United States Patent Application Publication US 2015/0376612 A1 - sequence listing, part 11

SEQ ID NO: 26620 - DNA, 1046 bp, Homo sapiens
ttgcatgtgcaagtggcctcacttttctggcattttgaggtgtgctgtcctcttctctgcaataatcaccaagtaatacactgcttctgttatgtcatgcactttgcttttttgtttccttctctgtgtctcacctgacatatccatacctgactctcctcctggtcagggctctcctagaaagtggctatcttgggagaaataaattggacacaggtcagacaagagccacaagtatatctgctggtataaaaaagtttcctgtgacacctcgtcatgggtcagacacttaggcattaggccatcgactggataaaaaagtatcctgttaaagataaactatacgcatccatgaccacttcccctggaaccctgttagggcagggcttgaatttatagccactctccagagagagactccaacactaagaggaaaacacaccatcagagttcacaaacaagtagtaagatatgcactggagtaaaaatctgtaatatcctaatgtagatgcacatttgtaaaactgaagatcacgatgacaattccaaaaggaacttctttaccagttaattattaaataaacagattggtagtttccacaccttaaccactactggttacttgaatctaaggtaggaaaatagtgaatacaaagaagtttgaattatgaaacttatgtattatccttttccaatgcagtctgattttttgaaaactgaaaaccaaaaaactaatcttaagaagctgagtttttcgcaaagggttttctcaaatatttttcctttttttttttgaaatagagtctcactctgtcacccaggctggagtgcagtggcatgatctcagctcactgcaacctccaactcccgagttcaagtgattcttatgcctcagcctcccgagtagctgagactacaggcacttgccaccatgcatggctaatttttgtatttttagtagaggcagggtttcaccatgttggctaggctggtcttgaacttctgacttcaggtgatccgcccaccttggcctcccaaagggctgg

SEQ ID NO: 26621 - DNA, 1074 bp, Homo sapiens
tgtagagagtagctcaaaattagctccttttattgtcatgttagactctgggttcattattgccagatctgagttttcaaaagaggctggaattctcttttgcttttgttgtccttaagtttcttaattttttaatgttaaaaacctactcaaatgtaaaagacagcaaacaaaacacatgtggaccaattttgacttcaagataccaatttgtgatctttggacttgatgaacaatttattgtctgtagggattgagaatttcattaataagtatatactcattgacacttctaaggtgactgaaaatattaagtactttaatcatatattccctcatcttgaatttagctattaatttttggtgaatcatttaatgattgtgcttatttaaattcagctgagttccaattcaaattatcagaaattccaaactgagagagaaggacctgaattagacctcattactttgtataactttttaatgatctttttgataggtgttttttgaatccaaatttgttatatttgttataaaatatccaagacttgactaggcacagtggctcacacctgtaatcccagcattttaagaagccaaggtgggagtatcacttgagctcaggagtttgagaccagcctgggcaagatggtgaaacccggtctctataaaaaatacaaaaattagcttgacgtggtggtgtgtgcctgtagtcccagctacttgggttctgcggcataaggcttgcttgaactcgggaggttgaggctgcagtgagtcatgtgtgtgccactgcactccagcctgggtgaccaagtgagacactgtctcaaaaaaaaaaaaaaattaaaaaaaaaaagagtcttaaagatagattaactgttagtaaccactggtagccaatcaggaggcatttgtctaaaagttcctcgttatgaaacagagctttatcctttgagacgattagaaggatttgaaagaaattgaaaagtaaataaccttatgtgacttaatgttaagaaaatactatataccctttgaaactctgatgaaagcaaatttgaaacccacatc

SEQ ID NO: 26622 - DNA, 1035 bp, Homo sapiens
taacattactagcatagtccccctcaaaacctctcttagtcactgccctcttctgcctccccagagtttatcactatcctgacatctaacactataagttagttttgcccttgtgtttttttaatgtcttcttttttctctttggtagtggttataaaatgtttttgtaatactagagtcttcattagaatccagtttagccaagtaaaatgcttctgaatctcattggtgggggaaagggaggaggctgtacatgtgagggaaaactgtattttaaaatatgttttaaattttaaattaaaaaaagaacacaatatttcttgatatataactgtttattttaaactgctgaaatatatcaatagcagctaaaggtatgtgtgtgctcttgcttacagaaaaagtgacccacagcatcctaaccttacacttgttttgatactcgccagcaaaggaggaagagagtgaatgggtggggttaaggattactgggggacatttctgggtcacaaagtgatatagccagaactctggaatttctctaaattaaatgttttatgttaaaaattagtgtgaatttgctggccatcagagaaatgcaaatcaaaaccactatgagataccatctcacaccagttagaatggcgatcattaaaaagtcaggaaacaacaggcgctggagaggatgtggagaaataggaacacttttacactgttggtgggactgtaaactagttcaaccactgtggaagtcagtgtggcaattcctcagggatctagaactagaaataccatttgacccagccatcctgttactgggtatatacccaaaggattataaatcatgctgctataaagacacatgcacatgtatgtttattgtggcactattcacaatagcaaagacctggaaccaacccaaatgcccaacaatgatagactggattaagaaaatgtggcacatatacaccatggaatactatgcagtcataaaaaatgatgagttcatgtcctttgtagggacatgggtgaagc

SEQ ID NO: 26623 - DNA, 1030 bp, Homo sapiens
atatttcacatgatttagaataatctaatctcaaatccacaattgcagtttattatagttatggatgtttggaccctggaaaattaaccttttaatttaaattaaagtaacagtttgattattgggaatattgtattgaacatttataatgatttgcttttggaattatactgatgaatagagtgaaaacattttccagagagtccacaagatggcacttgccaacttgtttcctctgtttttccttaacttatggaaatgcagcaaaatttaagaaggaacatctaaatatttatgcccttaaaatgctaaagtttagatttctagaagctttagtcaagactccttgaaattgatgagcttcaatttaacattttaaacagtgttcatttccggtataggagccaaaatcctttgttgaagatccgtaaaacacactgggatctgtagaatacaaagggctgcctgcattcactatgtttgcctttacttttaaagtaataatatgatttatgaggcttgtagtctatatgtctcatttctagacatcttaaaatatggacatttattagaacaatgggtattagtaattgctctaaagtaactgttattttttatttaaaaacaagatgatgtagttggaatatattatgtaatttttaattatgaatgaaatttaataagtggaatggtaatgaaggacgacaggaatctacccaatcacagtgttaattaaattaggcttcttttttactcttgtatatttgacaattaatactgctttagatgtttactgtttacattaacattgtcattagggaagggaatgatgttgaaattatgttgaggttggtagggaagttttatattgtttattgctttctgaaatcttgtcaataatttcaatggaaagagctacatgttcatagaagactaaaacattaaagtgtatcaactaaaatctagagcaaattaggtttaggtctatagcattctgatttttctcagcctcatcataaaaatcatcaag

SEQ ID NO: 26624 - DNA, 1033 bp, Homo sapiens
tcacttactctggaattggttccttttgctagcttatcttttcccaaaagtttcctgtgaaattacagttacatttatactgttatattttataaaaacctctttatccttcttttaactttcaaaccagaggagaagggacactaaacagtatctataaacacagggcttgttataatccaggttgattttctggcccctttaatgttgtcatgtgtccagtagtcaactggaaacagaaaccttctggggggaccatgctaaaggtaggaaaaatgatgggttcttctgctctgagagctgttctctcttcttttagacttttctaggctgttagcaaggaattggtgaagggaagcctttctttgttcaggtctccctttcagaccctggtgggttagccaagttcataggacgtttacatattagtcctccacttaaaaactagcttgtgttttgaaggttgctgaatagatgtcactaagtagtagaccaaaaagctcaccctaatgattgttttacagaatggaatatattaaaccatgacccttttaaaagatgcagtcagtggtttatatgacatttcacttattgcttattataatatttaattctgaaaaaaatgttttgatgaaattgactttactactcctgtaagttgttcctataagatgattttgcctcttaagtctttggatggtatttattactattctgagatttgtatctcaaatttggatgttataaagatgtcattatatatgtgtacagcatatgtaattaaagatgagagccatgaaaatgcaattcatgtttcttttatcataatgtttaaaagttgactagatattttaaagttattgtatattcctgggaagagaaatgcttctctgggcgtgtcggttcattttttttagttgaagttaaaaggatagattatttcaaaagaacaagaaaaggaacaagatggattaataatacagtggtaaaaagaaagggggcaacagacatcgctatacagtagggacacttg

SEQ ID NO: 26625 - DNA, 1047 bp, Homo sapiens
ctgaccctgtttggtaagtgcagccgtctccccgcgccgccgcaggtgggccgcgtcccggggctcgggggcgggggcctggggggcctgggcgcccggggagggggcgcggcgcgtggggtcggggcgggccggggccgcagagttggggcgcccggggcgccggcttgctccctcgcgcctctcccattgtttcctctcccggcagggccgatgggcgtgtgctcccctggccaattctcggctgggaggctcagaggtcctgggtgttttgcaaacgcacaaagattctctaagatgccaacttgggagtgaagttaactggttgttttcaaacctgcctttcccgtcggtaaataaatccttggaaagtttatttattttgaacgaggtatctgtgagtccccagcctccttggaattgccaaatgcatgtgttgcttcctgttggactattggggaattttttttttggactcagtatattccgttggaaataagtatgatttgtgaactgaatatgggttaaaattgaaaatgtttgcactaacgaatgagagcagacagaataaagttggttaccagaagataactgtaatctcaggagactgagtattcattaagaatgaaatgttatttttgtggtgtaattactgcagcactgttgcttttggtggttaagacttcaagctgtttttttctcagtctgcaatgacaatgggttgggaaaaaggactgaaaagatacattctttccttttacaaaacgactatggtacatacgtacctgactttaagaaaactcaatatgtgaacattagacgttcaaagtattcagcttttttgaagaagcaaagtacaatgatatgtaattgatagctacgagaacagcctaagtaagttattcacaatatcaagtttccagttcagttttaattatgtcatttgatcaaacacgttagaggtgttacatacctcaaatgctttttgaggtaaatacttcccagtgaattaagctgctagaatcaaagtgttacttttatttaact

SEQ ID NO: 26626 - DNA, 1060 bp, Homo sapiens
tgcccagagaaagagagagaaagccagagatgtctgtcttgcagactggcaagagggagccaggacacagctcggcttgcttacacccagagggaaagagttaagctggtgaccctgaaggcagagcgagcaggagagtgcagctgtgtgtgggagcgacaagaactgcagagttagagcaagcaacagagacagacagtgtaagagagctgctgaataaagctgtatttcacctacctgtggctccccccacttcctgctgctgagtgttctctcagctatctcccattcatccacccactccctttggacctcagcatgggctggaacctggacttgaacctaacaccctttctctacaaaaaattaaaatataaaattataaccaaaacaggttaaaaaaaagttaggtataaaaaggggattaattcagcacagacttaaaagacaactctataggaataatttaatatttgataaaaagataatttcttagaaaatgtcatttatccaagatgactctgtaaaagttagaaaaccaaatagatctgtaaacaatcaagaaatgtaattggtgattaaatatcaaaaaacaaaatgagagagacaagcatctacttctagaggctttatagggaagttattacaaaatcacttaaaaataatatataactttacagaggatgggcagaaaaaaatctcaccaactcattttatgagcttaacacctaaatcagactgaaacattaacacccaaaccagactatgacagtttggttatttttattgttcagtggtattccactgtatggttatatcacaatatgtatatccattcacccttgatgagtatttagatggtaactaggtttttgatggcaatgaataaagctgctatgagcatttgagtaaaagttattgcatgaccatgtttttctgtcttttgggtaaatacctaggattgggaatcttagatcctatggcaagtgtatattcataagaaactgccaaactgttttccaaagtgtgtgtaccattttacatgcccaccagcagtgtg

SEQ ID NO: 26627 - DNA, 1050 bp, Homo sapiens
aggctagagtgcaatggcgcaatctcagctcactgcaacctccacctcccgggttcaagcaattctcctgcctcagcctcctgagtagctgggattacaggcatgcgccaccacacctggctaattttgtatttttagtagagatgggtttctccacgttggtcaggctggtctcgaactcccgacctcaagtgatctgcccgcctcagcttcccaaagtgctgggattacaggcatgagcaactgcacccagccaattactgtatttttaaagtaatatctattttgttaattttgttatcttttacttgaaatggtttttacctgtttatagctttgtcttgcagttatgctcattatgggggttaattttcagtttataaatgtagcatgtttccttatgaacaaaaagcagattccttttctttactaacagtagctgcttaacagttactctgtgggtacaacttgataattatttttgtgtggatttggctgttatattaggttggtgcaaacagaatcgcagcttttgccattaaaggtaacggcaaaacatacttttaatggcaaaaactgtgattccgtttgcaccaacctaataacttagatactgcaaaatgtgtgtggagtggaagcacaataaattaatgaaagcacacttttatagctagagaattatttactcataagttaatgatgtggaaaaggttttattggtccgttgacttatagaaaatgagattaaatcttttatttctggtaccagacaatattttatttcagtatttatcacttgaaataggaaaaaatagcaataattggaagatacattataatacctttttgatttaatttctgaattctatgatctatcttccacgtttttccactgagtttttaactatattctagatgaaagaaaggggtattagtgtagctgccatcatctcatgcattttattctgagtttgagatctaatacttacatttgaagcttttactaagaatcttcctaagcctttgtttttccgtcaaactgatagaata

SEQ ID NO: 26628 - DNA, 1045 bp, Homo sapiens
gaatatacggtgattcacaagagagagaaaatgtccactaacatttgttcacgcataattactgcctcagttgaaattccggtgatcttttcatatatgcttcagtttttatgggatctggatcacatatgatagacagtaagaagataggcctagatgaaaaggaagaaattacaagttttgaaatagttataaaaatttctgaattgttcttagttgaagtgaatggaaatacttgtactggtattatttgggggtcttttttaaaagctcttctctcactcacccctttctgctgtactcagggaaggaagaaaggaaaagattgccaagaatatgtgttcttaacacttaacaccccagacagttatgtatttctaagaagtttgggaagcactgggtaggctgcaacatggttctcacatctctatctctcttttgtctctcagttgcactcgctctcactctcttattagcctccatcccctcaaagatgcacctctataagaatcttaggaaagtgtaatatacataactctgactccaattcctgtaataatatgtatttggggcccaagaactacatctcagttattaagaacagtatcagcaataatagtctcaggtctgttggatccctgaagtccctttcattgctgagatactgtggtctgattatctgtgcaaattatttcatatttacagatcataacaaaaccaccttaaagatcacatatgaccattttcactaaagaaaccaatttctatcagttaacagatatgtttgttttgtacctatgtagcaaatcattatatcagttgctaaaaggaatacccaaaagtataagataatctctgctcttagagagcttactaactggttgggagataaaatagttgcatatgacaaatttttattgatagcataataagcttcattcaaattgttgcttgataaagtggtagacataaatatctagggcctcattctaatactaggtctgtcatgctctgaatgtgagtccagtacaatccaataattaac

SEQ ID NO: 26629 - DNA, 1104 bp, Homo sapiens
tttttcttctgttgtatacccactggcatacttttcaagtcagacccattgtaatcaatgtaacagcatggagcaaacattagagcttcctcactggatgagtactgtataccctagggcagtcaaggaaggataatgaatgaatactgatgctgcttttaagtgctttataaggtagtaacttgccctactaaagattattcaagagagtgatgtttatgtacttcaggctcccctatgtgcagttactgtatttcattaattctgagagttaagctcttcactgtaaaactttaaatgctcttcaattctatgataatttctacctaaggacttaaaaatcttttccaaacacataatttactaagcctcacatttctacttctagttatatttgtgcacattttaaaactagaaatgaaagccccaatttatcactatagactgggtactagtcattgtattttgatgtctaacattctatttataaaatatataaatatgcagactggcgacctcccaagactctctccctttgttctgacccacacttttccaactcaggtctttctactttaaatacttcttgatcgtttttctaagtattcctatctggttctagccagctactactttagtcccgcatttaatttcagttttaatccatccacttccacattatcccatcaattagggtcctaatttcctatgttttagctactaatatagttgtttctgattgtttagaaaaggaactaggaatcttatcttgattctaaaaaattcagtttttcttatggtcttgagcatgtctctgttaggaatgcttacttgttccccggtgctgtaaagaaatagcacttgaacataaatttaatttcctcagcaaggccaatttttttactttctgcagaaagggtacactcgccagcagttttcccatgagagtacactgaacaaaggagacagggtcatttataacctgacgcatccaccctactgctgtgtccagtttccattggctggaatgggacctcacattctgtatttgtcctgattggctagcaacttagaagttttaaaagaggcaaaggcagaggagaa

SEQ ID NO: 26630 - DNA, 1025 bp, Homo sapiens
aaaacaaatatagaatgtgaatttaagatagtcttattttcatgctatttcacacaaaatataaaattactgcatcaccagattccatttctttcagttcttactggtagctcccaagagctctctgatgacagtttttctcattttacaaattggagattgtcctaagtaaatccataacttttctcttcttttcaatactgctacacaggttatgcatttaagatgcaattaaaaataattaaattttgctatttgctttgctgtggttagaaaatgtatttttaaatgatatgattataggagtaaaaatactattgtatttttaagagacagttggtatgaatctcttttttaaaatttctcttcttttgtttttcttagccctgtaccaggcccatttcctcttctgttacatcttcctaatggacaaaccatgcctgttgctattcctgcatcaattacaagttctaatgtgcatgttccagctgcagtcccagtaagaaagttagactatttaaatctctatcgcaaaactgatctttgtagtcagaaaataaagttggctgcttgactggcttatgaaattgaatttaacataatattgattagcagttgatagtatttatttgttatcattgtaatagcatataccattcaaggtatagctattttttctcttctccccaaaaccttaattttttttttatactgagatcttcttattcaacccatatcaatttgactggacttgtagcattcaaatattaacacagatttcaaattttagaaagatatttgtactagaatacttgtcaggtaactctgtggtatttctattagtatggaaattgtttataaagacacactctgaatttttgtggtcaagtagggtttgtagaatctttgatagcccagcatgttaaaatgtaaatgttctagaaaaataatctttcactttccctgtgaaaagaccccgcaaaaaagttttttgaggggtgtgttaaatatataaattttgaaag

SEQ ID NO: 26631 - DNA, 1031 bp, Homo sapiens
agtttagctgatactcctattttgtttttaaataatcaaattaaaagcatctaagtacacttagctatgacagacataaacatgttttaaggttttgatttcctctaaaatgagttctatcagtcccatgggatgttctgtgaaaaagtattcaaatagcaaatagctttggcaaaaatgccatactctgggtgctcccctagtcattttacattagcatattaaagactgtgaagagtcctgccaaaaaaaaaaaaaaaaaacaaagaaagaaagaaaagtatattttagcatttcccggatttgtttggccacacctttttttctttagtgtctactgacatccccgttgaaatgttttggggagcattgctattgaagggttaacaagctactatttgaaaaagaaacagtgttacagaattattagttgagtcaaatatatttgctatatagaatttctagaaagaaaacaagttgatggatgggataattaattgagaacttttaaatcgaaatttaaaagtaggaaagtaatcctgactcagagatgtctttttgcatttgttttgttcaaatcaggatccaaaaaggtccttaatttggttgtatgtttattaaatttcttctaatggaaaacagcaaccctcttcctttgctcttcttttcatctccatgacatttacttgttgaggagaccaggtcatttgttctaacttacagtgattcatcttagtgttttttgactttacgatggtgggaaagtaatacagtcagtatactgctcaattcatggtggggttatgtcccaataaacccatcgtaaattgaaaatatctgtattggatttggatgattgcctcctggtggtgttgtttaacttctttttctgtctcctgaatttccttgtagttggagctagggaggcttgattagattcactttcgacttttgacattccctgtccccacccttaacaacctttggtgttaatttaagactaatctgtgaattcagatgctgtcagcctg

SEQ ID NO: 26632 - DNA, 1050 bp, Homo sapiens
aggctatacaagcatggcactggcatctgctcagcttctcaggaagcctcaaggagcatttactcatggcagaaggcaaagcaggagcaggcacataacatggtgagagcaggagcaggaagagagttgcagggggcacacaattttaaaaaatcagatctcctgagtattcattcactgttgagaggacagcactgagccatgagggatctgccccaacacctctcaccaggccctacctccaacattgaagattacaattcaccatgagatttggcagggacatatattcaacctatatcacactccagagtctggatgctaagtgtgcttattggggtttcagtgttcccaggccctctcagtggacacagctagggacctacatgaccacatatgcgtgcatatacacattaacatctatatttctgtatctttatgttgagagccataagttaccattagtatcttcaaatgtcatctaataccaaggttcattctatatttataattcccttcaactgtagtatgaattcactcttacctagcacatccttgatatgtttacttatttgatcaatatccacgtatttacataatgaattgcctggtgccattaggcactcacctttcctctccatcaagtagatgtcttcctgtttgggtcctgacaccctgtgctggactagtgccactcctatcctttacttcatgtggatgccgccttagcccacttgggcattgacagctcacatcaggctgccttcccttcttttcttatccttctgagactccaacattaaatgcagggctgaccacccctttcccagcccaaccctcaactcatctatctcccagtggacatctttctcactctgcttagactcagacactgcagtgggctgccctcaggtagcctgtctgagctacctcccgtgcagacactctatatttgttttctctggtggcttaacttttatgtgaattttaagttggaagatgtgttttgccggttaatttcttccattttcttctattcatcttttctta

SEQ ID NO: 26633 - DNA, 1035 bp, Homo sapiens
tctggacaatgcatttttgtatggtatttccacaatggaagaggtaatcattaaatgaaaattgttattctttctgtcatcacactatacaataaagtatatctgaattcctaaacacaaagcagaacaccaattcttaaagctatgctttgcctttaatagaaatatttgtaagacagggaaagccagaagcttgagggttaatggtgtcttgattaatggaggttttaaggcactcttattttaaattatccatttgttttgttccatggaagcttctacaacctagggcaactcattctaataagatttgggatggggataggtatggatttcttgtgaaaagtgggagaatgagggctctgggaaagtaggcagatcatctttgggaaagcaaacaaagggaagatgaagatacagaagctgattttcttaaaacttgtcttgctcaagtatcccttggaaagccttagtgtgtacctttagtaatacataccccactttgtctgtatcccatactgcctccttgaaagactgtccacctcctgcctacctcctgtcctcccacagggacagaagctaacttctctccaccacccaggattgcccttgcatctgttacacacttttgaggccatgcccaagagaggattaattcctttctcatactgatgcctactttttgggccctgtttcttgtcacagtatttggctcttaccaggaaatttgccattagcagtgtttgcacatttcagcagagattctacccacaggttagtgatatccaaatatagccatttgctgcataacaacattttgagtcagcagaccacatataagatgtggtagccatcatgatatagtataacacattactcacatttgtagtgatgttggtgtaaacaaacctactgtgctaccagttgtataaaagtatagcatttgtctttcattaagacaaggaaaaaatagcacaattacgtacagtatgtaatatttgataaacaatgatgttactggtttatgtatttaaa

SEQ ID NO: 26634 - DNA, 1068 bp, Homo sapiens
gtgtgtgtacgtgttttctatgttcgctcgtttaaccgaacctaggaggaaaaagagaggaggagctgggaactatttttgtgcccctaggtagtataaaattggctttctttaatggagagtcttaaaactggtgaggccaagagcaaaactactgtgaatatcatggagtaaaagagattactcctgatggaccttaggcatcagaaattttagtgaaagaaatgtttctcttaaaattcaacacctattttaaatagtgatgtaaagcatttctttacatgtaccttcaggttttctaatgctttcctggctattatttaactggtactaagggattgactaatccctaaattataatgtgaaagtttaaatttcttagaggttttaaattatggagacggtcacaatgcatgcatttaagatatacatttaaaatcagaacaaaaactgactttctttgagcacactttttgtcctatttgaagaaacatgaccactggcgttatcattgtgagtaacagccgttctgatctttaaatagccatatagctttggtctcttgaatcaaaattatgaaggtaaagctttatttataaaagcttgttaaaaagtcaaacctacaggtttaagtgtcttaaagtacaaacacagaagcagttttatcatgtattaatttttttttccttacttgaggaatccaccgtaaaaactttgtttcaaaaatgttaggaacatccttgtaaaatacgttttaaatatacagattcccctctgcagattaagaaagttcatggatctttaaggccatcagtagttgcgtaatagttaagaatcctcgtctttgtaaaataatttctaggaatcttccaaatttaccgtgatgtgtaaaagagtttctgagaatcttccaaatttaccatgatgtgtatgttgccttcctaagacgtttaatcttgctttgagagaatgctactgccattaagttttaagaactgatttaaaatgtaatatcgtggaaatttagaacttagttgttatgtattttaattgtcaggaaggagcttt

SEQ ID NO: 26635 - DNA, 1332 bp, Homo sapiens
ggttatgccaggtaatcatttctatccctaaataagttaagagcatgcttgcagtagttggaaacttagctactgaaataatagctactttgcattaagtgcttactctgtgtcttgcattatatttaaagggctttgtatgcattatctcacttaattctcataacaccatttggggtgttatgagaataacatctatgaaggactagagacacagaggccacattacttgcccaggtcatagctagtaaatgtcagaaaatgaattttaactaagtctgacttcagagtctgcattcctaattgttaagctattttgggaataaaattattagagcacattccttaaaaggatcaatttattttatttaagacctaaactgtcagatcttaaaaggtatagatcatattttcagatggataagaatgtcagaacccatcaaaatgaatgaaaactaaccatttatattgacagacagctccctacctttacaccatattatcaggattgaaggagaatagtgtaagagagatctaggcaaatactcttccagcagacttttcagtttacaaaaatccccacactagtaatctgattctttaacatttaccaaacatgttgaaattaatatttcaaagtaacagtcatatgtggtctcttttagaaacccttcgctgaagcagcagctgttctcatatgctatcctgggatttgccttgtctgaagctatgggtctcttttgtttgatggttgctttcttgattttgtttgccatgtaacaaattactgcttgacatgttggcattcatattaattacggatgtaattctgtgtatcttactgtgactccgaaaactgtagtattggtgtcatgggaatgtacgttatttccaaagtcatttcattaaagatgaaaactttaatttcttctgtgatttgtacttacactaagtttagattatcacaaagaagaacgtgcattcaggcagatgctgtcccattcagaggaagctacagcagttgctccactgatgaaaaatattccaatgtaatttttatgggaattcttttatatagtgttctgcatattgtaattcatagggcttttgtttattcatataaaggataaatatttgggtgttttgagcttctataaaatatgattaattaaaggtagttaatactcaagatggtcttgagtttttaaggtctaacatcagttagaatacttcaaatcagaatcaccttccaagactgacttgacaggtggttctaaaaataaatcacgtcagctttttaggaaatgaagccttaagctagggggtaatgtg

SEQ ID NO: 26636 - DNA, 1034 bp, Homo sapiens
aacattgtgaattttttggagcacattggatgcagtggctctcaaacctatttgactatgaaaatgagttttgttgttgttgttgtatatatatatatatatatatatatatactttaagttctgggatactgttagtttatttttaagaaatacagccattgtcatccagggacattctgtttctttagatgactgatgatgtctagtacaatagattatgaatatgaaagatcccccaacaaatggctctccatcagaaaagaaacactcttgaaagtaaacatagatatttgtagtttacaaactgcatttgtgtggctgaagtgataacttattccagtgcattgatgggacacagtgaattaccctgttaagctgtgtattgtgacctagagaggccttgaacatgcatggccctgatctacctaagaagagcctgctgggccgggcacggtggctcacgcctgtaatcccagcactttgggaggccgaggtgggtggatcacgaggacaggagatcgagaccatcctggctaacatggtggaaccccgtctctactaaaaatacaaaaaattagctgggcatggtggcaggcgcctgtagtcccaactacgggaggctgaggcaggagaatggcgtaaacccgggaggcagagcttacagtgagccgagatagcgccactgcactccagcctgggcaacagagcgagactccgtctcaaaaacaaaacaagagtctgcagccctggggctggtcttctcccacttgagtccactcccccttttcagccttttgagttttgttaacactcttccctttcctcttctccagctgctccctctatctgtggagagatacagacatacagacatttaactgtgaaaaaggtaaaagcaggcacagtgcgaaaagactggcaaagagaaacagagatggaggtgaggagttaatagtaaagacagaggagagagacacgctgaccacaggcctctaacagccatctttcaacatgcatgccgtggttgtttat

SEQ ID NO: 26637 - DNA, 1713 bp, Homo sapiens
cctgccacacacacattttaaaagtaacaatagtagtgttttctgtgttttgcatatgcagtcttttctcatctcccagccttcttgagcttttcctctgcctgagatacgctcccactcacatagacattgggggcactaaataaaaatagctgtttaattgaattggaatcgttccacttggaacccaagtttggaaattttgctacttcttgttaagctaggccttttattcttgaagttgctatttctcatacaaactcattttatgcattagacacacagtcactattgttatggagaacatagttgtatcagaagaggtatagctttgggtgtggatgtgcgtgtgtcaggggaaagatattctgattatatgatgattttcataaaatatagtatgctgagtttccgaaaatcctaaatgacttagaaatggtgctatatgtggtttgtttgacccctgcaaatctcatgttgaaatttgatccccattgctggaggtgttttgagcatggagcggatccctcatgaatgtcttggcgttgtccttgcagtaatgagttcttgctctatttttcctcccctggaagctgattgtttaaaagagcctggtatcctccctccctttcttctttgcttcctctctcttgctgtgtgatctctgcacacaccagctcccctttgctttctgccatgagtggtctgaggctctcaccagaagccaagcagaggctggcaccatgcttctagtacagcctgcagaactgtaagccaaataaacttcttctttgttttttttttttgtttgttttgtttttttttcagtaaattacccagcctcaggtattccttaacaacacaaatgggctaagacacagggtcatagggatagcaggcacctgagccaagccagaacttagatctcaactgttaatgcaggatgatttgtattgaaccatgaattttacactgcctctcaatgttggtgtcagcatttaaggttatttaaaaaatacaacctgaaggttacataaagtttcatttaaaaaataagaccttataagtctacttttatttccagtggacagcaactacttaatcgtcttaaaactttcttcttacaatattactttacaatattacctgttggatttattatctgtgtacaaatcagttagttgaagggccaaagaataaaggcattttgtgaattatgaatagctattttgaaatggtcatggagactagctactctagaaaattgggagaatatactgtattaagttactatctggtataacttcaattaattgtgaaaattgtagcagagatctagatatagtttatgaacttctaaagagacattaaagggaattcaagtacttgtgtaaagatgaaccaaggtagagatgattgtgaattggtgatctgctgtatgttacagttatgtaatttgacttgtttcaaaattattaaagttttaagtgtatgcattctactggtcaataagtaaatatattcaggctctgaatgtagacagataaatatataaatatagaaagtacatttgttagaatacaaacaagaataaaaattgagtacagaatgaaaaccttattaaattttatcactccatatattatttgtctcatcctaatttctttcctcctcagaaactaatctacattttctactttaatgctattttaa

SEQ ID NO: 26638 - DNA, 1025 bp, Homo sapiens
tttttgtatgttactgacccatatggattttagtaacatcttgcttagtcatgttgttataaaacattcaaattctgatatacattgcttgaaaatgagtgagtacctcagagaaatttgatagactcaaacagatagtatgagaaatatctttgaaagaaatatggaggaaggttaaaaggggattagtaaaattaatgcgataggtaacatgtttgtaaccatatagtatccttttagatacaaaagcttattttcattattattataataaacagttaatggttgaaacttagtaaaatgtcctatttctgattattaagactagtataaatgagaaaatccaagctattaagtaccattagctacagtgatcttagcttccttgcttacaattgttcagtgggtcatctaaattcttctatgtcctgagcatgatctacaaacatggtctagcttctgtctctccgtcttcccgccatcattgtgctgtagccatatggaactcctttcagttctctgaccatgccctttcctgcctcagatttcagcttaaattttgcctcctcagagagatgccttcccaaactccccatctgaagctggcctctgccttttactccctatcatgtcactctctgctcaccatccttatcacaatgtgtatttgatttgtttgctagtttactgtcttcacaacataatgtccgtttgtgcaagggtcttatttttcttattcatgtctgtatctcaagggtctagcacaatgcttgatgcatattgtgtgaataaatactttgttgccaaatccagtgaaaactctcagttcttgtttcactgcttggcagtattgacattgaatattctctgagatactttttttcttttggcttttcatatatcacactattattctcttatttctctggcctcttgctctcaacgtcctgtaagtgttggtgttccttaagttctacctagtgtcatcatttcttcattctgcatattctttccctagggtttct

SEQ ID NO: 26639 - DNA, 1028 bp, Homo sapiens
aactcatcacaatgttgactcttaatagaatcatgtatttattattctatcttttaaaataaaaaagcccctaaaacctttagtacaaccgtattacagaaaaatgattcattctttaacactaacgatagctgatgagctcaaaaataaaaaattgcaaaaaaatgttataatgttttaaagtttacgaatttgttttgggctgcattcaaagctatcttgggccacatgtggctggtggctaagggttggacaagcttgaatgagagaattctcaagaattctagtttcttgttcctgaatcttgaggttaatatgttgagtttttggaaatagtttgtttcaggcccattctgagtaattgagatgtctctgaaaattatgttaatattttaggcactgttgtggactctttctcctacattatatttttttaaattgcacagtagtgctatgaagaaagtattaaaatatctatgcagaggagaaactgaggctgacaaagtgctaacaatcttctaagaatagaaatgtgcgttgaacccagatcttttctcactttgaagtttcaaattcatgttctttgcactgaacagtgtatttaaaacatattattacttaaatgttgtatggatgtgtgttaattaagctattatatgaaaatattttgttagaagtaaatgcaaaaaatgggaaatagatttgtatcttttagtacttaaaaactgattttatttaagataaataaaaacatagatacacttgaatacttgctgaataatctaccaggaatgcaatcattcgataaagtagcattttggtttggagttttgtgtgttgttttaaagatcacagtttaatctttttaaacctagtagtagttttagtctagagttatctgtccaaatcagtatgactgtttacatttacattatttaaaatgaaataaaactacagctgggcgcagtggctcacacctgtaatcccagcactttgggaggctgaggtatgtggatcacttgaggcca

SEQ ID NO: 26640 - DNA, 1031 bp, Homo sapiens
ttttgagatggaattttgctcttgttgcccaggcaggagtgcagtggtgcaatctcgggtcactgcgacctctgcctcccaggttcaagtgattctcctgcctcagcctcccaagtagctggtattacaggcatgcaccaccacacctggctaattttgtatttttagtagaggcggggcttcactatgttggccatgctggtcactacttgatattttattaaaagtggtttccttggggatgcatccctttaatctgaatagatttgtaatgtaatttgaaatttgtaaaattgtaatttgtaatgacagatatgaattatcaattgattaaaaagtaaattaggaaagagcatcttaacaatattttaagagcttaatgtaagtattattattataaagttaggaagtaatctttagttatctaaaaaattcccaagtctagatctgtgtgcattttaccattcacgtattttgtggccctttaacaaaacttgagtttttaataatcactgagtaatctgtgcaagcagataatccctctgcatccatgagcattccttcaaaacagttcaaaaatcaagctctatcaaaatacatgagtcaagattacctctttaaatggcttcatgaaaattttgtgctttttcagaatattagtcctatgtggtaatttccagcattccttgggaaatctgtgtttttctgaatcttgagaaaaatcacttgagaaattgggaacatgaggaaaagtgttatagttccctgagaattaaagcttaacaatcaactacagatgttactagttcaaaggaattcactaatgtcagctgaaggcaagagcaagaaattctgacatgctgagttacaggttaatgttgacgtttctgggaacagtacagaatcatagagaagtggtacaatctaatcagttttgtgggcatttatggcactctcttattaatggtgagtcattcttgcaaataaaaatgtttatatacctactataatttatataaatgtataaagta

SEQ ID NO: 26641 - DNA, 1084 bp, Homo sapiens
cgtatttcttctagttttgctttacaaatgttgatgctttgctctttacatgggtatttctgttatatcttcgttagaaacacatcctttaagaagaatttttaattttgaaaaaattatagattaacagtaagttgcagaaaaaaatgtacaggcaggttgcaggtaccctcacctagctcaccccaatggtaacatctatatggtagtttttccttcatccatagttttgccctctgcagtttcagttaactgtggtcaattgcagtctgaaaatattagtttttcgagagagactacattcatataacttttattgcagtatagttatacttgttctattttattattagttatttttgttaatctcttactatgcctaatttataaattaaatccctatacctacatggtatgtatttataggaaaaaacttagtatatgttggatttggtactgtccatggtttcaggcatccactgggggtcatggaacatatatcactgagattaagggagaactactgtagtaaatttctagttagcctggaaaacgggaagatatgcctttataccaacacgacctataaataactgacccaaagtgaatgtaccacaaagtaaaaggttttaattaattataaaaaccaaaagcaaaaaaagttgtttcaaaacagaccaacgtctttcatatcaacaaatattaagccaggaaattgacattgcttcaatccacggagcctattcagagttcatcagttttatatgaattcctttgagtgggttttatatttctgtgcaattttatcgcctgtagctttgtgtaaccaccgcacaattcagatccagaactgttccatcaccacaaggctcctttttgctactcctttatagccatacacatcttcctccactttccgcattcctaacccctgccatccattaatctgttttctgtctccacaaatttgttatttcaagaatgttataagatggactcacatagtatgtaacattttgaaattggcgtttttcactcagtatattcttgagatccatccaagttgttcagtgtgtcaataatt

SEQ ID NO: 26642 - DNA, 1066 bp, Homo sapiens
tgggcatggtggtgggcgcctgcaatcccagctacgcgggaggctgaggcaggatcgcttccatccaggaggtgaaggttgcagtgagccgagattgtgccactgcactccagcctgggcgacagagctagactctgtctcaagaaaaagaaaaaaaaattatataaatgctcttttcaaaagtaagaggagataaggtagtctaggataaactacttatttttttttactccttattaccataataatagagtctaactatacttggtacacaatttaggttttggggtattgctggaacagccttgttttggatcagcattatattgaccctgttatgaccttataataatctgcccaaggatcaaatttatctcttcttgttttgtctttcataataggttgaaccatatgaaattgccagtattcaactgcttggacttagcaaaatgtcagtttcatatggttaaccctaatgttaacaactcttatggaaactacaatgaactgatattcattaccctcttggattgttgagtatgtaattggtaaatattttttcaagtgttttatgagtgattttggctggttttcattctagatgtataaaaaatatcattggcaaacaagctttgctataatgaagtattcttagatgtccttttaaaatctgatctgcaaaaagtactttaggaatttagaaagaagataacctgttgattttgacctccagagtcttaagtgaacttttagcaatagcaaatcagaccatttttagtctgtaatttttttcaatgtgttaattcttttgagtaatcattcctaagaattttttttggaggaaaacgtgtgttttttaaattttttaatttaatttaattttttttttgagatggagtcttgctctgtcacccaggctggagtgcagtggtgcgatctcggctcactgcaacctctggctcccgggttcaatcaattctcgtgcctcagcctcctgagtagctgggattgcaagcgcatgccaccacgcccagctaatttttggatttttagtagaccagttggc

SEQ ID NO: 26643 - DNA, 1046 bp, Homo sapiens
tcggttcccatgtattttccatgtatttgaaagaaaggagagatggattagaaaatagctacaactacagcagtaaaaacagtttgtattgagcaatcactatgtgccaagcactgttgtaaacaggttagaatacattaggtcatttaagtctttcaacatttaagggggtccttaactatccctcttttacagatgaggaaattgagtagcagataggttaagtaactgatttgtccaagattttacagtaagtgatgggccacaggacttggagttaatatgtttgggtggaaaggagagcaccagtggttgaatacagaagaggtatgaaattaaagctatggagaaatatttgatttaattatttaattttgttgtgttttcacatctgttagaaagtaccacctattacatatgcattacagtaaaacagttcctttaatatcagaatttgatagaaaaattgctgaaactgtgctggttgactgttctttgattatgaacctgaaagcatggatatggcatttaatgactatcactctaatattgttttagagtacaaatttaaaagcataatcccttgcttcaggggtcttagaggctaagatgtagattgtttcattaataccaaaacaattctttaagcaaataattgtcaaaattggtatagtgatattatgcatatatttcatattgtacttactttaaaattgacatgcagtaaacaaataaaggctgtgcttgcagacttctagtaccagttctgtccctagctggagctacatgattttggcaaatcatttaacttctctttaatgcagatttaaacactcaaatgtaatcaaataaaggaattgggttacacaatacattgtactaatactatttcttgtgcttattactcacttttcatttcagtagatttgtttaccaacaatttgataatgtcagaggtggtttcatatattttacatataaatattcaaatctaatctatacaaagcagactttatttctgattttgtgttattcataataactgg

SEQ ID NO: 26644 - DNA, 1050 bp, Homo sapiens
gacactcaaatgctcaattccctgttgaagaaatgaatgatagaccttatctatcatttatttgactcatgtgtacacccatgtatatcacagacatttttatttaattattcaagaattggcacatgagaagcattatctaattcctctgggaccttccactggcaaaaataaatgcaatgactgtggctaccagatgaattttgccctttttcttatatttgaaagtaatgactttattatttctgaatttaattatttaaattttaagcaaaacagaaaatcactacaaagaaaaaaatgtcaacaaaatcttactatgtagaagaaaccgaccccttccctcagctgccgccaagctgctcggtccttccgaggaagctaaggccgcgttggggtaaggccctcacttcatcctgcgactagcaccgcgtccggcagcgcctgccctacactcgcccgtgccatggcctccgtctccaagctcgcctgcatctactcggccctcattctgcacgacgatgaggtgacagtcacggaggataagatcaatgccctcattaaagcagccggtgtaaatgttgaacctttttggcctggcttgtttgcaaaggccctggccaacgtcaacattgggagcctcatctgcaatgtaggggctggtggacctgctccagcagctggtgctgcaccagcaggacgtcctgccccctccactgctgctgctccagctgaggagaagaaagtggaagcaaagaaagaagaatccaaggagtctgatgatgacatgggccttggtctttttgactaaacctcttttataacgtgttcaataaaaagctgaacttaaaaaaaaaaagaagtaaccatcattaatattaggtgaacatctttcttgacagctctatgtagacactcagatattaggagtgatcggtgcataaataacttggtacatagaaataattttataaaactggatacatattatgcatgctatttttaaataaaaatattaaatttacatttacttagacgtaataagagaga

SEQ ID NO: 26645 - DNA, 1031 bp, Homo sapiens
atttttaccattaacgacctgaggcaggactggtggaggtcagttcattagttactgatctcaagaaacaagtcaggactattttctaatgtgcttctttcaagttagtgtggaaagagctgatgcatctgttgtagctgacggaatttaaggaactgaataattgacaagatttccagaaaagcagggtcgccagataatgctacctgtttgcgaatgattgttaccgtaatgctctagagagctaatcctttctcggcctagtcagatgattttaaatcatttgattttacagagctttagtttcagttttttaaatgaaaatggggatgggattaggtcatcttctaacacccacgacagccataaattgataatctatggatccatatttaaagttactgataaaaataaccacaattgaccagcctcccttccctgttaggaaatgctttatattttaatttagcaacccatgtgaccaacccttttagaattgaactggctctccctaggaaaggttagaaatctaatcagttatagtaagtttctgttaacaaatggggagtggtcgacttggagtttggaaaaggggagcgtaaagtctaaaagtttgttaatttatctagccgttgctccaggaggacctgtgttatagtttggaaacatttacaaagggtatttttgtggggcagaaaacagttagcagtccttaatgtaatttggttgaaataaccgttcaaaccagactcctcctgttgctttgattcctttttcgcaaactttcttatgttctacgtatccaggtgctcctgatggccagcaatagacttgagacattggaagaatgtatagccttagcgtctatttagtgttaagattttgtaagtctaattactgtgaaatagtcctggtaactttatcgattctggatacaaagaaaaatgcaaagtgaaagacctttggaaattgctattcacaccagagtactctatgagacattacataggtgatcaagaagagtgatcacc

SEQ ID NO: 26646 - DNA, 2017 bp, Homo sapiens
aaacagaaggacttcagttaagatttaggctctatgcaacatacacttcttgcattttctcattcaatgtcctttcctttttttttttttttttttttgcaagaatgtagctgacattcagagtagattagtaccttcaatgtctgtgtgaaagaaatgaccttaatatgaggacaatattgactgtgtatttagggggcccactgttaaggcatatagaattttgctttatttcagacctgacaatctcttgtctgctctgcttccgcataaaattataatactgcacatggatgtaaaacccaacctattccctgcctgagggactagaatagagggaagaatgactatagttctttgttgccttttgtgaaggtaacaggcacagaggtatgatgcatgatggaattatatacctcttcttgaggtgtttgagggctgactaaggacctgtactttttttttggtttgttttgcagtactggggccagggagccttgctgttgtgtctagagagtgttgaagaaccatgaatatttcgcaaaaagaaaataatttttttaaccattaaaattcctggtagtgacttcctctggcaagtaaaaaactctcattttccttaaaaaatgagagttttttacttgcaataggaaaacttgccaatttttcaagttatttttattcttgatgattctcaatgagacataattaaaatacacatagaaaaaacaaccgtaggccaggtgcagtggctcacaccagtaatcccaacactttgggaagtcaaggtgggaggatcactagagaccaggagtttgagatgagcctgggcaacatattgagacactgtctcctcaaaaaattaaaaaaattagctggatccagtggtgcacacctgcaattgtagctatttgggaggctaaggtggaagaatagcttgagcccaggagtttgaaggtgcagtgagccataatcatgccactgtactccagcccaggcaacagagtaagatcatgtctcaatgaaaaaaagaaaaatcaaccctagtggactggaacagggctggtttactttgtgtcagctgcagtgcccccactcgccaacccacatgttcttctcctgctggttcccaagcagagaccagaaccaagaatgagaatcatcctgtgggtgcaggttgtatcttatcctccagagacagcacttcaccctctgttagaaacttctttaccacactgcctgtttggtgaaatccttagggcagtgacttccaaactgtgatccaggggccacccttggtgggaggatcaggaaggagggggaatgtatcttaagaaaagttgggggaagctcatatctcttctcgttgatcctgagaagtaaagtctttcctcctcagagagatgcgggtagacatgactcgcctagatagaagctcattcatctccctcccttctgcctctgcaggactcttggaagtctgggtccccgggagtatgcggctcttgctctgtgctacaggtttccaaagttcacttgataacagtacaattgtgctgtaaattgtgcagtaatggagactgaggaaacaattagtctttcatcttcattcatgttaccagctcacttcctatggtgtgaaaagagccagactttggagttaggagacatctgaatacagacagaactggcaagattatggggaagaaaagggaaaagtaatgaatattttcaaagaggttaagccatttggccaggacaacactgcttgcaggtagcagaactgggattttgactgtccataatccctattctctgcttgttttactccttccctctcttctttcttttttcattgtctaatgacctacagacattctgtcagctgctaaagaatgagggactcctttataaagattgataggacagtgtcgctacttaaggagttccttccatgtggaccagtgggggcgctgttgacgcatggggctggacttctctttggagcagagtcctg

SEQ ID NO: 26647 - DNA, 1026 bp, Homo sapiens
cagcagatgcacaaacattataaggtattttgccctttgctggagactaaggatgatgggcaggaagcttctaatctaatctagtaggttttgcaatttagaaatgaaaatttaggtaaaattttatgatatccctgaaatagaccctgaagtttagaagaagataattttcaaattcttggcctaatgaagtggacaaaatgctaccaaagttcctcagactctgaaattctgtaatttattgtcaccaaaagtcaaatgcctagaccagtgttgatcattctcatgctgagagtaattagtgaatttgttcagggtctggggggaccccaatttcaaagcaaatggaaaccagagatggttgttctgtcaatccaattgtcactttatagtccctaaataccaaaggctaagctttggcaaagttgggcagtaaaaatctacccttactgcaaatctttctccttttgatccttctctccccaatcagttctatttcaatccagaaagtcagcaactttgaactttctcttccgtctgtgaaaacctattggtaagtggtagatatttacagcttagtaaatacataagtgtttctaaatatctaagtgtttctcccaaggatatttatgttaaagttttatatctaattttctaataaaagttttttctccctattgagggaattgttttccatttatataaaattattttaaaattatttgtataaatttaaggggtacaagtgaagttttgctaacatggatacactacctcctggggaggtctggacttttagtggaaccctcactggaataatgttacaatgtacccattacgtaatttctcatccttcttcccctcccctcccacccttctgagtctccattgtctattccacactctaagttcatgtgtacacacactacttagctcccacttatatgtgagaattttatgtttcacgatgagtaggtggagaagatgtatttagggagtaagacagaggactttcttaggttccct

SEQ ID NO: 26648 - DNA, 1035 bp, Homo sapiens
tagagagttaattagaaaatgcttgtcatttatttcataattcgggggaaattattttgttttataacacttttaaaaaatatttagctttgcagttcctgaccccttaatgcctgacccttccaagcaaccaaagaaccagcttaatcctattggttcattacaggtaagttgtacagttctttgcctactgatgaaatatataataagtttgtaatgtcagaggggctaacacaaggaattaatattttaaagacaagatagtgatatattttgttttccaacttacgatcattagattaacagagctaacttgaaattattttcctatttatgttctgggttttctttcatatacagtatttgcctttggcttatagaattctcatttaagatcaacaggccctcagtgcacatgggtaaagtgttttatactttaagaatagttcttgctactcttgtgacaaatctctttctacttctgttgagacagaagactttatagagagcctaaatcaaatcagtgaacctaactgaagaaaaggagtctatttgcttattctaccaaaaaaaaaaaattttatctatacacacacaaacacacacacatatattcagctttgaatttctatatgcagaatatccttcttgcagattatccatgtgctctgttaggccatttccctccccattattcagccagtcctttggtctccttttcctgcacagtgagcttttctatagttttcttcaccttctgtcccccactttatgcaagtctgttgtttgctgtccctactcctcatgtgttcttggccagctgtgggtttggaagtctatagctaggaggggagggactttaggaactgatggcagtgaaacctgtagatggtctcctctggtgttgccaaagagggcggtagtagcctgtttttctagttgatgtctgataccagctcactgtggtttaatgcaagaacaccattcgtagcacaaaactgcttcagttttggtattggggtataaaaatataaa

SEQ ID NO: 26649 - DNA, 1050 bp, Homo sapiens
aggctgtcagaataaaattatgcacattttgctatcaaacaattctgctgtaaatggttcctttaaaagaaacttcttgctgcagaagaatttcccctccaggaataaaggaagagtaaaatactaatctgcatttcttcagaggtgtgacacggtctactttattaccatgttatataataaacatatataatgtagaaataaggatttttatgcaggtatgcatagaattatatagaactttaaaaagttattttttaaaattttttcacatggtgaatattttattacagtatataaccatgtagtatataacatgtacatatttttatgtacagtatataacgtacatatttttattacctagtatgtgtatgtaaaatctatagtgactttgttttgtgtattgaaaacatctttgtaagctgcacatttttgtgggagataaagacttctttttttaaatcttaattcaggtgaaggtacaagtaagaagctggcgaaacatagagctgcagaggctgccataaacattttgaaagccaatgcaagtatttggtgagctaaatttctttgtattcagcagctcaaaaatatcatggctgaggtaagattaaaaatttgaacatgcttacaaaagcaacaaagtgaacagttgttagcatcctacctctcaaattctatttccttatgaaaacttatcatccattaaagaaaactttatccaatcaaatccagcaattagctattaaatgaaggtgctcatgaactaggctttactgtttttttttttttaatgggatacaacagtagaaaatcagtgcttcttgcaaatattaatattaacattttgtatttagactttgattatttctacattgaagaaaacaaagtgtgagatggagaaagatccactaaaagtactcttttgggaattctaattttgaagaagcaggcagaggttttcttttattatataatgtataccaaaagaagagaatgttaagtgggatattaattcttgacatatctttctaaagtaagattttt

SEQ ID NO: 26650 - DNA, 1047 bp, Homo sapiens
ctttaggtccattgtgctacttttgattctgtatccaaacaaaatgaggaaggggagaaggtcctcatatattacataataacttctagtttttgaaactgaacagatattttgtatattatccactttttaaacaagaagaaacaggttcagagagattataagtaacatgcgtatagcaatgaagtcacaaagcaatgaaattttaaagttcatgctttcttttggtctgtgagcttgagcaaatgataactaaagttgctcatttgtaaatgtggacattatttttcttatgtatctatttaattgcaaacacagaaaacattggatgctaaatttaatttggaagaatgccaagaaaaaaatttagtaggaaggctcaagttctaccatctggaaaatctgaagacagcatttgtttgtgtccctggaagtttggagtcttttattttaattgatgccactttaagaaaagtttaaaactttttgtgtgaggcagttagattgtaggtgctggccggaagggtccccatgggaaccatagagtcaacactgcattacttactttagctagtctatttctagataggaagaattcaagaaaagggagggtttttccctctcaatgtgttttagaccccaaattaacaacctatggcaaccgttctgcctacgccctcttctcacactaccatggcttcctgtgcaagcttatctgcctccatggcttctgatactgtctaaagactaatattctgaaatgtctgtctacatcccaagcccagttacagaatagtgtatcagtctgtgcttgctgagcatctttgcctggatgacacagaggcccctcaagcctctcattgtcccaaactgaatccatcttttccctcaaacccattcttcttgcattccctttctatgtaaaggctccacaatcacctagttcagtagaaatgtaggcttttgtcttcctaactacttcccgtctttctccctcttgtccagtctgttattaaactctatccattggcgtttaataatccacta

SEQ ID NO: 26651 - DNA, 1026 bp, Homo sapiens
aactacacatgatataacctttataccatcaatatatttttctcatcatgtcttaatgtattttatgccattttaaaaaatgtttttcctgctgaatttcctgctcaaacagtatgatcaccgatgaactgatatttacacataggctatctcatgtagattttttatggtaaatttttgcttctatttgtattcactgcagttaatagatttgtattaatctgaggtttttctgtgtgttttgatttttagaaccgaacaatattttgggagtccaagtgacatggcttctactgcagaaaacatcagagacaggatgaaactagttaatctcaaaaggcagcagctgagacatcctgaaatggtgaccacagagagctaatagctaccagctacctacagatttgcagttcataatcccgcatgttgtcaacatactacagcattagccaccacaccttaagatgcatttcacagccaaaataagtctcatttcttttcatgacacatttctctttacatgttaacaccttgctactaccaaggcataattacttaacatgcttcgaggctgtagattccaagtatcttaaaagaaggaactataaacattgcactgaaaacttgctttaaagctttacctgacctgtcagtttgtagacaaacaactgataataagctttgaatggtgctaataagagtaggaattctctctattaaaaagaaaaaaaaaagttgcccttcctccacaggtgatttagtaaatttagacagtagttaaactcttgttagtagacagtggtgtcctcaaaattttactttgtaattcttcagaattgattatttttattgtgtcaatacagagaaagcctttcagatctttgatatatcatagtcattaaaagaccttttcctatttgtattgataatgtattaaaagttgtttgtgcttaataaaagacttctttaaacatcttatttaatttagtagttacatcctatttccaaacatgagtgccttattta

SEQ ID NO: 26652 - DNA, 1035 bp, Homo sapiens
cttccttcagtgacttcctgtttgctcagatggagtttgtcttcttggaataatgtaggagacccttcataatccaattcttgcataattttatcttctataacattcccataaaatcacacagttgtttttatctccctgaaagcatcatgctgtttcatgcatccatgactaagaatacttgtttccttgttttctgctcagtgaattcctacttactcttcaagactcagggatacttactttactttaggaagcctttttggacttctaaggcaagttagtcacttgctcctccctactctcataaaacattttaaatagctttataatagtacttataacatctctgcaaatgggagcatcttgatagtagagaccatatcttatattttccccagcacacattatctaatacctgaatacagtatatgtatgataccatcttcatcaaagtggcctacattgttttttagtttcatatttaaaaaataattatcacttcccttcagtccattgtagaattactttaaccaagttgaattttaatgtcatgttatagcttttattcagagcatctttatttttttttaaaaaaaagccttgtgatacctacttctatattgttattaagctttctttaaggacatcaagtatagtagagcacagtgtctggtaacatattatcggtatttgagactgcagtgggagtcccccatcccacctgcagtacgcagaatttcatggaaatgaaggaaatggaccagagttaagttaggttaagttgccttaaaaatttaaatggttatattatccaaaaagaccacaatgagattaaaaaaataatttgaattgtgtttctctacacccagaggtcagtagagtttttttgtttttttaagccctccatctagtttttaagaatgtagatggagggttttaaaaaaaatcagaattaaatattattttaggtactataatataatgaaaagcgttaatgtttaaatgtttctttagctgggcatagtgatgcac

SEQ ID NO: 26653 - DNA, 1075 bp, Homo sapiens
cttctgtggatgaggtgataccacacagaaagctgaaaagatgtaatctaacagcatgcacttcaaaggggatacggttttttgaaagaagagggaaaataaatggtctgcaagtagtgaggaacgaggcacccaaacccaccttcaggcttgcagtatgtcagacatggaaacagtaatcagttgagaaggctgcaggggtgactgagggcggacaggtttcacttagagcaaggaagagaagagaacatttagaggtcagggattgagttccagggatcacaggattaggaactttccaccctcaattttaataattttgccttagaaaaaaaaaatcatgtattacttagtttatctggagaaattataaaatgtaatctcttccaggaactaatttgagccttagtttactttgtaacatcttgattacaggaatggtttgcagtgtatgtggaacttaatcagcaaattgcagcactcttgaatgctggcgatgaggaagatcttgtggaactaaagtcactgcagcaacaacttagtgatgtttgttatcgacaggccagtcagctggaatttaggcaaaatctcttacaagcagctcttgaatttcatggtgttgcccaagatgtaagtgtctattctgattcttttcttttcttcaaattatctgaacacttacctacacgtaatttttttcaggtttgcatgcctcctaaattatttttctgaaccaataaaatgaattactggtgggggtaatgagataaaattctttgattttttttaaaaacaagtattttttaagtcattctgcatgcaattcaaccttttattgtctaactagagtgttccaatctagtagaatattttattttgactccttctcaatgtttatgctttataacttagatggaaatggaagtctcaatacttttttgcattctgctgacctgaatgtacttctttgtcttcctggtgcatgcatctgtgtgttctgtcttccagataatgcatattctaatgattcgtccttgtcttgtaacagtgtagtcttttcaagtgtaattgtgat

SEQ ID NO: 26654 - DNA, 1035 bp, Homo sapiens
aaataaaacagagaaaaaaaaacattatatataactgctatatatgtgttagtcatagaattacttagaattgatggaaattggaaacatcctatgttcccgacaatagagaattgaagtattgatagcaggtacaatagttatttgaggcagtacgttacttagctcttaataagagtgggttgattggttgcttggttggacagatagaagagatggaggcaggcaggcaacaggattggccttctgaaaaaaggatttgcaaagtcattgaaaattatgttataataacaatagccaagtggaaaaatcattaaagtattatagtttaatgctaagtgaaaaacgggatgaaaactacttgttatctatgagaattggctataacactgaaatctggagtagcatatgaaaacccttacgcaggtgaaaaattaatggaaggaaatagaatatggttgtcccttggtatttgtggtggattggttcaaggacgccctgcagactgtggataccaagatcaaagatgttcaagtctcatataaaatggcataatatttgcatataacctatggatactctcatatacattaaatcatctctagattacttataatatctactacaatgcagatgctatgaaaatagctgttatagtgtactggcttattatttgtatctttaaattgttgtattgttatttttttgtgcttgattttttttcccaaatatattcaatctgtgattggttgaattcaggcatgaaaatctgtggatatccaaacagggctgagcgcttatgtgatttttctttatgatgtggtatttttatataattataaaaagatccataaactgttagatttagaaatatatttttttaacctggtaaaagcagaaatgtatatctgcactgctcttttctacgttaagcctacccactgggtctataatattatgctgcagagatatccccattcacttcttgggagctatcctgagtttagatttaggatataaccatacatctattct

SEQ ID NO: 26655 - DNA, 1031 bp, Homo sapiens
gattagtaccatcagacagaaatcccacagtataattttgctctacagggaaataggattgtttggcacagtatcctgagtaatgaattcaccaataacaaaaatgtgattgataaaaaaaaatataaaccgtatgtatgccatatttaatatgtagtatagtatttctaaggtgcgtatatttatgatatatgatatagcattttaatatactatctagtttacataatatatatgtacacacacatacacacatatatatattaatatgtacagttttcctacttattgtgatacatacatttttaaattccatttataacctggtagatatgtaggtagataggttttaaaaacaagggactagaattgggaatattgagaagtgagaattacatttctttacagatattaatttcaagtatcttttatttgtaaagggcatgaattgttgtccgaattacagcagcgtcgatttaatggctcagacggaggggtttcatggtctcctatggatgatgaacttcttgcacagccacaggttatgaaattattagattcactccgagagcaatatacccgctaccaggaagtttgtaggcaacgtagcaagcgcacacagttagaagagattcaacagaaggtaatgcaggtaggtgtctgatttgaatatatttaactctttttaattccttataatttctactatgtgactgactattaagtcttatatacactatatagaaaaccttagaacacatcaaactggattctaaaacttttaaattatgtattgttttacaaatagtatttgaattaaaagttatgttattttcacagtgatgacattgagcattcagcttagtgtaacaatgaacttcaaaaataactggttcttggaaacgtcatcagtggtctcagtgtattcttgcaataaataacatttcattattgatacttgatttattcttaatttctaataacttagttttttggttaatttaggtattacaaagagtatttctatccta

SEQ ID NO: 26656 - DNA, 1043 bp, Homo sapiens
ggaacattagaaaaactttaaaatggataactttttgattgccagatttactcttcatagggcttatcattttaatgtccttagctaattttaagatgatgtgaaaattttttattacttcattgcattaaggaattgattattgatttttattacaaagaaacaagataaaatatttttgaaaatatttcatctgaactgctggtacctgttgttttttaaaatgtggtattagaaaaaatttttgatgaattttttatcaggtatctataacttattgaattggttttaaatattgtattaagtaaatgataatgtgtcatcatgttggaaacaatattgcatattttaacctaattttacctcctggttactttcgtggattttaatagtgggttactaaatgtttcttttcttttaacctttttataggttattttagtgtccgccaacaaattgactcgttatatagaaccatgccaattaacagaagattttggtgggagtctcacctatgatcacatggactggttaaataagaggctggttggtatattacaatgagataaaatgttattgcatagaaataagatatattttgataactttatcattttagtctattaaaatatagattatttttctttttacaaaaatggagaaatatgtgcataccacattatagcataatagacaaatactgtgaagtcagacttacttgattagaatcctgattctagttgctaggccttcaacaatgcgtttaatcttgccttggcctgattcccacatctgtaatatggtgatagtaatagtacctacctttgtgtgattatgggtaaaatgaaatgaatatacatataaagcatttagaacagcaccagacatgatatagtggcactgtataagttttagctattactgttctgtcattagtagcatcagtaaaggttgtaaaatttttaattagaataacagtagcataatttttttttttcttttttttgagacagtcttgctctgttgcccaggctggagtgctg

SEQ ID NO: 26657 - DNA, 1050 bp, Homo sapiens
aaaattaagtttaatataagggacatctgtctgtaagtgtttggatttatttctgggttctgtgctggtatggtataaaaatagtcacatagaccaatggaacagaatagagaacccagaaataactcatcctgtgatttatcatcttacgattttaaatatgaaataaatcatcctatgattctaaatatgaaaacaaagaaacaatgacactgttattatggccttatagtatagtttgaaatcaggtagtgtgatgcctccagatttgttctttttgcttagtcttggtttggctatacgggctcttttttggttccatatgaattttagaattgtgttttctaattctgtgaagaatgatggtattttggtggggattgtgttgaatttgtagattgcttttggcagtatgggcattttcacaatattgattctactcatccatgagtatgggatgtgtttccatttgtttgtgtcatctgtgatttctttcagcagtgttttgtagtttgtcttgtagaggtcttttgcctccttggtttggtatatccctaagtattttatttttttgcagctaatgtaaaaggggtagcaaacaaaaacataaagtggggaaaggacacccttttcaacaaatggtgctgggataattggctagccacatgtaggagaatgaaactggatcatcatctctcaccttgtacaaaaatcaactcaagatggattaaggacttaaatctaagacctgaaactataaaaattctaaaagataacattggaaaaacccttttagacattggcttaggcaaagatttcatgaccaagaatccaaaagcaaatgcaataaaaacaaagataaatagctgggacctaatgaaattaaagagcttttgtatggcaaaatgaacagtcagcagagtaaacagacaacctacagagggggagaaaatcttcacaatctatacatctgataaaggacaatatgcagaatctacaatgaactcaaatcagcaagaaaaaaagcaaacaatcccatcaaaaagtagg

SEQ ID NO: 26658 - DNA, 1051 bp, Homo sapiens
atgtcaataaatatttaaaagaaggttttgcagaaaataaagaaccatataatttttaaattaatataatctaatataattatatatatttgtgccattttgtacttttaaatatttgtgctctaattcacggtgttatttcttactcattaatcacttcactgaagattttcaaagctttttttgtagctttggaaaatatttctttagaattttcagcaattgtgtcattgtttcttcgttttcatatttagaatcataggatgaaaatgaattatacgtaatacatgtgatctcaatatgattttgagggggaatcttttctaattttgttcttacttttagttgataattgctctctgaggatggactttaaaaaatttgattatgggctgggcacagtggctcatgcctgtaatcccagcacttggggaggctgaggcaggtggatgacctgaagtcaggagttcaagaccagcctggccaaaatggtgaaacctcatctttactaaaaaaatagaaaaactagttgggcgtgatggtgggcacctgtaatcccagctgctcgggaggctgaggcaggagaattgcttgaacctgggagttggaggttgcagtgagctgagatcgtgctattgcactccagtctgggtgacaagagcaaaactctcaaaaaaaattttttttcattatgtttctttctttgtttttttcttctttgccgggtcatagaacatttccaataagataaaactgatcctttgatttgcattgctttatatttaaactttcatataggtttgctatctatggaaattagtggtctcttcaagggctgtaacagaaaggaatataggaagccctaccagtattttgtaatttaaaaagctgtaatgaaacaatttatagaaaatcacctagtctgggattcctaatcttgttttgttgcattaccctgaaatgtgtcagttttctctgttttcttcgagtttttgcttttcaaacatctagaaatctctacacagttttcctttttcagcattccagttct

SEQ ID NO: 26659 - DNA, 1037 bp, Homo sapiens
ccaaattagatacaaaactaattattgttctatagatccataagttataaactttgaggttgtctcttattccactggacggaaatatatcaatctcgttagacaacaattatttgcctttattctttttttttttttttgagacggagtcttgctctgttgcccaggctgtagtgcagtggcgcaatcttggctcactgcaacctccgcctcccaggttcaagcgattctcctgcctcagcctcctgagtagctgagattacaggcatgcaccaccacgcccagctaatttttttttttttttttttactagagacgaggtttcaccatgttggccaggctgatctcgaactcctaccttgtgatccacctgcctcggcctcccaaagtgctaggattacagacatgagccaccgtgcccagcctatttgcctttgttctaaacagaatctacaagttaacttctactcctacagagcttaatacctactgatcagtctatagagagtcaatcaaagatacaaacccaccactgcatgaaagaacactcagtaataatgtctgcctgtttctgagatttaggtagtttttcttatagatgaattttattttttaataggaggatattttgtaaaacttgattttggatatcagtgacatactgcattgatcactgcaagataatataagctgtttcttgaagtttgatattttagtatcaaagtaagtatcagtctctctttaaactttgtattccaagccaagagcaacattatttagcattttcctacatgattttgtaaattgttccagaggatttatatccttaatgaaggaatcatatttttaatactatcttttaaaaaatatggtttttttttttacttaaaatatattaattggaaaactttcagatattagttgactagtttgggagatttgtcagttgctcagatttatcactcagctggaaatcataatcagtttggtgactttctctattaaacaatttcaaataaaccactggtgaataacaa

SEQ ID NO: 26660 - DNA, 1056 bp, Homo sapiens
ttagacaataagcagttaagcaaacgtaacagcccatggtgataaatgctatgaagaaaaatacagcagtgaaagagactgagtcagatgatgccactttaggtagggtagacagggaaggcctctctgaagagggaatatttgaatagaatcttaaataaactgagggagcactcctaggtataaggcaaagggcattccagatagaggaaatagcatggacaaagacctgaagtggaacagacttttcatattgcaggagcagcgagctgttgtggaggagtgagctagcaggggaaggtgtaagatgagatctgagaggccaacaggggcctgagcttgaagggccttgtaggtcttggtaagagatttgaatttcattcagagtgcaagagaaagtcaagcaaggagccttgtaatgatgatatttcagaaagctggatagtttggcgttgttaacaatgcaggcggtagaacttgttggatttaagatgcattttaaagttagactctataggacttgataaaatatatgtgaaatatttattaattccataaatgttcatttcagttcattaggtagtataagtaaccatatcaagtaaatgtgaaattgtattcgtcaaagattagctttttgtcctcttcttcaagttaataatcatgtaaaatcttggtctcattgtataatgactgataaaaaacttattttagtgagaaaattgattttacgtcttttgaagaaattctccaagatgattgtgttagaaaaaatttttcatactgtagaaaaatcaaatttaataatttcccaactaaaaattaactcttacagtttaagctaaacatattcctagtacagagattcagtaaaacaaaaagtaattcacatgtacaatttatgctgcattttttatttgaagtattttctgaatcaccttgtctttcaagttcttctttattgccatgtatgttttgaagtctagagaatttcttctttattattttaattcttctccaaaaatctcttatgtagcataatcttgactgtctggt

SEQ ID NO: 26661 - DNA, 1035 bp, Homo sapiens
ttttaattgttttgtttatgtggttatcacatatatcaactggtgtatgttaaaccaaccctgcatccctagtatgaaacccacttggtcatggtgtattatctttttgatatgctattgggttcagttagttagtattttgttgaggatttttgcatgtatcttaatcagggatattggtctgtagttttctttttttgttatgtccttttctggttttggtattaggggaatactggcttcacagaatgatttagggaggattccctgtttatcttggaatactttcagtagtattgataccaattcttctttgaatgtttgatagaattcagctgtgaatccatctagtcctcaacttctttcgttggaatttttaaattactgtttcaatcttactacttgttattggtctttttagagtttttctttcttcctggtttaatctaggagggttgtatatttccaggaatttacccatctcctctgggttttctagtttgtgtgcataatggtgttcatggcagccttgaatgatctcggttataatatctcccatttcatttctaattgagcttatttggatcttctctctacttttcgtggttaatttcattaatggtctattgatttttgtttatctcttcaaagaaccagcttttttttcatttatctttttttgttgttgtttcagtttcatttagttctgctctgatctttatttcttttcttctgctgggtttgggtttcatttgttcttgtttctctagttctttgaggtgtgaacttagattgtcaatttgtgcactttccgactttttgatgtaataggcatttaatgctatgagctttcctcttagcaccattgttgctgtatcccagaggtgttgataggttgtgtcgctattattgttcagttcaaagaaattttttctatcttgattttattgttgcccaaaagatcattcaggagcagattgttttaatgtatttgtatagttttgagtattccttttggaattaatttccaatttt

SEQ ID NO: 26662 - DNA, 1035 bp, Homo sapiens
cttgggttcaagtgattctcctgtctcagcctcccgagtagctaggactacaggcgtgggccatcatgcctggctaattttttgtatttttagtaagagacggggtttcaccatgttggccaggctggttttgaactcctgatctcaagcaattcacctgccttggcctcacaaagtgctgggattacaggtgtgagccactacatccagctggttttgttttatttaaaaattaattaattcattcagttttttagagatttagagacagaatcttgtactgtcacccaggctgtaatgtagtggcaagatcatagctcactgcagccccaaggtcctgggcttagtgaggctcctgctggagcctcccaagtagctaggatacaagtgtacaccacctcatttgtgtgtgtgtgtgtgtgtgtatatatatatatatatacacacacatatatatatatttttaataatttaaacttttattttagattcatggggtacatatgtagtttgttacatgggtgtagtgcatgatgctgaagttagggtatgaatggtcctgtcacccaggtagtgagtaaagtacccaataggttgtttttcagcccttagcccccacccaccctctcccctctagtagccccagtgtctcttgttatctttatgtccatgtgtacccgtagtttagctcccacttacaagtgagaacatgcggtatttggttttctgtttctttgttaattcacttacgatgatgtcctctagctgcatccatattgctgcaaaggacttgatttccttcttttttatggctacatagtattccatggtacatttgtaccacattttctttatccagtccaccattgatgggtgcctagattgattccatgtctttgctattgtgaatagtgttgcaatgaacataaaagtgcatgtgtctttttggtagaacaatttattttcttttggatatatacccagtaatgggattgctgggtcgaatggtagtcctgttttaagttatttgagaaa

SEQ ID NO: 26663 - DNA, 1046 bp, Homo sapiens
tatctcttagattgcctgggttttcctttttgttatggctactagaaagccagaactagatttgtggcccactccataccgtaaataggtttttatattatacaatttttagcctttttcttggcaccatttttggttcttttctctattctttgcctttatctttagtttgttaacttgttatagttcatttattgtgtctttaatcctttgcagaacaaaatggggtatatacaaatgtaggcatacctctaagatattgccagttcagtttcagaccaccacagtaaagcaaatatctcaataaagcaagtcacacgattttctgtttctcagtgcatataaaagttatgttcacactgtagtttacaaaatgtgtgatagaattatgtctaaaaaatgatctacgtatatcttcatttaaaaatactttattgcttaacagtgctacggatcctctgagcctaagtgagttgtaatctttttgctggtggaaggtcttaccttagtgtttatagctactgatcaggatggttgttgcttgaagtttggggtagctatggtaattactttcttgcctttttctttttttttcataagggcagccccctgaaccagaataggttcaagatagactccctcattctatgacatagaatgagatgtgtcctgattttaaataaaattgaaaaaaaaacaacaacccaccagtgaagtatgccacattgatggactcttcttctcatgaaagatttctctgtggcatgagatgctgggtggtagcgtttgagccatagtagaactttcacaatttgagtcagtcctctcaaaccctgccactgctttatcaactaagtttatgtaacattctaaatcctttgttgtcatttgaacaatgtttatggcacgttcactaggagtagattccatctcaagaaactacttgctttgctcctctgtaagaagtgactgctcatctgtcagtttttttttttttttttttgaggtggagtctcgctctgtcgcctaggctggagttcagtggc

SEQ ID NO: 26664 - DNA, 1082 bp, Homo sapiens
actaaatacgtgaaaaaattccccaaggacctagaaagcatttcacaactctataggctgtttttatgttccaaattccaggaaatcgttttgttgaatatttattcaaacattctggactaaatttaaccttaaaaattgggcccactctagtttttccccagcattagaaaaatgaattgattgcatttaccaaacattttagcccctgtgaataagaattgaatggaataattgatgtaagagattaggagctagtgatggactaggaatctgacaacagaatgcagaatgtagaaagttgtaagtagaggtcacaaagttgcatctacttgggttttaattcattgctaggcatttaatgacattttaaacaggtaatctactaatgatatatctgaaaatgaaatgtccaataattaagaaaacaaagtattgcattttgacctttttaaaaaatgtatttttataaggacttgttgaagcttttccactctctaaaaatgaacttggtattaatgacatttcttttgaaaaaatgaaattgtaccaaactaatccgatttttagaaagtttctctgttatagtagttttactttactaaaaataccattcatctgtatagtagctaacttcaaagatcttttaaagctgttacaagcaacatgagcaacctcttgaggaaagtagaatatttactaataaaaagtagcaagcagagaagtgagccatgattggaccactgcattccatcctgggtgacagccagactttgtctcaaaagaaaaaaaagcagagacttaaatttttataatagttttctttgagatataattcatatgccatagaattcacttttttaaagtatgcaattcagtagttttaatatattcacaaaattatgcaaatgtcggcactaatccaagaacgttattaccctaaaaagaaccttgtacctggtagcttttgttactattcccccttccccatatttgacaaccactaatttactttatgtctctatggatttgcctattttggacattgcatgtgaatagaatcataatatgtggcctttagt

SEQ ID NO: 26665 - DNA, 1039 bp, Homo sapiens
ttgcagtaccccccattcacccacaaaatgcagcccaccacccagtcccccaattccagagagaaacacatcactagattgacgagggcttttagagactgctcctataattgaggaatcagcagcataggctttatctccctacttcctcccccaccctaccgcgttcaatttgtgtatctcagatatttgatttcttgagcatgtattggtcagaaagaaaaagaaagaaaaccattctctatttttccatgggtatgatctggcttaaaacaatatggaatattttcctgacagacttgaaaactaggatcttcctcagatgtctgtaaataactctggtatccaactgggtgtattctagtgtggaacaaaaaacagtgaacacaagtgcttacttgtggatactatcttaccaacggatcacaaagttctctttttggtgtactgttgttgacagggattgtgtactgtttcgacccaagtactgctgtatcctgtgtagtactagatctgtatctcttgtctgaattaaacatttttagttgctgtgtaaatgttaggaagcaaagtagctttgaattttctctgtaagagaataaaagataaaataatgtattttctttatttcacattttatttggagatatttaaatgaaatagaaagccatataacatagctataattactacctgtttgctatttttgtttaacttattttgtagcttcctcactggtttgtgttgctaagcaaacgtatacaaacagaaaaagagcttcctaaattgcacatttttgcacctcttgtgcattctgcaagaagacaatgaatccatgtatttctatataagtatcttcttcatttttaacctgttttcatttgtaatgatgctacataattttgtggctccctaatgcaataatgtacagaagataaaaaaatttataattgaacaatttgtctttctgttcgctgaatatattgcaggtcatgctcccatgcccccctttctaagccgatatcaacaagactggaat

SEQ ID NO: 26666 - DNA, 1028 bp, Homo sapiens
ataagctgagaaactacgataaaggaaaaatattttaaattcagttttaaccccataaatttatttaaattcttaaattctcatacttttcaacgctgctttgaaaaaggattgcagccagtgaagtatgtcacatgtttgacgaaactatagtttgtacagtatagcaaataaatcttatccattttttttaacaacacttaaatgtaagaaatccaagtgggcaagatattcaggtataaatgaatcaccacttggctgtacatattctattgccacagcatctgaaaagccatctgttgcatctcggtgaaagattcatcgttttgtgtaaaagctggtgtattactacaaaacccaaaggacattgtggctttaaatccctcctgatgcggcttctttgatgttttttgatgcagcacttcattattgcttatcaacttcagtgcagtgctcaaaaggatttatttttaaatgtaacattctgccaggctgctgccatggtggctgctgtcggagctctttagggagaaccctgagcttccctaagggaaattcaggcacgtaactgccaattgttagattttatagactcagagttctagatatacatttttctctttggcatcactagagtctgtgttagtctcccctattcacttcctaaattcagcaaggaagcatcagcattaaagagaaattttatttgctcacaaatcattttgagcaaaatcaagctggcagtagaaaaaaaagaactcaaaaagcatcattgtcatcctaaaattatacaaacttgacagtatttgaagatattcttattgggaaattttgcctatatttgtcaaaacattttattagaattaatagcattgactgcattttttaaaaattctgctcatttataacatacagaaaagtgcacataagtgtgcagttgaatgaatgtacacaaatatagcatacatgtgtagctggccccccagatcaaggaaagaacatttctggcatcctagaagacactctga

SEQ ID NO: 26667 - DNA, 1107 bp, Homo sapiens
tagtatttctcatcacggtggagcaggatgcagactagaaaacacatgaactagagcgccacaaacaaacacggcaggggaggcagttgagtcgtctcaggaatattaagaaaacaagctcattttaatgggttttagtttgggctgtatttttaaaatatctttctgaaagcatgtcacaatttactaatattattttttagttttcaaaactttgtattcattgagtatgtcttcatcctaaagaatctaatataaaaaaaagcactttactaaccacaaactagtttgtaacagggtatactgtaattaccatggcaattatattagacatctttttttattcttgctaacttggaattatttcaagattttctctttggactgacattttcaaatcttgagctctagtgaagatgatttttacttcttcacattgtgaaagttgaattaatcttttcagagagtttttcatatggttaatttttggtattgggacacttcaacttagaatttgaacttcaaaccaagaaaaaaagacttatggggcaataatattatttatctttctttttctgactgtaagacatgaacataatatatatttcatatcaacctcataaaacattccaatgttcccaggccacattaaaatgcaaaataagatggtattatataacttgtatcaataggacccatgaataattggcacaaagatatctgtgcgtatgtcgtgtgaaaagctcagatggagtgactacaagaaaggtggatggaaggaacatgaaagactaatgaaatcataatttcaagagtaaagctactgactgtgaaggatacagattaactttgtatatgcagtcattgacatattaagttatgcctgtatccaaacttaggtgtcaacatagtacattttatatgtaaaaaacagtcaaagtaatatatacatcctagactttggctaccactaaactgtattaaagtgttgctgtaccttttaagacaaaatgatgcagtaaactcaccataaaaatataaaacccagatttgtggctgttaaaaatataaccaccaagggaagtagaacttttctgaagatataaa

SEQ ID NO: 26668 - DNA, 1033 bp, Homo sapiens
aactttttaaaaattcaaacattatctgcacagtgatactttgaaactttgtgaatattctgtttcccagatttttccctagtggttttagcatccattgatgatcattgcctgaattggctattactatgtgatagtgaaattctagttttctgtttctaccattacttttacatgtattagttcatttgcctggctttccctccttcctctacccttaaatttttagaatcactgtgtacttatggatatattttttcttttttactattacttttttagcttgataattttgttttttctcagatttattaaggtataattggcaagtaacttgtacaatattatattttgatatctgtatacattgtgaaatgattaaatcacactaacacattcatcaactctcacatacttattttttgtggtgaaaagatttacagtctactcctttagcaatttcaagtatataatacattattattaactgtagtcaccatgctatacaatagatctctgggactccatcctgtctaactaaaccttgataccctttgaccatttttgatcatttcatttttttcttttctttctccccctttttttttttttttttttttttgaggcaggatctcactctgtccccagactggagtacagcggcaccatcttggctcactgcggccttaaccttaacattctggactcaggtgatcctcccacctcagccttctgggtagctgggactacaagcacataccaccactcttggaacaattttttgtattttttgtagagatgggattgttgtcatgttgcccaggctggtctcaaattcctgagctcaaccaatcaggctgccttaatctcccaaagtgtttgaattacagacatgagccactgaccctgaccatttcccaattcaatagtattataatccatttctgtaatttttcattttgatactcaaattgtgccagatgtgatcatcagcaggagcccttctgagttggcttgtttcttttcaacttgt

SEQ ID NO: 26669 - DNA, 1042 bp, Homo sapiens
agccagccatgaacctgtctatagcagcaccagctcctagttctgaactcaactgttttcgttcttctatgcatttagaacagagataaccattactttagtcaattacttaaaaaatttttattgagcatatattatgggctaaatacaatgttaggaaggccccaaggatatcaaagtgaacgaagcaggaaagaaccctgtccttaagcagtttacgtctcaatttttttttccctgcctaaactaagactttaagaactcagagactcttctagaaatccttaatcttctgatgatttttttttttttttggtgctttgctcaattctaaacaattgagatgaccaaatcaataggtaaggtatttatttatagtactctattatgtatcgttgtcattcattcattcaaaaaattacttctgatcatctactatggttagtatatgtagaaattgataaattagtaaaatatcttagggtttagggttctgctcatctagctaaaagcagatatgcaaataactacaatggcaaagtgtcaagagcaagggactagcaaatgattccattgttttggatgagggtgactgagagttatggtaataaccataacacccaatttcctggctgctcagacgagcagtttaaagactcactgctagtaatgtgtgcttttatttaatgggaatcccgtaagtactcacttgtaaaaagcagggtttcccagaatccattggcacaaactgttcaactccttgacatacacacagaacaattcagtcacagtgttaacactgtttgggataaactatgtgactgtgaattagggaggtcagaagaaagtatgtttttagacatcattggatgtatactttttattcgtcctatagcctatactttagaaccatactcattgaaactgtgaaaaatgaaaccacatcatgaaaaagttttcctgataatagcattatttgtgtatcttaacggtagctatggactctttatagctacttaggaaatagctcttgtcatgtttc

SEQ ID NO: 26670 - DNA, 1050 bp, Homo sapiens
tgcattgctgggcctgtgataggcaaacttttgtatataccacagcttcctccacttgtggttacctttctcctgtcctttcatgcaatggattgctactttgcaagacaatctgaaactgctgtaattcctccaataatgaacatctgcttcactaataacaaatctatatcccacacctgtttatatgctggcttagtatttaatgacttttattattaaagccaaatcacagtggtttttaaaaagtgactttaatgccaaatcatagtacttctttttaagtgtaaattttcaaaaccatttttaaatggcaattaaactcaatacatggtatatgactcaaaagtgatgtcatttatgtgattcaaaaatgatatcactcaactgagggaacaatatgaacagctatgacacaagttcatgcacacactgatattgaccaccacagtcgtgaatacttccttgtgggtagttattataagacgcaaatgattatggatgcacactgatttagagctgtgaaaatgtgtttgaaaagtcttagattctaattaatatggcaataaaacaatttataatggatattatcctcatcctagatgttagggtaacctaataaggtagagcaatggttctcaaagtgtagtcccaggacaagtaataccagcatcacctggtatattagacagggttctccagagatacagaatcaataagatatagatgtagatatcagatatagatatatgagggggattaagggaattggctcaacaattatagaggctgagaagtctatgacaggctgtctgcaagctggagacccaggatgctagtggcatggctcagttcaagttcaaggcctcagaaccagggaatatacatatatttgatgtatctattgaatatgcaagaggcctgaatttcataatggcaaaaataggccttggtctcttttgtaattgtcatccttagccatttctctttctttgttccctttgctttaaattatcctgttttcatagtccttccccattttccttttac

SEQ ID NO: 26671 - DNA, 1091 bp, Homo sapiens
ttactctgaaaattgggacacattgtctctgctttatcatttccaccattcttgaaactgaatttattcagcattccacaaagacgaattgtctttctttgctatagcactctactctctatcatcatctctgagtgtctccaggttctttaggtaaagatatataatctgaagatcaaaagatgacattaaagagagcaacattaaagaaagcaacatttactcaagaccagggagcccctggcacatagcatattgatgtggcagtttggatttaagaataaggatgcaaaacctagagtgaatgaatatggtatatactcaggcattggaaaagttagatggaaaggattccataccatacgagcgatggaatgtggatccagtggaataaacgtgacctgtgaggacacagtcagcaatttgttcataatacaagggtacattttgaagtcatgggctgcagaacttgaggagttagtacagagaaggatcatttaagacagatagatatatgctcccttccattcagggaaagtcatttgcataaggtgctttttggaggcttttttgatgaaaatggtaacttttttttttggcaagatctgttttgtttgtgtgtgtgtgtgtgtgtttttctgtttgtgtatgttttgaaaaacatgttatttaaattttctcctcaatgaagagagcagggaatggggaattgttatttaatggagtgagttacagtttgagaaaatgaaaaagttctgaaggtgagtggtgtcgatgattgtataacaatctgacatttatgagcaactctttcttcctcgtttatttcttaagttagtttttactgccaattattgaatttccctgttcatacaccatttctggtattcatctactcacaaatatatgccatcaaccgccaacagaggatacgtgatatggaagtatagatgaactcatataaatatatagccacctttagggaaattacacaagaaacctccctgctcaagtggatcagggttgtcatgtgggtatcatgtcaagtggatcagggtgtcatgtactgtttatagccacaccccctacat

SEQ ID NO: 26672 - DNA, 1035 bp, Homo sapiens
gtaagcaaaacacttttaagacccagtatttaaaattctcactattgatgtgtcaacatgcgtgtggataaataaaatcttagataaatgctttctacattaaagaacaatatcctttgcaatagtagtaaagattattcttaagaaatactgatgcttcatatcatattctatttaaaatattggtagaataatgaagtctcattaattcaggatttactaaatgagatattatgaatgtcattggctcagcatagcataaacattaggctacctaatgagaaacctgtttgccaagaaatttagtagcaaaaatgtcttcggatgacaatattaatttatgtaaggaaaagtcactttcaaggattctgatacatttatgcaagtaataacagctaataaacaacatatgatgtaataacaaataattacatacaacgtaataacaaattatatatgatgtcctatgcttttcgctttcctcatcctcataattgtttttgtaggtataatgagaggtaggaaacaactcagaaacagttgaaactatcatgagaaggtttttgtttgtttatttgtttgagacagggtctcactctgtcacccaggcaggagggccatggcatgaccacagctcactgcagcgtcaagctcctgggctcagttgatcctccacctcttaatagctgggactacaggcgtgtaccacctagcctggctagcttctaaaaaataatttatagaaacagggtctcactatgttgcccagactggtctcaaactccggggctcaagtaatcctcccaccttggcatcccaaaatgttaggattacaggcatgagccactgtgcccagccatactttcttattctctctttctgtctctccctctctccctccctctctccacctatccatctatcttggcagaacaaggtagaagtgctgccattaagcaggggaaaatatttacataaaatctaaagaaaattggtgtctatctcctcaaaagattaagctttagaatgtgtata

SEQ ID NO: 26673 - DNA, 1024 bp, Homo sapiens
ctaggttttcttctagggtttttatggttttaggtctgacgtttaagtctttaatccatcttgaattgatttttctataaggtgtaaggaagggatccagtttcagctttctacatatggctaaggaacaggcttttttagtccatagccacttttacactcaggcagtatacatattctattattgtacttatactgtgtattatttattttacaatatctttctcacctgttagtatatgagtactttgaggatagggtctatgtcttgagtctttaaatatgtgactctcaatataatacctggcatatgataataagtcatagacttaaaatgttgactaaaggacagaacacttgaatatagaatctgtgaatacttgtgcagaactcaatactttatttgatattgctgttcataaaaagattcattcttcaattaaaacatgctattttacttacctgtcagatggataagatcaaaccgtatggtagcacaatgagctacctagtatgtgggcatggggcactctcatacattgttatgtggagtatgaattgattcatttaatatttgcagggcaatgtggtaataactattaaaacttaaaaggtgtatctcttttgacccagcaatttcactaccagatttagttaacagatatacttgcatatgtatacaaagacacataaaataataaatttccttgcatgtgtgtatatacatatacataaagattttattgcaatgttatttgtagtagaaaaatacaggaaaaaatactcagcaatagatgataataattatggttcatccatgccatgtgatattatgcagtaatttaaaataataagatatgtctgtaagaactgatatggaataatgtgcaaaatataagaaaaatttgcaatatgcagaacaaagtatatattgtttgtgtaaaaggtgtgtatgtttgtatgtgtgtatgtacatatatacatacatatgggggaaggaggaggggatcaggaaaaagaagaa

SEQ ID NO: 26674 - DNA, 1046 bp, Homo sapiens
ctcagctgtttaccaaaactccattcccacacccaagctatcccaattttaaccacactggaacagaacagaatgttctatcctggatctgaatgttactcttagatattgggcaacctccctgtggaataaagggtcctttgctgagagtgttcatgtcacttcaggccatattgcaaaatcccctttgcccactcagcttctgtattacctttcttctcttttctcacttactaatattcccctcctcctttttgttaatatccttaacagtcaaaactagacatcagtgtataatttgattctcaaaatgagaaaaaaaatcacagaagtgaaccacatgtactataacagaatgtggtgttaggagaacctgcagttgattaacaaataatatggacaacatatttggagtaatttcttaaacctaacctttctgtttccagtctaaaatgccacctcagttctctgtcagttatgcaacattcaaaccaggaacctgttttgagcctgaattgatcagttgaatgtgagtgccattaacccaagttttggaaatggattaagtctaccatcccaagaaagtacttcttacaaaaccatatcttctttgaattaaatgttactcccaccaaataatctagttcatttttcagtgtctattgccctagtggacaaattcctgttttcttccctttttttcttgtctgttaacactatacccttatttcaatctgatcattttaaatctctcaagatattttttgcctccactcatcaatctgtttcccacttttgactagtcataaacgttattgtgttatgcgttacttcttctactagtttaaactgatgttggtggccttttcttgtatttaaactatgctctttaggaaaagattctgatccctttttaccttaaatagtctactcccgtccccatgttggcatcaatgtcctcctacttacttcagtcctatttggttgtgtgacgtgtttgttatcgcaaaataccaatgtgaatccataatctaaatttcaatccc

SEQ ID NO: 26675 - DNA, 1100 bp, Homo sapiens
taatattaatggcaaccactatgaaaactatacaaagagatacaaccaaaatataaataaataaagatggagtcctaaaaagtgttcaagtaaaccacaggacagaaagaagagagaaacagaggaccaagaagcaaaggaaaaaacagaaagcaaataataaaatgtcaaacttaaaggctaacatcaataattactttaagtgtaaatagcctaaataagccaatcaaaagaaaaaatgcattaaaaaaaaacccaactatatgctgcttacaagaaactcacttcaaaatcaataagaggtatgttgaaagtaaaaggatggaaaagaatatatcatgcaaacagtaatttaaaaaataaaggcaggggtagctatattaatatctgatgaagtagggagtaaagaaatttactagggacagagtaagacattatgtactgataagatattcaactcaccaggaagacctaatgatcctaaatgttcatgcaccagacaacagagcctcaaaatacatgaagcaaaaactgatagagcagaaaaaagaaatggataaatttacaattgcagttggggacctactctcagcaactgataggattattaaacaaaataagcaagaatatagaggatctgaacaatataatcaactaaaaggatctaattaatttatatagacctctactcaataacagtataacactattttttccaagtgcctatacagctattcacaaaggtagaccatatattggaccataacacaaaccttaatgcgtttgaaggaactgtaatcatatacaatattttctctgaccataatgaaatcaagtagaaattagtagtagaaaaacaacaggaaaattaaacaatatatctcttaaataatctatgaatcaaagaagaagtctcaaaggaaaaactagatgaaaattaaagcacaacatagtaaaatatgtgggatgaagctaaagcagtgctgagctggaaatttatagccttaaatgcttatatttgaaatgaaacaaagttctcaaataagtaagttcccgaccaagaagctagaaaagaatagataaaccaaaccacaagcaaa

SEQ ID NO: 26676 - DNA, 1046 bp, Homo sapiens
tgttcacagcatctttaccaagattccatctcaagaaaccactttctttgctcatccgtaagaagcaactcctcattcattaaaattttgttatgagattgtagcagttcagtcacattttcagcctccacttctaattctacttctcttgctatttccgtcacgcctgcagttacttcctccacttaagtgtttcttgaacccctcaaagttatccatgaggattagaattaacttcttccaaattcctgtgaatgttgatattttgagctcctcttatgaatcacaaatgttcttaatggcatcgaaatggcaaatcctttccagatttattttctttggattcaccagaggactcactattgatggcagccatagcctttcaaaatgtatttcttaaataatacgttttctttgtgagcatatagattttaaaaattttattgaagtatagtttatatccagaaatgtatgcctgttgtaaatgtatagatcaatggatttctacaaattgagtatacctcaatttgaacatgtatcagtctgctttgtgcttacttcaagtcattaaccttccctttgaacctccactcctcgaagctaatgactagcctgacttctaagagcattgatttgttttacatgttttcatgctttatgtaaatagatgaaattgtataatttgtaaacttctggactggcttattttgctcaatatttatcttgagattctgtgaatgggtaaatacattatattatgtctgggtacttttgagtttggaactattatgagtagtgcttctatgaacattatagtgaatatgtatccatttggtgaatatatctacatatttctgttggatatagtatacctaagaataaaattgctgggtcttagaggatacatatgcttagcttagtagacattggcaatttccaaaatggctgtaccactttatacttccaccggcgtatacaagttttggttgctgcacatcttcatgaaacacatattttctgtcatttttactttaaccattctggtg

SEQ ID NO: 26677 - DNA, 1040 bp, Homo sapiens
atacagcatctaagatcttcatactaaggtatgaagatagtcttggtgacactgttcagctggatcaagccaaaccctgtcactggaattttccattacaccaactagtaaatacctgtaattgctcaagccttttaaatttgagtttcagttacttgcaaccaaaaacaattctaactgaaacaagacttaaaaataactgcaaaccattgtgtttgcaaatatttggaaaccatcatttttgagaagaatgacatgctatttcaatgattgacagaggaagatcttagagttggatgttgggtcatggaggtagagaagaatgaacagtaaaatataagaaaagttgtctaagaatgcctctgtcaaaattattcttggcagacaaatgcatatttataggaaaattcatcatcctacaggattttattatttaaaaatataatttgaaaatgagtgaaacattaaattctagacaattgggaggaaaaaaaatcctgaaacaaagtaataccaataaacagaacttaggtagattagtattctgtactaagagaaaaaatgggaacaaataaaaatttgtgttaaggaaaatgttacttgatagtgaaccaaattttgacaaaaggcaaaggaggatttataaatgagctcagctttgtggccttggatagcctggaaaagaaaagtaggtataaaattaaacttgctatgttgagacacagcaaacattttcatctttttatctagaactaaaattcacctgtttgtgaaacttgtgctgcagctttgtaatacagcatagcagttctatgtggtattttatggtaactgaagaatttgatatggggggataagacccaggcagaagagtaggtctcactttttatcacctcaactgctttatctcactcatggaatcaaggttagtgaattggaatattttttcggctagaactttctgaccagtgcaaagttatctttgattcagcgtgaattttgagctcttgaacacttactgtttttctcccctccgaaaa

SEQ ID NO: 26678 - DNA, 1047 bp, Homo sapiens
atgggcacatttggggaaacaaaaactgaaaattgaaaaatctggtcaaatattcaattgtgcctaaataaaattataaccaagtatctgattgaatatatatacacctatacatacatacatttatacatatatatacacacatatacatgtacatacacacactttttctctggatactttgtctctgtataataaggactatattaaaaagtgatatactctgagaaatgtgaaataatgggttgtgcagattttaaagaagctataaattaaccttgaaaaatattttatataacattgttattttcaccccaaagcagaggaatttcgaatgaataaaacatttcttgttgaaggtaatgtcagcaaaatcacttcaattcagcatggttcatttactcatgcaacaaaaattaattgcataatgtgtattcggttaggtcttgactattttctctaagcatatcttattttaattctaggatgctttgatttagtgtggaatgtgatgattattataaaatgtatacttggccatttaagttggttatttaaatcattagcctgaagatcatgcataccctggaatctcacagggtggctagaatgtggatttgtaagcttttgaaaatgaggtggtgggttgcttgacatctggatttgctttctgacttggtagactaaggcaagatgcctagaatagtgccctttcctttcctaaaacctaataattatttttgaaagttccacaaaacttgcttttatctaaattccacttttgaaaggtttatatacattaactttttttacatgcaaatactgaccctggaagtgttaagctcctttcagtcatttatactgtagtctgatgcattttaatctgattgctttccttctaaatcctagaagagctgtagtgagactgcattttaaaaggagaagtgaatctgttgtagcacgtagggaacttcaaggaatatcctggaatggatgcctagtgtcctggggaaccaaggtgggaggagggggagagggcgtggtagg

SEQ ID NO: 26679 - DNA, 1026 bp, Homo sapiens
ttttaaaataagttcttacataaattaaaagaaatgatgaaagttcaagcaaactgttttagaatttgtcaggactttaaatttgatgtaagaaaaaatagggaaaccaattttaaatactgaaaaaagtcacgtgaagagactacacattaaataaaacaataagctctggctcaaggacagatagatcactgaaaaaaagtaaccaagaattagatcatttaattatgtaacagatgagattttacctaaaacatacagaaaagaagtattatgcaataaatgactgagataactagttaccaatatggaaaaggtcacttaaaatcatgccttatttcgtacatcaacataattacaagtgaattcaagagttaacatttttaaaagtcactacttaagaaaattagaataatttgagtacatgatgcagagatagagagttaggatatactatgctaaaaagcaacaacaacacaaaaaattacaggaaacaacgcatttgaccagatacaaaaattgaagcctcaatatgccttcctaaaggaaccatgtacatgtagcaagttgaaacaacaggctagataaaatggtttgtataatactatgaataatgattagtatatatcacatataattctgaataggcttataaaaatatcaaaatagttaaagaacatgttagaaattcgaagttattaagctgcatgtaaaaatatttatctttgcctttaaaaatgtaagaaatatatattaaaatgaggtgcaacattcttgccctcaaaatttgcaaatctaaaaaccgtaatgccaaatacctggaggagtattatgagaagggcactttcctatattgctgatggcattgtaaattgatataacctttttgggaagcaatttggcaatgtgttacaagaatcataaaaatgttcatactcttttaacctagtaattctacttctgggaatctatcctaaggaaataatccaaaatattttttaaatgctatatgcctgacagtgttta

SEQ ID NO: 26680 - DNA, 1050 bp, Homo sapiens
aacgtgcctgtcttatgtggcctctatggacacactgctcagctggcagagaacagggaagttttctcccagcacccaaaaagagaaagaggaaactactttttctttctgggctccttgcagcacaatagatcaggataagcttccacatttcctctctggagtttctggagtggtttccaggaagaagttaaaccttcacctttaaatggatgaccatgtcacaatcaggaagaaacatctccaaagacccatctttaggtaagtaatgctacatcgcaggtggctctagggctgtcaggaacaatagtttctcccttcatccttaatttggggattctgccactaagctacagcagagcaatcaagagtgcttaaagtttaacttcaggcatactgagggagcctttttgttttctgttttctgaaactttgtgcacaaactcttatcaactcctgaaaatacattttacaaaatcttaactattcaaacacataagtgacatagtactggaaaaactttggaaacgttatgcaatctctagctgtttctgtaggctgttgcacagccctctaaataggaaacgttgtgcttagttctttcaactgattacaggcaagggcagtgtttcagtgctgtgaatactacacctttctggagtgaagtgtcgggagataaatttgaacttgatagctactttactagagtgcacattttacagctcgctcaggaatatcagaccagcagttaaagaaacaacagggtgataggaaaaattttacactgtggtggaatctgtgaccaggcaaaatgtagatacagtataatggattgagctaaagtttaattttggagggaggtacaccctttctttaagaaagcagctgtttcttcattgactctttaattctggattctttagttacctattatgtactttagaatttaaaataaaaaataatttaaaagtatctagaaattgaaccctatttttgcccctcaaaacagaagatttttaagaaagtcagttatatatcagttttgtcttt

SEQ ID NO: 26681 - DNA, 1055 bp, Homo sapiens
tgaaagaggagtagatagtttatacttccattttataatttttgttgggaaacattactattatataatccccatcaagtggtaccataccataacaagtcattctccctctacttgtatgtatccagtaatactcattgtctacaggcatactctagcctgcctttggccaggtttaactttagctagtttttttgtttcagttggaatttgttgctatgtccattttagtgtctactttttattattgatgccgttcagcgtctaagtaagcataagatgattctttatcctactacttacctttgttgcttttcctgaactccttccttcttgaatttgtaaactgaagggaaacactaagcttatataaataattttcagatgcttttattgaaacaacaaaaaaatatatgtagcatagagcgtctggatttcatgaattgtgtttcctacttgccagattgtaatttccaagcatgctcttatctcattaacacaaagaggtctgtgcctgacctaggatctttcttttttttttagaaacttgtggtggagaatgttgatgtgttaacacaaatgaggaccagctttgacaaaccagaccagatggctgcactgtttaaaagattatcatgtgggtaactcatgatactttttataaacataagaagatcttgatactcagtatttagctttggctcaaaatttgtaacataaatacaagtagtaaattatgaaaagtactctttagcttatgaagagaactagaacatttttgcagtcaaaggatcatataagtgtgtgtgtggcttatctgtttcacaatttttcttaaccatactcttagtctactatgtgtcgctagttcatgaatattaccagtatcaatttggttttgaacccattaaatttaatacagtaaatctacattaatttagactaaaaggattagcttctgagcctgttaactttctaaaaatcaactttatacgtataagttacatacaataaaatgtaccatttaagcaaacggtattttggattttgacaga

SEQ ID NO: 26682 - DNA, 1024 bp, Homo sapiens
ccaagaatgagtttcagataaggtgtgatgagtgagagtacatttatctattctggatactgtacttactgacacagtttaagatagcatgaacacatttggtagctatgccatactgttttcacaatcaacttgcaatcagatgaattgtctctttttttcacttatgctaaccttaaaccatggctttccacatcttatattttgtgaaatttttagacctgagtgtatgctttgtagtttttcttagtagagtttatcttgttaggtattgtccattattctagggtctttttttgagtacagattttatcctagtcttttaacaattattttataaacttaactattttagccttgtctgtaagtatgaatgttatcaaatatattctcattcttgagaagaaatggaaggtgcttatgttttaacatttctctcttatattttggagtggctgtattctcgctcagatattaaaatttaaagttaggggaatgcggaacgactgtaaacaatgttgactttttaaatatccttaaccaagatggttaaggatgttaaaacattttttcttgaaaacttttgatgttagctttctagtaatctcctatgtgattcttttcttacttgacttttcattttaccttcataataacttccatattttattaatgatttaatattgtagtaatattttttggtatttgtttttacttttttgcttctcaaatactaaatcctgacttatttaaggattatgtttttcagaaggcttcctatgaaatatttatatttttaatattgtgccttcatcatttagttcttcaaaacaaggttaattgtaaggattccattttctggaattgtataatgttttatagtgattttgtttgagttctctcctaataatccagattgtttagtattcaactacttgtgtattattaagaacttgagaaggtgtttatttgtgactttgttttctcagcctctgtgtactgaggcatacttcatacgtattct

SEQ ID NO: 26683 - DNA, 1028 bp, Homo sapiens
ctctatgacgtgtttcttcacacaagatttacccaagatctacccgtttctgttttcaccaagctatgtgcattacccaagctagctaagtaagctctgtatctcacttatatttctgtcttttaatattgttgtgatatttgcaacacagcctggattcagctactgtttgcttgaatagttagtatgctttcagagtaattggtgtaatgtaagatttcattcttttctaaatttagttgctacccaagcattgtgccaaaactatcagtcaagcagtgaataagaaatcaaaaaagcagactggtaagaaaggggaacctgaaagggagaaaccaggtgttgagagcatgaggaaaaacaggctggttgtgaccaagtaagtatccacttatattatacctttttgctccaggtaaaatatttatttcatttttttctattgacattagtactgaggaaatgctaataattgtatattcttcattttccagccattttaaaaaatatttctgagcttaattaacctgttagttgcttatttcatctcaaaatacagattttggcctttagaagaaaatatatgtaatagttgatatttgtctttttatactaagtactgaaggccaattatatgtttaaaaaattttgtgtgttacattataagcaatctgtaatttttaatttatttaaagttagatagtggagactttattttggcatgtttttgatatattagaacatacccaatgtcattattataaaacagaaataacagaccaggtagcattcagggatctttgcttgcttcattgtttggaggggaggtgtaggtgggtaataattcggtaaatattttttgtttaaagtatagttcctactttcttgctaaattgagcaagccattgcccttttatagacaactttccttctctcataacagaaagtacttcaggaattgggcgtgattatctttatgagtgcagaataagctctacctttgtatattaagtcagtatattcattac

SEQ ID NO: 26684 - DNA, 1049 bp, Homo sapiens
actcctggcctcggtgatcttctcacctcagcctcccaaagtgctgggattacaggcatgagccacagtgcctggcctgttttgctgttaaaaataaataaataaaatttctatttgtttaattaaaaagagaaaatataagaagtatttttttgtggaagccatttttagatggatacagtctcaggaatgactctcaggatgaccatacttttctggcggtctgcttagtactctgaggtgcttttgcttttcttaggttctttccttccaacctcaaaatgcataagcacttttctcttttttgttctatattctctagggagcttatttttagaaatgaagacttttataaataaaagcattaaataccttaccagttagtgggagatcagggaagtacacttgaaataccaacatcccaaaatgttaaatgtgtatatattataggttattttcttattacaaataaagttttaaaattgacacctctttgtttttaaaaaggcaatgaaacaatacaaaagtagaacttgtaaaaaaaagaagtggaatttcctctgccaaaggatatacatgtttaaaactttgaaagtcattgtcataaagcttgaactgcttcaatctcctgttctgggtttataggagtgcctaaaccaatacttgggctcagagaattttagagatttagatgcatttcagatgcacccttacatttgagttattcatgtgagaattttagcctttttcagtcactgcaaaataaaaagcattgagtgaacatgaagaatgtagacctgattattcctatgtgtagatttttaaagttttttaagatttttataagagcattattagctagctatctgatttttttttcatgtaatctatacctacttgtgttagtttcctagggctgccataacaaagtaccaactagatggcttaaacaatagaaatgtattatttcatagttctgaaggctggcagtctgaaagcaaggtgttggcagggttggtttgtttcaaggactgcaagggagaacctct

SEQ ID NO: 26685 - DNA, 2006 bp, Homo sapiens
actttaggaactaaaatgtagcattttttgtagttgaagcaagagagttgtagacacttttgttcttcattgttgtagttgacctctttcacccaggctttatggaatttattttcactaaaatggggaacgtgattgcatagagatattgagaggattgtgtgagagacctgtaaaatgtttggaacaatcgatgcctgacacataatgtatgctcagtaaatatcagctcttattagaaatactatgggtaataatggggaatattaaagttttattatatttattttgaagaagtgatctgcaagcttcctttgttattcacttaatatttaatgtacagcttctggctgtgaggcattgctacatattcttatgtacattatcttggttaattgtccatgtcagcttccatttcgatgaggagggtattaggctagagatgttaagtcatttaaccatggttgcataataaggtatgctttctagcatcacctaccaaaacatatcatctgacactggtagtctttgaagtttgtcattataatcccttatctgatagatgtttgcattggatacttcctttgtccagaactgtatgatatggactggggaaattaaaacttgagtttggtacactgtctaattgtgctggagatagctataatagaagatagaaagtgatagctgctgttagacattatacatgtttagaggagggagatgttagcatttcagggaaggagtgcaatcaggtgcggttttctgaaaatgggattagcatttaaactaagtgctttaggaatagtggggttgggacatgtttaaatggtgggattctgacattccagtagaggaacagtaagaaagcaggaggtgtgtatagaaaatagtgaatagattgttttggctaccgtatgtagtgtgtgaatacatgtaggggaaatgtagattggaaaagtaagttagggccagattgtggagggccttgaaagctagactgttttgaatttaggcatctagtagttgtttgataaatgtttgtagctaagtagagtctagttatatatggctttgggggaaataaagttgaatgagaaatgtagcctatgagattgtattaaaaagggagatgatgggcatgtagaatggtagaaagaacactttcagaagtaaagagatgagatttccaatcttggctctgtcattaagtagttgtaactttaagaaggttcttttaaggtctgtaggtcttaggttcttaatatggaaaatgaggtttgtatttaagaccatttaaggctcatagtaagatggtgaccgtattatttattgttcagactaggacactgaagttggaaggaaaggggacacaattagtaaaattatactagggcaactaaaataaattgggattattaagcccaatataaaccaaattatacccttcatatcttactattatgaatgtactttcacctgttgtattttgaaactcaagtttaaagtactgaaaagcaggaaaaaggactaagacatcaattctaaatgtttaatgttgtcgaataaggtaataagtattcactttatgtttttggagtagtaatgattaaaatgtgcatataaacatggaatcgttctgaaacagataatgttgtgcaaaatagagtcagctactctcagatgaagctaaaaatagtcactacaagtatatatcttaatttgtctggtatttaggggtagtaatgaaatatttcatttgtgaatattttcttttttctttttttttttttgagatggagtctcatctctgtcacccaggctggagtgcagtggctcgatctaagcttactgcagcctcctcctccctagttcaagcgattctcctgtctcagcctcctgagtagctgggattacaggcatgcgccaccatgcccagctaatttttgtatttttagtagagacagggtttcaccatgttggtcaggctggtctcgaactgctga

SEQ ID NO: 26686 - DNA, 1033 bp, Homo sapiens
ttggttctcctatgaccaaacttgttgagtccggttaggcaaaattgtaacaagtatattttctaacacactgtacgttaaaaggaactctcatcaggagcaaatgataattgatagagaaataaaaactcttaagtatagcaggcaaggaccatttaatgtcagattatcttgtacaagtcagtagcatctgaggccatcttgacataaataaatctgtataattatcaattacaatgatgacatctaatcagtaagaaaagcttgatttatgcctggtctactggttttgaaagtaagttaatcacatattagaaaggttttaaaaaattattaaaattgaatgtaaaggaactaacctatttatatttctatttgtaatggaaaatagtgccattaagtgaggtaaattgtgttatcattaatgcaatgtgataccctttatacaaaaatgttacacttgaccaaccccactataccacggtatataattagtgatttttgtagtactgatgataaaattaatttcaaagtttgctttaatttgaccatctatagccagaatcttaaatttccaaaagttttagctgaggcacattaatgtgctcaggtggtgaaatagaaattattttaatctatattgctgaacttgatattaattgtgtcagttacctattgctgcataacaggtcacctctaaatttcatggcttaaaacgacagcagcttgtttcttatgattctgtgggttgactgggtagtttctctgctggtctcactggttttaggttaccgcagtgcattccactggtgcattctgggggatgggcccagctggaacagcagggatgctgaagtgccctttctctatgtgatacgatatctcaggcttcctcacatacagcacgtcagggcagtgttccaaaagagcaaaatcagaagttacaagaccttgccctggacttagaagtgactcgttgtttctgctgctttctgttggtcaaagcaagtcacaaggccagccaagatgggaa

SEQ ID NO: 26687 - DNA, 1039 bp, Homo sapiens
tttcttagtatactgaagaatggtcatgttcagaatcttcctgatatgtttacatatctttatagtaatttctatgaataactacttttgggaaattagagttattttttgcctcagtgtggcatttttatataaattttgactcagaatctttctgcctgtcttctctttttatttttttctctgatattttcttgttactatctttgctgcctcttttgctttacatacaaatttagtttagaaatttcctctcacatatgatcttcataattttgagaagctctgttgaaaagatatatcgtcagctggtccaaaaatagtgagttatctcaattgattgttctgcgtcagttacagatccagctccttgttctactctttgcccccttctcactactgcacttgactggtttaaaaataaaaagatacattgtcacctttttgttttctcaaatcatgtatgttcattgaagatttgtatttagcctgttgatacttttgcttaaaaacgcttccatgtagaaagaaaatgctagtaagaactaatacaaataagtcagataaagtgctttttaaggcatttttttaaacaaaatcaagtctgtttttggggagtacaggttagtagaggtttcataaaagattgtttttgtagagacgagatctcactatgttgtccaggctggtcttgaactcctgggctcaagggatccttctgcttcgacctcttaaagtgctggaattacagacatgagctgctgtgcgcagccagaaatattgttttataatatatcaatatattaaagcattataattagttcctgattgcaaaataggtgattcaaaacttgcacttcttaacacttttgtttgtgtggagaactcttttttagttactgacattaattggctacctcatctgagagattatatactcactctaaaagagagattttgttatgaaaatctgtcttaaattaattttatatacacttctttttcttacagctcataaaatttctgacatgagctcttc

SEQ ID NO: 26688 - DNA, 1043 bp, Homo sapiens
ttcttttgaactagggctcttgtattaaaatgtttaaagtgaatgaggaaaacattttggaaaagacatttaaacataagcttttattttataacacttagaaagaaacatgtctagtactctactgaatatttaattttgtaatattttattagcttcagatgaatacaatcctacctcaaaccaagaattttttttctttttcttttttttaggtttgagctttttccttcactgctgttctgcgctaactgcttcgaaactttccatgcatttttttcagtagaagaacatctctgtactgtctcccattgcatatttcagctgtgacaatccctgcactttgcctattcattttatcacctgctcaccaaaaacaataaatatctctttaatttctaattgcagatttgctatttttgattttagaagaagggtgcatttcacttttttttattactgttgttttataggcatgtggagaccccaaggcaaaaccatcctatcttatcgacaaaaacctggaatctgctgtgaaattcatagtcagaaaattccctgctgtagaaacccgcaacaacaatgtaagttatctaaatttttctattgcttaattttaagcatcttttagagaaacagtggtcaacacagtgcttatagtagctcttatttacctaatttttaacattttgatatacagattatataccttaagggtttttttgagacaatattcttatgtccgagaccggaaaaaaataactcttaacgacattgccactttattacagcaaagatcttagattactatatatttattccctttcaaattgcaacaagagtaaggtaatagatatgtatatattccaaattcttgtgtggatacttgggatatttttgtttcttatagtcataaacttcctgttgaagttagtaaatgtctgcatagagcttctgttgttttaagtagttagctgtatttagttttaaaatgtgtttgtttttctagtattttcataattgacaatgatttctaaagatta

SEQ ID NO: 26689 - DNA, 1760 bp, Homo sapiens
cttgaattcctgatctcaagtgatcttctccctcagcttcccaagtagctaggagtacagttgtgcaccaccacacccttataatttttttttctcttaaagccctgagcttacttctctacaagctaatttaaaacatttttttgtagagacagggtcatgctatgttgtccaggctggtctccaacttctggctcaagccccttagcccccatttctggaattacaggcgtgagccactggacttggacaaaatgaaattctgttctttctgttttcagtgtaagaaggaagagctgctcatttatatatgtgtatgtgtgtatacacacatacgcacacacatacttgtttggttatcaaccaacgaagttgtttatatgtttacattcttaaacagtaaaatttgtggttgtgggaaatggatatggtgatctgtcattttcattatatgtgatagtccctaatagaggaatggatagctaaatttttcaatagttagaatatgaaagacaacacatatgaaaaaactgaacataatttggaatcactttaggattttgcactacctcaagcatgtttatgacacttgatttttattatgtgattatgtaaggcaatgctaatctatagctatttgtgtttgggcaaatttttagtatgtgattattattcttagctattatatttggggagaagaatataaattggaagattttaagaatattttaaagaaatgatagtctactcaaagaaagttggatatattttaatatttatgatgttgaaatggaatttacatagtagtaatgtcagtctggctaaagattatgaagttctaaatttcttaagattttgttttatttaattatatttgagaattaagagatttcttactgcattcctatttccatttggaaaatataggaatgttaacattgatttttatactttggcatggtaggaagttaggtgatgtttgaaaaatagttacaatttgagctgaaatacaaaagtcatccaataacaatttatttttattctcggctaccgtttctttttaaggtatgtaaaatttcactgatggttttgctcctgtttttatagctgcatgtagtctttattttccttctttctagtattattttaagttggtttagaaagagcaccaagaaactgacctgattgtacacgtacacagtagtgtttatatgaacagtataaactctataaatttattttatactaaaactcgctacttagaatacctttaaaattgtagcaccatataattctaatcttgttctgttattcatagtctgcagtgcataagttttcttctgaaacgtatatcatagtttgacaatcattgtttacacgtaattttctctctttttattacaatgcttccccagcaaggacaagtttggaaggtttgcaaagcttttcaccttccctctgcccgcttgcccgctttcagatcagtttcatgtttcataacttctctttctgcaatccacaacatagccatagtaaacaatggaaaactataaaattgcagtagtgtatttcctcacacatggcagacagatgtaactttccaaaggacacatccttttcaaaatgcaataaaaagaagttaaatagaaatgttataattttagtaattccctaaggaataacatctcgctagcaagcagttaatttaatgtcacgtaataaaacaggaacagtattcaagattatattctgtattgtaa

SEQ ID NO: 26690 - DNA, 1064 bp, Homo sapiens
tgtcctcaagtgatcctcccacctgagcctcccaaagtgccaggattacagttgtgagccaccatgcccaatcagccttcttacctgaattatttgttatggttctttgccaggatatattttacctagctgataacttttagtcatgtcagtttatttttttcatagacttcttcttttttgcctaagtattccccatacaagtgtctctcttgttattaagcaaataaatcaagtaagtggattttagaaaaaagataagatggggcctagtacttctgtatgtattaacctcttatttttaattggcattttttgggagctcttggtatgccaaatactctcgtaaagtctacaggtaacactttcatgtagtgaacataaaaactttttagcataggttgtaattattatctgtttaacagttgaagaaactgaggcacagatagaatgacttgctcatgggtacacagctaagtgatggtgccaagattttaaacatggacagcctgtcttgaaactcaggttcttaacaattaggttaaactctgtacagttacagcaaatgtagactttaggctgtatttaggctgtatttagatgtttaggcttaaagtgaataaaggaaatatttgattgagagaggggattgtatttaatagttgcataaggaagttaacactaacttgctagttgtatatatatattatgataaagactgttactatgattactattcatattagacttggataattattatcatcattatagctattattaaaaagcagctagcatttttagagcacttatgtgcttatcattttgctaaatgctttacatggtttctttatctctcttctaatccttataataaccctgtgaggtaagtactaatttccccattttacagacgaagaaacataggttaggagatattttgtaatatattccaggtcccatggctagtaagtcatgaaaattgaaactcagccagttttattccagaatatttgtttttaacctttgagacatactgcctcccaattaagtatgttagataa

SEQ ID NO: 26691 - DNA, 1033 bp, Homo sapiens
cagtcagcagaagctggcggagaagctcaccatcctcaacgaccggggcgtcggcatgctcacccgcctctacaacatcaagaaggtgcgcacgggccggggaggccgcggcggaggcgggcgggcccgggagggatgaagggcaagggaggccgtggggtgggggcggcaggaggcgccgggtgtagaaatctcggcgtcgccgcccgaggcccggcccggggtcgcctggatgcgccgcggcctaatgcggagtcccgggcgcctctccctgtggttcgccggccggccgaaggcagagaagccatttcccggctcccggcggcgggatcgggcgctgggcctcgcacggggtgggggcgccgctgggagccgggagctgtcccctcctcggcgcccccgcccccatgatggggcccataggaaagggagggtggtgggtgggcgaaattctaggtgggtaggaaaacttgagtgttccatattcttacggagatggcagcagtgaacagggattacaccccacatccccattttttggtgtgggaatgtgggtagagaagggctgattggatgaatcccgtatcccctccactttgccactttattttagattgctaaataaaaagccattgagagtgtgttgacgatttgggattatttcattttgaaggtggagaggagggggaagtgagggtggaaccaattttctgaaatacttctaggctgtgagtcactagaactggaataacaaccttctactctttcccctgtactcctcctcatgttagattttccaataccatttcttaaagttcggtgtctgtacaaaataaaaaccgtaaaaatgttgcaattgctgctgatttatagcatagtctgataatttgagcaactatagctaataggcccatttaaaggcttttacatgtcctcagtacagtaaggagtggaagaccactggaagtttagaaaagtccatgtaaagatagaacaaataattacattcattatcgtaggacaaaacaacaaa

SEQ ID NO: 26692 - DNA, 1057 bp, Homo sapiens
gtgaaatcctccagcacctacttttgggtgagattggaaataaactaatggagataagactattccgccaattcagaagtagtgaatgtaaaacccactcctgttatatgaagataaacacacacacactcacacacacacacacacacacacaattttgattcacagaaaagaatcagatttgctatttttatttttataacatgcttattaattttacttgctgataaaatatccataatcaatgtttagacttaaaatgttttagtagatgccaaagtctttttgaaactaaattgccctgggattgacatatagtttcctaaatctttcagaatcacaaaacaaaataaaaaatgatcaaatgataagcaatgctttataaagtagtaaatatatttgtgagtgtgtttcgttttgttttgcttaatgctgacatataagtgataatattactctaaagcaaagctttttaatggacatttcaattatgacttatatcttaattttatggaccattgagaaaacatttgacaaaaagtaacatttttaataacatgtattataaatgacaatctgggggattcttacctttacttatatcaaagagcttagataaagcatcaaattcttttgttacaaattatttcagaattgattcttttaaaacacatactacaaaaataatcatatattttgggagaatctttgaatatagaactttaagacttttaagaggttctttgttctatatccctatgctacatcaaactactcctgccaggtgacaagttagtctactttagcaccagagaaatcaattcatagtcttcccacaccataatcaattgcacttattaattctccagaactatgtctttctgtgtaatctaaatatgtttcattgaacccaaattggccttaacataagagaagaaatatatatgttttttctgagtactaaaactaattacagacattaataatgctgtgaagtcgtcttttaagaatttgtgccactgtagaatgattttaattctcaaatgaaatgtgcact

SEQ ID NO: 26693 - DNA, 1089 bp, Homo sapiens
tttatgttattgaggttccaaaattatatctttttacattctgtatccattagcataaatttattatctgtttcatgcatttgtcttttaaatcctttagaaaataaaaagtggatatatgagctaaattatgataatactattttttatatttgttaatgtatttacatttgttaaaatttacataatttcatatggctctgagttactgtctagcatcatttcatttttctttttaacttgaagaactttctttagcatttcttgtcaggtagatctagtgttaatgaactccctcagcctttccttgtcttggaatgtcttaatttcgcctcatttttgaagaacattttttgctggatgtagaattcttgtttgacagtatttgtttttctttcagtcctttaaatatatcatctcactgcctcttggcttgtaaggttactaatgagaaaatcactaataatattatgagggttatttgtacatgatgaatcactttccttcttctactttaaagattatctttgtcttctgacagtttgattattatgtgtcttgatatgatatttttgtgttcattctgcttgaagtttgtcaagcttcttttatttgtgtatgtatttcttcaaatttaggaagtttcagcccttgtttcctcaaataatctatctgtttctttctcaatttcttcttctggaatttacataaggtgtatattgttctgcctgatggtgtttcaaaaatcccttaggcattgcttacttttttttcaatcttttttccttttggtctttagacttggcaacttcaaatgacttgcattcaagttcactgattgtttcttctgtctctccaagtttgctattgaacttctccaatgaatttttcaattcagttgttatatttttcagctccagaattaatttttaatttttatgagcacataatacttgcacatttgtatgggttacatgtgatgttttgatacaggcatgcaagtgtgattatcaagtcagggtaattggggtatccatcacctcaagcatttattactttttgtgttgtgtgttaaggatagtccaattc

SEQ ID NO: 26694 - DNA, 1098 bp, Homo sapiens
gacaaacccacagccaatctcaaggggattatatagagatattaatagaaaataatataaaatattagaaaacaatggatctagaaacccaagtgggaattataaataaatattttaagatattctggcagtattgagctatgtgagttaatgagttttacagaataacttaaaaatgatgaattaacctccaggctgatttaagctgatccattacacaaaggaaaatatgaggtaacctcaggtgcctgtttaccaaaggcttttagaaaacaatgtaataaagatcatcttagtcattctaaagtaagaataaatgtcataaaaaagagaaagtgagaaatgtgaattatgagaagaaattatacttttatttatgaaattctaatttagcttggaattaatacttcttttacttagataaagaacactacataatgcttatgatgtgtaagagaaaacaaggtaggaatgtatttaaaatttttattattttatccttatgctacaaaaaattagaaggctttaaataatacatcttgtctggaaaagcatttatattttggataaacttagtgttctggaaaccatgtaaaatgtctaggtacttaatgtttataaaatcttagagaagtcaaacttgtgtatataataataatatacaccaatatatttatacatctatatccgtctacttacctgtctctgtgcctctatatctgtatctatgccctcaaagagacaagataggatgtaaacattatttgaataaaatttataatgcacagaagcatttatttaaaattgtcatatttcaataataggcagaattattttcaaaatattaactggacaaaggatttcttaatattctcactgagtttgtcatggttctccagagaaaaagaaccaacaggatatctatctatctatcatctgtctatctattgagagataaaaatatatttattatgaagaattggctcacatgattatgcaggccaaaaagtcccttcatctgttgtctataacctggaagcccagagaaatcagtggtttaattccagttcatgctcaaaggcttgagaatcaaggaag

SEQ ID NO: 26695 - DNA, 1037 bp, Homo sapiens
tcctttttctctgggtttaaatttgagaaggctatagcttatctcttaacttttcacttgggtcttagtctactcaggtttccataacaaagtaacatcgactgagtggtctaaacaacagaaatattattttctcacaattctggaggctgaaagtccaacatcaaaccaatttggtttctggagaggggtcatttcttggcttgcagttggcttccttctcacttatctttcctcagttcttacctcagtgtgaaaccacctcacctcaggattttataaaatcaattaagaaaaaaaaatccagctaatcacagcagcaatcattatgccaacttgccttctggctcacttacttgtagagtcactactccagtataatgtggcccttgtcacaagactcttttcattttctattctataaagtctaagacattgtgagatgataagtcttctattggagcttctttcctaagttcttcatactaagaaaactacagatgccagctggtctggagggcctagtaagaacctgactcataaagaaatgcagttgctgtttcttgatgatttcatgtcccttatcctaagcaatcgatgacctcaaattttccagcccctcactctccacaaatccccatgaaaacccttgcccagagccccttgacagaacagatttgaggcttgagaattcctcccatttcctcattgggtgacttgtgattattaaaccctttctctactgcaaccctgctgtcagtgtattggtctgttgctgtgcagtgggcatagaaaactggcagtcctgtaacaagcagttgtgcagctgagggtggaagtaggggtggtaggagaagagaagaattttaaaaaaagaaaaagaatgctttctctggtgtctcctaatcctactggattaaggccacactcttgtgacttcatttaacaataattacttccttagaggccatatctccaaattcaaccacactgcggattagggcttcaacatatgaatttgtagagattctctgccc

SEQ ID NO: 26696 - DNA, 1050 bp, Homo sapiens
ttttctttgtattttcctacatacgtaatacaggtcagtggttttcaaccctggttaagcatctcagtgatctatgaagctttaaaacgtatggtgagagaggccagcatccttacccattcatactgagtttcaaactgagtctgaatctcctggggtggcctctcattttcattttgaaaaatcttcacagacgatagtgggactgaattaattaacactctttaggttataaataaaaaacttatcatgcactaccttgtaaaagatgaaattattttaagcataaaaaggtctcttatagaaacagagtagggatgtggccagagtccattgaaggtgctccatagagggcttctcttgcagtctcctttctggtcccctttctgtctttgcaagccagcttcagtcttctctacctttaaatgtaagcatcctatctttctcagcttccgggtttacgtggtctcatcacaataaagcagtcagacttactcttgaatcctttactgtctcccaggctagagtgtaatggcgcaatctcggctcactgcaacctctgcctcctgagttcaggcgattctcctgcctcagcttgctgagtacctgggattacaggtgcccacgaccacgcccagctaatttttgtatttttagtagacacagggtttcactttgttggccaggcttgtctcaaactcttgacctcaagtaatccacccacctcagcctcccagagtgctgggattacaccgtgcctggcctgaatcccttagttctgactgtaagttacttaggggaagagctcatttgctgagtttggatcaggtatcaaatcttagcatataaccatattttacaattattactgctcctaccatgggtggtatgagggcaaaggggctggattggtgtgaagaagctgggaagacaaatctacaatgtcctttataaaggcatggctatgattcagaatcactggataatttggttaaacaacaaacatttactgagctcatagcaggtgtcctactcggcagggaataaaaa

SEQ ID NO: 26697 - DNA, 1040 bp, Homo sapiens
attgtgagtgtgaggtatgggatacatttattgagttgctgtttaaaatagaatgatcagaatagacccaccttgaaggtgatattcagcttgtatcagatacttcaatattttagaacaagtcagtagtaaaaggttgactggttcatcttgcaggcaaatttaccatggaaaggtgagcattataataacttttaagtatatgagaacgtttacatttgtgcacacacactagtgtataattatctcatagatattatcttagaaggttgtcgttgttagctcatttacatgtgaaatatcagactcagagaggttaagtgacttgtctgaggtcaattgattagtgcttttggctctaagttctttctttaaattttgttaagttgtctatctctcgtattgaattttttactagccttttagatggctgttgtgagatatcacattttatcacttccagacttagtccgatttcatctaattactttgaacaatgaattattatttttaattggaaaagtctagttgtcattattattactctgaccatagagagttatttcatataatcattcatatttttaccatttaatgttatgataatattcataagctttagcataggcagcccatttaattggcactattgaatgtcagcacaggcataaaaatgcaggtgagtttcttttattaaaagtgccccaaacagagtcacatgtcaaatgtaataacaatctcatatttctgacttacttgcttatgattgtccataagccagtaataggttattcaaagtcattaaaataaattgatttgaaaaattacattcagtaaaaatgcatgtagaaagcaacatttaattcagagtaataagtatttttgttttgttacacataatgaatgcatctaagtaaattcctacagggtcttattaaatattttcagtgatgattgctagatgcttagcatgattttctgaagtatatgaaatagagttagaaactgtcttggagattataattatgtggcatcgcaca

SEQ ID NO: 26698 - DNA, 1044 bp, Homo sapiens
gacttcaagcctcttaggaacaagagaaaaagaaagatcaaatctattggaaccagtgttgatgaacttactatgatgcctatatttttaaaaagcagaaaacatctactgataattcgacttggaaaataatttttttaatcagcattttaaggtctcactttctgtatcaattttaaatgatgattttgacttatttacccaaagtattacatgatcggacttcctctttatgatttgaaattgtagttctctgtctgtagagtttatttttaaaatatctctgtgcaacttgctttttaaaacaacagtacattctttagggcagttttaggttcacagcaaaactgaacagaaagtacaaaagatcctgtatacccattaacctcagacatgcacagctcccctccctcactatcaatatcctgcgccagagtggtacatttgttgcaatcaatgaacctatattgacacattattattacccaaagaccatagtttaaggttcactccttggtgttgtccttcctgtggattttgatgaatgtgtaatgacatgtattatagtatcctacagagtagtttcactaccctaaaaatcctctaaactctgcctactcacttctccttcccttgacccctggcaaccattgatctttttaccttgtccctagcatctttatcagactgtcttgtgcagtatgtatgaaagaggcccttttcagataggcctctttcacttaataatacgtcattaagatttctccctgtattttttatggctaaattgttcttttcttggtagtgatgaataatgttcagttgtctggatgtacccccatttaactatacattcaactattgaaagacatagtatgaccccatacttaatgtaaatataacctgattccctttgccaagaattgtattttgaataggcatatgacacttctctgaacaagatatgaggtgatgtgcaatgactggtttccaagcattatttcctaactcttagtaagggacataaaggaatatatagaactg

SEQ ID NO: 26699 - DNA, 1029 bp, Homo sapiens
gtaaatgttattttctttttttttgaggtttatgattgatccttggcatgtgtccccttgtgtattgctctactaaaaatagcctaaaaaagaattttcccctcgatgtggagcttctctttagttacaattctactttctccttcacttgagtatcagtcttcagagaactaccataacaaaggagtggatacagatatacgcaaaaaagtctatgagaaaattagtacattaaatttgtgaaagctcatttaaagtaattttctactaacaattttaatcaaatgtattaatcatatttctatgcttagtgatgttaaataaaaatttaaaaggtggcaatcaataaacagagataaaagcttctcaagaataaatgaaaggaagtaataaaaagactcactaagctgaattgcctcctatcaacagcagctgataaaatattaaaagatttgccttgtgtaatgtctctggagagctgtcttactgatgtacgaggccatgattgacaactttgagactttgctggaagcgacaaaagtatatctataatattatgctgaattgcataggtctttcttcttaaatgaggctagaaataacataccaccaagtgtttggcttttaggaaattgagcattttctttagttctagctgcagtttaatttcctcagaattagacattatgcggtatctggaacgttaaaaaaaaaaaaaagcaaaaacagagtattgtacctaatgatatgtcaaataattttggaggaattaagaaatcactggaagaaattacatgggtgggtaatggtttttatgtcacaataaataattagtaatatttactgacacatttcatgtgcctggtactgagctaaatgatttatgtgcattgtttgtattaagcccccaaaattctgtggtatatgtaatgatatttccatttttcttgagataaggaactgaaactcagaaaagttaaggaacttgtccaagattatagtaagtggcttagttcaattttgaatcta

SEQ ID NO: 26700 - DNA, 1029 bp, Homo sapiens
tttatgtaggagaaaaagaagtgttctataagaagtttggacaagactctgcaagaagttaagaggtactcatatcatccttcattatgcttaaggggtatgccattcaaagaaaaattgtagaatatcagactttaagaaagtaaaatagaatttagaaccctgtaaaaagtaagcattctggtgctgtaaagataaatttataagcatacagatatatttgtgaagtttgtatataataatttaaaattcttttacaactttaatggtttgtatatagggattttgaaaaatatgtgtgtatatactttgaaaattgtgtaatttaaaagtgcaaagtaaaatatgactgttttatgagaccactattagtgccagtagtgtagtctttgatataatcaattgtagtagtaatttaaaaaataaagatgaattccctttaacatttgagctatgttaaggattcagaaatgcttttctttgcttttaatttaacagctttattgaaggaaaattgatatgcaaaacattgtgcatgtttaaagcatacaatttcataagcttggcttatgtacacagcagtaaaaccataacaataatcaaaataatgactattccaaaagttttgtagggtcaatctgttatccctgtctccattaaactacagatctgatttgtcgtaatagtcttgttagcatttttctgaaattttgtatcactaaaatcatacacaatgtgttcttttattttccggcatttttcactcagcaaagttattttgagattcatctatattatgtatattagtggttcattctttcttcaatggcttagaattccctttgatgaagaggaagtttacattttgaagttgaggctttccaagcattcatttctctatgggatatacacagaaattaaattataaaatgtaagttcttatgtgttgttatgtagggcatagaagttggtaataaatataaaattttacctttttaatactttacaagctgttatcactttatatat

SEQ ID NO: 26701 - DNA, 1023 bp, Homo sapiens
catgaggcagatctctcatgaatagattaatgcccttctatggtggtgagtgggttctcgctctgttagttcccggagagttggttgttaaaaagagcctggcacctctcccctctgctcgtgcttcttctctcaccatgtgatatctacacatgccctcttgatgagtggaagcagcctgaggcccttaccagaggcagatgcccaatcttgaactttccagacaccacattgtggaccaaataaatcttttttcctttataaattacccaccctcaggtatttctttataggatcacagaacagactaagacagtatccaatataagtctttgatagattgttctatgaagttaaatatcttctggactgcactcctattttgatgttaatgtttaattgctgcctttcttagcattgaatttttcgtattttctttttttgaattagtgagttttgtgggttttttcgctccaactctttagagccagatctcctagtctgggtcttgggagcaaggtgtgttcttagctgttctgatcatgcagtttagttttgtccttctgcctttttgcctatattgttataactgtcatagttacattcagcagattggaaacagtttggattcatcttccttaaatactatgctggttctgtcatgagtcttcccacctcttgacatcaggccatgtgcctgtttccagttaatgtttcttttggagcaatactgatgtccattacctcaccagagccaaacttgagatgttgcctgtctctggatccacagtgcagcacacgtgctgattcagtcccattaggcaggaaagttgtatttctggaccacagtaatttgtcttatatttgagtccaatcatagcactttagttttatatttttatattttacctattattactttgtttatatagtgtagaagtaggtgccttaaagcataaacataacactgttttgactggaatttgcctatttgacatggtttcttctcaaagtattacattt

SEQ ID NO: 26702 - DNA, 1027 bp, Homo sapiens
tcttattggaaggtcatgaaagacttcaaaataaaactaatagttattttatttcctcagaggtaactttttgtactgataaaaagcattggttaatattaagtttaatctaaatattaagctataatatctttattttaaattttactcattggacagagctcagcttctggagtaccataaaacataggtcattctcctccaaccccagaatgtccatccccacggcagacctagttaatatctgatcactccctttatatttcattttcccattgtttataaagctatatagctttcttagactttgttttcttcctttttcccacaagacttaaatctttgctcgcagtaaacatttattgctgcagtttgttttacttttatgtattttggatcagccatctaataaatactttcttatgtgtttctccccaagagctacagtttataaatacttcaaatactgcagtcaatgcttagtgctgtattttaaaacaaaataaaatggtcataaggtaacaactggtgtgtaaagtaattaagaattactccttctcttgagaaacgtatagagaaactatagataatagagcttgtgtagaaaaaacagaggcagaacttgaggtcaactgtcacgtaggaaaaaagaaccttacagatgtgttctttaaaacgctatcaacacctctatccctgtaccaaagaataaattagagtcaatgcaggagggaaatgaagacactgatttttaattttatatcaggaatctatttactcatttattgatctaacatatattttattgaaagctactaatgtgccaagcactgtggtaggagtagagatacaagggtacatgagacaaagagactctgctctcacatgtcttttgagttacacagatattgaacaaatacttaaaagtatgttaaatttgctctttcactcaattcataattaagtttaagcttttttgtcaggttaaattgttggtaaatatagcaaatccagatcattcacagtt

SEQ ID NO: 26703 - DNA, 1087 bp, Homo sapiens
aaattccttaatgtgaggtagacttaactgtggcaaaacagtaagaatttgtgtctgtggcaaaacagtaagaatttgtgtttggtttgtgtgtgtgtgtgttttttttttttttttttccagagaatcagtgtttggggctagcttttccaggcccaaatgagaaatcttggctgcattctttaagtgctctgcatcctaccgttttttttttttctaatgtgaggattataattcttcacagataattgtgagaaaacagttacagaaatccttcattgtataagtaattttaaaattggtcgttgtttcaacttctaacatagttcctggaaccaagtgcttaaaagctattgaattaaattgcatataagtgaaaatcattgttcccttcatgataaaaattctctcaccaaaatttatcatttttgaagagcaacttagtttttgttacgtgggttcctatattagcttgctagggctgccatagcaaaataccatacatgggtagcttaaacaacaaaattatatgttctcactattctggtggctggacctccaagatcaaggcattggcagatttggttcctcctaagacttctagagagaaggtaaccacctgcaagctaaggaaagaagtctgtgtcctcacatggccctttctctacacatgcacccctggtattccttccgcttcttataaggacgccagtcctattgaattaagttcctgttcttatgactttatttacctttaattacctttttaaagatcctagctccaaatatagccacattgggggttagggcttcaatatatgaattttagggggacagaattcagcccaccacagttactatagtataatgtatgtataaaatgtaataattaaaataaaattcctaaagtggaggagagacagttcagaatataaacattaaaatgtgctacgattttttccttttcaattttccagcagcattctgaggtaaaatcaatagttttcctcccaaataataatttttgagagatatataacttaattgatcatttgccaagtgagaaaggtgtgttgataatcaagct

SEQ ID NO: 26704 - DNA, 1026 bp, Homo sapiens
tcgtgaggaatgtgtgctttgccatgaaggaaaagaagggcttaaaaaagatgcaggtcaacaacaccaaggacatgaatggactagccaaggctgtcagggccctcatatagctcaaggaggtcaaggtcaagacccctgagggcatcagctacaagctcaatctatttgcctacattgctgacctaagctagggcaacatgtttatgtccacattgtgtagaatgatttctctatctttgggaacatacacaatattcgaattgctggattgaatggtaattctattttgagttctttgagaaatcaacaaactgctttccacaatggctgaactaatttacactcccaccaacagcgtataagcttcccttttctttgcaacctcagcatgatctgttatttttttactttttaatgatatgcattctggctggtgagagatggtttctcattgtggtcttgattggcatttctctaataattagtgacactgagaattgtttcatattcttgttggctgtgtgtatatcttctcttcgaaaagtgtctgttcacgttctttgcctactttttaatggggttgtttgttctttgttaatttgtttaatttccttatagatttcagatattagacttttgtcagatgcatagtttgcaaatgttttctctcattctgtacactctttaatctgttgatatgctgtccagaagctctttagtttaattaagtcccatttgtcaattattatttttgttgcaattgcttttgggatattcatcgtaaaatcttaccaagttcctatgtctagaatggtatttcctaagttatctgtcagggattttgcaagttttaggttttacatttaagtctttaatctatctcgagttgatttttgtgtatgatgtaaggaaggagttcaggttcaatcttctgcatatagccagttagccagttatccagcgccatttattgaatggtgattcctttccccgttgctggctgtattagttcatttttacact

SEQ ID NO: 26705 - DNA, 1062 bp, Homo sapiens
cctgggaggcagagcttgcagtgagccaagatctctcactgcattccagcctgggtgacaaagcgagactctgtctcaaaaaaaaaaaaaaagcctttggattacaggcatgagccattatgcttggcctgaatataacctttctgagagaactaaaaattgttgcaccatatttgctactaatggtttttttcccctctatattgtcagagacacaaacatttcaggacagactatagaaagtagagatatatgagaacagcaatgattcatagcctcctcaaggaattaatgtgtggcaagctgagatctagaattgcaccttttcatatactcattttattctaagtgttaaataatcattaggtagatataagaaaggatcccaaattgtagctgcatctccactcctggtgaatgcttcaagatatagtgagacttaggttgcaagctggatatatcaacctgctagggatattgtggagtatccttcaaccagtccttaaattgtcaatgatcaggaccaaagacaatgtgcccattctccattagcaacttctgtatatgaatagaaatctcttcattcaaaggcacataaggagaaaaacagacaaatcatggaaactatagaaaaatactgtcaactactttgctatgtaaaaacctacctaacctaaatggatttacactcttaatttaaaattattttgttatctctcctgagctattgctgactagacttagctccatgtatgctctctgggcctgacattatttaggggcttaactggggcggaacatccaagaaggctcattcacgtggctgataattgaaactaacttctttctcactcaggtgtagtaactctgttttgggggcttatttccttgcttgcttccatagatgggcctatctttcttgccagtgattggttcaggcctaagccaattagtgcatagttttcccattggtcatggtagattgagatatggtttaataaaagtgactttgaatacttcatttgatggttgcagcaaacaagcttctctgtctttactcgg

SEQ ID NO: 26706 - DNA, 1105 bp, Homo sapiens
taaaagatatattaatcatccaagaactatcaaaaactatttaatatgtattaagacctgcatgaaacatcagtaacataagcatatattcttatcaaaattgaaaaactgttatattatgaagcatgtacctaaagcagatctattttaaagcataatgaattaagcctatttgtagcagacatggtaagtgtcttgttcatatctcttcaactcacttgagaggtaacatgcaagcaaacatgctaagcactgatccctattgcattcctctgcttagcaggtagagagcaaatgtgacccataatcaatgaaaaatgaaagttggcaaataaatgcctcagaactgtaataggcaacttctgagatgctttgtatgttccctcagagagtttacttctggaactgaaggccaattgccatattagcaacaaacattctttattgactttctccttttgctttcttacttggccattcttataccttactaattgggatcacaacccaaataaaccatgtgcacttaaatcttgtctaaaggtctgctttgggaacccaaagtaagatagtatttaaagaagctatgaggcggaactcaggggctcatgcgtataattccagcactttgggaggctgaggtgggaggacggcttgagtctaggagttcaacaacagcctaggcaacatagtgagatcctgtctctacaaaaaataaaaaacaaaaaaaattagtcagatgtggtgatacacacctgtagtcccagctacttgtgaggctgaggtggggaggatcacttgagaaggagtttgaggatttggcaagctatgataacatccctgaactccagcctggatgacagagcaagaccctgtctcttaaaaaataaaaagctataaagtttaggattttatttatttttaagtatttcttattttgactatttttttttaccagaataatttagaaatgaaaaattttgtttgatatctttgaaaagtatttttaaaaattatctgactcaaggaatcttcccaccttgggcaagttgaaaaatataaaaatgactatacctagagggccaacagtcacctataataaagc

SEQ ID NO: 26707 - DNA, 1030 bp, Homo sapiens
atgaagacatcacttcagcatttttcattttcaaaattctgacaaaacttttgtcaaaattcatgaagaaataaaaagtaagttattaagctgtattagaaaatcatttaatagtagagtaaaataagcactaatgctcagcagttaactttatccaagttgtgcatatataactcaataaatctaagtctggaaatgaaatagtggagacacaaaaggacaagctatacatttttttaaagtcttgacccaaatatgaactcatttgattcaaatgtaaaatctcatgaaattcaagccaatagaaattccacttctttcctggccaacatagtagcaccatggaacagttgaaaaccacattttcatgtgtttgtaatttatttcttttctaccatctgcatgtggcaaacaattcatcacagttgcaagctgtcgttttgccatctgcatgacaaaatggagaataaacttaactctctaaaaacatttgtgttcattggttgtgctgacatatctggctgtcatctagaattttgtcactgtaaagtggaatggatgctgttggctcagacaattggcactgtattgagataatagccaatatttgtaactcacttaaagcaactaaaactaaagggaaaggatgagcaaacctattttaagttcctctgtgtaaatgagtagctgggacagttgtaagaagggagtggctcagttgaataagtgaacagattagagtactatatacttagattctaatccttgttcttcctctttttagcagtgtgacttagaagcaagttttgttatctctaagttccactttttatatctataatggaagaatgtttttaatcactcaaataaatatttattgagccttttttatataccagacactaggtgggttccaggagtacaatggtaaacaaagcaggtatgattgtttatctatggaagattatagcattgagatgaaaatgaatacgtagaatagcaataaataaatccattattttcaaatagg

SEQ ID NO: 26708 - DNA, 1047 bp, Homo sapiens
aaaaaagttggaggactgacagcataggacttttatgataaaggtacagtaatcaaggccgcgtgatattggtgaaagaatgcaaaaatagaacagtggaacagaacagagagcccagaaacaggcccagatcaatataaccaactgatctttgacaaaggagcaaaggccttacaagggagcaaagacagttttttcgataaattgtgttggaataatcggacattcactccctgcccaaaacgaatctagatagagactttacactcctgacaaaacttactcaaaaatggatcacagacctaaatgtaaaacaaaactaaaacaaaaaaaaacttagtatataatattggggaaatctagatgactttgggtttgactataccctcctagttacaatagcaaaagcataatcaatgaaagaaaaaataatttggatatcattaaaataaaaaaatctgtgctgggaaatacattgtcaagagaatgaaaagacaagcaacagactgggagaaaatatttgcaaaagatatatctggtaaaagacagttatttaaaatataaaaagaacttttaaaattcaacaataagaaaaatatgtgatttaaaaaattggtcaaagaccttaatgtacacctcatcaaagaagatataaagatgacaaatatgcatttgaaaattatatgtcatcagagaaaagcaaattacaacaagaaggagacaccattacatacttattataaggtccaagatccagacctctgataacatcaaatgctcatgaggatatggaacaatgggaactctcatttattgattgctggtgagtgcaaaatggcacagtcacttcagaggacagtttgtcagtttcttacaaaactacatattcttaccacatgatgtagccatcacaactctgtagtgtttacctaaaggagttgaaaacttatgtccacacaaatacctaaacaaggatgtttgtagcagctttattcataattgctaaaagttgaaagcaaccaagatgcccttcagtaggtcaatgta

SEQ ID NO: 26709 - DNA, 1050 bp, Homo sapiens
aaggtaatttcatctttacaatgtttaataccaaagaaaaagtgatgtctgtggtaatataaaagataattgcaacaaaataagaatagcctccaactaacccatgctgctcagtgacagctggaaagactttggcctattccttcattcatccttcattaattcttaattcctaccaccattgtatttgttaaggaatgaggctttacatctatcttaagggaagtagatgagaaaacttaggattaaatacttagctaatatactcaaaatcacatcttagaggtggtgaagagggcatttaatctgaatctgccaaaaacccaggctcttttttgcatgcagcacctaccttatagtttataccatactgtttaaaaatgctttcataggttcaattatccatcaagcaagcattaaacatttaaacatatcaggcctaggtcataaaaaaggctttgtttctatcattaaggaaatcatagtatatgggaatatggacaatatgtggaatacatgacaacttactgtagtagatagagttgtgtgtgtgtgcgcatgcgcacgtgtgtgtgtgtgtgtgtgtgtgtgtgtgtgtgtgtgtgtgtgtgtaggagggatcagttctgcctggagattcattctttacttcctggaagagaagaggttacaactgacactaaatgaaagagtgtttacaagttgaccaagggagtctaaggggaaaggcaaagtacttgcaaaaaaaaggtagcattatcttgcctagctctcttcttttttcgctcttcttttttttctcactttcctcctccccttcccccaggctcttgtatatgctttgctttttaattttccttctctagtctctctagtgcctttctctaaacttctgaaaattcataggtatctttgtacaaatttttaagatgtcaattccatgggcatgcaagatgcaggaaattagtgagcaaaccaaccaaaagcttatttccagtccctacttgccaggggccctgggcaggatacaccctgcatcacctgatgaga

SEQ ID NO: 26710 - DNA, 1031 bp, Homo sapiens
gtgctggaattacaggtgcaagccacccacctggctgaaaaatgagtgtcttaatcagttttgtgctgctgtaacaatacctgagtctgggttacttacaaagacagaaatgtcttggcttaccgttgtggttggaaagtccaagatcaaggagttggcgtcttacaagggccttcttgctgtgtcatcacatagtggagggtaagaggttgggtgagaggcagagaaaggagtgggggaagagagagaggactgaattcatccttttataatgaacctactctagtgataacaaacccactcctacaatagtggcattaatccatttataaagctcaagcccccactgtcttatcaccttcttatacgctccacctcccaacactgttgcactggggattaggtttccaatacatgctttttgggagacacattcaaatcatagtaatgagttatttactcatatgcaacatttaatttatctttgttttagtgagatttaaaaattcctgatatatgaaaggcttgaacagcatatgacttttttgagcagataataatttaatacagaagtcaaaagttgaggtcaagttaaatgctttctttgtcataataggacattaattttatagtcaactcaatagattatttattttataactattatgcctattaccatggtatatgtttatcccactatttttatctccctctttagagaaatagacattaacctactatttgattaatatataaatgtataatttttgaatgcttattattcatcatcacttataaaatttgtatgattttactttgcttataaatgtagatataactcattcagaaattggtttattttaactttatcttaactatataacctatgtgataagtgatgctcatctactttttaatcacagatgaggtctaattaaaaatatgacatacctctattttttcctatttctcacaaattaaatatttgtttgtgaaacatttcaaggtaagagatatttttgtatgaattc

SEQ ID NO: 26711 - DNA, 1061 bp, Homo sapiens
aatgcagacatagcgaaatattgtcaaagtttgatgtaatgttctcagaattatcattaacatagggaaactaaaagtattaatcattgaatcaaaatgaaagtactacatgtgaaattactttaaaatggggcctaacggtcaatttagagcctcaattacgtttatcaaaaagcaggaaaaagttatgtgtgaagttaaaaaactagcaaagaagaacagagtaaccaacaaaaaagtaggaataaagaaaaataaagatgagtagaaaataattaaatggaaacactaaaaacagtaagttcaaaaaaaccaaaagatggttattagaaaaaaattgtgtataaatccttagcaataataattaatgaagagaaaaagtacaaatattatataatatttacacaataaaggtaacatgaactgacatatattaaaattaaaaataacctaggagaagtctatgaacaattttatgccaatacattccagaacctagatgaaataaataatttgtagaaatgtaagtgaggaaatttgaagaaaaattaggaatccaagtaaattaataaaaattaaataaattgaatcaaaatcttgctcaacaaaagataccataccttggaagtcttagagataaattttaccaaacttcccagaagaaagatatttctaacatctttattataaatatgtgtatttttttcagagggcagaaaaagagcaaaagctagtcaggtcattttatgaaattactattattttgataaaaaactaaacagctatggtgcaagaaaagaaaattatagaccaatttgtttaagaaagaaaataatcaggtcctagtttacatactctcaaatcagtttcaccattgtgtaaaactcaataatacatctcaacccagtgatacataccagatatacaagaaattttcaacatcaatagattaaagagggtggagtcactttagcagatacagacaaagaaattggtaagttcaacactcaccagaagaacaccattaacaaattaggagtggaaagaaactttatgaacct

SEQ ID NO: 26712 - DNA, 1019 bp, Homo sapiens
cacatacaaattaagtgtccaggattttgtcttaaaataagagaatgacagttactctgattgaagctgtgttatcactgctgtggtttagtatttctctgttatcactgaaaagaagaggtagaaactgcaattgacaattgagttctgttaagctaatcggaagtgcaaagtgagcaaattaatgtcttttttaagataattttaattgacaattataataaaaaggaaattgaatgttttcagtataaactgagagagaagactgcccaagttctggcctatagacagaagacttctaacagtaagaaattgataaatttctatttctttttagtaactgggaaagttattatttttatttaccataaagtgccacagcatgttatttttttccttctctttgacctacacaattaaatctatgtttataatattttttatactaaaaatgaggaggtagggtagaggaagtaccttttccttaccgatcctaggttcatggctgaggccctgataacaaaagatttatgaacaagagtaaaacatacaagtttatttaatataagtttcatgtgatacaagagccttcataacgaaatgaagatgcaaagaaatgggtaaacctgtatatttgttatgccgggtttgatgaagtagatagagtcatggagatgtatgattggataaagaagtgtgatttaatagtactaaactggaggaaatatagcaaggcctatttgttcagattcttccctatctttggagataagcatgttcttttcatctggtatagaaagggcacttctcacttgaggaccccttcaggggaagttcggaaaattcttcctaggttttatgacctgtttcaggggagaagggcagatcaaagagtgaccttcaagcttctgtggttttataaaattcctttggcctaaaatattttgggggtattatgccctgaaccccatcagtgacatacctaaaatattattctgtacttatgagaacaatgaaat

SEQ ID NO: 26713 - DNA, 1030 bp, Homo sapiens
agaagcttttgcaaagctttacagctcaaaggggcagagaaagaatttacaattacaagttttctaaggaaactgctgtaagaaaagggaggtcagaagtctgtataaagtttaatcaagctgccgggcgcggtggctcatgcctgtaatcccagcacttttggaggctgaggctggcggatcacctgaggtcaggagttcgggaccagcctgaccaacatggagaaaccccgtctctactaaaaatacaaaattagccgggtatggtggcgcatgcctgtaatcccagctactcgggaggctgaggcaggagaatagcttgaacctggaaagctgaggttgcagtgagccaaggtcgtgccattgcattcaagcctgggcaacaagagagaaactccatctcaaaaaaaaaaaaaagtttaatcaagctgaaggggatgttaaggctgccttggtcattttttttttttttttaatcagaactctttacttataagcctgaagttcagataatattttgatattgaagaagtgtagaactggcattttgatcttcagtgccttttgttttcctgttaggctagatgacatagaatgtaatcaagtaataattagtgataataaagataatagttcactttctgtgagctttctttgtaatttattttttaagaccactcctacaatggggtttgatgtattaattgatgaaagtatttcattgcctttctttttttttcaactttcatcaattaaatatttttattagcatgtagttgaattattttataattgtctttgaaataaatgggttgttttgatgtgagaatgatttaatttatttttactaaccttacacagatggatttaactaaaaccaaatgctctgcattctgtgagcttgcaacctctacttcccaacatctggtttatagcacattagttctataatctttgttgttgccaggaaagtacatgggatctacttcatttgtaatagacaagaaacatttttaatgccttagttcca

SEQ ID NO: 26714 - DNA, 1059 bp, Homo sapiens
ggactctaagtatggtttctactaaatgtgtattgcttttgcaccattgtaaagacaaaaattataaatcatatcatcataggttgggaaccttctataattctaatttatttacactgactggcttctgggttagtggcagaatggacaggtctgcatccctgagatattcaaaataatcatagctggatttacatatttttacaaatacaaatcactctgtttttcttttgtcctgttttgacttaataagttcccccccgacccagtccccccaactcccccagttctagcctaggaacattatgtaccacttcttggatagtactcaaagtgctacttattttgtgccactattagacttagaatctacttttctgtactgttttgtcagtataatttgggaagaggtatggagtcctaagctatcttgtttgagaactgtgcagtcttttcccagtggtaattctaattctcctttgtttccttccaaatgtggaaatagtaatttgtttctgtagtcttaattgtgcaaaacaaataaacaaaaactccaagctatttaagattttttttacagacatcaattagcataaaattagtgtatctatttgccagtgtctttgttctttggttctatttttgatacaagattgttcttcctcagatgattaaatctacttatttctaagatattgtttgaatttgaaccgatctatatgctctatttacccctcatcatattacctcctaagttttctaaatagcctttgccttataatttatgtttctggacttttccagaattcaaggcaatttcagctatttattatgccttttgaaatgtaaggtattggtgaatcaaacccaaatattatactgagttggtctccaagtcacaggaaataatgagaaatgttagacttaactttcaaagcctttgttatctccagaaggctgggtttagggtagggcttttatataaaattgtaacttcctggagattatgatcaactcatctttagttatatatctggatgatcagagttgtgaacaggt

SEQ ID NO: 26715 - DNA, 1030 bp, Homo sapiens
aagaggcaaaacaaatatttaagagccacttgtgtttctttttctatgaacttgcaattcttatcctttggctgtttttgtattggttgatcttttaccaatcaattgagaggaaaattttagttactaggaaagagttttctgtctctggtagttgtaaatctttttccagattatcatttttcttttaactttgcttatgattgttttgatatttagggttgttttttgtagctaaatatactgatcatttcttttatggttttaaaattaaaatatagtttaacagtcttcaattccgacgttataagtaatttctcctaagctgtctagttttttttttttgtaaagattgatccatttggaatgtatactgatgaatgttatgaggtaagaatctaattttttttcaggtagctacacaattattcccaatttattgagtagttcttgtttttctcacagatctcagaatttataacagcaaacattatttttcttgctctcaagactgtcacttgcagttctctagtgctaagtgggaccagaagggcttcgttctaagttcacaacctagaacctgaattaggttcagatctgttccaattgttttctaattctccttttgtatcagccgatacctgggacattttcttctaataaatcacaagagcagatgaggacaagccgaactacacagcatgtttttaatgcctctgtttatttcatattcactaacattgtcttggccaaaacgagtaacatgacaaagccaacatcaacaagacgggaaaatatactcttttttgtgggagatgttacaaaaacacatgactgaaatacggatgtataatttaattcaggtaaggaggctagaattgatgacaaatattcaatgtgccatagttggttttgcttttatatccaatataaacatcttttttaatagatgtgtctaccattttatgtttattaatattactgatttatttggtcttagatttgtcacattactttattgtgtcttccc

SEQ ID NO: 26716 - DNA, 1099 bp, Homo sapiens
attgtgaaacaaagtgtgaatattaaaaagaattgggtagaaatcttggaaattaaaactatgcatagaatatgctatacagggaatgagatttagtgatttggaagtgtcgtagcaaagtgtgattctgcattcattttttaaattattttttaaaaatagataatacagtcataaagtctttttaaaagattgtggtaacatatgcataacataaattttaccatcatgactaaccatttttaagtgtgcacttatagtttttagttaacagtacacttaaaatgtaagtttttaagtgtactgttaaccttaatagtacttaacagtagtgttaactatatttacactgtgtgcaacagatatctagaactttttcatcttttgaaaatgaaactctgtaagccattaaacaacaccccatttgttgttcccccttaacccatggtggccatcattctactttcagtctcttatgaatttgactattctaggtgcctcatacaagtggaatcatgcagtgtttgtctttttgtgactggcttatttcacttagcataatgtcttcaaagataatccatgtcatagcatgcatctgaattgataacacagtgttttggttcaaacatcaaaaaatattaaaagatattgagtaagcatcttgatatggtttgcctctgcatccccatccaaatctcatctcaaattgtaatccccatgtgttgagggagggttctggtgggaggtgattagatcacgggagtggtttcccccatgctgttctcatgatagtgagggagttcacatgagatctgatggttttataagtggcagtttggccttcatgcccactctatcgcctgctgccatggaagatgtgtcttgattcccctttgccttcctccatgattgtaagtttcctgaggcctccctagtcatgggaaactgtgaatcaattaacctctttttttaataaattacccagtctcaggtatttctttatagcagtgtgaaaagagaattaatactgatgtagtgggacactgtaataaagataaactgaaaacgcagaggcaactttggtactgggtaacaggga

SEQ ID NO: 26717 - DNA, 1029 bp, Homo sapiens
ctgccattgtgaacttaacagcttctcaataattaaaggctttattgacgtgatgggtggtgacattgaaaaatgtgattttttgacattatatagtgaaatgtgtcagcttttggaacatctctataatacagttacttaactaatgtttttaagtgatgaatgtatatcaaatcatacatgggtaaaagattcattcaaaatataagatggatcattggattataataaaacagagtatgaaaggttattagagttgcagattcaacattgcaattaacctttaagatatacctacttgtcgagttttgatttagtatcaaaaaacaatttccccaatattcgaaaatattattaaattattcctctcatttccaattacatatttgtgtgaggctagacttttttcatgcttttttaattaaaataacattgcaaaagattgaatgtagaagcagatgtggggatacagttgttttgtactaaaccaaacattaaagaaagttggaaaaatagaaaacaaagccactcttcttactaaatttcttcattgttttgttttttcttttctgtttctttttttttaaaacatgtcattcatattaacatttaatgggtttattattgttgctttaaataagtacatgttttaaatatttcttagttttaatttctaatgtggcaaatactaaatgccataatctatataagtgaatgatctttggagttctccatttttaaagtcttcaagcatcttgagactaaaagtcagaagactgctgtctttactgtattgataatggcagacagtctttgttttaagttacctttcacaaaagaatgtcagccttattttgttctagtgtaaaatttttggcatatttatacacaagttatatgcatttcagatacagattgccatattaaacattttacctgtcagtttttttatgccaaaaggatggttgaaaaaaaagtgcaaaacataaagatggtcttaacatcctgaattcaataattttgccagat

SEQ ID NO: 26718 - DNA, 1054 bp, Homo sapiens
tcatttactcaactgatactcattgagctactgctatgtaccaggcattgtttaggtgtaagagatagagaattgaacgaacaaatattcttccaatcatggaacttacatttaaaagtgacaaatagaaaaataaataaatgtgtcatttacaaaagtgataataaaagtactacaaagatgataaaagtactacaaagaaaaataaataagtactacaaagaaataaataaataaaaaataaataagtactgcaaagaaaaatggttagggggatggggcttctggagaatatattgttattttatataaggtagctaggaaagtagtcatttaagaggaaacagggaatatagagaccctgtggtagaaacctgcttggtgtgtccataaccagcagagaagccgatgtaactcagatagactgggcaaagaggagtggtagcagaaaataccacagagatctccaacaatcagagaataaagagaggatacgactcatgcagaacttgtaggccattgtaaatgttttagattttactccaaatgaggtgggaaatcactgggggggggggggtttaatgtaatatattataaaatggattttcctgtctattgtgttgacgatagctttcaagaaggcaagtatgggaaaagggagatcaacttgaaggttaatgagacaacctgtgtaagatgtgtgatagcttgaactaaggtaatgataggtgtaatgttgacaagttgttagtttctggatttattttgaagacggagccaacaggatttattgatgaattagatatgtagtgtgtgagaaagagaggaatcaagaatgatttcaagtctttcagatgggcaattggaatgatggcgttgccatttggtgacttggaaaatactcccacaggagaaaaatttaaagttagataatccagagctatgctttgaacatatgcttattaaatatccaggtgaatattgagtaggtagttgaatatatgaatcttgagttcaggtgagaactctaggttgattattaatttggaatgaa

SEQ ID NO: 26719 - DNA, 1058 bp, Homo sapiens
ttaaaaaattgttttctgtatttagtgttgttttattccagccccttatttaaaaggcttttccctctgagctcatcattgatctggatgaggtgcatactcttttaacagtgtttattacatgtgtatgcgaaggtctgtagataatacgctccattaaactcttttgcatatgaaaatgtctttatttcgcctttacctttgaatgatgtgtatagcattcagttatttttctaaaatgttttgctgatattactttacaaacttctggtagctataattgctgtggataagtcagcttttagctgaactgtcattcctttgtagatagtctttaacttattctgaggtttttctttatcaggaagttctgaaatttcactataatacatctattttttaacatcatatttgaatttaatttttgatctgggagtttcagtttttaattcttgaatattcttaatcattgcctcttcaccattccttccgtttttttttttttttttctgaacctctcactaaacacacctgaggtcactctcaaatctgtttttcttgttccttgtttgctctttattttcattatctttccaagttctgggtgaattccccactactaattgtctctttgtctgagtttatttttaagtttgattgcattttttatttcaatgactatatttcaactttgaaagcatttaattaattctttttcatatctatttggttgtttcagctgtatcttattttgttttataatttgttatttttgtatgagattatttctgtgttaatctctgtgaatgcattgtttcacagataaaggttctaagaatttattttccttgcaataatttattttgcaattgtggattttgttttctattttccttaaatatttcttcatatgttttagaatattttgaggttttttttttgagatagaaagtatttgttcctctttctctttttaaaattcattgaagttcacctaacaaaatcaaccattttaacgtgagcaatccagtggtatttagtacattcaccatgtttta

SEQ ID NO: 26720 - DNA, 1003 bp, Homo sapiens
agaagaagtcgtctttaaaaaaataaaggtgacttacttctttcttttcttttttttttttttcctttttggcgatagatctttaaacaacgttgaaacaggaaaagtctcactctcctattgaaatctgattcctttagagtgtaagagtgatggcttatcacttagagtcacttttctgtgaaactttttgaatcagataactccctaaactgcggaataatgaactgggaaagaggactaactcgaatgtcagacacttcttttgtcctctgttttggctgtctgctatctcacagaaaacctggttaggaaattgatgtaaataatgtattttttaaaggaaacaaagatgaaaattctgaaaatgtgtttcctttttaaaagaagaactagagcagagggaaagataaatcaggaattaaaagttgcattaaagaaataatagaaaaatgcctaaataattattggttctgactgagaaagaatagctgtgcgaaagatgtggaaagtaaaattgcacatggaaatggactttaatacatacttcgccatattgatcagcgtttacccatgtctctcaattactgtcctttttatttatattttcaaagttgaaatatgacctgtttgcttgaatattaataaatatatgcactgaatgtgtttgcccataattctgaatactacatatacattttaagtatgactcattgagtatgcacagagaaatgtatgtgtatacacataaaatggcatagaaatttgcatatgaggtacacatatgatgtttactagtctgtaaatgagtgcatattaacactttatttattagatatgtatgggttctgtatttcagagatgatttacacaatgaagaaagtacatgcactttgggcttctgtatgcctgctgcttaatcttgcccctgcccctcttaatgctgattctgaggaagatgaagaacacacaattatcacaggtaaaatattagaagcaatta

SEQ ID NO: 26721 - DNA, 1050 bp, Homo sapiens
tttttttctaacagaatacccttatactttaagatttttaagttagtaagctacctttttgtcttttttttttttttttttaacttaggatacttctgaactggtaaggtgtgctcacaatgaggtttcccctaaaagttatttttctactttcttctgttagcaaagcagttgccgctacagagtgaatgcatttgggccatccgcaggttactgggtcaaggatttttgataggaagtctaggggttatcagcggcctcaatgcttttggggtattcccttgtttacactgacaacaagaaagtgttattggagtgttatagggttatggataatacctttaattatcaattataggttttaaatttaccttggcttttaaaggaatagggtacactgttttttttcttaactacttgtatatctctctctctctctctttccttgactccctctttgtctttctgtctcttcctgtcactttctctctctctttgcctctttccctctctgtctctttcctctatctctctctctctgctggtctttccttgcctctgtcagctgcttatgctgctgttctctcaaccactgtgaggcggatctaaaaccagctgtaaccaagtgtctatgtacaggaactggtttgcgtgccctggcttacaggttaccttgtgccatacctttgaaacaacggacccgtcaaggcttacttctgatgggaaatccacctctaatgctggccagtctatttcacataaagttctaacttttcctggtgtcagagtaacaccataatctcccttaaatcctttcttgaaatttttcaacatagttcctggtggggtgggcttactttgtgcctgacccatgcttcctcgagacaaaacaccacatgcacaccgcaaaacaaagaacaagtaaaaagggcacacagacactttcacagtttacaccaaaccagagtcaaaaccaaatcagagtatcaagaaatccaagccaggtcaaaaccaaaaccaaagtatcaagccatccaagtcaagtcaaaa

SEQ ID NO: 26722 - DNA, 1022 bp, Homo sapiens
tgtgctattaactacaatgcaattaacctttacttttcttaaaaagcaaagttgtgcaagtaatttgcctgctgtctctcagcaacgtgtcctccttttttgacactagtttgtaatgctagggctgtgactttgcagatttcatacctctgattcccttggcagctttttgaaagtattggagtgagacttgaagttattgaggaatggggattggaagaggagacaagacttccttcctgttttaaaatttgttttattcttgctggcttcaactctaaaatggcagttctcctaagcgttagttggtggcctccattgtggaagtggctccagcctccagttcctgttggcacttccagaaatgcctgaacatttccctcagagagccagcagcagccaacccaagcctcttccttagagcaccaggtctggtggctcctcctcctgttatccccatcttttcccatttatttccctaacctcaggcattgtagctacttcctgagttacctttatgtgactttacttattcaaccttctgacacctgtgaaaccagtttcttccattaaatcctctctgttggaaacaatttggtttctgttttctaaacttgtctaatatatctgtacatagtcatatatattttaaattatatgtaatgttaaaaatagtaaaagcaaataaattaattccattgtgtttctgatttatattttaaaaatgcttttttgatttgggcttttagcatgtcatatatatgtgacgattttgatggcttgatatggagtatatcttatgaaatgtatacatagctccaaatgtcaccaaagcaaaaattggtatgaacattgatagtaatttttccttgcaaaaggatcttatcctggagttccagttaggttttacaattactgaaatgacttgctgtctattttctatccttgtttagctcatactccattaaacagaaagcaaactaagagctggagagatgaagagacttggtcaacatcataca

SEQ ID NO: 26723 - DNA, 1051 bp, Homo sapiens
aagtgggcacgaacgcggtggacgctgtacagtcgccttcgtcggtagggaactgctggcggcctaggggtcgtcctgagagggaaaagcgggctccggctgcatctgcggcgccctgcgtggccgtaagagccaagtggcctcagaggctcgccccctacgcaaatcctcgttgtcttgccagggtcctgacgtgacgtgcggccgcgagaaggaaggggcgggttgggggaggcgctgaggtggtagcagcggcggcttttgctgagttttctctggcccagagcgctcgggctgtcggtctagcaggggggactcccctgaggggccgctgcgggtcgccgtcttcggaggcaccggcgagggcagagccaacagcctcttcacggtctgtaaggtcattgtttgccagtcgtgggcagcgcggcaaacctgctgggaaaaggttttctggttggaataggatgagtaccgcaccagctttgccttccagctgagatgtaaatttcaggcctccatcctgtggaacgtgggaaaactatcttgagtgttggcatgttctaagtatgacataatagtttaatgtatgataaatcatgggtgtttagacgaaagatttacacatataaattggaggctttagcggtcttagtgtaactaacttttcgtccccttaacccttgatgcctgttctatgggtctctagagcggaaggagcattatactccggaaacatttgctggaaggggttatgagaaattcctctctgtatgctaactccgtaatacaagcgtttgtgtattttaaaatcacagctgttccaaatataatctagcctcgttttccccctccgtcggatgataggtgttcttcaggacagttttattttaagcaattcttagtctcaagtaaacaccatcattaaaagaactgagaactattatcaattcttcctttggagtccatcttcaatggaaaggagaagggaaaaccttttttaaaaagaagaaagaaaactgaagtttttgatttgactagagaaatattcaga

SEQ ID NO: 26724 - DNA, 1070 bp, Homo sapiens
cagtatttaatatcgccactgatctgataccagaatctcatagtaggcagttaaatcttaaaaacaaacctcccgtatctgcatttaattgtatgtaaaagcttccctccacctaccaaggcagtcttcttccttggttcccatactgcttctttaactattttagcctttaaatgctaaattaggtttttctagttcactatagtttgcacatttaaatatttccattcttcacaagaattatgtgcattttaagcatggttgaaatttgctgccacaaccataacattaaaatttggagatcattgtagattcatgcggttgtaagaaataatatagagatcttgcataccttccacccagtctcccaaatgataacgtgtgtgtaactacagtatactggacattcctcccccttttttttcggagaagttacagattgcctcataatcctgtggggatactatgtggctatgatgagtgatgactacactgaaataggagaactagacggtttcatgataacctgatttttttaaatccagagctgtctgaactggaggattcagcagaacaacagtatccacatttaattatgcatgaagtccccttttctctaccttaagcaattaatttcctcccaaaattcaatgtggaggaggttagaaggcacatctggtccctctgccctcccctgcctttactttaaaccactggttttacctgttttgtaatgtggaggtttcactggcaattttatttcaagaagaaaaaaagaattctaatgtttaaaccactggattaattcagtaggctttattaaagctaagacatgaggcttaggaagttagaaaatatccaccccagtcatcaaaagtatattgctgtccatccctggagatttaatttaaaagaaaaatagaatacatataaaaattttgcaggaaaaaagtatgatagaaaaatgtgcctagtataagaatttctgtcaattcagtaagtaaaatctagcaatattagacaaaaataatggtattaacatttgtatcttctcttgacagttttaattg

SEQ ID NO: 26725 - DNA, 1029 bp, Homo sapiens
gactatgtgaaaagaccaaacctaggattgattggtgtatctgaaagtgacgggagaatggagtcaagttaaaacacacttcaggatattgtgcaggagaacttccccaacctagcaagactggccaacattcaaattcaggaaatacagagaacgccgcgaagatgctccttgagaagagcaaccccaagacacataatcttcagattctccaaagttgaaatgaaggaaaaaatgttaagggcagccagagagaaaggtcgggttacccacaaagggaagcccatcagactaacagcagatccctgtgtagaaaccatacaatccagaagagagtgggggccaatattcaacattcttgaagaaaagaattttcaacccagaatttcatatccagccaaactaagcttcataagtgaaggagaaaggaaatcctttccagatgagcaaatgctgagggattttgtcactaccaggcctgtattacaatagctcctgaaggaagcactaaatatggaaaggaaagactggtaccagccactgcaaaaacataccaaaatacaaagaccaacaacactatgaagaaactgcatctaatgggcaaaataaccagctagcatcatgatgacatgatcaaattcacatgtaaccatattaaccttaaatgtaaatgggctaaatgcaccaattaaaagacacagactagcaaattggataaagagtcaagacccattggtgtgctggattcaggagacccatctcacatgcaaagacacatataggttcaaaataaagggatggaggaatatttaccaagcaaatggaaagcaaaaaagcaggggttgcaatcctagtttctgataaaacagactttaaaccaaaagcaatcaaaaaagacaaaggcattacataatggtaaagggatcaatgcagcaagaaaagctaactatcctaaatatatattcaccaatacaggagcacccagattcataaagcaagtttttagagaccttcaaagaggcttagact

SEQ ID NO: 26726 - DNA, 1026 bp, Homo sapiens
tcaaggaagcacatggtcatcagatgaatagctgatcagatcttaagggaagggtgttttaggatacggcaaggaaagctataaaaattaaattagaaaatttatgttacatgcttagcccagtaactgacaaatagtaaacactcaaaatttaactattattaataattttaatgcagttttatatttttagaggttgccggatttttcattgagagtctcttgtatgttacaaaggatggccctttttatcctcatatctgtaacattcttctgttttgggtaaggatgccagagattatactgacagttagactatcatgtgagtcccccaaggactttttacaaatgatgatgatttattctcacacgtcctctttggccattgaagtaaaacagctggatagcataaaaatgtactgtttggtcactaatagaattctcttcataaactttataaattggctgtggaaatttttatgttgatgagctttggtcttgtttctcacactgttacagattctgtaaaatgtatgaagcatacaaaattgaagattgtctctgtaaactgttatgaaggcctttctatcatgtttggccaaagattcagatctttctctgtgttgtgggcatcctcagtcacattgagtagtctcatgcttcccttgagctataacaggaaggaaacatgggcatgtgattatcctgtctggaagggacacccttgattacagtggaatttaggatacgagagagctgatgcataacccctttctttgtcaatgtgttcaatgctagtatctgcaatgagtagacagacattctcagggctgtagaggatatgaaaaagaggaatatactttggggatgcgattagaagtgggtacaaaagataaataaccatctctctcatctggcagaggtaaagtatggtaagtgtaaaaacaatacaaagaaaatactcaaagaattgaaaggaggaagagcttacctgtaagaaaggactagaagcttttttatgaaggt

SEQ ID NO: 26727 - DNA, 1035 bp, Homo sapiens
agcttaattcacaaagacattttttaaatattaaaattcatgccctttgattgatcaaggaggaggcaggataatgtatttttttcccctcgtaccagagtttaatacaggctatatctcctttggcaaatcacctatcccgataaaaaacaaaactgtttttaaatctcagctctgtaatccttagagcttaaagataaaggaaaaaaaatgaccttctttttgtccattagtcaattacaggaagcattattctttccatattaccacgttatgaatctgatttcaaagtaagtattctaatgaaaagagaagcacttaactttttaaaaaaattccaactgactctgcaaatgaaatttttaaaccaaggtaccaggagaggaaaaagaccttatgttctaaagccaccatcatatgaaataaattattctgtcttttatgtatccgaatggtagtagttatatgccatccttgggagaactgaagaaatggtcactcaagtcattctgtatgttttgtgtttctgaggagccctcactgagaaaggctggcagagtcagaaaaaaaaaattcgtgttctttaaacagggtatagtcggggtttttttttttgtgattggggctttttaaaaagagaggtactctggaaaaggagacagaacatatttaagtcctacttttagcatgtgaaggagctagattctacattttcttaaatactctgatgagttaaatggaactaacactcaaatgccaccaaatccccccaccactgatagttaacaatgacagcatctccgactgcttcttgcatctttgctatctgcctgactccattctgagtgctttgcatcaattctcctgtaattctctttaatatgagataagtatccccagatttacagatgaataaaactgagactcagctcacacagcaggcccaagattgtccagttaaataaggagcacaagcaggatggaagccaggccagttcaactcaaagggcctcacttaacaccaaggcctactct

SEQ ID NO: 26728 - DNA, 1035 bp, Homo sapiens
gagtcagctcattctcatctacatattaatatttgatataacctccttttggtagaacaatcttaataaaggcatccctggttcagagaaaacttcagatttcaggtcttgacatttttgtctttgttttttgttttttttttgagagggagtcttgctcgttcccccaggctggactgcagtggtgctatctcggctcactgcaagctccacctcctgggttcacgccattctcctgcctcagcctcctgagtagctgggattacaggcgcccaccaccgtgcccggctaattttttatatttttagtagagatggggtttcaccgtgttagccaagatggtcttgatctcctaacctcgtgatccacccgcctcggcctcccaaagtgttgggattacaggcgtgagccactgcacccggccattgttttttttttttttaacaaatgaaggtaagtcatagagaagattaccactcactccctatccctagtagcaaaatgactgtatagccttatatgtatttgacttaaatttgaaaaacctttagaataccagagaaattgaaaactaatacttccctagtaccttgtattataaaagaaaacaaacaaacaaaaaacaagaaaaccccaagctacttaaaacaatattttttctgcatagtaggtggatctctttaacaatagtccacatgaattcatcgatacgccactcagaaaattgagccaaacagacctgttgtatactctgtaccacttctaggcttctcggggcatttgttgacttcccatggcctgaactgttaggaatattaagaaagaatggaaataattaccttcttcctcatctggcactgccagccactggatcagggcaaagagcagtaggatcaccaagcaggccatgccaattcctcggaaggttgcagcagcccctataaaaacaaacagcactctatagagtaattccaagaaatgcagatagcgctcatctaaaaccatcagttttctaaagatcaaagcaaaggaagc

SEQ ID NO: 26729 - DNA, 1027 bp, Homo sapiens
atgttatcaagtaagtattttcctcaaagtaaaagttttatagagtcacttaaatcagtgctactaaaagtgctgatccagagagacaaagagcttgcaccagaatgtcaatctgtacacttcttccctcatcaacaaagtcttgctgcaaaaatcgtgtcagctgaattaaatggtgtgcatagttgacatatttggtttatattcttgtgcaaactgaaaatactcagatagtaagaatttaggcttttcaggccatacagtagttgtcacaattttaggctttgtataccgtacagtccctgtcaactttgtcagtatagcacagaagcagccataggcaacaaataaatgaatgggcatggctatgcttcaatgaaactaagaagcagacagcagtctggttttggtttgtgggccatagcatgctgaatcctgaatcctaagccatttcagcagctcatcccgtcaaagctcattatcgtgtctgcttttataataatgtcaaaagaatgtaggcaagagcaaaaacagaattggagatatctttccttagagaccagaaaaccaaatgcctgaaatagttgtttcagatgccccaacatggagatagagggatagaatgaaatatggaaaattgtacataattatttaaaatgtatatgagtaataaagtgcacaagtactgccagtcaaggccctgggccaaatttggaaaaaataaatattctaagaaggtttcatttcaaaatgttgatatctcaacattactgcttagcagtaaggagttggaatattccttccctcattttttttcttcctccttttctgtcttcctcatcctttcctttttttcctttctcaacccagaggaaaaaatttccaggcaccattgaaaaccagtattacattcctgaagagtaggttcatagagcagcagttaaaacttgtggttttgccatttaattttctttcagtggttgccccatttgattttctttcagtgtagtttggagacaatacattt

SEQ ID NO: 26730 - DNA, 1130 bp, Homo sapiens
agtatcaatataaaagtcctcaataagatattagggatcagaattaaatactacattaagaaaggacatgaccaaatatgatttattataggttacaagggtagtccatgactgggcaacctattaatgcaattcactaaattaatagctacaaggagaaaaaagcatttacttccttccacagaagctgaaaagatctaacagaattcaatactcattcctcataaaaacattgaataagataggaattgatgggtacctctttaacacaaaaaaatatatatatctccattctagagacagtatcttacctaactgggaaaactccagtaagtcagaaacacagcaaggatgctgtgtttccactgctatttagcatcgtattggtggtattggccaatgcaattagacaagagaaaaccattagaagcataagaattaaaaacaacatcataaagatgttagctctccctgagttaacttgtaattttaatgttattccaataaaaataccaacaagttgttttctggagctacacaaatttgttctgaaatttatgaaaaataaacatgcaagagtagcgaggcaacttctgaacaagtagagcaatgaaatgggactggccctactagacagactataaatcctctatagtcaaacatccttcaagggttcaggcttatgaataaaaaggccaatgggaaagaagagaaaaatctagaaggaaacccgtgtgcatatggaaattcatgtgataaagttggcagctcagagcactggggaaaataatggacttttcagtaaatgctgttaagacaaatggaaagctaactggaaaaaaagtgaaagcaaaaagtggacccatacttcactctgatcatgagaataaacaaatatatcagcgatctaaaagttaaaaagaaaaaaaggaaaccttgcaagtgctagggaaatgagtgaatgatgtaatgtcaatagggaaaggctttctaatataaggaaaattccagacatgaagaaaagatgatacaattgcacatataaaaacacccccgtagaatctgtgctgtatagggcactgtgtaagaaaggttgacaagcacagtttttgctgtgtgggggatttaac

SEQ ID NO: 26731 - DNA, 1026 bp, Homo sapiens
tagcaaatattagatccatgaataatgagaactgacagtattttcatcacttttcatttaatagacaagaaaataagatggtatagaaattaaaacactttgtatagagatttcaaaaggagtgacaatgatttgtttttttccattggtatgtcataaagcgttattttgttattttgttattaattccctaggtttatagtagtttgaatcttgcatgtatatatatatatatatatacatgcaagattgcgtgtatatatatatatatacacacacatctatatatacatatatatatatcacacaatcaaatgttagaaggaaaaatatttctttttattttttaactttgaccatctaaaaatacaaaattttagctagagaggaggaataaattctagtgttctatgtcattgtaagacagctatagttaacaataatatgttatatagttccaaatagttcaaaggaggatattgaacagtcccaacgtgaagaaataataaatgtttgagattcggattaccctgatctgattgctatatacatcaaaacatcactatgcatcccataaatatgtacaactattatttgtcaattaaaaataaaatatgataaattatcaggtgtacaaatttttctatattgtcggatagagaaaataataaagcacaaacaaaactttttgtaaggatttatttttctaaaagtataaatgcttttatacaaaaagcggtattttttctttccagattattgttatttgccaaattttgggccaaatatgaaatttgattttcactcataatttccacactagtaaagaagaaaatgaaacatatttctgctttaatcgatgctcatatattcaaaaaataattgtggcgtgaatacaagttttctttcttttcattcctattttacaaggctatgagagatagaaaatgttaccaccaatcctgtctgcattaagcaataattaatacatatttacagtgtagttaattttaatttaaaataata

SEQ ID NO: 26732 - DNA, 1048 bp, Homo sapiens
atttgtagatgcagctctcctggagagtgcataagcgcactggggtgtgggaaagcaatctgcaaagacaccagaatttagctgccgtgagcacaggtcagtacattttaatgaagaacatctgctaatcttgcttgtctattaagagatagattgggtttatcacaattcagaggtaaagagaccagaactacagagcttggagagcaagttaatgatgacaagactttgtatttaactaatttatcttggaaaaaataaaagaggaagctatcttgtattgttattcctttagaagatatgctcagttgttaatttgatttgtttttgaaaggaaattagtccaaatggcaagagttcccataatgattcaataaaattttgatgaattaaggaagaataatcagtcaagcaaattatcctattaactgaattgtaactgatctttttgtggcatctcagagtaaaaatggcaacagttaatacttttgtatagtgcttactctgtactagtgctgttccaagtgctattatgtataacaatgcaatgctaatgacagtccctcgaagtagagtctaactattactattcccattttacagtgagaaaagtgaggcacagaaagattaagcagtttgcccaaagtcagctagtacgatttcaaatcaggactcaaaaccaagcggtctggctcctaccagtttggctccagaatcttgtgttctaaaccactgtgctatattctctttccagattctgaaaggcagatagccagagattcttaaaaagctaaaaattagaaggataatgtggactattcattagtaatagcataatggaataatggaagagtccatggaactcctatctctggtctactctactatgacattttctaataagggaaaaggaacaaagactatttttacatccattttagatattgatagcactaaaatcagttattgcctgggcataaaagtatatgtgcaaacatgaatgagtagctctttaggagcattagattgcatgtaatacacaacagtc

SEQ ID NO: 26733 - DNA, 1049 bp, Homo sapiens
tccaaatctctttgcattagatgagaagcaagagatatgtgataagatgcgtcagttagatcgccagcgggataaaaccaagcaaacagatggcagccccatagcccttttcaacatgtttattgatcattgccgcagccaactgcatgtggtccttgccatgagtcccattggagatgcatttcggaatcgtcttagaaagttccctgctcttgttaactgctgtaccattgactggtttcaggtattgtcatgtacattttagatagacttctagaaatgttgaatttccactatcatcatgacttattttatagattcccaacctgtagtttaccccaaaatattgtttagcagaatcttctgatcagttatatcttatgaaattataattcaagaaattataatagaaaagtatttattaagaatatatgtgatcactaacttcaatatattataggaagtgttatgataaaattgtgtatcagagtcctgacaggaagcacagagcaaccttgaacccttcaccgaagaaagcataatgaaggaactgttcacagaggggtaggcagggttaagggaaccaagaggggatgttggaacactcaggaagtggtaggtggagcaatagcaggaagtgttactataaccgtgtatgaaagtcagagcttagagctgtggatataagactgcccaacaggaataggaaccagaaacgtagaactcagctacggctggaaaggaagggaggatcaaaatacccctgtgtctcacttcttccaccctgcccccaatctcttcccattagctaaacccaaaggagttaagagcgagaaagccagagtgacctttttttctgtggacttcagtactgggaagtacagagcagagcagaaaaaggcagcgaatggatggggggtaggaacgaggggtggggaaggggagtagcaaaggaagagtaactagctagatgtgaatagtaatttaattctcccttctggctttaacagcatatcacaatgcattctctacctgtgtggtaaaaaatc

SEQ ID NO: 26734 - DNA, 1028 bp, Homo sapiens
ttctcaatttaacctttttctcttcttggcatgtgaatggaaaaaaaatcacattattctacaaagaatgtctatttcatatgtttcagaaccttatttggagcccttcatttgcaccttggaggagcacctgagggtccagctggcactgggaagactgaaactaccaaggatttggcaaaagctgtagccaaacaatgtgttgttttcaactgctctgatgggttggattatttggctttgggaaaattctttaaggtttgaattaactcctcatttctttacaacaggataactgatcagagatggttatttatgatgcaacataattgaatacaagtaaaagatttactgtagcttaagtaaaagtaaaaattgaagcactatctcaataattcttaaaggaaataaggttatagcaaaaccctatttgcagagaatctctactttcctctccagtccctactgtaacaagtcattattactggttggaataagtggtgtcccttaaatacattggagcagataagagtttgagaacgattgcatcgtgtaaaggtcgtgggattctaaagacatctttaacctacagatcttgttattgagaagttattttgagttagtaatttacttttatagacatattctaatcagtcatttcagtgaacttgaaatcttaagttttattatttgtttttatttttaaaaatttatttttatacattatagatgtacatattttcaggttacatgtgctaatttaataattcctaaagatcaaatcagtgtattactttttttaaattctaagttagattcttgtcagtccatgagcttcaaaaggtagaattagagataccaagtccctgcctataaacctataaacatctgattattttagcagcttgtgtctgtagcctgttattccttaaaatgttaggtgacacaactgaacacaaaatgatccacttgaaattatatatttatttatgtttttctgtaatttttcaaagcacattttattttat

SEQ ID NO: 26735 - DNA, 1059 bp, Homo sapiens
gaaagtgtaaagcaccatatgtttgcggcttctaactggcttactgtgtttagattgctcaattgcaaattatatctagagtgtgaagtgtcagtccttgtgactttcaacttgggactgaaatttgagcccaccattattttttcttcttatggctcctaacacttatgacatattttttcctcttggcagtcactgagacttctgaatccccagcttcaacccctctaaagaatcgctgcccattccatcattcattcattcaacaaacattactgaccacctactgcagtgcatgctagatactgttcttgatgtggttgtagcagtgagccaaagaagtaaaaatagagtaatagtattttccagagtgagttactattttatcaaatagaatatacttgtgtattcccaaatataccttacaaatttgatgaataactgtataaatgtttttgcatgatgttctaattttatcttatttagatttaatccctcctaaaaaaatctgtggattttattgatatttctgctttatggatgactataagtaactgaccctaagttatattgcaggtaaatagaagagttaggatttatgtttcgataattcattccaaacctaggaatttttcactgtgcctttttcagcattctttaaatttcagttctttagaatttatttatttatttatttgtgttctggccccaagtattctgcatgaagctacagtacaagatggtattggctaagaatgcagattcttactcatattcaagtttgttaacctaattgtacttgtttctactgtaaaatgggtgtagtaaccatgtacctcacatgtttgtcatgaggctcaaaatagatgatatatatataagaattcatatatatgaaaacatatgtatatatatgaatacatatagatgtacatatatgaggagagcacaaagagctactatttttattatctttattgcagtgaaggcaggctgcaacattattggatcataaagcaattcagttttatttattaatattcaagtattagtacccag

SEQ ID NO: 26736 - DNA, 1030 bp, Homo sapiens
gagccgagatcgcaccactgcgctccagcctgggcgacagagccagactccgtctcaaaaaaaaaaaaaaaagaaagaaagaaagaaaaaccatcagaacaagagatgagtactagaaggaccctttggggccatctcctttctatatttgccctgaggtgtccctcgttggtcttcctaattccctaccgcctgctgatgagctgatgtggcttttcgtgtgggagagaattgacaggagattctcatacagtggtctgctctgtagttgaacctcaggtccaagactctcttcaactcctttcccctctgccctctcactcagttctatataactgtattttaaattttcactttattctgccattgaatctgcatgtactaacaaaaacatgccagagttaacccatcacatcaccatattaaagattcttaaatgtcatataccttttggattggtctttactttgggaggtgggtaaatttatcataaaaacagattgtattaaaaaaagggactcttctgtaattaatgtaaaacgtcaagctattgaaagaatttgtgactttaatggaatgagataatcattccacttgcattccatcagcattgttgctgctgacaacagaggacaggatagtccaagtcaaatctactaaaggtccttgagagctatttcacaagtcagattttaaagtgtctatttgtgagtgacagacattgcaacagttaaagaatgcttacccacttttccttggcctcaagagcaaaaaccagtttgggctcatttctttccaccagcctagtccatgacaccatcccccctcacctggactactgcagtagactgctggctaaatcccctgcttctcctgcatcccaccattcattcattctgcactcaacaaccactgggatctgcaaacatctcaaggtcacctccctcccttgcctacaccctctggtggcttagaataaaatccagactccttcccaaggacttcctgtggggccctggtctgcctcctc

SEQ ID NO: 26737 - DNA, 1050 bp, Homo sapiens
gaatgtgcatagtgactttattccaaatagtatagtatggaaagagggggaacaaagtaacttcacagtagagaaacctgacaaacactatggcagtcaggtgatcaaggtcaacatcaatagccacaagtcatgttgataatatgtaccctcggtatgatgcgtgagggtggcactttacctctgtggtcttcctcccgaacacataatgctagtccaaccatgagaaaaatgttagacaaaatcccaactgagagacattgtacaagataccttaccagtactctttaatactcccaaggtcatcaaagaccagaggagcctgagaaactgtcatagccaagagggagacatgacaattaaatgtaatgtggtttcctgtatgggatcatggaacagataagggacattaggtagaaactagggaaatgtagataaagtatggattttagctaataatagtgtatcaatattggtttattaattataacaaatgtattatactaatgtaagatgttaatctgtgtgtgaggtgtacaagaactctctgttttatccttgcaatctttctgtaagttaaaacctattctaaaacaaaacatttattaaaagaaaatatgcagtcaggattcggggagatttaggaaatgtttccctggacaatttgtttccttgttatctgataaatgacagcccccagggtaaattttggtatgtatatgcctctgtctgcacttgaggtcattagagtaataagtgtatatatggggttaattctgtgggaagtccaaattagtagtggcattggtatatataaagtattattttgtgttgcttatgtcaactgtgttgtctatgagggactaatactttgcaattcatattgatatcatttcagtgattatattttacctgtcaccatcaaagtctttatttacagtagattagctaaagcataaagaaaagggagtttattttaaagaataacgcatcggccgggcacagtggctcatgcctgtaatgccagcaccttgggaggccaaggcgagc

SEQ ID NO: 26738 - DNA, 1040 bp, Homo sapiens
gtcaagtttattcacttgctttatgacataactcagctctttgcccagctatacaaacagatctccagacagattattggtcaatagccagttttgtacaaattcattagtaaaatctcaattcatttccctgtctttagtattcacctctatgcagataacaacagctaacacttacgtgggatctcttatgcaacagtcactgcataaagtgccataaacacactaactcagctcatccacacgtgtggccctgagctctcaccccaattccagccctgtatttttcagtctctagggcattttgttagctgtcatatccaagtcaatatgtataaagtttcacatgcccttgtccacctgcatcacttcccacactcttcatagcatcaggtagatagacttggctcaaatcccaaatctactgtcactggaatatgacttggacaggaaactgcaccttcattttctttagttgcaaagtggtgtgtgatggtcctagtaatacccgcttcgtagacttgtgaggatttctcaagatcccctgtgtaacgtgcatcatctgtaatgtacagcaggcgcttaacaagtaagacctgttgttattgtttaaatacactttatattatcatcatgcttcccattcttctttcttgcttatctattcttttcccagtgcatatttcacattgtagatgtttctctgagtcactcactccagtctagtccttatcccctcaggcttcaattactgcaacaactcctaactggggctctttcctcttgcccacccttaatttactcaacacactctgaaaataatttcttaaataaaacaccatttgtatgttattcttctgctcaagaacctataaaggcactgttcactgcatcatgcccaaactcctctgctaggttttaaaaattcttgtcataatttggctccaacccttctgatcaatttcatttcccatttactcccagcactcctcctccactctaggctagcttggttctcttggtgtcttctgaacacacat

SEQ ID NO: 26739 - DNA, 1027 bp, Homo sapiens
agaatgtaagctccatgagggcaggtggttttctttttgttgaattcactcatgtatcctaagatcctggcacaaagtaggcactcagtaaacagttattgagttaattagtctttctaccatctcgttagtccgattcttcatgaagttatagcctaagtttctcctttctaaacagtttcagggttgagggtagaggtggcacattggtgtatgttaataggaagaagttctagatacacagctctacactgttgtgacatttttcacattaaatgaggcattttacattcaatgaaacatacctaataggttttaataaataggcttccaaccaagttagtttcatttggaccaaattcctaagtaattaggaaaaaaaacaaaacccatgtactacagtagttattttaatctagacaagttatatttgcatttatattgcactttacagtttgaagagcagcttataccaaaatttccttggattttcaaccaccatgactggtctgaacaagtattttcagtccccatgtgctccagttccagagaagttaaaggactagcttcagatcacaaaagtgattctctaagacctgccacccaggtcttctagcgtcctaccttaggtgagtagagtgctctttttaataagaggcttttggtatcaggtttaataagaggctttggtatcagggcatagggcttaatggagagggatggccaatgatacatgattttaggaagaagttctgcatgatggaaaattaattaccttctagtgagatcatattttaaaaatttgctttaatatctccatgttcagtggtttgttgaatacttttcattaagtaactagagcttttatattctgattaaataaatgagccggggcttgtaagatggggaaggcttttactgtcttaattaaataagattatgatttattgcatatgagatacagaaaagaaaccatcagaccaggcacaatggctcatgcttgtaatcccagcactttgggaggcta

SEQ ID NO: 26740 - DNA, 1036 bp, Homo sapiens
ggaggtgtggtaggttgtccttgaaatccagtatagtctagataagttgttttcaaatgctgttctgaggcaatgtttttatgggcttagaaaaacatagacaatggactttttattaatgcataggttattcaacgtaaggaattaaatggtaaagtggtgttaattgagctagtttaaaaatgtcattgataaataaaagttagttactttatgtcagtctgcaaaatgtttttggaattttattgttctttgaaactcaaaagttttccattcatgcttttagtgacagcaacaattacttagcatttactcttttttttctagcagtgggaattgtttctatgcagattatttgaactgctcacatcctttgatggtgtaagattgcatgtatgtatgtatgtatgcatgtatgtatgtaagtatgatgaagtggtccaacatactgctaatgcttacagtgtctggatgtcatgggatggggaagtaaactttgaatttctttccctcccctcccataaaagcaaaacattgatattcacagagttgtatctactaaaaaaacttgaagttctagagttgtgtagagcattttcacatatatcatctcatttgattcttcttggggtcacagaggtagcaccaatcatttgagaattttaattattagcaaaaggtttatataatctttttttttcttgaggaggaacatttttggggatgcttgatattggaacaaaatatgtggtagaactttatgtaaaatagaatccaagactcattattccatctgctgtcatatgtgtatagaaaagagtataaatgtaatacacaagggtggtttgttgtaacaaagtcatgtctctttgaaaggtcatacagcataatcattaactcagaatgattcagaacagtgaggttaaaataaataaaacccttgaggaaaagaactttctggaagaacttgagttctttaaaggaggtgttgagggtttggtcaacatcaatgtttagtttatagtaagtactttct

SEQ ID NO: 26741 - DNA, 1026 bp, Homo sapiens
taatgccatgaattaagaggagagcaagatggaaggctggaaggtcagttaggctattgctgtaatccaggtgagaaaggatatggtggtggtctggattctgtagggatggttatctgttaggcataatataattagtaggcagaacttcatggagaggagtttggtagaaattattttaatctattactgtccaggcctgagcttcataacattgtatgcatccctagaattctaaatgtccatacatttatttaatgagggttgcaaagtcaaatatttaccaaggcttgcttagcacaggaaaactaaataaagcaggcttgctgtaagagtgggaggttttggggaactggacagcacatgcaccctttaaagaggacaagtctattcagttgcaggcaagtgttgccatttgtaaataagaattattgccagatcttctgatttttttctttttccaaagtatcttagattcttatatgaaatctaatttttacatgttgatgtctaagtaaaaattaaacaaacttgcaaacagaatactgagtaggccaacattgttagagccaaataaaacaagtaggagtgggattttgtttgcctgggttcatttgtgacctccagctaataactgtattagttagggcaggctgatatgacaaagaaatccaataagaaaatggccaaaagaacagagatgtttgtttcccatgtgacagttccagtgtgagtgggccaggtggccagacattgttgctcttcatggtcactcaggtgctttccaaattgttatctcctagtgtagacttgttcactggcatggttgtagctggccatcaccatgtctggattccagccatcaaaaagggaaggagagtatggatgaacatgagcacactccttgtcctaaggccctggccatctattcataacaatgtaatatttatgtatgtttgtgtagcattcttttctgttaattttttaaatccttatagccatttgagcctggcatgaggggtatta

SEQ ID NO: 26742 - DNA, 1029 bp, Homo sapiens
agaattacctaacaaacagtgtatttatttttaatatgtgataatgatcttgtggtatatatgcaaaattattcctacaaaaatttgtatattggtctgtcattttcctttcacattctatagtgaattgttcccaatgttgaaatggacgtgtaagcctttgagctagcttggagtcgaatacactatttttcactcacaccatttattcatctttgtatttaatactatagctctgtcaatatcacatgaggcagtttttcaaatacgtataaacagaggttgcttattattaaaggaaagacaaagtgggactctttatgatgtcatgaccatgataactaagcacctaagaaaattatttaaaatagttatgtggtaggcagaaagacaaataatttagttttttacttttcaccagcatgtatcttagctacctaaactgaaacatgggaggctgggcttaattcaaaatatattgctccaaggcaaataaaaaaatgctttatctatatttgtggctttctgatgaaaaaatagagaagagcttgttcaataacaggacatggtttccatttcaagatcacaagtaatataagactgggcaagtagtacgtatggaataaaggacatactgctgattgataaagtaaaaaactttttttttgtttgtttactcatctccactatttattatatgttcttgaatttaagttaacagtactttttagatgatatactgttagcttaataacaactttttagggaaaaataaatgctgtaattaatgtgcacatgggttagtaacacccagcccaattgtgggagggaaacaagtagaggcttaggatcaaagaaataaaattgggacttattagaaattcttaccactgtttctactgtacacaaaactttctagttgagcagaatttgtatgcaataagtaaatatattgtatactccatgtgtataatttaaatgcattttatttttataattgaggttaactgtttcacatgcttaattttt

SEQ ID NO: 26743 - DNA, 1022 bp, Homo sapiens
ctgccttgtacatctcaacattcttgaaccacttaatgtatgtaacaagatctgcacttgagatacttcagatcaaatgcaccatctcttttctttagatgtcaagaaattataacttgaccctagagtttcacatttcttaataaccaaggaggtaacaataagcatcaaataattttgtatgaatatcttataaaaactaaaattgttttgcaattgggcttacagtaatttatttttcttttaaaataacaatctaaagatcataatttgagattgtctttagaccatttgagattgtcattagataattggtaataattctgacagctattcttttttgcggactttggaccaagtatattattgaaaaaaaaaaagtacttagcatctactttgtaaaccttaggataagatattgagtaaaatatacaaatccataccctcatgggttgggatgcttttttgttttaatgggattagataataaaataaatacataacatatacgggacattggctggtgataagtgttctggaaaaaaaaggaggaaaataaggaatattgggggcaggggaaagttgcagttttcaataggggatcaggtgacatttggctgggcaccatggtgcacacttataatcccagcactttgggaggctgaggcgggcagatctcttgagctcaggagttcaagaccagcctgggcaacatggtgaaaccctacgcctacaaaaaatacaaaaaatttagctgggtgtggtggcgcacacctgtagtgccagctacttgggaggtaaggtgggaggattgcttgagcccaggaggtagagactgcagaccctgtctcaaaaacaaacaaacaaggtgacatttgaataatgacctgaaggaggtgaggaagtaaaccatggggatatctaaggaaacaactttccaaaaacattagcaaacacagaagccctgaggcacaagacgttgtgctggttagacgaagagcaaaacagatgagctgtgtctt

SEQ ID NO: 26744 - DNA, 1009 bp, Homo sapiens
ggttgcctgttcactgtgttgacagtttcttttgctgtgcagaagctctttagtgtaattagatcccatttgccaattttggcttttgttgccattgcttttggtgttttagtcctgaagtctttgcccatgcctatgtcctgaatggtattgcctaggttttcttctagggtttttatagttttaggtcttacgtttaagtcttttatccatcttgagttaatattcatataagctgtaaggaaaggatccagtttcagctttctacatatggctagccagttttcccagcaccgtttattaaataggggatcctttccccattgcttgtttttgctgagttggtcaaagatcagatggttgtagatgtgtggtgttatttctgagggctctgttctgttccattggtctatatatttgttttggtaccagtaccatgctgttttggttactgtagccttgtaggacagtttgaagttaggtagcatggtgccttcagctttgttcttttttttcttctttttggctatgtgggctcttttttggttccatatgaaatttacagtagttgtttccagttctgtgaagaaagtcaatggtagcttgatgggaatagcattgaatctataaattactttgggcagtatggccattttcactatattgattcttcctatccatgagcatggaatgtttttccatttgtttgtgtcctctcttatttccttgagcagtggttggtagttctccttgaagagatccttcatatcccttataagttgtattccaatatattttattctctttgtagcaattgtgaatgggagttcactcatgatttggctgtttgtctgttactggtgtataagaatgcttgtgatttttgcacattgatttttgtatcctgagactttgctgaagttgcttatcagcttaaggagattttgggctgagacaatggggttttctaaatatacaatcatgtcatctgcaaacatagacaatttga

SEQ ID NO: 26745 - DNA, 1105 bp, Homo sapiens
agccactaggtttaacagtggaatcttgatttgcctaggtgacttctgggattactgtttgacaaataagagtaacattttatttcatttcagaatttacgtcacttttagctacaagagtaggaagaaggtaatcggcaaggcagaagagtatactctttgccttaggatagcgtaaactcaggctgagacatacccggcttatagagttcttctagatgtgtagactgtaaatgcccaaatcctctcaactaaagttttagtgattccacaaagcctctcatgtaaatttccagtgattccaccattgcacttgtgaatatgtatccttgttagtacccagggatgtcctcgagcaccagttttattttatctgccattgcatctggattccattacagcctctcagctgttactgcctgtggacagttacttctgcttactgcctgtagagagttacctaacttctcttctcagttcttcctcaggtcctggctattttggcctcagttgaagggagtcttgctctcatctctgagggttttaagtttgtttgatcccattgttgtcttttctagctttgagcatgtttttcagtattcatattttaacttactgagaacattaaagggaaatgataaactcgtggtggggatatggcagacaggtgcttgtttgtttgagagaagtagcagaagagataaaatacaaagtgctatatgtttcagctggagaggaaagagagagaatttattagattatatacttgtcccatggcataccacgtatatgtttaaatagggacacatctccctatgtttaactatacttataaacaactttgatacacattgcgtcttttattctgtcacctgatattttagtgtatctcaagttacagattacatgtgtccttaaactatttctgaatttggacttagttccatatacagaaagaactttagaaaattcattaatttggatcttctattgatagccataaatattatgtttatgtattctaaaacctctttgtttagttagtactgttcatgaatgtaacaagcttcaatttctcatttgtgagtagtacatttgctttttg

SEQ ID NO: 26746 - DNA, 1147 bp, Homo sapiens
gatttctgggttctctattatgttctattggcttatgtatctgttttatgccagtactaaactgttttggttgccatatctttgtagtgtattttgaagtcaggtaatgtgattgcctccagctttgttctttttgctcaggactttttttgctatttgcagtcatttgtggtaccatatgattttatgattgtttttcctataccagtgaagactctcattggtattttgatggggatttcattgaatctagacattgcttgaggtagtatagacagtttaacaatgctaaatcattcaatccatgaacatagatggaattgctttctattttttcgtgtgtctttttcagtttctctcattggtgttttataatttttcactgtggagatattttactttggttacatttattcctagatataatttaattgtaaatgggatcactctcttgatttattttttttgttttttgtttgtttatttgtttttttgagatggagtctcgttctgttgcccagacaggagtgcaatggcatgatctcggcccattgcgaactctgcctcccaggttgaagtgattcttctgtctcagcctcctgaatagctgggattacagccgtgtggcaccacgcccagctaatttttttgtatttctagtagagatggggtttcaccatgttggccaggctggtctcaaactcctgacctcaaatgatccacctgctgcagcctcccaaagtgctgggattacaggcatgagccactgcgcccagccctcttgatttctttttcagatttttcattattagtgtatagaaagttactgatttttatatgttgattttgtatcttgaaacttttactgagttcaaaaaaaaacaattctaacagttttttttggtggagttttcaggtattttttaaatctaggatcatgtcatctgtgaacaaggataacttgaccatttcttttccaatttggatgtactttttttctttctcttgcctagttgctctggctaggacttctagtactctattgaataagtagtgaaaacagacattctcgtcttatttagatcttggaggaaaagctttcaatttttttttcccattttgtataatgttagctgtgggtttgtca

SEQ ID NO: 26747 - DNA, 1161 bp, Homo sapiens
ctcctttctaatatcaaatagacttcctaattatcaaaaagttgtatttatggtagagataattaaggatgaatttctttttaaaatattattttggcttaaatttctttagctggcatgatatggtaataagatattctacttaattaaatattttaggtagtaaaggagcaaaatagcattcactcagctgtcaaataattagatatgtgggaaagtatactaaacagtaacactctactttaatgcaatttgcatggtggttcaaaagattctttaagatcttgagtgcctttaaggtttaccattatagaaaatcaattattatgcttagagatatgcataagtgctcaatttaataaaatgtaaaggagtttagaggaaaataaccttttttttcaataattgttttaaactaggtgacagttaagacttccttttcacaaatacttggacaggtaagagagattcctggctggttgattatttactgctttatgaatagataactctaaggaagggttgtagactttttccataaggggctggataatcaataattttttgcagaccacatacagtatcttttgctactgccactgctgtagttgcttctgtcttcttccttttttctttttcattcttcttacacttgaataaaatccaaaaattattcttggcccacagaccatatttgcccacccctgctttaaggtgattctttcatgtttgatacatccaaaaaatgagagctgatacctgattctcaaacaaattaatatttttgcctaaatgaatttcatggtttgccatggtggcccccatctgtaatcccagcactttgggaggccaaggcaggcagatcacttaaggtcaggagttcgagaccagcctggccaactggtgaaaccccacctctactgaaaatacaaaaattagccaggcgtgctggcatacacctgtagtcctggctactcaagaggctgaggcatgagaatcacttgaacctgggagacagaggttgcagtgagctgagattgtgccactgcactctaaccttggcaacaaagggagactccatctcaaaaaaaaaaaaaaagaaagaaagaaaaagaaaaaagatttcatgttgctcatactataaattcatagtacaataaa

SEQ ID NO: 26748 - DNA, 1028 bp, Homo sapiens
acgtgcccagcctaatactttcttatgattagattgaggttatgtatttttgccaaaataccacagaagcaatgaggatttcctactatatcatattgagtatacgtgatactgatatctctaattactagttatgttaattttcctttcttggttaaggtggtgcctgctagatttctctgctataatgttattgctttttccttttgtaattaataaatatctggggtgacatactttgagaatatataaatgtcctgtttttctttagaataacccactatttttagcatccattggttcatctagtacttagcaaatatcactctggtattctacatttagtggaattcttcctgagataaagtagacccttctcccccattatttatttattcaatttttatttatgtcactatggactcagaggtatctattttattcattgggctataatccaattctatcattatatatatttttgcttaagttattctagctttgaatattgggaacttttttatgttggctcctgtgccctttaaatattttttttacattttatttatgaaaagaatctgtgttacttggcaaaactttaggatttttatttttccccctaccctttgttttggtacaaaactacccagaacaatacagaaatgacaattctgaatcacccatatcattgaagataagaagcttgtaaaataaaagatctaccaagaaagtacacctttctgaaattggaattatatacctgacttttttaaaagcagatagatgtgattggaagtaataaaatttattttgtctagagtttattgctgggagattagatttttaggagttaactccatacagaagtgaaaacctgtaaataaatttttaattattggcattgtcttaatgctaattaaataatcagtatgtttttaaaaacttccttgatattctaagtaatacagtactttgaattcaacaggattgtcttcaaggaaagtggtgttaaatacaaatggcctata

SEQ ID NO: 26749 - DNA, 1046 bp, Homo sapiens
tatttctccagcaggcttttatagtctaattagactatctttaataaatacaggatttttcaaaaagatataaaacaaaatcacattttccttttgactatgaaagtattaagagacatagtatctaaatctttaactaatcttgaattagcctaggctgataatactttcatccatcctttactgtccttcttatgcaaacacctaaagctaactataaaaaaactgctatgaatctgttgttctagaaatggccctcgaataatttatctattaagttaggcttgtatatcaagttttctcagcatagtatctctccttgagaaattcttgccacttaagtataggcagaattatagtgtaatagatgatactttctccaaagctgaggtttatagacttttattttccactcaaacatcaagtaaagatactttactgtaaatttaacttactttttctaataaatcaatgttttatatttcagtttgttgtagattgtgaattctttaaaaaagagaaaagatacatacagcttcctgtaactcatcttttttcctttggtaagtactttgtttttggaaagcataagaattgcttttatttttaacagagttgcagtaaagcagagctttgtaatatcaaatgttgaatatttcaagtatagttcttagaataactatatgatgtggttcagtggttttattctcattgggctagcagtcatattctgagaagtgaacttccataatcacatacatttgcaggtaattgcgtgtgtgtatctatgtgtctgtgtgtctgttcttatgtgaaatttatcctattggcccttattaatacaattttaatatagagttataaattatttgtataagaaggtttcaagatttctctaaatattcttttaaactttattttgaaataattttagatttacagaaaagttacaaaagagttcctgtatatccttcacccacatttccctaaggttgaccttctacataaacacaatacaatttttttaaactaagaaattagcattg

SEQ ID NO: 26750 - DNA, 1035 bp, Homo sapiens
aattcaacccctgacctcatgtggtgagatgtagtcaaaacagtcaaaattttgtttcatgcacaaagttattaaaaatataaaaattaccttaagactaagtgtgtaagatatgtatgaaacataaatgagttttgtgtttagacttgggttccatccccaagatatgtgattatgtataggcaaatattccaaaatctgaaaaaaatcaaacacttctagttccatgcattttggatgagggatcctcagcttgtactagggaagtgggaatagaaagaaaagaatggtgattttgatagaattagtgggtaagaaagaaaatggaggtaaagggcccttcggactccccttttcctatttcacccagcaaacttactcttcaagatccaacccatgtccctttttcccttttccagagtcccccagtaatcttttacttattctcatgatactttataacttctttgaaaaatttattatattgaattataatttatttatgtctcagttgccatgaccacattgtgaactctttaagagtaatgaacagataggttttattctactttgcatcctcaaccttcagtgactactgcataaatgctcaagaaaatgtttattgactgagaaggttcataagatttgtagccaaaataatcagaaaaatgtaggagaaatagagaaaggaaaagggggatgtagttgggagtcatctcaatgactaaatctcacaagtaccttataatggattcattgttctgttttgcttagctcaagtaagaggtaattcagcatctgcaatactaaaacctctcttaaagggtttttctggcaggtaagctggttttgaatgaatctaacatttttctcaaacttgaaaaggccctctctggttattccaagaaattgatgagtctttctgcaaatagacagtcttagcagcctaataaatatgtaatgcatcttaatgctctttggaaagtaacactgctgactctactgttgtacaaccccatctcactagaattataa

SEQ ID NO: 26751 - DNA, 1032 bp, Homo sapiens
atctcagagttaaggcagaggactttaagtctctactgttagtggttggtcctgttaaaaataaaatgccttcagagcagttgagaccatggcaacctgacctcattattgtagggaagttgtaacaatacaacttccttattgcagttgaggaagggaagtaaaatggagacagaattatcagctcaggtagaaaggataaaaagaagagctcctgtctgttcagcaaagacaagacagccatgaaagtatcataggacaagcttgtatagcccaactgcttccctcttaccaaaatagaaaaggaaaaaaaaaaaagaagaaagaaatccagcttatggtttaaactgtgcaattatagaaaccaccagaacctttgataattctttggcattttaataaaatccaccgttaatatttaattttaataattctagttattctttccaaattcagcaccctctctgagcacaaacttggaaacttttttcaaagctgttacaatgaataaatgcggaaattaagctctactaatttttttttttgcttaggcataaaacttcctttttatagctcttttatggaattgctaggaatttgtgtgtataaactatttacaaatagagggcttgctttattattttaggaccaagtgagatctcagtttgtgcttggtgtgttgttagaattaaaagggcattcatcgagatcatgtcacttttcaggcatatacttaaaaactgaccatcatagtctgggtgcggtggctcacacctgtaatcccagcattttggaaggccgaggcgggcatcacctgaggtcaggagtttgagaccagcctggccaacatggtgaaaccctgtctctactaaagatacaaaaattagctgtatgtgtggtaggcacctgtaatcccagctcaggaggctgaggcaggaattgcttgaacccaggaagcagaggttgcagtgagccgagatcgcgccgctgtactccagcctgggcaacagaatgagactccatctcaacaac

SEQ ID NO: 26752 - DNA, 1015 bp, Homo sapiens
caccttaaacttgctttgatttggtgatgtaaacttttaaacattgcagatcagtgtagaactggtcatagaggaagagctagaaatccagtagcatgatttttaaataacctgtctttgtttttgatgttaaacagtaaatgccagtagtgaccaagaacacagtgattatatacactatactggagggatttcatttttaattcatctttatgaagatttagaactcattccttgtgtttaaagggaatgtttaattgagaaataaacatttgtgtacaaaatgctaatttgtgtgtgttttttgaacatgacttgtaaaatgcggaactttgataaagtattggtttatgtggaataagtggcttaatttcattttctgtcacatggtttatagaaagtagttagctgaataaaaactatataaagtgatggcatctttgtcaaaattccattgttgtgttaataatgacagcaagaagagtagcctcaggggatgttcccctcaaactagcacaaccattccatcatcgtagaaaagtagcacttttgctaaactgtcttgaatattttgtacttacatagcgcctttcatctcttgatttctcaaaatgctttatgaacacatttaaagaaagtggtttaagtcttgtccaacacttgacaggtctgctgtgtttagcaagtgaggaatttaactttacttcaaaactgctttctgcctattaggagtgaggatacctaagtaatgctgatagaacaggacaatgttgggcttttctccatgttataagccactactcagcaatgcatcagtaaatacctattcacccactgtatgccagccactgtgcttatatgcaggggatgcaaaggtgcatgagacctgccctctacctttaagaacagtataatggagaaggggagacaaaccttgtgacagattccttatgtactgtgataatacacagtggcagcagctaaaatgtctaggtttgcttagctttgtattcag

SEQ ID NO: 26753 - DNA, 1050 bp, Homo sapiens
tagttgtcaagcaaatttttctagaatgcaattgaatttgaagtaatttttaaaatgctcagggggttaccaaacgatattattctacctcaagttttaagatttgatgtaaaaaaacagcaacagatgtttgggtggttagaaaaggttgactcttagtgtatttcaactgtgcagtcataaaccaaatgaatatgtcttttttttaaatttattttttaggactcagtaatgttgaacggctttggcacagtggttaatgctcttggcaaacgagtcaaaccatacttgcctcagatctgtggtacagttttgtggcgtttaaataacaaatctgctaaagttaggcaacaggcagctgacttgatttctcgaactgctgttgtcatgaagacttgtcaagaggtaaacttttgcatcaaattcttacttcttccccaaatagtttaatgtaaatagtaacattttaacattatttgttttattataggaaaaattgatgggacacttgggtgttgtattgtatgagtatttgggtgaagagtaccctgaagtattgggcagcattcttggagcactgaaggccattgtaaatgtcataggtatggaatttgctggttacataagactttttcttgttttaactttctttttcttttttttttcgtaagtaaaatcttatttaggagttgggaggtttttgttagctttttaaaagcacttcaagattgtagttaagtcgggggatgtcacaaaagtcttgtttcccaaaacccatttatattttactttaaagagaaaaaaagggtaagtttaggacctacatgagaggtgggagtagtcacagctcaaaaagctttgaagtcatggaatacaggaccctagtagaaatagtgtgtcaggtgaaatatattctgccatgttctgctgcggggtgaaaaggcaatcctaaagttttaatttagttttagaacaatatatatatatttaaaccttgaattagcgattatgacaggttttttgcttgtgatcagtttcaaggaatataat

SEQ ID NO: 26754 - DNA, 1866 bp, Homo sapiens
ctcctttttgttcttaaggcctttaaaatatgcttaaagcttgaagataattagtgaaattatgtgagggattatgttaacactatatgtgccttggaaatggaagatacttcagggaaatgaaggcatttagtacatacctctgtggttcgttctattaaattactcttttgagttaacataaaatttctatcacaggaattgaaattccagagtaatttggatggaaatgaactcatgctgtctatgtaaaatgtgtgtaaaagtaaacactaaaatattaaagtatggaaaatcttctttgagtaatttgctcattcaaaatgtttgattataaagaaaccacacctattactctgctctttttcccaggctgcattgcgtcagattactgataaagctcgtgaatttggagctggtcctttgtttaatcagattcttcctctgctgatgtctcctacacttgaggatcaagagcgtcatttacttgtgaaagttattgataggatactgtacaaacttgatgacttagttcgtccatatgtgcataaggtttgttctccttaatagtgtttctgatagtttaaagttttaactttttcagttaatcaatgttaaatttacatattctcctagaccttttcctttgcacaagtacacaccatacatgtacaaatacagttttatacagatgtacagatgttagtttttgtcatctttgccgtaagaggttcatattatttaattttttcatttgcttttattaaaattagattaggatgagaacatatgagaactaacgccagttagtattaagaaccagttttttcaccgatggtaattatggtgcagtatgttcatagggtgtataagttatttctttaaaaaatattgaatattagtgtgtcactaatagctctcttaaattttcatctctgtctggagtttgaacttgtataattaaaattcttaaacagttcgtcccttgattaacaaaagtcctgataattctaaatttcttatgtatgtttaattctgtacatgagcatttcatcagtaattgatgtgaaagtgtagcttcttctcttttctctttttcagatcctcgtggtcattgaaccgctattgattgatgaagattactatgctagagtggaaggccgagagatcatttctaatttggcaaaggtatttacatttaatttctagagaagaaaatttatatctgtttatggaattgattatggaaagaaatggttgaagattaatattaccaactcatgactgtcctttctttgtttacattttaggctgctggtctggctactatgatctctaccatgagacctgatatagataacatggatgagtatgtccgtaacacaacagctagagcttttgctgttgtagcctctgccctgggcattccttctttattgcccttcttaaaagctgtgtgcaaaagcaagaagtcctggcaagcgagacacactggtattaagattgtacaacagatagctattcttatgggctgtgccatcttgccacatcttagaagtttagttgaaatcattgaacatggtaagttgtaatgtaactttgtctttttttttttttctttaggagacagggtcttactatgttgcccagactggactcaaacctttgggctcaagtgatcctcctgctcagcctccttagtagttgggactagaggtacacacacagcctgtccatgtttaataggacagctgtcctaaaatttgggctactgatttggggagataaatggaaaggcatagctctacaaactatagattttatgatgggtttgttatattatctgctgacaggctatggttcatg

SEQ ID NO: 26755 - DNA, 1045 bp, Homo sapiens
tgaactcctggtttcaagtgatctgccaaagtgttggaattacaggcatgaaccactgtgcctgacttaccctttgttttttattatggaaaaatgtacataacatcaaatttactttttttgttgttgttgttgagatggagtcttgctctgtcacccaagctagagtgcagtggtgcgctctcggctgactgcaacctctgcctccccagttcaagtgattcttttgcttcagcctcctgagtagctgggattacaagcgcccaccaccacacctggctactttttgtatttttagtagagacagagtttcatcatgttgatcaggctggtctcaaacaactttaaatgggtcaccattttaggaatattctattttagaacttgatagttttgagtataactgtttgagaataaagaatattattttaacagtgattaaaattgtggttttactcactctttctttttaaagatactcctgggcatggaagtggatgggctgagactcctcgaacagatcgaggtggagattctattggtgaaacaccgactcctggagccagtaaaagaaaatcacggtgggatgaaacaccagctagtcagatgggtggaagcactccagttctgacccctggaaagacaccaattggcacaccagccatgaacatggctacccctactccaggtagaactgtctcattggacataattgtttttttctccataaattatttaattttttcctttgtggtattctgtgtactattaatgtcaacttctagtaagaataaggagatatacaaatttaagtcttggtttgcgtttataatataaaagcaaataataggattgatcttaactgtcttttatctcaatgtatgtaataatacagtcttgtactatagattatataaaaatttgcttttcttggtaggtcacataatgagtatgactcctgaacagcttcaggcttggcggtgggaaagagaaattgatgagagaaatcgcccactttctgatgaggaattagatgctatgttcc

SEQ ID NO: 26756 - DNA, 1070 bp, Homo sapiens
gctttgtcttaataacagcaacaaaaaacctgcagaaaacatctcttaaccccattcacatccgcattcagctacaatcctgtttctatatctttttagaacaaagtgctttgttctttgtttttttcttgaggtagggtctcattctgttgccaaggttggagtgcaggggcgcaataatagctcactgcagcctccacctcctgggctcaaatgatcttcccacctcaaccccccaagtagatgggactatagacacgtaccaccatgcctggctagttttttatttttttgtagaaacgggtctcaccatgttgtccaggctgatctcaaactcctgggcttaagcagtccatctgcctcagccttgcaaagtgctgggattacaggcatgagccacagatgccttgaatgagttgtttgtacttgctttccctgcttacatagttctagtcttatgtaatttctagtctttttatgtagttctagtctattccacctaaaatctcttgtcaaggtcacttggcccctaattgataaatttaaaaagtgtattttcatttctcacatgatttagcataccaagaatatttgacatttcttcatacccttttctctctcagtctctgggttttagtctttcttgcttcccctcaaaatctcagtggctactactccttagtcttgtttgctggatcctcattcttcttacctctgaactttggggtgttatagtagtgctgagtcttttggattcttttccatctgtgctcaatccctaggatctcattcttgtctttatgtaccgtttgtataagatagctgccaaacttacaaatctgtcctctgcttctgttccgcagacttgcgtatttgttcagcttgacgtatttatttggctgttcaatgggcatttcaaaatcagtatttctaaaagaaaattattgattttcttcgcatacatgtcttctcagtcctgctcccctggtctttcctgtgtctgtttggctcaagcaaaacattaagggctgggcagagtggctcaggcctgtaatcccagcactttggga

SEQ ID NO: 26757 - DNA, 1052 bp, Homo sapiens
ttaaatgggatggtaaaaccccattttaacagtacagagtgaattaaatgtgcatccattatcactatgcatatttacataatttgtcagtataaataaaacaattttattatttttatcttttaccatttttctatcttgttccatagtcttaattgctatttatatgagttttgaagaaaaccctatttttcagtggaagcattatggttctccattgttgactgaagattttacttcacctccagtatataaactacagtgtgctatgttacgaattctgaacttgcttatcttttgtttagaaaggcattatgtaaaacgaaataaagacgcacagactatggaaccagcgagcgtagaaaggagatcaccagtacatagaaaagagaatgagcaaagtataaaataggatgttaagtggaagtgattgcgctaatggtagaaaaatacattgaaagcattttaaaggtaaatactcactgtttttttcagcgagaaattaggcaacagctagcagaaaaagctaaagctggagaactaaaagtcgtcaatggagcagcagcgtcccagcctccatcaaaacgaaaacggcgttgggatcaaacagctgatcagactcctggtgccactcccaaaaaactatcaagttgggatcaggcagaggtaatttctttttgttttttgttattactgttaaaaaatttttttctgttatggactgtattagtctgcttgggttgccatagcaagataccacagactgggtgccttaaacaacagacattgatttttttcgcagttctggaggcttgaaatccaagatcagagtgccaacagggttggtgtttgttgagggctttcttgctgtgtcctcacatggcctttctctgtgccagcaagctctgttgtccatgctcttcctatgaggacatcagtcttactagattagggccccaccctcatgaccccatttgaccttaatttacctccctaaaggcccagtctccaaatacagtcacactgggggttaggacttcaacatacagatt

SEQ ID NO: 26758 - DNA, 1041 bp, Homo sapiens
tggcgtcctcctcttacacccccgacaggcgctttgttcagtgtttgggacctgctacttcagagtagcttctcttctctgaccagagggcctcgtttaagcggcttcctcagtaggattcgtgggcaagggatcggggaagcgggcgtggggagaaggtctcactcgcctctcgacactgtcgtccccatagtttgtgcagaagagggtcagaaaagcactgaaatacggcagccgcttttccggcagactgaatcgaatttggttaaaccgagattccgttactcctacccttgtgtgtcttcaagcgtcagttacttgtttatttttcttgcacgaaacgatttggggataaaatctggtagttgttttccctcccttagtcacttttagtataatattgatctttttctttggagactggttattggaggagcagatggaagaggaaaacataaattactttcattaatggccgaagctttcaagctagttgatcgttttatggaatacagagtgtgcaaattaggaaaacgttgggaatagactggagttcattaggaagtatccagagatgacagaaaatgggatcacttttcagaaaagacgaggcatgagaagttggaactgcattctttgatttctgacttggaatccgagattttcactgagaacgagacttctaagtcacttttgtttcatatgttctttctgggtatttggctcggtattagtctgtgagaggtaagagactgaggccatccaaaattttacagtctgataggagaaacagatgtgtatgttctcattctctcatgaggccagatgcatgcttaagtagaagaaaaagcagcatgttctgggaacctgggtaacggaatgattatgtttagggttgtttcactgaggaggttacatgaccgtgttttaaaaggatcagtcagttttaaatcgggaaggacatctgagcctgagaacatcttgtaacaaggtattgaatcgtgaaaggtgtgtttgagtagtagtccactgtagcaggaa

SEQ ID NO: 26759 - DNA, 1046 bp, Homo sapiens
aggataaacaggttttgggagtattcactgtaacatagcaccttcctctgactacttttttttttttttttttttgagacggagtctcactctgtcacccaggctggagtgcagtggcgcgatctcgactcactgcaagctccgcctcctggatccacaccattctcctgcctcagcctctcaaatagctgggactacagatgcccgccaccatgctcggctaattttttttcgtatttttactagatatggggtttcaccatgttagccaggatggtctcgatctcctgacctcctgatccccccgcctcggccttccaaagtgctgggattacaggtgtgagccaccacacccggcctcctctgactacttttatacaaaatctggcagtatttcactcactccaattatctagcccaaggacgcacggatttttactgttatgttttgacacgaagagtttgccaaagacctcatttctaagagcagagatactgaatagtagaagctgtcataatgatgacctactactgactgttctgagtgaactgatttagaccattatataaactaatccatacaaaatgtttctatcatgaagcaggcagtaaaagtcattgaactgttgcctctctgaaaatgttcaagggcttctggccattaaagattagtgtagactagaattactgacatattaagtgacaggcatgttttggtcagctaataattcacagaactgtcacatggcttctgttcttcccttataataatttttactgtattgggtaaaaaataataatttttactgtgttgtctattgggtattaaaatccagaacctggccgggcatggtggctcatgcctgtaatcccagcactttgggaggccaaggcgggcggatcacctgagttcgggagttcgagaccagcctgaccaacagggagaaaccccgtctctactaaaaatacaaaattagctgggcgtggtggcgcatgcctttaatcccagctacacaggaggctgaggcaggagaatcgcttgaacc

SEQ ID NO: 26760 - DNA, 1049 bp, Homo sapiens
agaaggcattgttttgggagggggttgtgccctccttcgatgcattccagccttggactcattgactccagctaatgaagatcaaaaaattggtaaaaagttaccttttaaatgagtttgtggcctgattttagtttttcttagaataataatgttgcagtcccctaaatggaatagcacattcatttcctgaataacagaagtagaatagtgctaatgtcagagctaaacatgcatcacatctttttcagaggaaatgatttgatctgtagtaggattgggatttccctacatcaatatcctcacaacttataaatgtgttacaatatttacaaatgaaagtattaaaattttgctgaaatttctctgtaggtatagaaattattaaaagaacactcaaaattccagcaatgaccattgctaagaatgcaggtgttgaaggatctttgatagttgagaaaattatgcaaagttcctcagaagttggttatgatgctatggctggagattttgtgaatatggtggaaaaaggaatcattgacccaacaaaggtaaatggttgaacactttctaaaaattcttttgttgttcattttgttaatgtatcctcacatcccaaatctttgattttgtcaccagaaaaatagtctaatagcagtagcaacagcaatagctcttgtgcccatcaacaattctcatgtacatttccagcacctagatatttaatactccactaaaaggaagcaggatcccttgagtagcagttgagtccatgcctggaggcaggaaaaaatcaggatggatctggaacaccctgttcctgcctggcagtaagaatactttccaagatacgcagaacagggttttgttttgttttgaagacagagtcgctgtgtcgcccaggctggagtgcaggcagtgacaacctccacctcctgggttcaagcgattctcctgcctcaggctcctgagtagctgggattacaggcatgcaccaccatgcctggctaatttttgtatttttagtagagacggggtctcatcatgtt

SEQ ID NO: 26761 - DNA, 1042 bp, Homo sapiens
tctacaaccatctgatctttaacaacctgacaaaaacaagcagtggggaaaggattccctatttaataaatggtgctgggaaaactggctagccatatgcagaaagctgaaactggatcccttccctacatcttatacaaaaattaactcaagatggattaaagacttacatgtaacacctaaaaccataaaaaccctagaagaaaacctgggcaataccactcaggacataggcatgggcaaagacttcatgactaaaacaccaaaagccaaaatagacaaacgggatctaattaaactaaagtgcttctgcacagcaaaagaaactatcagcagagtgaacaggcaacttacagattgggagaaaatttttgcaatctatccatctgacaaagggctaatatccagaatctgcaaagaacttaaacaaatttataagaaaaaacaaacaaccccatcaaaaaatgggtgaaggatatgaacagacacttctcaaaagaagacatttatgtagccaacaaacttatgaaaaaatgctcatcatcactggtcattatagaaatgcaaatcaaaagcataatgagataccatctcatgccagttagaatggtgatcattaaaaattcaagaaacaacagatgctggagaagatgtggagaaatagggacacttttacactgttggtgggagtgtaaattagttcaaccatgtggaagacagtgtggcgattcctcaaggatctagaattagaaataccatttgacgcagtgatcccattactggttatatgcccaaaggattctaaatcatactactataaagacacacgcacacatatgtttattgtggcactcttcacaatagcaaaatcttggtaccaacccaaatgcccattaatgataaactggataaagaagttgtgacacataaacaccatgcaatgctatgcagccataaaaaaaggatgagttcatgtcctttgcagggacacagatgaaactggaaaccatcattctcagtaaagtaacacaagaagagaaaa

SEQ ID NO: 26762 - DNA, 1105 bp, Homo sapiens
gaagaaaagatgacttgattctgtcctttagatgggaggattttagaagaggatttggattggttttcatgcctagagaagaccatcttataggcattaggtactgctctcctttcactcagagtacgtataccactagaataaagtactacatggtattaggaaggattcttagcaattggctagagagcaaattatgttgttcttttgctaggaattgtctagagacagtaactctctgcctggagtaattagaacattttaggggaatacagatagttaggacagataactttgggaatcttttaatctcagatattatgtatattgcggttgaaagggacttatagccaaagaaaagtgtcagtataatagaaaaagctcagctcctttgctaacttgtaagacagtttcactttagagatgcccatttggacattcactgttttgactgctctttccttacctgttagaagatgctagaagatataacttaaccatcttcatgtagatgtcatcatggtgcccaacccactatggtacattgtctgaccagaaactatatatttcactttgtagataatttctctgactattacttctcttgagaaacatcttcctagtctgtcatgggcagttgccttgtcattgtcccctggaaaccttctttatcagactgacaactccccatgtttgtaatttccaattcggaggagaatcctccgaattggaattaagaggagatgctacatgtttccagttcaatcttgaatccaaatagcacctttgtgaggaacttgtcaggattcagttaattaatccatgtgaagttcttagaactgcctggcacagaataaacattcagtgaggggtagctattcttactgttctttctctgtttcatgtttggcttctctgtacatatgtattactagtgctcagttctaggaaacaaaggggagtgaagcaggctagttggttggacctaaggagaagaacaaatgcaatcatgcagaaagattatagtaacttcaaagtatagttttggaaaatctctttaaatctaaccagtgcacagtggaaaatccctgaagaaccaatctaa

SEQ ID NO: 26763 - DNA, 1032 bp, Homo sapiens
ataatgacaaaaaatagttgatacatgttaggtacagatataaccattcttttttttttctaaatatttttgattgtggtttgttgaatccataggtatggaacccatggatatggtgggccaactataaatgcatatatgtaaatgatatatttatttcacaataaatatattttcaaaacagaaaaataatagaatgccaatgttttatatacttttgcaaatattttaaagtctgacttaatgaaagacaactggattttcataattgcttcagcatttaatctaatacaatatgtggttttggttgacgctggtgaggcaaatccagcctcaggtagatgtgtaattacaataggaaaaaatattttaatctgcatttcagataattgtgatattcttctttgatactagagcaacattctacaagtggtagtttcttaatggttagttgcaaagtggaattgaatctaaaactatattgatgaacttttcatactttttcttttacctattcataactttataacatcatgcatgcatttggaaaatactggtttactgtattttgtaaggttatgcagcccttacaaatgttggcacattttattatatgacatatttaaaagcaaaaccaaacatatttgttaaatcaccactgatatcaaaaaagttaagtattgggaaactattaagcatatggtggccactacaagtttttcaaaactctaatttttgcttgaaaggttaaaaggtataattggcaacaaatgctgtcagatatttttcctggagtgataggctcactttagttttaaaacaatgtcaaatatgcagatccgaataaccatagtttgtctttagttgttctttcaagtcaaattgatactccatgacaaagatgggtggctcagctttcaagtccaacaatgacacaagtgctgtttctcaagacaaccatcttccctcagtatgctacagaagtacttcatatgcgcttcccatttcttcacacagtacattaaaaagacg

SEQ ID NO: 26764 - DNA, 1052 bp, Homo sapiens
tgggtacaggaggatgacaacagggcagctcccagcctcctgtagtagcgacagctctgaagcataacttccactccagagcgctctgcaggaccaggctgaagctgggactttgcttgcatttcttctcttccctgtcctgcttctcacactccctcagcagtttcccttggaagtccatcttaataaatcactggtgtggtagtctctatctgaggatctgcgttttatcccagattataggtccacgccatttccagcctaattggtcatgccatagggtagtagtttgagtaaaacctatctatagttttatgtctactttctctgcaagtcaaaagccatatgttgttatggaactagtatagaattttttactcctttcttttgaaaatattatcagtattattgtttaaaacctatgccccctatagctctgcaattcaatgggtcagtattgatatagtccagactgacttatggatattgaatgtggaggaaagagagagaatgaataaaaatgagacagaaacagacgttggatgtaaggccttatgagatttaccaaacttgacttaaatgaaaactgtccttactgggtccaaatggtgaattatgtgattctgtggctttgagagtggctttgcctctcggccctactcctcctgtgctcctgcagtgatgcacatagtgtctgtgggaataagcagctgtatcaggtttccttttttttccatattcgttcttgcttatatcctgaatttattttagtgctgacatagtttgacttactaggcctatgtacatgaaatatgttgcttgactatttaatttgtttacatctttgccttttgacagtgtgattatgaattccaaccttaagcattcttttgccctttgttactttgtggactttaaaaaattaatcagggatttatgccagtatggaaaggtttatgacagtattttaagacttaatattactgagggatggttgtagaatgcccactgacctataataagcatgatttcataaaatatgtacagcgaat

SEQ ID NO: 26765 - DNA, 1028 bp, Homo sapiens
cccctagacaccatctgaagctgtatgagggtgtgagtgggtgtatggcaggaagggaggtgggtgggagggggaaggctggtgtgtacacctggtggaagtaggcaaagtcgaacctattgcagtaattgacggaaatggaatggtgagggaagtgaggccctggctttgagtggcacaagtgagaaagacaggaagccaccaatgcaagaggttcaagcagaggagagccatgagacttggtgagagtaagtaggggtatgagaatgagaaagagacatgcaagcagaatccaggttttgagcttaagtgactcttgatggttgtgacagaaataagacaataccaatggagacgaaattgctgatacctcagtgagaattttgacaactaggtagaaatgtccattaggctgtttgacatgtgaaaccagccgactaaaggacaggatggagaataaatttttgagcacttttttggatgacaattgaaatggtaccaaatgaacattccttaaagaggagagcaagagcgggagagggctggaagctttgagaggaaaagggccaggagttaagaagatgcagctagagagagtgaggtgtcactgaagccaagggaagatgagttaccagggggaagtgttatcaagggtgcagtggaggggcaggggagaggagagggaattggaggctcttggctttggcagaaaggataccataatgacattggagggagctgtctctctgaagtgtgagaacagggaagcctatgcatctactgagggaggggtggcaaggacatgagaggaaagagtctaaacgtggctaactgaagcatgagggctaagtgtaattatcagaaagaggatggagccagcagttttgaagaggaagaggagtgataagcaagagcccaccaactaggagggaatggatttgaggctcagataatgcagtgcctttgaaagaaagagtaatagtgatgttttcttcagaatctgggagaagggcaaggagatgtgtaag

SEQ ID NO: 26766 - DNA, 1050 bp, Homo sapiens
aggtgattcttcacttgagtttggcaattacaaagggaatgattcagtggatagttcatactttcttgaacaccccagtggtctgaagttcaaaagagcagttttgaaggtggaagaaaggtatggagaagtccataaaagtgccacaattgtagcctgaggcatatatatatttaaaacagggaagtaatgatttagccgttctctgtctggccagatgcttggaaagtacagattgtggttgtgtgtctgcgtatttatttttgatttcacctttcaaagtgtgtttaagtgctggcacctcttccttttcctctgatgtctctgtgagtaaccacttgcagcctctttcctctgccactggctgtcctgagcatcctaatttagcagaccttaggcatcgtcctcccttattaaatagtccttagctgttccaatttgaaaaccttatgattgcatctttctgtggcttacttattcttacttgaggaagagttgaaatacctaaggtcggcttttgattgcaaaaccccaggtgctcagggttttgacccatttaaataagtagaggtaccagtacctgccttgtgcatctcataggtgatcatgatgttcaaatgggatgactaaagagacagtcttgttaactgaaaactgtggggttttttttttttttctttttgcgacggagtctccctgggttgcccaggctggagtacagtggcatgatctcagctcactgcagcctctgcctcccgggcagaagcaattctccccgctcagcctcccaagtagctggcattacaggtgagcaccaccatgcccggctaatttttgtgtttttagtagagatgaggtttcaccatgttagccagactagtcttgaactcctgaccccaagtgaccctcctgcctcggcctcccaaaatgctgggattataggcataagccattgcacctagcctgaaaattgtaatgaaaagaacaatttgcaagtgcatgcaacttccaatgtgctccatctcctaaacatattctctgtgactctag

SEQ ID NO: 26767 - DNA, 1044 bp, Homo sapiens
gacaatgtctgttaagttgaagggaaaataatgagaaacctattacagaaatttgctgtgccatgagctttgttccagggtaagggagtctctggaagataggaaggctattgggtaagagcatgtatcctggaatcagggctggattcatgtcctggttgacaagcctctataaccttacctttatgagccccccttgtttggttagtaaaactgagtagtaatggttctgagttatataaagaggattaaatgattggaaattacataaaatgcttggcctaatgcctggcatgcaatgatgcaccataaacagtatcagctattattattgagatatgatgtgaactgaatgtgtgtgtgtgtgcctttgagggtgttttggaatttggatcctctgaagcaaagtatgctattaatatttttgcctcgaaaaaaatcaagaaggcatgcattcacgtataggcagctagatagaaaaggacattattctgaccttatgtttaggacttttcatggaggccattttaatacctacctgtaggtatgtatgtagatgttaaagccttgttacatacaaagttataaaatgcatattttgattatactggtgatacaaaggaactggacaaagaacaagttaggaaaagctgtcaataatttttcccaaatttcacaatcattcacaattaattttctcttgcattcacatggaagtcgaaatgggctttgtgtggaagtgtacaaacctctaacttgatattaccaattcagaaatttatccagggcttctgaggcatgtggaagtttggtccaaactgttgtatcatgaaaatcatgtttggttataattgtagatatgactagagaggcaacatgagtgaggagaatccagatcaggagccaagagccctgggttctaatctcagttcttttatgccagatatgtgatcctgggcaagtctgttcacttctcagggcctcgttaaactcttctataagctgggcatcattgtatttgcatgtttcacatagttcggaggg

SEQ ID NO: 26768 - DNA, 1022 bp, Homo sapiens
tgtggaacttacagtctagtgaagaataaaggtgccaaatatttttaagtgcagaggctctctgggatcatttgtagcagagggtgggtggtccctgatgccttctctgattgcggacactcctacagatggcaaaatggaggttcaaagagaataagtggccccagtcagtaagctaggacaaatttcctatcctagggtcttttggactatgtcagatgacttgccgtgttagcaggtgacattttagaagatccaagtttttgcttctttaagtaaaggcaactttcccttaaaaacatcctaaaaaatgtaatgcttacctcttttatgttgacttacaattcattaatgccaacatatgtttatacaggactttataattttcagtgcactttaactcatgttattttattgtaattaccatcttgtgagtcaggcaggggagtttgtttcttgttttagcttttaactccccattttatagaagagaaaataggggcccagagagggtaagcgagttatccacagatgcagagctgcatccaacagagggcagatccaagatctgggatctcttgattgccaggctgctgctcttcaaacaaaagtgggtatgtgacatacacacacccactgtattttaggcatcctcattttatggggctgtagccagagttgttagaacaagttaaattgacatgacctttgccttttggtggtttatagtctaaatatggtttaaaaaaaagcttcaggtttattaatacacaagaaactatttttttttttcctgggtattgtctattcagcctatgccaagtccttcacacttagaaggaaataaaacacagttacagtgcaccttagccctactttcctacttaaatgttacaatgttcctctttctctgcaacagtaatgagatttgccagtgaattgaagggaaaaaaaaaaggaatctgggaattttgatttttctgctcttttgaggagaattagtggattaatctagatgctcc

SEQ ID NO: 26769 - DNA, 1050 bp, Homo sapiens
cctcccaaagtactgggattacaggcgtgagccatcgcgcccagccatctttcatatatctttctaaagcaaaaaaagccaaattcttccatcatggtttcctttgggacttctagacctatagtaagtctattttaaaaaattatctgatacacttagctttgtgtgtttattcttttttcccaaattttgtgtggcttatattagttactattcattattgttgagttatttttcagattcactcatacttgaactgaatgactttgattataaattctttggatataaagagcactgtcactttaaattattctgtgaatagcagaagccagtgttgagatgataatggtgatatttaatatactatttttctctattaggcatatcatagatttaacaataattattagatttggagtctctgctagctgcagccttttccgaaattcaaggtatatttctgtgtagcgtatcttcacaaaacataaaaacactaaactgaaattaaaactgatttgaaagtatactagagaggattgtgaatatctatgaaagtacatgactttttttttttttaattaaacatttgtgatctctgcctactccatttcctagcaccttttattttgttattcttctttaggtaaacagccattcaggaagatggtttgtgcaaaaagaatgaaaataaaggcatgaaggaaaatgtatgcactagcatcttctgtctctccctctgagattttatgctctgcttcaaaaaccagtttaaaaataaaaaagatgagggcggttgcaatctgcttcattttatgcagattaggtatggccctcgggtacctgccaaattgctaatatggccttccgttgggcctgattagtgtgaacccggatcttttccattaaagcagaaatgaatttgttgggaataaggtaacaacaaaagtgatattttcactaataaccgtgggtcaggttacattaaagcagtttctcagtgtgtacctgaggcagactaccctcagcatttatgatttcctccatcct

SEQ ID NO: 26770 - DNA, 1049 bp, Homo sapiens
gttttacatgacatcatctcccacagcagttgtcctgtgtttttctagatcatcattgagttcctgacttcacttaataactttgtcaaagttagaggtttcacttatcttagatctcctgggctgtaacctctttgataagattcttagagattcctacttgtttctctgcttcattttcaacaatagttacctagtcttaattaagattatgagataactttcagatcctggcctcacctcttattagggcatctgacctcagggagttacttaacttttctatgtttctttcttttcttctctctcttttttttttttttttttttgggagacaagagtcttgctctgtcacccaggctggagcacagtggtgccatttcagttcactgcaacctctgcctcccgggttcaagtgattctcctacctcagcctcctgataatttttttgtatttttggtagagatgaggtttcaccatgttggccaggttggtcctgaactcctgacctcaagtgatctgcccacctcatcctcccaagatgctgggattacaggtgtgagccgccacacccagccaacttttctatacttcatgtgtaaaataagataagaaccctccttactttaaggcagttttaaggattaattgagatattattttaatgataagtgacattgtacacaatgaatgttactcttattactattatttctcatgatgatgcccacctatcttctttttcataattgtgatcatacgaatatttccacagcttcacaactcttttaaatcatctcccctaacatgatttcatccatggaattacacccatttttttttcagcttttcagtgtcatttcctaaactataaaatacatacgtcctctcagaatgcccttattgtacctttcagaagaagtggtctttggtacctcagagaaacctgtggcttcatgtctctcaaaagtctattcttctgatttaagcccagcatagttcaccttcataaatgtatttattatattatgccttccatgatgagtac

SEQ ID NO: 26771 - DNA, 1211 bp, Homo sapiens
tttgctctgcagtgatgggtttctcactgagctgcccagaatcactcactcgatgccttttgggatcgatgacatttgatttgtaatgagtgggcaggaatgggagtggagaccagatctttgggtcaaagagggaaaaaaggaactccgtacagcagatcatagtctcttttgcatctgattccagcctgatgaattctcacacacagggggcattattctatataactaagacttgtattagatgctttatgtaatgctttctttttgggtacattttctattacgtgtaacaaaacattgactgaaagtgtttatttaataagagttaaaatttactaaaccaaatcaaacaaatcgaattgttcaaaaatgtttggatgtagaagcaaaccacgttaagatttgaaaataaattcacattttacattagtttttaaaataaaactaataaactaataaaatgtgaaaaaatttcacattttatattagtttttaaaataatttccttttaattttgaatatagtgaaacgtagatggtgaagaacaaattgattgactagtttctttcccctaagaagtggataagcaattgatcacgatgacttcgctcacttaacagatcgttggccctctagttctgtgtcttttacaatctggttctgactgagggcattgtagtatagtgcagtggttaggcgttgtggactctgactgccgggcctttcatcttggtgctccccacttcccagctctgcgattctctgcctcagtttcctcttctatgaaatcagggtagtaattataattcccccttgtagggttgttaggaagattaaatgaaacaatccaaataaagtgctttacattgcccttgacacagggtaagggctgaatcatgttagttgctattatgattccagttgttgttattattactttacaatgcagaagccagatacagtgtgtcaatttcttttgttttctgtagcttcaattcatatgagcccttattctgagatactggatgtgaagtaccaatcttaaattttcttaaggtataggtagactaggtcttctggtattcatgtttttaaattgacaatatcctattccatgactgcatcaacttagaagaatgttattttcttttttgtggataagttgttctgcactacattgcttctttccccttttcttcagagtactt

SEQ ID NO: 26772 - DNA, 1400 bp, Homo sapiens
tagagggtgaagactctaacttgattttcgggatacctagcagttgactaggtagtgcttgggggtaaaagctgttgagggcaagaaatgaatgtgcgatctcactttacctctgaccttgaattttctacttgaatgcccactaaaaaaagtcctatcagtggaaataattcatttaaaaatgtagcttattatttcctccatgatgaggaaagtatttagcagtgttttcagttatctgttttgcttgggatgataggccatggtagcaattaactttgatatattttttaaactgcctaaagtccttcttctccagagcttaggcattaatgcccatgacctggaagggactggtcatctgagacattcacgtaaaatgatccaggttaaacagactgacctacagatatatacaacctttatttaataattaaggtatgtctcattaaaatatataacttctaggagtttcaagtgtgaaacctacaagcctaaaatttgtggtactctgatatgatatatatcatgtttaattttttgttctgctcccctttaaagcataactgtcttttactaacttatagattttaaatgtaaaatagagttgtttgctgaatagctaggtttgtttgtggtttaagaagatgtagtacagatttcattcaaggaactcatttggtaaaaaacacattcgttaaagcacttaaatttttcaatagtgctgttacttttttgatatattctttacatttaaacttgtccattgatataactcctagttttgatgctataccattattttccaactctaagtaaagtctattttggcattcataatggacagtaaaaaagtcttggccatagagcattttgtaatattaaaatgctttttaagaaattccctgcttcctattttgtctttttttcctttggaaaagatttctcatcatctgaatcttataatttcagttatttgcaaaattgtgaaatttcagaattgtaggtctttcacttcatatgttagtatatattttacattttaatactttgtccagattttctttgatacagtgttattatatttttacattcctatgggatcccagttccataactattcatttatttctgtagtattaagtgttcaatttatttattacttagttcaaatagcttagcatataagtgggacccagagctgtcggggacttcctttgtttacagtatgacagaagaagagctcggtggtggttttgagaggcaggagtgaaaagtgagcattctgctggctgtttggtcacagttgggcaccttaggttggtttcctaggtgccagatagattttgcgtgactgtgatgagcatttaaaacccagcactttgaaatgcaggtttctt

SEQ ID NO: 26773 - DNA, 1050 bp, Homo sapiens
tgcagtgagccaagattgtgatagtgccactgcactccatcctgggcgacagagaaagactctgtctctaaataaatagatagatgtctctaaataaatagatgtctctaaataaagactctgtctctaaataaataaatagatggacagtcagataattagtaagtgcagtcataattttggaaaggaattcagaaattcacctttttttctttttctttctttctttttcttttcttttctttttttttttttttttttgagagagaatggttaaaagatatatgttgtctggagtcaaaaggtttttcatgctctgaaagtttgacattttccctattgaaaatgtttaaaatggttcaggcgtggtggctgacacttgtaatcccagcactttgggaggccaaggcgggtggagcacctgagctcaggagtttgagaccagcctggccaacatgaccagatggccaaaccccgtctctactaaaaatacaaaaattagccaggcacagtggcgcacacctgtaatcccagctactgtggaggctgaggcaggagaatcacttgaacccgggaggaggaggttatagtgagctgagattgtgccactgcactgtagtctgggcaacagagcaagactgcatctcaaaaataaataaataaataaaaaagaagaaagcttttaaaatggtttaatcttgtcttgctttctctatttcttcctttcactctctctcttttctctactttttcttctttaaacactaaatgtttgggagactttcagcagttttttctttgtaagggcaatgttgaaaaaatatacgtatttagacattttaggccttagagctaacttttaacagacacgctgctttttaaaaaattctgtggctctctaaagagagctgaaaatgctaccccaaattgctgttaaccatgtctcagccctcattagagctggataggccgcaatgtaaaacactatttggagaacacaattcttcaacagaccccatgctttgtcctcctctgctatataaaattaaa

SEQ ID NO: 26774 - DNA, 1046 bp, Homo sapiens
gtgagaatgcataaggggaatttagattttgtgaacggaaaattagcagcccaaagtctcttttcagaagctttggcagcaagttccccgtctcccccactccccaagaataagaacagcagtgaaatgttggatctaacccatacattttaactcattattttttggaaaaaacagagaaataacctaaaatggtttcgagtaggagacctttatgcttaactcaaaaaaatgaagaaaagagtttgccttttagtttctattcttttctttgtagcaatttttaaatgaatgatttgcctctactgactttgattgtatggtcttttttcacttccaatcaacactgctctccagcattaatttagggtgccagtaaggagagctgtgaattcctgttattttaaaatgcaatagaggttttgaaaatgtctgtggtgaaaatggatttttatatacaaaagattcatcatcctactacttaaatgtaatgtgataaatatttcaaagtcaaagtagatgccctgagtggaactgaggtatgactaaaacaaaaaccagttgaggacttacagagtttgaaaaaagcacagttgtagtcattatagtatgctattttccgttgctctttattgttagcaattaaccaaacattatttttcttcttttatgtagaaacaagccctgtaagcataacatgctacagtgtttttgtaaaaatgttccatggtggagttttcaaaattatggaactctagctatatatatttgtttcaattaacagaattattttgctttttagtagcaagtgatttaagaattgtggtaaaatcagtataattaagtggcactgaaaggctacatcagaaattgcattctacaacttctgtatctttgctgctcaattaaaaagttttacttatttcagatttttaaaaaactagataaaaagacataatatggaacaagtgtgctttagatatataattatgacaatagagtttatggcatgcattttttttcccctttttaattgatgtccttta

SEQ ID NO: 26775 - DNA, 1031 bp, Homo sapiens
cttgaccttccaggctcaagtgatcctcccacctcacccttttcagtagctgggactacaggcatatgccaccacacccaagtaattttgtttattttttgtagagttggtgtctcactatgttgcccaggctggtctcaaactcctgatctcaagcaatcctccctcctcagcctccctaagtgttaggattacaggcgtgaggcactgcacctggccaataaagtatttttaaattaaggtatatatattggtttctgcagacataatactattaaacacttaagagattacagtataatataaacataacttttatatgcactgggaaaccaaaaaatttatgtgacttgctttattgtgatatttgccagcgatatttgctttattgctgtggtctggaatcaaatccacaatatctctgaggtatgcctgtaccttaaagcagtgttaatgaaacagaaatcacttagggctaaaataaacttaggagattttcttggctttatggtatctacaataccaggaacttctaatgctggagtccctacctgactcagagaaagaacatttcccaggctgggcgtggtggcttatgcctcaaatcccagcactttgggaggctgaggcaggcagatcacttgaggtgagaagtttgagaccagcctggccaacatggtgaaactccgtttactaaaaatacaaaaattaaccaggtgtggtagcgggttcctgtaatcccagctactctggaggctgaggcaggagaatcctttgaactcaggaggctgaggttgcactgagccaagatcatgccactgcactgcagcctgggcgacagcgtgaaactccatctcaaaaaacaaacaaacaaaaaaccaggctgggcacgtggcttatgcctgtaatcccagcactttgggaggctgaggagggcagatcacgaggtcaggagttcaagaccagcctggccagcatggtgaaaccctgtgtctactaaaaaaaaaaaaaaaaaaaaaaaaattagccag

SEQ ID NO: 26776 - DNA, 1021 bp, Homo sapiens
tatgttgaaaaactatataaaataggaagttgcatgatcttcttcttacttcatcttttgtagttttcaaaatgcaaggaaggtagcactagttaagaaaatgaaccttttttttttacaaatattttaaaggcatttatttttaagtgagtggaataaaaccatataaactgtattttttttttctaattaagcaatgtgagcacatttaaatggcctagaaaggtcttaggtaaaggaatctgagtaataaattttagacctacaccagggcaggactctacagatgctcgtttggccatgagtgagtgacatatgtttatcttctcacattattaaaattaatagtgtagggctgttctaagctctgtagttcctgggtgtaacttgtttttcctttcctctgaaaagattaattgttaagctgccaggggacaaggagacaaggtataatagcataaccaaaggtttaattaccgcctgaaaacttttgtccttcactttgaatttgcttttgtaggcttaagggggacttttaagaagcctggaccatgcttgtaaacttcaaaaataactctagggttatgtatggctgccacacaagggaatgtcagctttctcctccaggttacacatattcaagagagtcacaaaccaccaaaagctggaagttgttaacatctgaaggctgttggtggcctccgaaaaggagatggtggactcagaacagtttctaatggacaggtgcatgcgtctcaaaaacctctgctctgggcactaattggtctattctagttttaccagatgtcagatcttgacccaaacagtttagtttctggattttggaaggaaatattgacaaggcctaggtgatgagattgataaggaacaggatttagagccatatgatttggctattgaagaaaggagctaccatcttagactgagttaagggaattttggcaaattcagtagcaagtccaaaagagtgtctcttatagacatcaaaagcttgtgtctg

SEQ ID NO: 26777 - DNA, 1029 bp, Homo sapiens
ttgggagtagaggggaggtggtaatagacacacacaaaacttgttaattgctatacaagaagcatgtgctttaaaaatgacaataacaatcacaaaaccagtttatcattgttttacatatttatttagttcactactatgggctttttgttggggtttcccagagggaaactaaggtagaatcaggaacaacactgcccacatacaaagggggagtcttccaagtagtaagcccctgcctcttgatctcaactctagcacacacattggaaggcaggccctttgtctaatttgctcaacactgtacctctatcatctagagcaagaaatgaaggaatggatgaataataaagaataatgattcctttggataccttttaaatcatgttaccaagttaacattaatactcatagatagactgaaagtgttgtcacggatcagtgagtgacgtaggaagtctacacatggaaggtataatacttgagagaacaaagtcatggctggggaaatggctctctgacagtggccacttgggtaatctgaacttttccaaaatggacataagtcatggaaagaacagtgctctattcacttcagaaacctccccttgaatgtgcgtgaaatatgatagctgggcttcctttaaaattatactttgaagagcagggtagagaggacaggaaaattagatgaattagagatgcaataaaattggctttgtgttaataattgttaagattaggcatgtgggattcactttggtgtctgaaattttctataataaaaagtcaacaaacatacacatctccacttaagagcctgacataataaacatttacactgcttaatgtgtaaatatagtctaatcttagaaagcacttcttacatagattaagaaaatttaaaaaaagtttttcttcatgacaaaaaaaattgctttcagctctagatgcaacaaatcatgatagaaattggtactaggctgggtgccgtgcctcatgcctgaaatcctagcactttgggaggcc

SEQ ID NO: 26778 - DNA, 1034 bp, Homo sapiens
aaatatttttgctccacagaagtggaatcccaggctttactggcaatagtaaaaaaaaaatctatttagacttaatacttgaaatttcttgtggcttattctgagttcctttctgtttcctattgccacaaatagcacttttattaaatggtattttcctgtgttccatgaaattattagcattaaattcactccacagctgtgtctttcactgtgttttaaatacatttaaaatcacattttttttacagtgtctgggttttattcatggccttcagatgttctgatttcttgatcacatgttctacaatttaattgaatgcccgtatggaatttcagactactttcttacatttgccctctgggtctttcactgaaatgcggagatgcttattcagtttttagtagttaaccatcacttgtcaaaacagatcttatttcttaaaagccataattttattatcatttattttaccttttgagcctacagttagcaaatatatttgagtcaagagcagtggttctcaacgaggggtgattttgccttccaggggatatttgacaatgtttggcaacatttttagttgacacactgtggggtgagagttgctactggcatttagaaggtagaggccaagggtgctgctaaacatcctacagtgcacagggcagccccccagaacaaagaattatgtgaccaaaatggtaatagtgccgaggttgagaaacctcagtgtggagtctggtggaagatgtagatggaaaacatagcaggcaggcaggagtggtttacggagaccctcctctgtgttagttatctttcctctacaagtttacgaagcattatttttgatgcatcaacaggataacgatgatgatgactgagaagcacttgtaaggtcccaaggagccatctggtgaccagggaaaatgttcagtagggatttagggttgaatatattatatttgcactctttgctacagatggcaattttcaaataaccacgttattatgatcccatttccaagaatgg

SEQ ID NO: 26779 - DNA, 1659 bp, Homo sapiens
ctcctgggttcaagcaattctcctgcctcagcctcctgagtagctgggattataggcacccaccaccacacccggttaattttcttatttttggtagagatggggtttttaccatgttggcaggctggtctcaaactgctgacctggagcaatctgcctgccttggctttgcaaagtgctgggattacaggcataagccactgcgcccggccatatatattgtatttaaccttggattaagtgattgctttaggatcttccagctcaaacatcacattgcatatatatgtgtatatatataattttttggggggggggcggagtcttgctctgtcacccaggctagagtgcagtggcgcgatctcggctcaccgcaagctccgcctatggggttcactccattgtcccacctcagcctcctgagtagctgggactacaggtgcctgccaccatgcctggctaattttgtttttgtatttttagtagagacggagtttcaccgtgtagtcaggatggtcttgatctcctgccctcgtgttccacctgcctcagcctcccaaagggctgggattatgcctgtagcgtgagccactgtgcccggccaattcagatatatatatatcttaatagaggtgggatctcgctgtgttgcccaggctggtcttgaactcctgagctcaagcagttctcccatcttggcctcccaaagtgctgggattacaggtgtgagccactgtgcccagcctacattacatgtgtttttttttttaaagtattagtgttaactaactttttaatttctttaacaaacattgagtattttttttccttaaattttgctttgctttgcagccctagggtggtcccaaccatgtgatgtctggagcataggatgcattcttattgaatactatcttgggtttaccgtatttccagtaagtgacaatgatctatttcaaccttgctttgcacaagaaaggtgcctgtttatatgaataaatacttttgcttcccccattatagactattaattgtagataagcataaataaactaattcatatttctttcataattgttttatttaaaacatctttcagtatataagcaattatccgtgtccatgtagggaatcattggcgagtttgttctgcaagccttaatgttagtttttttgctgtcagctttaactgtgtctgttttggtggtcatcttccccaagtctgtttttattttatttctagacacacgatagtaaggagcatttagcaatgatggaaaggattcttggacctctaccaaaacatatgatacagaaaaccaggtacgttttaagagttagtgacatccttagtatcatttgatcacatctgctgattagaacttaattttttttttttttttgagatggagtcttgctctgttgcccaggctggagtgcagtggcgtgacctcggctcaatgcaagctctccctcctgggttcacgccattttcctgtctcagcctcccgagtagctgggactacaggcactcgccaccacgcccgcctaatttttttgtatttttagtagagacaaggtttcaccatgttagccaggatggtctcgatctcctgaccttgtgatccgcccacctcggcctcccaaagtgctgagatt

SEQ ID NO: 26780 - DNA, 1107 bp, Homo sapiens
ttaggtatgcttctttgttctaacaagtcatgttttctaacccttctttcactaagcaaaccagaacagatttgaactgttatgggttatatattagtatggagatcagctcagatgacattaaaaatgccgtagtgttattcttgtatgccaaatctttttttccccaaaattagcactttaattttatttactgttataatatttgttttcttagattaggtaggaaatcttaatttggccaccgcctactttgacaagtaaatattacatcatacgattttgcaacattaaattagaacactagaaactaaaaaattatgtttcagtgaatgctacaactaagcattttttttttttaagaaaaacaattgtattatgttttgttgccttgccactttgagtatcttatctgaaaatctgttccttgccatgtttttctcctgttaacataaactatgtgccctgtgaatttctggggactgaatttgaaattgctcctgccaaccgtttgtggcctggcgtgtatctgaatgcctgaatatctccccgctgaatgaatttcgtattctgccctgaattcactcgggtatattgattggctggatgatcttggtgccgcccacttgacgtttccagaagagtcaccgaaggaaaagaaccaggagtgtagaggatgatgaggagggtcacctgatctgtcagagtggagacgtactaagtgcaagatgtatagaatatttttcaacacttattaacttttcagataacataatctatatatagattaagctttcagggatttggaaatctttttttctttctcttttttgtttttgttttatttttccatttcttttggtgggggggattgtatttttgctttctttagaaatgtaatgtttgttatatagaacttccagaacagtaatcaaattaatgaaattagacctaataattatgttttttgatggtgttgaccaataaaatatctagtgataaggaaatttgtagcatcaactagaataatctacattgatagcatttattgtgataagtacattgtttccacttcttgatatgactgagatttatttctctctttta

SEQ ID NO: 26781 - DNA, 1051 bp, Homo sapiens
gacatcaatagtgttagattctaaacagggcaggaaggtgaagaatgatctaaagcacaatgaaaaaaataaatacccacctacccaccctctagttagttgtcttttccactataaggatgtttaactataactccatatatttaagtatatatgactgtgtgcccttttgcctttttatacttatatatttaaaaattacatccaagaaataaattcattttttctttagcctctacaatagaagagttcatatacctcttatgaatgactaacgtacaggtattcttaaatctttcagggaactgatggagtagagtatttattaattcctgttgataatggaacattgactgatttcttggaaaaggaagaagaggaggcttgaagctttcctttattcttgaatctcccatggaagggttgtaccccagctgccactcctctagttgaaagtgttgtgtttacatctgacattaaattatttttccagcatacaagatttaaatttgggaagggggggatgtcctcaattagaactttttgatcagcctggctggtaccgtctagtactatgcagcggtcctcaagttggagaaaatgtgcctttcattcattacctctctggagacttcttgctggaatgaacagtgtgctcagggactatttggaactggatgtttttgaattattttatacttagagatattctgaattttttgagggccttttaacactccccgagctgattgtttgcaagtgtgtttgttccagagtgtggaagtataaagacatgggcatcacgtaaattggttttgtttgctattctgtgtgtcagaaccaacgagtgtaatggagagggcaggtcatctcttattgtttctaaaacaacttaaaaggtgtagattgggaagaggtgagtgatccagctttctccttttggattgaggctatgtacttggtgggggcaggggagggaatatattataatactattcagttgggataatgggaaaaacagagtatatagggtatctacccagcctagaaa

SEQ ID NO: 26782 - DNA, 1032 bp, Homo sapiens
gtgctgacttatgttcatatccttttgaacttgccaggcctttcttttcaagatttttaccagcagtgtcgggaggcattcctcgtcaatagtgatctgacactccgggcccagttaactgaatttagggaccacaagcttataagaacaaagaaggtaagactccactattgtagcattgtatgccaggaatagtccgtatcatttacttaaggacacatatatgtttgacttagacctgattttgaaactgatgttccctgttgagtcacagagattcatttaggggatgtgccatttgagtttgtagaaagagccatggtagaagtaccctgcttcagagcagagcagaaaactcacatgttctagtccagagtaataggcaattagaaacatggtgagtcaaataattctgttcttttgttttttccctcttgctcattcattaatttggtctgtatttattgagtactaactacatagatattgcactaagtattaggatacagtagtaagcaaaaatctgattgcttttcttatggagcttaaagtctaatgggggagatggacattagtcaagtaatcgcacacataacattttaactgtaaggaagtcctatgattagaaggtacatagttctgaaagagtttatttaaataggtggatttgacctaattatggatagatatcagaagagaccactgagctgagatctaaaggaagactaggaggccaggcgtggtggctcacgcctgtgatcccagcactttgggaggccgaggtgggtagatcatttgagcccaggagttcgagaccagcctggcaacacaggagaccctgtctatgaaagaaaaaaaaaaaagagctggttgtggtggcacgcagctgtacctgtagtcccagctgcccaggaggctgaggtgggaggatcacttgagcctgggaggtgaaggctgcagtaagccatgatcgtgccaccacactccagcctgggcaacagagtgaaaccctatttcaaaaagaacaaaaca

SEQ ID NO: 26783 - DNA, 1004 bp, Homo sapiens
ctgagagcattatatataatgctttctgagaaatcctttggtttttttggtatccctccactcccacagtgtaataaaacatgcacagattcacctccaatctattgtatacatcttgcctatttcccatgccttattaaagctgctttctttaggctgagcacggcggctcacacatgtaatcccaccactttgggaggccgaggcgggcagatcacttgagctcacgagttctagaccagcctgggcaacatggtgaaaccccatctctacaaaaaatataaaaatcagctaggtgtggtggtacacgcctatagtcccagctactcgggaggctgaagtggaaggatggcttgagccctggatgtcagggttgcagtgagctgagatcaccccactgcactctagcctggacaacagagccagaacttgtcttaaaaaacaaaacaaaacaaaaagctgctttctgtagggcctgacttcagtgctaatcatgtctattttatgagtaaatgacatatcttctcaaataaattacatacccctaagcaatcattattttatcctatactactttattttttaatacctaggcattgtgtatggtagaggaaataatcactgaaatatcactaaaaataataattgcagctggacatggtggttcacgtctgtgatcctagcactttgggaggccaagttgagtccaggagttcaagaccaacctgggcaacttagtgagaccccgtctctaccaaaaaaacaattagccaggcatggtggtgtgcgcctagttccaggtaatcgagaggctgaggtgggaggattgcttgagtccaggagttggaggctgcagtgagctatgattgtaccactgcactctagcctaggcaacagagtgagaccctctaaaaataataataataataattggatttcttttctttttagattcttctttagaactcttccttctcatccacaatttggatagccagatgttg

SEQ ID NO: 26784 - DNA, 1023 bp, Homo sapiens
ccaaagtgaagacccatgtgtagctttttgctagagttttcatttcaaaaaatgatctctgattcatcagcatgaatttccaagtttggggtacagggcaatgcactttcctcagtttatttatattattgtttttaaaaatttgcaatacttaccaaagataaaggatttgttagaaacagcttttggaagaggagcagtgatataggtttattttactaatgataatagtaagtaaattataaagaacctttaatgttttctgagaaagtaaagcctattcttggagtttataatcatttaagtggttctggacaaaacttaccaaattctttactgttattactaaaaagaatgttaacaattttaagaaaacaaaaaaattattttttaagaattttgtttatcggttgatatactcattgccaaaccagattaaagtaatattccaattggattggcttcttctaagctctacttctaaggaaattgtttggattgatttgctgtctgtgctttgagaatgacttttttcccctcctccttttttttaaagcaaactttgcgtaacttattgagcaaggtttccccttccttttctgccgaacttaaacaactaaatcaacagtatgaaaaattatttcataaatggatgctgcaattacagtaagtattatcattacaaacccttgtaaaataaagaataatatttacatgaatctttatgttaaagtaagttaacatttttctttttacagtgagtttcagatatttagtcatatataaaaataaatgtaaaaatagacattatgactcagatatagaaatgtcactttattgtatgactcttcccagaaattctacagtttttaagaaatttgtgtttatcagacttgacagccattgataagataaatagcatttcttagaattatgttattggtttaaaaaacttgaatatttcctttgtcaagattaataaatataacaattagaaaaaaaaattataaagttttccacagc

SEQ ID NO: 26785 - DNA, 1049 bp, Homo sapiens
acttggaaaaggtaaatctgtttcttcatttgggttcattttccacatgcctctcatggtgtgagtgtgagagcatcattaaagataacacttatatttttttatttaaaatggcctctattataagtgatttggtctttggtctttagaaaaaaaaagcgagagaaagaaaattgttaaagtaaaaataaaatggcccctaaacaaaagaccactattccatttattctcggttgaagaaatggccatctgttcaacactctattttatgtattatttatatgtattatagactttttggcacaaaataaactgttcacactttatggaagatttaaaagattttaaagtataattttaactctgcacagttttcacttgattttagatctcactttctggcccttctttctcaccccccatcaaagatgtgcctcaactatatatggtaagaaatgaaaggaacataagtggttgatggagaggagagtatggtaattagagaaagcagcaaggtcaaagttagttatttgtattttcttttaaagaaatctgtgggtaatatgaaggaaaatttgaagattctgggaagacagctaataaaggtgaaagcagtattactcctaatatgggtaggattatttttctgataaaagtaacagaggtttttaaagaatttttgtaagcgtaataaggttatttccctctttatctactgttgtcctttaaaaggtttttatatatttctttgtttacagcttcagaactagcaaaaacaccacaaaaaagtgtttcattcagtttgaagaatgatcctgagattacgataaacgttcctcaaagtagcaagggtaagacattacattagttctttgaaaagaattttcatagttgcttcaagatagagcatgttacttttttccttgtttgtgaatttttatatatattttcttcttttctgaaaattcattcaacaaaatgcaattaatatttcaactcatgtaccttagtatacccgtgtttagcagtcagtaagagggaaaaatatc

SEQ ID NO: 26786 - DNA, 1006 bp, Homo sapiens
aaaaataaaatatgttaaatgttgacactgatgaggaatatatgagaagtaattataaaacctgtatttctgaatataagttaatcagttgccaaaatcagtttagtttttctaaaatgtgtaacattaaatacattactgattttgaacataacatggtacatacaataatttacattaattgatgtgtttcttagtatttattatctacatcaagaaattaagtttttttggttggtcgcggtggctcgctcctgtaatcccagcactttgggaggccgaggtaggtggatcacttgaggtcaggagttcaagaccagcctggccaacatggtgaaacccagctctactaaaaatacaaaaattagctgggtgtggtggcacacacctgtaattctggctacctgggaggctgaggcaggagaatcacttgaacccagaacgtggaggttgcagtgagccaagattgcaccactgcactccagcctgggtgacagaaagagactccatctgaaaaaacaagaaattaagtttttaaatctataaaaatgactgaatcctgtataggagcactgagaaaccagagaagaaatgctgatgtaataattagaaagataaagtagacagcaagaccaaaatgaaaccctaggacaatggtgcaggacaaagaaataccactggagaaagaggagaattattattgtaaagtgaaatagaactcacaggagtaatcaagtagtagttctccatttggagaattagcatgctcataacttaaagatgataatgtgttgtatttgtaagcactgcataaaactggaatattatcctcattctgcgcatttctgtcatcatatctgaaagaaatacacattttaaagtcatgagaagatagttttatagatatttcgtctttattattatgaccatgaaatttcaggaacgcagtttaacagactgatcagactttctataatctttgtttagttatgatgctctttaatga

SEQ ID NO: 26787 - DNA, 1022 bp, Homo sapiens
ttatgtgtacctaataggtatatcatactggtactgagcatatatagaaaatactattcatagaggagtcatcaccacccaacctccttgcctgtgtaggcatatttcttctgaacctgaccacacaagtacaacattttggtaacttcagtcttttcagtatttttgtaatcttagccatagtcctatgagaaatgtacataagagcaaacaattcaggatagaaattagcagaaagctgggaatgatgtgaaataactggcagcatagtacagaaatgtaaggtatatgttttgcttctggatttttagaaattgtgctaatcatgtttacaaattaaggcatattcagatgtctgctattatgtttaatattgatttgataaaaaaatggaattaggtgtagcttagagtataaatgagtctttttaaaaatgtgtatctggaagtagggctaataaagaaatccttttattttcaaagaaatgaacttaattggacaactcatccccaattacagaattgatatcaatatggtttgctgtatttgagtataaacagctcagtgttaattatatcaaaggaagttctttacatcttcattgattacaaaatttaccaaagaaaatgtatctaccaaatataatttttaaagtacttgttaaggaatgaggcctctttaacatataaagtatcttaaaaatattctctgacctggaaaataggtttacagtagctacaagattccattttaggttttcttatgtcaataaatgtcaatattttacacttccagcaaaagtacccgttaaagctaaatctaaatattattcctcatagcacagtttctggtctccttaaattaaggatcctactcatcaggattgaataaaaagggggaaattcctaaaattggtatattgtataatattgtgggttaagtaaaatttaggggggcattatggaaatgtacctattttaaagggcagtggcaattactataatattggttaaactggtaaa

SEQ ID NO: 26788 - DNA, 1033 bp, Homo sapiens
ggctcactgcaacctctgcctcctgggttcaagcgattctcctgcctcggcctcctgagtagctgggactatagacacgtgccaccatgcctggctaatttttttatttttagtagagatggggtttcaccatgttggccaggctgatcttgaacacctgaccttgtgatccgcccgcctaggcctcccaaagtgctgggattacaggtatgagccaccacgcctgactctaccatcattttttactctcattagtcttttatgaatttttaaaaaattctttaatttttaaaatatttttatttttaattttttaaataataagcttaaaaatattctttaatttttaaagtcttccatactacttagaaatcaccttagattgatttgtttttgttattctttattattctaggaaaataactacttaaaagaatgttgacactctaattgttgtatttcagtttaaaggaatctaattgctgtattctaggtgttcagtacattatacttttttgcttatatttatttggctgaagaatttgagaacactgataatcatgtaggtaaatgatacctgttgagctgaacttcttctactttctgtctttaagtaaaatccaataagaaacttatgaatcaaacttgtggtctgcagtggcctttgttgccactacactaagtcgtgaggataacatttaaagaaactttactagtagtctaaaaattgtattctattttcctgtcaacacacagtatcctgaccatctcatagctctttgcactattaatttgcttaattaattccgtgggactttgttttgtgtttaaaatagaatgtctcccatttagccaggaatcattttagcacagtatatttctgaataatagattttaattaagttgtgtgtatcatgaaataaaatggagagtagtaaagtattaaagaatggatggttcttcttcttcttttcttttttttttttttttgagacagagtctcgctctgtcacccaggatggagtgcagtggc

SEQ ID NO: 26789 - DNA, 1050 bp, Homo sapiens
attattattctatttttttctcatgatgtccagttaaggaccattggtattgaaatttcttcaccttgaagtcttatattttgtgtatttagtatacattataaacaaaattccacataataaagtttagttgtataactgaaaggtaataaggtacaagaaaattgaatctcatgataaatattcttctgtaccagtgctcactcctctcttagttactttaaaaaatcattagcaaacatttccatctctagaagtctgaaggaaggagcaagggctttagaatgacttgcattcagttcagaaccatgccctgccacttattaggtgttttaaatttgggcaagttacttaatatcttgacttcagttgcctcatccataaaaaagaaaacattgttagtaggactaaaaacaacttgaagaattcattatgttgcataaggtgtttataaatgtccattattattaccatcaaaattaaaagtgggtttaaaaaaatgaaaattgatctaggaataaaattctctactttcctaacttgcctgattgttttttcttttcaagtaggaaatttgttatatatcactgtgtttcctatagtgcttaccagcagatacttagtaaatgtttgttgatttaataatggaatttggtgttttagattatgcttagcattaagctatcatttttattaatgtgtttagtgtaataaaattcaataatgggacacatgaaacaaacattttgcaaagtgtcatgtttgacaagttgttgacataacttattggtgctgtggttcagttatcttttgacagtgcaaaattagtatactatagaaaaatgctcagttatatgtcagaaatgtaaccctaggctttggactccttttgattccctcgatgtctgtgttcttccttttctgtggttctcagtttttcttaatcacagtgggagtcatccatatattcttttctgtttttccttctttccctccccagcacttcgttgtttcaaatagccccagggggagttgtatatttctcttaaa

SEQ ID NO: 26790 - DNA, 1026 bp, Homo sapiens
acacggcgaaaccctgtctccaccaaaaaatacgaaaaccagtcaggtgtggcggcatgtgcctgcaatcccaggcacttggcagtctgaggcaggagaatcaggcagggaggctgcagtgagccgagatggcggcagtacagtccagcctcggctcggcatcagagggagactgtgcaaaggggagaggaggaccgtgcaaaggggagggggagggggagagagactattctatttttcaaatgaaggtactaaaatatatttttaggattttagagttggaaaataactaatcattgtaggaaactgaagcccaaagggtttaaatgagttgtctgaggacatataaacagtatggttcattgactatatatatgttttttaagtacccgtcttacatccagaaatcatagtatctttgttagctttgaatgcatagtagtgagcaatgcaaaaatgtaccctgttctcttggaatttacaatccagtggggagatggacaattagtaagtaatgaggtctgataaagaagttacaaaccccgaagttctaggcaggaaataaatcttgtgttggaatggaaaatactggggaatggaagaagagctgctatttacataaagtggttcagaaaggctgctgagacttacaagatcagaaggagccagccacttaagtagcaggagcaggacagcattctaggctggaacagcctgcacagatgtgctggagttaaggtgcacgtaaagctgtagagaaactcaaaggagagtatggccagaacatagaaagctgtggggagagtagtatgaaccataagacagggaccagattgcatagtgcctttttcaatcatagatttcaaaattatggcattagattcaaatctgagttctgccacttaaactgtgttaccttgtataggtcacacacccatttacactttaattttcttatctattagatgagaataacaagctacttcataggacatagtatcatggagattatataatgcttatagc

SEQ ID NO: 26791 - DNA, 1060 bp, Homo sapiens
ctctcttattggtttttgatacaggtttcacacaggcttcatttgccaattgtgttgtttagttgggaagtaaaaggttcttgagattggggtggagatggggagaggaacactgattgattcctggcttgggacaggcgattgttgctatattgctatactcttacaggagtattatctcctttgtcaaaatatagccaagatgtgaaattgaaatagtaattctccttacttaaaaattatttatttctttttttgagacagagttttcacttttcttgcccaggctggggtgcaatggcacaatctcagctcactgcaacctctgcctcccaggttcaattgattctcctgcctcagcctcccaagcagctgggattacaggcgtgtgccaccacgcctggctaactttttgtctttagagaccatgtttcaccatattggtcaggctggtctcgaactcctgaccccaggtaatcgtcccggctctgcctctcaaagtgctgggattacaggcatgagccaccgcacccggctcctccttgcttaaaaattctaataagtggctgggcacagtcgctcacgcctgtaatcccagcactttgggaggctgaggtgggcggatcacaaggtcaggagttcaagaccagcctggccaacatggtgaagccccgtctctcctaaaaaaaaaatacaaaaattagccaggcatggtggggcgcgcctgtagtcccagctactcgggaggctgaggcaggagaattgcttgaacctgggaggcagaggttgcagtgagccaagatcatgccactgcactccagcctgagcgacagagcaagactccgtctcaaaaaaaaagtgggggaggggctgggtgcaggggctcatgcctgtaatcccagcactttgggaggctgaggcgggcagatcacgaggtcaggagattgagactatcctggctaacaaggtgaaacctcgtacaaaaaattagctgggcgtggtggcgggtgcctgtagtcccagctactcgggaggctgaggcagtagaatggcatgaact

SEQ ID NO: 26792 - DNA, 1059 bp, Homo sapiens
attttttggcctctcgaccagctgagacattcctccaggagatgtatggcttgagaccctcccggaaccctcctgatgttggccagttgaagatgaacttagtggacaggctgaagagactggggatagccagagtggtcaagaaccctggtgcccaagagaatggaagatgccaggaggcagaaattggtcctcaaaaaccagattctgctgtttatttaaattcaggtagcagtttattaggtggactaaggaggaatcagagtcttccagtcataatgggtagctttgctgccccagtttgcacatcctcacccaaaatgggtgtcctgaaggaggactgaggttcagcagttaactgaccttttatacaagttagcacatgaaggatagatatgcactgaaacatgtggtctggtctgacttgagagaaaaggaatgttgcacaagggttgtgaatgtgaaagggggaatggaggaatggaaataaaattgggatgagccctaatggaggaagtcgggcaaattgaaagtataaatgaatgggccatgagtgttcagagggagaaaagaaaggtttaatatactccttcagttgagttttcttgtcttgaacataaaaagtgaatacaaataaattcagtaatactaaaacatacagagatactgaacttgctggcacatttacttctggtaagcataaagcagagagaacccaggttagaaggatgggaagagaaaaggagcagttttattgcttatagaaagccgttctgaggggttggtggggtaagctcagtctattactgagacaatagtgagatggcttatatgtttcccctgttaatatctggttaaattatgtatccatcaaatggtatgctcgcagcattagcaaaattaggagtttcatctttttcattgaatcacaggtggagactcctattttcctttctgttttcaggcctttgagcccctgggagcccaaataccactcaattattttgtatttatgattaataaaagttcattttttaaatttgtatttttatacaacct

SEQ ID NO: 26793 - DNA, 1818 bp, Homo sapiens
aacccagccagcagaattacagtatgccaatgagctaggagtagaagatgaagacataatcactgatgagcaaactactgtggaacagcagtctgtattcactgcacccactggcattagccagcctgtaggcaaagtatttgtggaaaaaagccgtaagtagatgccttgttttagaatatgaactctttaaaaattgtccaaggatatcctttatacttctggaaatctgaattaaggaattaagcaaaactgtgtacaacaatttatacacaaaactggtcatcatgctatgattcatgagagtgaaaaactggaaacaacctaaatgtgaaataggagaggaataatgtcagtaagttgtggtgtatctatataataatgttcttcaccattaaacataatgtttagggagaatttttcattttatggaaagattctgataaaaaatgagcatatacacatgtgcacacacacacacacagtttgatctatgcataggacaaaagacttgaaggaaataggctcaaatattaatgctggttgtttctggatttatggggttatgggcaatgtaaagatcttccccacccctgcctgattctttattctttcttgtactttaccagtttgctgcaattggtagtagttgtggtgggacagataataatataaattctacaattgacaataagagaaaatacatgatgatactaccatattaaataagaaatacaacattatagctgtatattcttttgcaagatagttgtgacattgtataatgtatactaggtttgcagtgtattttagctcaggctgctataacaaaataccaccgactaagtggcttaaaccacggacatttatttctcatagttcctaaagctaggaagtgcaagacaaggttccagcagattaggttactggagaaggccccttcctggcttgccgacagctgccactgtgtcgtcatgtggcagagagagctctggtgtgtcttcttcttcttaaaaggattataatctcatcatgggagctttatcctcatgacttcatcgaaatctaattacctcccagtgacctcgcactcactggggggttagggcttcaacatatgaatttttgggggacgcattccgtctataacacagtgtttaagaaaaacctactcaaagcatgatcatgactatatactaccatggatatgttaagcatatgctgcctaaagaactcatctgaaacataaaggttagtccttaaaatttacaatttagattttgtgtaccttgttttagaaccctacttcagaagatcccatttaagggatcttgcagttcttggccaataagaaacctgtggtctagagaggctgacttacccagtgtctcacagtttggttagggtggaactgggacttgaactgtggttttatgacttctagtcacatggttttattcatctaccacgtggtcatttaaattaccgcagttctttttcaagcagtatcacttaatcctcatttttattcttgcttcacttagcatagaaatttccctgctagagtaactggccataaaaggtaccagtggttctattgtctgcccagaagttgtcttttcttagggaaaattgtcacacccctgtctttcatcctccaaaacacctgcgaactgggtttggtgaggataattgaaatggaacctttcctgtttcctgaggtctatttgtggattactagatatacaagaaggagcctctgaatcaacagtaaaaaggctaaagccctgctcatacaatattgcagtgctgactttt

SEQ ID NO: 26794 - DNA, 1028 bp, Homo sapiens
attctcagttgtatgttagaaagtttctgttctttggaacaattttgcacaaaagaaatgattaataaaaggttgatatgactttattagcaggaagctaggaaacctggcagtgccagctgatgagaagtggaaagcggtgtttgacgaatgttggcgccaactgggctgtgagggcccaggccaaggggaagtttggaaagcatgggacaatattgctgtggccttgaccaccagtcggcgccagcacagagacaggtgagtgaacacctgctcaacatacagcagagcatgttaggaagatgaaacttaagaccagtaagtagtcaaggctcaccacatttaatttaaaagttaatgatttacttcgcttctgagtaagagagattaaaacacactttctttatcttctgttgaactcaactgttaaacctgaacagaatacatggacagttatttatgaactctgaaaagtaaatatcaacaagtagattgaggaagaaaacctgaattcaaagtaccacaaaaccagtggtgagtttacttagatgttttgctccaatatccctcagccagaactcagtgcagcctgaaacgtgaaagcaagtactgtggtgcagacagacagggatacagaaaaaatccctctggttctggctcaaggagtgacaaagggactcctaaaactcagagtggttgatatatactcagttttctttctgtcttttttctctattctctcatgcccaagcctccaggaccttctgtggcagtaatggtagcagctggagcaggcgtgaacaggaaacttgcaaaagtcaaaactcttgagagagtggaatcttcttccccctttggtggctccttagctcaagggaaggccaagccccaaccccattgcatttttggctttgttctctgttctcccaccatctgtccctagatgtggcacaatcacggaagtgggcagtttttggccagaggacctaaaaaggggtgcctgcgaaccagaaaatactggggatgtg

SEQ ID NO: 26795 - DNA, 1065 bp, Homo sapiens
aagctgtgttacctcattggtcagcatggagcctcattgagcagcttccttcatggggtaaaggaagccaggagtttggtcatcctgaagcattcaagtctcttcttggatagttatacagagcaagtatccagtcccgtgtcatgttcaatctctgcagggttattctgccaaggagaacagctccttaatcagaagagactagattagggagagtgatataaggtaatagaaattgcaaagcagtattttaatcttaagccaactatagttctggattgctaaaatttagtcttctctaaatgaaaaaaaatttaaaaataatgaattatcatgttttcttctatattctagcagagtgatagcataatttacattaaatgtactataataagtctggttctttagaaaacaattttgtttacttaactaaattgtactaaaacttggaagaaattagtaactaaacaaattatttcaagaccaactgctgattgtaaatatggagctgttctgatgtctgcttttgacttttatataaatggaagttttaaaagacccaactatttttaacatgaagatgtttttccttaataaaacctggaatagttattcaaggttctttgcatatttttcaagcaaaatatcccaagtgtacttgaaaatgtaacttaaaatgtttctcacgttttcttaacttgtattttgatatgatgatgtgaggcataatttaagtgttattttaatgtatgttaggttatgctttgatctgaagtatgtataggttttgttctctattcattcacacctcaaccatccagcaaacactgagtgcccactcagtgccaggcatttgcggggagctccaagcccacagcagcacagcatggggcctgcgaaaagcaccagccctcagggagttcgtgttttgttggtgttttgttttgattatttataacataataacatgtgtttattactgaaaactgcacaaataaagataatcaaaaatcacccataatcctaccaccagaactaaccactgtttatcatcttagtgtattt

SEQ ID NO: 26796 - DNA, 1022 bp, Homo sapiens
gatgtgatggtgctcaaaggaaatgctcattggaacattcagatttgggatgctcagtcagtaagcataaggcaaatattccaaaacctggacctgaaatccaaaacacctctggtcccaagcattttggataagtgatactcaacctgtatatttatgtaacatctcaaaactatatataatgtgacatacaaagtgaagacagccatgtcttgttaagaactggtgcttcctgtacagcctagaggcataaagttaatttcttagttttggccaaaatgaatcgctaatatttttaagccattgcataattttttgctgttccaacttgtttagtagtagtgaattgtagatattagtgaatgtgtctgttttgtcttattttttgcttattttatcttaacatggttatttattttgcctttgaacacttggaatctgtttctataatagcctggatgatggccgttaggagtggattgatgtgaggagtttgtaggatgaggctgaaggaaaggattagcctcctgcactttgtagaaattctcactatagtgcagaatattaaaaagagtcatttttaaaaagatgaattaatgtgaaatactgtgtgcttgaaccagatttctacaactgcttttgaaaatttaaaaagaaaatccaatttggttaaatctataggggactaaaagtttgctgttaaaatttttagttaattcactaacccttttttttttcttttttcttttttttaaccttcagatggtgaggtctacagctttgggactcttccctggagaagtggaccagtggagatttgtccaagtagccccattctagaaaatgccctggttgggcaatatgttattactgtggcaacaggaagcttccatagtggagcagtgacagacaatggtgtcgcgtacatgtggggagagaattctgctggccagtgtgcagtagccaaccagcagtatgtgccggaaccaaatcctgtcagcattgctgattctgaggccagc

SEQ ID NO: 26797 - DNA, 1028 bp, Homo sapiens
tagtggggaaatggataaactggtttattcatgcaattcaatactatcttctcataaaaatgaatgagctagatctatacttaccaacatatatacatctcaagtatgtaatactgggtgaaaaaagcaaaatgctaaaggatttatacagtaagatgcatttgtgtacactttgaaagcaacataatagcatgcattatttattgatatgtgtatatctaatgaaagtacataaaagtaaatatgaaaacgtgggaatgggatacattaactttagaaatagtaactaattctgagtggagtttcttcacctctgtaacttattttttcttgtgttttaaaaaagagctgaagccaatatgaaaatatgttaatatgtgttaaaactggatgatgagtacatagatttgttatttatttttacagttttatgtatagttaagatagtttgtgaaactagcactttaacatttttatttataatcaggactgtttcccaatatgtttgctttattttactttgtaccctcaaattaggagactgtggaaaaagaactcttctttccctgcaataagaaaggaatgtgccagtgcagctccactatgtaaagcttttctaaggagaggagacagaccaattatttggtcagttttgctttgctgtttgtgctcctgggaaaatgctttctttaggacatgaagcctgcaggggaattaacattctagagatgcttgggaaatgtaggcatataccaatcatgaactctggaagtataggggagcaagttgtataataaggccctcaaaggaatttggacatgttgtgactcagatacaaaattactacagatttgtgtagtattagcattaacactttgaaaagcttaacttggttacattttattacaacgtagttatcttgagtttataccttgaatgcaagtatcccagttgttgctcaaagaaaatagttgtctctatagatattagtaagtaacctgatgacaatgtgttaaatggttgactaa

SEQ ID NO: 26798 - DNA, 1143 bp, Homo sapiens
cagtagtttattattatttttttttaattttttgaggccgagtctcactctgtcgcccaggctggagtgcagtggcgcgatcttggcccactgcaacctgccttctgggttcaagtgattctcctgcctcagcctccccagtagctgggactacaggcgtgtgtcaccatgcccggctaatttgttctatatttttagtagagatggggtttcactgtgttagccaggatggtctcgatctcctgaccttgtgatctgcccgcctcagcctcacaaagtgctggaattacaggtgtgagccactgcacccggccagtttattactttttattaagcaatagtattccattgtatggatataccatcttatgtttacttatttaccagttgatggacatttgggttgtttataatttttggctattatactactactactactgaacattcatgtacttctctttgtgcaggcatacattgtcattttccttggttagattcccaggagtgaaattgctaggttgtatggtgaatttaacttcttaaggaactgccaaacttttttcaaaataattgcaccattttatttccaccagcaaagtgtgagggttctagtttctccacatctttgccaacatttggtattgtctatattttattttattttttgagatggagtctcgctctgtcacccaggctagagtgcagtggcaggatctcagctcactgccatctccacttcctgggttcaagtggttctcctgcctcagcctcctgagtagctgggattagaggcatgtgccactacacccagctaatttttgtatttttagtagagatggagtttcactatgttggccaggctggtctcaaactcctggcctcaagtgatccacctgcctcagccttccaaagtgctgggattacagacatgagccaccgtgcctggtatattttaagtaacagttattctagtgcttttgtttttttgagacaagagttttgctcttgttgcccaggcttgagtgcaatggcacaatctcagctcactgcaacctccacctcccaagttcaagtgattctccaaccttgcctcctgagtagctgggattacaggcatgcgccaccacgcctggctaattt

SEQ ID NO: 26799 - DNA, 1060 bp, Homo sapiens
tatatgtgggagctaaaaattttgatcacattcaggtagagagtagaaaaatagataaaagactggaaagggtgagtggtggcggcagtgaggaggattaagaggtaagttacaggatacaaacaaacagtgaaatagaaggaatgtatcaagtttgatagcagagtacggttattatacttaacaaaaatatattgtactcagatgacaaacacactaaataccctgacttgaccactactcattatatacacatagcgaaatttcacatgtgccccacaaatatgtacaaattattaacagtaaaccatatccttgtccaggtatggtggctcacacctgttatcctggcactttgggaggccaaggtgggaggattgcttgagcccagaagttcaaaacttgcctgggtaacatagtgagaccctgtttctacaaaaaatttaaaaaaattattcaggtatggtgacacacacctatagtcccagctacttgggatgagtcccagctactgaggtgggaagatctcttgagcctgggagttggaggctgtagtgagctctgatcacaccattgcactccatcctgggtaacagagcatgaccctttctcaaaaaaaaagtaaagcatatccttaatcacaatagccaagatatggaatcattgtaagtgttcatcaacagatgaacagataaataaaattatggtatgtgtacacaatggaatactattcagccttcaaaaagaaggaaatcctgtcatttgtgactaaatgaatgaacccagaggacattatgcaaagtgaaataagccacagaaagacaaataccacatgatctcacttacatgtggaatctaaaaagttgaactcatagaagtagagagtagagtggtaggtagttgtggggagggaactggggggatggccaaaggatacaaaatttcaactagaccgggaggagtaagttcaaaagatctattgtaaaacgtggtgactgtatttaataacaatatattcttgaaaattgttaagagaggctgggcatggtggatcatacct

SEQ ID NO: 26800 - DNA, 1047 bp, Homo sapiens
ataaaaataatttatatttgatgttataatacattatttaatttttatagtaaattcactaatctgttttgtttagaccagtatgagagaaaagccagacttcgagttaatactttgtaaggttatctgcactctcatctgtggttggcaatatttgatgcagtttatattagatttatgttgttgttatttagatagtttggagctgagatgaggacaggagctgagatgaggacaaactcttcagttttaattttttgtttgctcccatatatttatcatttttttccagctctcatgggggaatgtgctttctacatcggaagtaaaaccaaaactgaagcatgtcatagccaagaaaaatagacataatgtttttaaaacagacataatacttagaagaaaatgttatgcttttggggtgcttataacatatatttgtttatagttctttaaattgtcctaataaaatttatatctcaaggtttttcactctgttcaagagacatgcactgaacttctgaagataatcgagaaataccagctaagactcaatggtatgaaatcatagttatctatctgataatccccatttaaaataaatattagcattttttaaaatgaaagatttaatgtaaaaacaattttgtgaatagcttcttatggcaaaatatgaatatttacagttacctgttctcaaaggccccagtattctctcttctttcctcagttaatcaaatcctctgacccagatttattttttgctgatattttttttctttgagacagggtctttctctgtcactcaggttggagtgcagtggtgcaatcacagctcactacagtctccaccacctgggctcaagtgatcctcccacctcagcctaccaagtagctgggattacaggcgtgtgccaccatacctggataatttttgtatttttttgtagacacagggtctcactatgctgcccagactggtttcaaactcctggcctcaagtgatcctcctgcctcaacctcccaaagtactgggattacaggtgt

SEQ ID NO: 26801 - DNA, 1048 bp, Homo sapiens
agaaatgatggagataaaagctttctcaaacaaaaactgaggtagttcatcaccaccagatgtgtcttacaagaaatgataaagggagttcttcaagctgagaggaaaggatgctaatgagtaacacaaaaacatctaaaagtataaaactcattggtacaattacacaaatttagaataatagtataatggtgggtctttaatatgaatgttaaaaaacaaaactattaaaaataatggctgcaataggcctggtgcggtggcccatgcctgtaatcccagcactttgggaggctgaggcaggcagatcacctgaggtcaggagttcgagaccagcctggccaacatggtgaaacctcgtcttcactaaaaaaaaataccaaaattagctgggcctggtggtaggtgcctgtaatcccagctactcgggagactaaggcaggagaatcacttgaacctgggaggttaaggagccaagatcatgccactgcactccagtctgggcaacaagaacaaaactctatctaaaaaaaaaaaaaaaatagaccaagaagcagcttccctgctccttctgggatctccatctggttcagcccacctgcctccactcctgcatcaaccatgtccatcatggtgacccagaagtcctacaaggtgtccaccagaggtggtcctctggcccccaggccttcggcaactgctcctatgcgcgtgggcccggtgcctgcatcagctccttgagcttctcccgagtgggcagcagcatctttcggggtgtcctgggtggaagttatggtggggccagtggcatgggaagcatcactgctgtcacagtcaaccagagcctgctgagcccccttaacctggaggtggaacccaacatccaggccgtgtgcacccaggagaaggaccctcaacaacaaatttgcctcctccatagacaaggtacaattcctggagcagcagaacaagatgctggagaccaagtggagccctcctgcagcagcagaagatggcttagagcaacacggacaacatgttcgagagc

SEQ ID NO: 26802 - DNA, 1048 bp, Homo sapiens
cgggttcaagtgattcttctgcctcagcctcccaagtagctgggattacaggtgcctgccaccacgcccagcttatttgtatatttttagtagaaacagggtttcaccatgtttgccaggctggtcttgaactcctggcctcaagtaattcacccgccttggcctcccaaaatgctgggattacaggtatgagccaccatgccgggcctcaagtatcttttatgaagaaattacttgagcctatccttttgctaaataagagtgaaaactgatagaggctgtagtagaataatggccttccaaagatgtccatgtcctaattcctgaaacctatgaatatgttactttctgttgcaagagactgtgttcaaagagactttgaagatgtaattaagttaaggatattgagatggggatattatcctggattatttaggtgtgtccaatataatcacataggtcttcttaaggggaaggcagaaaggtcagaagaagataagacaatgtgatgacatatagaattagagaaagattagaagatgctatgctgctggccttaaagatggaggaagggggaccacatgccaggaaatgtaagtggcttctaaaagctataaaagacaatgaaatggattctcctttgtagcctccagaagaaatgcagccgtctgacaactttattttaggactctgacctccagaatgggaagacagtaaattaattttgttgtaagttactaagtttgtgatcattttttatagcagcagtaggaaattaatacacagggaatatatctttctcattcttgacgtttcctcctatgttaaaggagctcaattagtttaactcctagtctctctctaccctctcatttctttctagaggaggagtggcttgtctggtaaatttgggaagcaaaaattgggcaagtttatctcaattccttctttcttctctcatacagggaagcctctggtgattcagttacctctgactggcttgttgaatttaattttagtgctcggttatgaagattatttggctctc

SEQ ID NO: 26803 - DNA, 1244 bp, Homo sapiens
ccagagattctggtacgttgtgtctttgttctcattggtttcaaagaacttctttatttctgctctaatttcattatttgcccagtagtcgttcaggagcagattgtttagtttccatgtagctgtacggttttgagtgagtttctttttttgtttgtttgttttttgagacctctgcctcctgggttcagggaattctcctgccgcagcctcccaggtagctgggactacaggcgcccaccaccacgcccagctaatttttttatttttagtagagacggggtttcaccatattggccaggctggtctcaaactcctgaccttgtgatctgcccgccatggcctcccaaagtgctgggattacaggcctgagccactgcacccggcctcaggtgagtttcttaatcctgagttctaatttcattgcactatggtctgagagactgttttttatgatttctgttcttttgcatttgctgaggagtgttttacttccaattatgtggttgattttagaatatgtgctatgtggcactgagaagaatgtatattctgttgatttggggtggagagttctgtagatgtctattaggtccgcttggtccagagctgagttcaagtcctgaatatccttgttaattttctgtctcattgatctgtctcatattgacggtggggtgttaaagtctccccctattattgtgtgcgagtctaagtctttttgtaggtctctaagaacttgttttatgaatctgggtgctcctgtattgggtgcatatatatttaggatagttagctcttcttgttgcattgatccctttaccattacgtaatgcccttctttgtcttttttgatctttgttggtttaaagtctgttttatcagagagtaggattgaaacccctgcttttttttttttctttccatttgcttggtaaatattccttcatccttgtattttgagcctatgtgtgtctgcacatgagataggtctcctgaatacagcacactgatgggtcttgactctatccaatttgccagtctgtgtcttttaatcggggcattgaacctctttacatttaaggttaatattgttaagtgtaaatttgatcctgtcatcatgatgctagctgggtattttgcacattagttgatgcagtttcttcgtagtatcattggtctttatattttgatgtgtttctgcagtggctggtactggtttttcctttccatagttagtgctt

SEQ ID NO: 26804 - DNA, 1048 bp, Homo sapiens
cctcccaagtagctgggattacaggcacccgccaccacacccagttaatttttgtatttttagtagagacggagtttcaccacgttggtcaggctggtcttgaactccgtacctcaggtgatccacctacctcggcctcccaaagtgctgggattacaggcatgggccactgtttctggcctgctatgtcttcttgataaattgaccctcttattattaaatgtccatcttatccctggaaatattatttatcttgaaacctgttttttcagacattaatatatagttaatgtttatgcagtatatctttatgcttttccttttaacttctccgtgtatttgtgtttaaagtatgtttctttcttttctttttttttgagacacagtctttctcccttgcctaagctacagtgcaatggcgtgatcttggcacactgtaatctccgtgtcccgggttcaagcaattctcctgcctcagcctcccaagtagctggaattacaggcatgagtcaccacattggactaatttttgtatttttaggagagacggggtttcaccatgttggccaggctggtctcaaactcttgacctcatgatctgcctgcctcggcctcccaaagtgctgggattacaggcgtgagccactgcacccagcctaaagtatatttcttttaaattacatgcatttgggttgtacttgtctatcctgtattacaatctctgctttttaatggtgttacatagtccatttatatttaatgtcatttttaatgtgtttggatcaaccatattggtgttccttttctattttcccatttattattattatcattattattattattattattattttgagacagagtctcattctgttgcccaggctggagtgcagtggcatgatcgtagtttactgtaaccttgaactcctgggctcaagcaatcttcccccatcagcctcctgagtagctaggactacaggtatgtgccaccacacacagtaaatttaaaaaaaaattttttttagagacagggtctcactgtgtt

SEQ ID NO: 26805 - DNA, 1002 bp, Homo sapiens
atattgattcctgtttaaaactttttacttttttttatagagacagagtcttgctctgtcacccagcctggagcacggtggcatgatcattgctcactccctgcagcctcacacttcctgggctcaagtgatcctcccacctcagcctccaaagtcgcttacactacaggcgtgtgccagcacttctggcctttttttttttttttttttttttttttttttttgtagaaatgaggtcttactgtgttgctcagacaggtctcaaactcctggcctcaagcaatcctgcttcaccctcctgaatcactgggattacaaatgggagctacaacacctggtttctattgatttctaaagtagtaatattgtagcccaagaatgttatctgtgttatttcaatacttttatttttctgcctagcatatggtctgtttcggtgaatcttccagttactcttagggaaaaataatgtattctgctcttggtgggtggactggtgtataaatgtcaattaggtcaagttggttaaaagtgttgctcaaaaaaaaaaaaaaaaaggcggaggcttgcttaaaactttcatggtttcacttttttttttttttttttttttgagtctgaatctcactttgttgcccaggctggagtgcagtagcatgatctcggcttactcaccctctgtatcctgggttcaagtgattctcctgcctcagccttcccagtagctgggattataggcatgtgccaccacacccagctaatttttgtttttagtagagatggggtttcaccatgttggccaggctggtctcgaactcctaacctcaagtgatccgcccgcctcagcctcccaaagttctgggattacaggtgtgagccactgcacctggccttcactttttaaaaaaatgtctacttatgtcagttactattctgggggcagtgttaagtccctcattgtgattgtaaatttgacagtttctccttttagttctgtcaggt

SEQ ID NO: 26806 - DNA, 1031 bp, Homo sapiens
gtattggtatatcattgtgggttgagaattcattcctgctcttttatcaaaagtttttttttgtttttgaggggaaattcagataatatacaattagcctttttttttctttttttactttggctaaacaaacccaaacaaccgtttcgaagtgtacaattcagtgatatttattgttttcacaatgttgtgagatcaccagttctctctagtttgaaaactttttcatcaccccataaaaacaccccttactcattaattacttggtttgtagtttttctgttgctgagtggtattccattgcgcagtatactataatttgtttattcacctgttaatagatattctaatttttggccattttgaataaagctggcaagaacatttacaggtctttgggcatatttttcatttatcttaggtaaatacataagaatacaattgctggattgtgtgcgtttccaagaaactcaattttttctgaagtggttatacccattttatattcccacgaccaatgtatgaaggttccagttgttcctcattgttgccagcactttgaattgacagattggttgttagcaagatcaaatgggggtgtgctgatatctctttgtggttttaatttttgtttccctgatgaataatgttgaatatatttttatgtgcttaatggccattagtatacagtcatatactgcataaaggtgttttggtcaatgatggaccacagatataataatagtcacataagattgtaatagcatatttttattgtaccgtttcagtggttagacatgtttagatacacaaatacttaccatcattgtgttgcagttgcctacagtattcagtacagtaacatgctgtacaggtttgtagcctgggagcaatagctcctaggtatgtggtaggcttataacatctaggtttgtataagtacattctatgatgttctcacaatgataaaatcatctaatggcacatttctcagaacatatccccacagttaagcaatgcatgactgtata

SEQ ID NO: 26807 - DNA, 1648 bp, Homo sapiens
gcttccctgctgacctctttttaacgtggtgcttatttttatttcgctattattttgtaatgggaatgtcttccttagaaactaattggcaaccgatggataaaaacaaaacatagtaaatgtgcagtttgagctgaactgcagaatgcacgggcccgcgaggggctccgcgcacagatcctgctccttaggccggcaacccgaccccacggcacagatatggctcctggaaacgcgcgtcagctggtcaggtgcccaggtgatgtcagtggtcagatacctgatgctctaaggaagacggagaggggaaagcggggagtccatcctggcagctcacccgcgatgctggggcgttgccagtagagggggtggaatcatttttcgtgtaatagatgatcttgatgcacacagcataaaagctgttataaactatgggtctctgtaaaatagattgttgggaaggtaacatttttccatggttttgatttttcccaaaagtatttatgtattgatttatttggttctgactcaggcgacgtactgtaagacgatattactttaatcatcttcacatcagtatttatggaatagccacaggtgcctcatcctttagtaggagttaattatacatttactggccgagtaaacatctccgaatggtatgtatgtatttttatgtgaccaaaattttaaatcgtttagtatttgttatctgtgcctatcatacccagtattctttgaaatctctttatttaatagttcaaaatgattgtttatctagtcgttgaaacagctatgtggaaggcagtgttctaattaccagtttaattttagagttagaagggtgctcagagatcagccagtccaaagaggaaaaattgcaaatatgagaactggtggaaaaagtaggatgccatatttttattataaatatcataaaaatataaaacaaagtttataccagttatggaactaggaccagatatcaaaatattagatacaaaatagataatatactgtcttgttctactatactgccaaacttggtgatttcattgtgtgattctatatttacattttttctgtacttttatactttagctttttcagtactcactgcgcttcctttaaaattttattctttttatattctttaacaacaacagatgggatatgtgagttttaaatatatctgtaactggaaagatttcctcgttcgaagtagattttgttatttaataatattcttattaccctcttccattttgtctatttttcattcatcacttaagttttgtgtttttttcggaaatcaaaattttcaaacttgtacttggatccagtattcaccattaaaatttagtcaccttctatgtatctcattattattttgccattattgactcacttgcatgtaacactagggttttaaaattccttttttaatttagttgagataaaaaaagactaaaattccttttttaatttagttgagattaaaaaaaagactaaagtaacacaatatctatatttacagaggccgacattaacaactgttaacattttgttgtatttctttctagtatttttttagataaggaaataaaacatttccaataaagctgaagtctcatcccacccatccgtt

SEQ ID NO: 26808 - DNA, 1048 bp, Homo sapiens
gatcacctgaggtcaggagtttgagaccaccctggccaacatgtcaaaaccctgtctctgctaaaactacaaaaattagctgggcatggtggcgaccgcctgtaatcccaactacttgggaggctaaggcaggagaattgcttgaacccgggaggcaggggttgtagtgagctgagattgtgccactgcactccagcctgggtgacagtgcaagactctgtctcaacaacaacgataacaaaatattgattcggcagggcacggtggctcatgcttgtaatcccagcattttgggtggccaaggcaggcggctcacctgaggtcaggggttcgagaccagcctgaccaacatggtgaaactttgtctctactaaaaaaaaaaaaatccaaaacaaattagccgggtgtggtggcacactcctgtggtcccaagtacttgggaggctgaggcaggagaattggttgaacccaggaggtggaggttgcagtgagctgagatcataccactgtgctccagcctgggcagcagagccagactctatctcaaaataaagacaagtagattgccaatttttgaagaattcatcaagatattttaaggaaggcactttatattaaatatatgtcagatcctttagaaattgcatacagttggttgggcacggtggctcacgcctgtaatcccagcactttgggaggctgaggcgggcggattgcctgagctcaggagttcgaaaccagcctgggcaacacagtgaaacctcgtctctaataaaatacaaaaaattagctgggcgtggcagcatgtgcctgtagtcccagctactccggaggctgaggcaggcaaattgcttgaacccgagaggcagaggttgcagtgagctgagattgtgccactgcatttcagcctgggcaacagagcaagactctgtctcaaaaaaaaataaaaaattgcattgcatacagttttcactgtaaccctaatctttcctcatgtgtagattagaataaattttttagacaaaacctttcatcagtattaaacatt

SEQ ID NO: 26809 - DNA, 1102 bp, Homo sapiens
ctcagcctcttgagtagctggaactacaggtgcatgccaccatgccctggctaattttttttttttttaaagagatggggtcttgttatattgcccaggctggtcttgaactcctgacctcaagcagtcctcccacctcggccttccaaagtgctgggattacgggcgtgagctaccatgcctggctgttactccacatctttaccagcacttgatatggttacttattaaagtcatgattaacttttaataagccctggatctttgataattatgaaatgttcatatttttagctaatttttaagttgttgttattcatttttttatagagatggtgtcttgctttgttgcccgagctgtctcaaactcctgggctgaagcagtcctcccacctcatagcccattttttaaaagtgttggctctattttacttattgatttttttgttgttgttgttttgctttgtttttacttactgatttgtaagagttatttatgtattctggattcaagttctttgctgaatatatgtatttaagtattttctcccactctactttgctgataccatttatttctaggtgcatactttcgtaagcttgctcccatagttcatttcgtttgagagaaataatagtatattgagtttctcatttagcttttttcctcctttcactgatttttcctgagaaatcatttagctttttatagggtttaaatttatacatgcataaattattagtttaagtcatgccagaaacctttgaagtgccaattacaatgaaaatgttgctgcgttagaaataatagaaaaatttggggcccgagaaggtggctaacacctgtactttgaagccaacactggaggatcacttgagcctaggagtttgagaccagcctgggcaacatagcaagaccccatctctaaaaatttaaaaattagccaggcatggtagtgtgcatctgtattcccagctacttgagaggttgaagtgggaggatcacttgagcccaggaagtcaaggctgctgtgagttacgattgcaccactgcactccagtttgggcgacagagtgaggccttgtctcaaaaaaagcaaag

SEQ ID NO: 26810 - DNA, 1024 bp, Homo sapiens
agaaatgaagtaaacaagccattcatttatataaccttcttacctcatagtaattgacatatttccagtctatatcagctactcttaagtgctgtcatcaactgaaaacgcctagttgatagtctgagcattagcatacactaaagttagtgctaatagagttttactatagtatcaatctactctttatcatgacaaaatggtaaaagttagttaaaaggtaacaaacctgagggcaataccatattgatttattaatatgaagggttataaatccacttagaatttgaaagtttcctaagccacattgaagtattctggacttaagagtgtttctttgacagttagggtaacaggatgcttgtattcaaaggtgaagatttatgatttttcatattgagccgaaaagttttatatgttgtttagtccaaactttagtggattaactgtacctcttctttttggttaaggagagatagaaactcaacttgaacttatttaaccttaaaagtaaatggattgtgagatccaaggaaagattgaacaaccacatcacaagaagggtaatggtgcatttgggcctcaggaaccagtggaatagaggcttgaatgtggtccgcacaccctctcgctgtcttgtccctcaagttgactttattctctctcacttcagattggctttcttcaaaagacatggcaataagcttggccttcaagatttcccagattttatgttctgtcctatctgcccctggaaaaaggctaatttcagttctgtggaacacaagttctttgaaaaggtcctgaatgaggaagagacctactgttgtaggcaaataatatgaatcatattacatatgtcttttcccttcatatacatctgtttagttttgcagtggctcctgggataagatgctaaagatctggtctacaggtaaattaaatatttattttaccttgacttaataatgttgtttcaaaaatttaaattcggaggctatatggtggcttacgcctataatct

SEQ ID NO: 26811 - DNA, 1020 bp, Homo sapiens
ttgccaggcatggtggtgcccacctgtggtcccagctacttgggaggctgaggtgggaggatctcttgagcctgagaggcagaggttgcagtgagccaggatcaatgcaactgcactccagcctggggaacatagtgagactctatctcaaataaataaataaataaataaataaataataaaattcttgctttttctttttgcttaatattatggtcagtaaaatggaggcggggggctaatataattgtcacacacacacacaagaatatacatatatgtgaattatatacataaatatatagctatagccttattgctcaaagtgtggtttgaggatcatcagcatcatatttgcaaagttgtgcaaccatcaccacagtcaattttagaacatttttcatcatccttgagctgtttgttaaataatacccccagccctaggcaaccactgatctactttctagctctgtaactttctctcttctggacgttttgaataaatggaattatataatgtgatcttttgtgactggcttctttcacttactatgatttttaaaaaatggtttcattatatcatagtatatattagcacttcattcctttttgtggccaaataataggccattgaatggaggtaccatatttttccattcatcagctggtgggcatttaggttgtttataccttttagctattatgaatagttgttatgtgaacactcgtacaagttttcgtgtggatgtatgttttcgtttctcttgcatatatgcttaggagtggagtttttgggtcagatgtaattccatgtttgagtttttgaggaactgccagactgttttccaaagcaactgcaccattttacgttactgccagcaataatcagggttccaattgctccatattttcactgacacttgttattagctgtctttttacttatagcaccctagtggatgtgaaattatatttcattgtgtttgattaacattacctggatgactaatgatgagcatt

SEQ ID NO: 26812 - DNA, 1107 bp, Homo sapiens
tccacttgcctcggcctcccaaagtgctgggattacaggcatgagccacctgcacctggtcagaaaatactttagaagatccttgctaggaagagatcagtgtgcatttctcaatatataaccaaatgcctgaacacaatcaaatgtagttaaatggcatacaagtttaaatataagaaaatacaaaaaaacccagaaaatacaatttagaatatttagcatttctagtcaacctaatattttctagtgtttttttaaggaaagacaacattcctgatgcttaaagaaatgcaaatccagccaggtgcggtagcttacgcctgtaatcccaacactttgggaggccaaggcaggcagactgctgacatcagaagttctagaccagcctggccaacatggtgaaaccccgtctctactaaaaatacaaaaattagccaagcgtggtggtgggcgcctgtaatcccagctacttgggaggctgaggcaagagaatcacttgagtgagctgagatcgcaacacttccctccagccttggtgacagagtgagactcttgtctcaaaaaagaaaaataaaagaaaaagaaatgcaaacccatgaaaagtaattcagaagagaatatgaagcctgttgtaacagagatgcttagaagtggaaagttagtaagctctatctacattcattttcttctttaaaatgtagaaattgccagcctaagcaacatggcaaaaccccatctctaccaaaaaaaaaatacaaaaaaaaaaaaaaaaattagcctggcatggtagcgcgtgcctgtggtcccagctacttgggagaatcacctgagctcagcaaagttgaggctgaaataagccgtgattttcccactgcactctagcctgggtaacagagtgagactgtctcaaaacaaatcaaaagtagaaactagattagatagaatttacacttaacatgattccagagactgtttataatggtagagagctgagagttttaacaactgttcagctttttcttttgccaaaattagtattcactattttaaaattaactttttcaaaaatcagaaatatgctgtatagaatattcactttctggctga

SEQ ID NO: 26813 - DNA, 1084 bp, Homo sapiens
tgccttggccgtaagttcaaaggcaacaataaagtgtactttcattaataccaccatggactttcgagtattaatatgacaagaaaagacaactattcattttttttaaggggactggacacacaaacttcaggagggaagaatcccctctcccattagaatccctctatcttgataaaatggttgctttattggtcagattttggacttggatcgtctgttataatattaatagtacacagcatgtaagattttctgcattcatttgaaattcctaataccaaccatcttttaatttataaaaaaagagggaaacttacaataaaacaaaaaatactaccctcacagatgattaatagcatgcaatctatgaaatattacatacattaaaagtctccaattactgtgtgcctgacccatcacacagtatccttccaagacaatctatagaattcaaaactgtacaaaaattataaaatatgcagaaaacccaaaaggtactgtttgtaaaacaaagatcacacacacattagtactaaatagggaaaaaaaatcagcagacccatggactacccctgctcccaaccacaggtcttcagtataaaggacttcaccagtgtcttctgcactgcccccatcccgtaggggtccaaaagaccagctgcattcctgctgaccgccactaactctgttttctgcatagttgtcttccctgcttctgtagtggtgagctgtgggaactttttttttttttttttgatggagtctcgctctgtcaccaggctggagtgcagtggcacaatctcggctcactgcaacctctgcctcccaggttccagtgattctcctgcctcagcctcccaagtagctgggactacaggtgtgcgccaccacgcccagctaatttttgtgtttttagtagagatggggtttcaccatgttggccaggatggtctcaatttattgacctcatgatccacccacctcggcctccgaaagtgctgggattacaggcataagccaccacacccagcctgtgggaactatttattggatttcaaaacaccctctgcctcattaatcc

SEQ ID NO: 26814 - DNA, 1032 bp, Homo sapiens
acgcctgtaatgccaatgctttgggaggcctaggttaagggatcacgtgagcccagtagttcaaaaccagcctgggcagcacagcaagaccccatctccacaacttttttttttttttttttttaaattagccagacttagtagtacacatagtcctagcaactcaggaggctgaggcaggaggattgcttgagcccaaaagttcaaggctgcagtgagctataatcacaccactgtgctccagcttgtgcaacagaacgagaccctgtctcacaaaacacaagatgagaatatgtcaaagggatacacagaggagccagtctgaaagagctccaaaggtcaaagctggaacaatttgagcaatacaataagtaatatagtataggattgtaacccatggacataaatatccatgagtttatactgatgtaaataaatcattgaataaataaatggggaagaggagagaactgtcctgtgtagatttctaaatgatttatgaagacactttgtcctgaaggaagtagagcttacctaagtcctcaagtgtggactgtgcttagtgacttgcttccagtgattatggaacggggattaggggtaacttcacagtggagaaacctgacaaacactgccacaaccatgtggtcaaggtcagtatctaagtcacattggttatagggacctttgacatagtgtgtgagaatggcttttttcctctatgatcttcctccccaagttccataaacagactaatcaagagaaaaagcatcagacaaaccaaaactgagagacagtctacaagatacctgaccactattcctcaaaactgtctaagtcatcaaaaacaggaaattctgagaagccgttataggagacatgatgactaactgtgacgtggtgtcctggatcagaaaaggcacatgagggaaaaactagtgaaatccaaataaagtgtggagcgtagttaatagtagcaggacatttccttagttgtgacaaatgtagtatagtaatgtaacatgttaataa

SEQ ID NO: 26815 - DNA, 1046 bp, Homo sapiens
gtggtgcatgcctgtagtcccagctactcaggaggctgaggtgggagaatcacctgagcctgggaggtcgaggctgcagtgagccatgatcacaccactgcactctagcctgggtgacagagtgagaccctatccccctgccaaaaaacaaaaagtttaaaaataaaccacagtcattccttggtatacatagggaattgcttccaggacccaaatcaataccaaaacctgcacgtacacaagtcctgaagttggtcctgagaccttggacatgaaaagtcctcctgtatatagcgaatttttaaaatttttattattattttgagacagagtcttgctgtgtcacccaggctggagtgcagtggtgccatcttggctcactgcaacctccacctcccaggttcaaggaattctcctgcctcagcctcctgagtagctgggattacaggcatgtgccaccacgcccagctaatttttgtatttttttttttttagtagagacggggtttcgctatcatggctaggctggtcctgaactcctgacctcaggtgatctgcccgcctcagcctcccaaagtgctgggattataggcgtgagccaccatgcccagcctgtatagggaattttgcatcctgagaatactatattttttatctgagtttggttgggaatgcagagccctccagtatggagggtcaaatgtatttatagaaaaacatttacacataaggacactagtagctcagactcaggttcaaggatcagctatagttgttaattattttgattctaagcagtgctatttaatgacccttaagctgtttatatctttccaagttctatttaaatcattttaatttacattgtattgcaatatatgaattaaactagatcctgaaggaattcttaaccactgtttagccccttaatttcaactgggtttgttctgaacccacaaagcttaagcttcccagttgaaggaacaacttagcaacagtagcactttctgtaagtattctaatttttacaccatagagaaagttct

SEQ ID NO: 26816 - DNA, 1048 bp, Homo sapiens
acattgctttaattgtaacttttactgctaatggttgtccatactctgggtttctttagcaaactttgcttcctagttcttgtttatattatcacctcctcatttaattaaaacatttactcatataaacagaatcttagttaatattaacttagtcaaattgaaagaggaagctgcaattttaattgcccggttctctgcccttggaatgttttgaatcagtccagccagattttcactgggctggtattttatatccatttgaaatattttagccattgtcatcattaactagggaataatacagtagggaagctgagttgctttctacctctttttaagtcatgtttttatttcattagcttatttaaataatgttaaattcaagaatatcagacatatttctgaaaaatatacagttatgggtaatgtccctaagttgttgttattgtatctgaggtttgtttgctttaatttctttctaaccttgtacatttatgaaagaagatggtagaccaaaatgaaaatctgcccaagaagcagctcaaagaaaagaccctttaacaaagtcagcagtgggaccctttctctaccctgagtttctctttttaaagcagatctatgactggtggtagaaatttaaagatcagggaagtgtagaagtctaagctggtcagtgtagaagtctaagtctagctctttttcctttttcctcagctcttccctcttcgttctctatttactctttccctagagtccacacttgtatcttcagctaggatctctattctagatggatctgtctcccaagagcacatttccaaacagctgttaggcatttcctagaagatcaccaacatcttacaagcaccttaaatcccacaggtgtttagcctacttacctacattatccctgggctccataatttatatctgttgtcatcttttctgtttctgtttaggatgctgacattcttctaattaccaggtttaagccctctgatcatctttgctacctttcttctcatttaatgtctccaatttctaa

SEQ ID NO: 26817 - DNA, 1056 bp, Homo sapiens
aaagaatgcccctggcctactcttccagcccatgtaggcatttcatcttgcacccctgtaaagtaagattaaacgaaccttggagtatattggcatggaagcaagggggtcaagagaaaagaactcactgactggtcagaaaggagagattttcaagaaagagaaagtggtcagcagtgtcagatgctgcagagaggtccagttagctgaaggcggaaaagtgtatgtggaattcagtaacaaagaggccattagtttcagatttttagcacaaaagaactttgaggagtagagctacaacttagtttttcttctttcctcttgtcctgtaatgcagggtttctgtaacaacagagaatgactgtgacatggatcggaacttagaaagcatttgttgtgaaggattattaactggaactaataaatactgtacccagatcagtcaaacagtgctcattctgctagtgttttccatcacaagaacattagtatttaagtgctctatagaatgtaggaaatattttggatattagatttttaatgattataggaaactattcagaaaaccactaacagctggagaatgtattttagtcctacagattctagatcaaaatgataatacaaataaaccactacttactgcttctaatggtagtttgtttttttttttttgagacagagtctcgctgtgtcgcccaggctggagtgcagtggcgcgatcttggctcactgcaagctccgcctttcgggttcacaccattttcctgcctcagcctcccgagtagctgggactgcaggcgcccgactcccgggttcacaccattctcctccctcagcctcctgagtagctgggactacaggcgcccaccaccatgcccagctaattttttttttgtatttttagtagagatggggtttcaccatgttagccaggatggtctcgatctcctgacctcgtgatccacccgccttggcctcccaaagtgctgggattacaggcgtgagccaccgcgcccggcttctaatggtagttaatattaagtgattactata

SEQ ID NO: 26818 - DNA, 1030 bp, Homo sapiens
ctcccacctcaggtgtgcctgtagtcagccaggactacaggtgcttgccaccatgcctggctaatttttgtattttttgtagagacagggtttccccatgttgcccaggctggtctcaaactcctggatgcaagggatccgcctgcctcagtctttccaagtgctgggattataggtgtgagccaccaggcctggcctccaccttacttttctagtagtaacatctaaatactatttctcttgtttccttttttaaataactgaaagtaatactgtactatacatactatagtaggcttatgctatatttggagagtagacctgtttttcccactcaaaggataaccactgtttaacactttcgtgtgctttttctctttatgtgtatgcatacagcagaaacaaagaggaaaaacgtaagggtaggattgtccatgtaatggtagttgtgtcgttttgtattggttaaaagcttgggctctggagcaaataggccttgcatcctgactgtgtgaccttggataatgacaattacttaatctgattaagtctcagttttcttcgtctgtaaaagggggtaataatagtacctacttcatagggttgctgtgaagactaaatgaggaattgaacataaagcctttagaatggttcctgaagcataacctttatattttcttggtgcataactttttctggtgcataacttttctatttttttctaaagatttttaatattctttttttttttttttttttttttttgagactgagtctcactctgtcgcccaggctggagtgcagtggcacgatctcagctcactgcaagcttcacctcccgggttcacgccattctcctgcctcagcctcccaagtagctgggactacaggcgcccgcacacccggctaattttttctatttttagtagagacggggtttcaccgtgttagccaggatggtctcggtctcctgacctcgtgatccgcccgccttggcctcccaaagtgctgggataacaggcgtgagcca

SEQ ID NO: 26819 - DNA, 1050 bp, Homo sapiens
gatcaggtcataaaagctctgccctactgaatggattcatgctgttatcacagaagtaggttagttattgtgggagtgggttcctgataaaaggataagttctgccaccttcctttccttcctccccgctttccccactcatacatgtactctcttgaccttctgccttctgccatgcgataacacaacaaaaagaccctcttcagatgtcagcgccatgctcttggacttcctgtctccagaagtgtaagaaataaatttctcttctttataaatttctcagtctatggcatactgttatagcagcataaaacagactagactaggagcttgcccagggttacacagtaggaaaatggtagagccaagtttccaaatcagatggccttgactccagagatgaagctattaatcactacagctcctgttgcacatgtagaaaaaaacccaaaaaactaagaaaagctagaaaacaactcaaggtattaaattaacaataaggtcagtatagactcaacttggcctcagaaggcttcagggacaagactgtgagcaagtcatcaagcagagtgggatttaattggcagagctgaaaacagagagcatcagaacaagaatagaggcatgagaacaagaatggccatgacttgctgtgtggtgccaaaagagcattaacttagtagaacgatgagatctagtaatttttagtagaatcttacctgttttttctttaagaatagaagaaaatgcaaatacctataatactatcatatggcacccaggtatgcataaacaaacttcaaattagctgcgcgtggtggcaggcgcctgtaatctcagcaactcaagaggctgaggcaggagaatcacttgaaccctggaggcggaggttgcagtgagctgagattgtgccattgcactccagcctgggtgacaagagcaagactttgtctcaaaacaacaacaacaaacttcaatgtatatggagtaaatagtacaattttcagttattgaggtctttttttccttcctggtgtactagaactggct

SEQ ID NO: 26820 - DNA, 1033 bp, Homo sapiens
ggcgcgatctcgatctcgggtcactgcagcctctgcctccttggttcaagcagttctcctgcctcatcctcccgagcagctggggatacaggcgtatgccaccatgcccagctgatttttgtattattagtagagatgggatttcaccatgttggctaggctggtcttaaagtcctgactgcaggtgatccgcccacttctgcctcccaaagtactgggattacaggcatgagccagtgtgcctgggcatgttgtaaaacttttaatcagaagtctgttaactttttttgtacttgaaaacaagtactgttttattttctgaacatttcattgtggtctttgctgcgtgtaggtttcttggtgatgcccttttcatctgtttctagttgcagagttttcaaggcaaagatgtggcagcaattgcaggtggcttggtggatgctgaagccctggtagctctcaaagatttgcttaatagagtggactctgacaccttatgcactgaagaggtcttccccactgcaggagctgggtgagaaatatgaagctaggatctaggctttcctttctttttttagttacaagttatgtataaaatgtgacaacctggattctccaacatatcccccagtttattttcatatatagaccaagatcaaaccagaagttgtaggaaatagaggaatccacttatcactaagtatctcaggcacagtggctcacgcctgtaatcccagcactctgggaggccaaggcaggcagatcgcctaagtgcaggagtttgagaccagcctggccaacatggcgaaaccccgtctctactaaaaatacaaaaaaattagccagacgtggtggtgtgcgcctgtaattccagctacttgggaggctgaggcaggagaattgcttgaacctgggaggtggaggttgcagtgagccaggatcacgccactgcattccagcgtgggagacagagtgagactctatctgagaaaaaaaataagtatctgaaatgttcatttaatttagaaatact

SEQ ID NO: 26821 - DNA, 1047 bp, Homo sapiens
ggtaaaatcttggctatcctcagctacgatgacctccaaagtatcacctccacaaacaagtttgcctcgtgctccaagttaagtgagttgtctccatctgtaccaaagaagttctcatcttcacagcctgccccggcctcgaagaaattccattttgagggggtggagaggagcataggaggagcactgagcccagccaccagtttttcagtgcataaaagcttcccacattgtatgtgtttagatttctaaactgctgaaatggtgggttttgtcatttttggccagctttacttttgcttttcagtgggaaggttttttgagctccttaatctcccatagacagaaatcctgcccctcttgttgaatcgtcccagatttggctagttggagccccttcaaactagcttctgtgtcagataatagttttaaagccttccttactgtgccaggaatttatgtgttcaaatgtgggtgtgccgggagcagtggctcacacctataatcccagcttttaggaggccaaggtgggaggattgcttgagaccagtagttcaagaccagcctggtcagcataatgagacaccggctctacaaaaaatttttaaaatgtggtgagaggatagtttgagcccaggagttctaggctgcagtgaattatgatcatgccactgtagcctgggcaacagagtgagaccccagggcaaaaaaaaaggtggggggttcttttatttaattgcagttcctctaagcttcattttttaaagtaattcagaaagggaattaattgtaaaaaaaattttttggtaaaccaggtaacagaaactttctttattcccaaaagcaccatagtaaacaccgtatgtgtttctcagaaagacagaatccattgatgtaatggatgcggttggaagtaatattgtggttagcacaagaactggagaagtgatgaggattttgccacgtatgcatgaggacatcaatgaagagtggatctctgataaaaccaggtatatgctatattgttttccttaacttttacagttt

SEQ ID NO: 26822 - DNA, 1387 bp, Homo sapiens
ccacgtacgaattgggggccctgaattaaatggcccacaaattgtccatggacctttcgttgcgtttggaagtaaattaataaaataggcatgtcttaagttcgtacctccacggctcccgaagatgacgggaaccagccctagaagcgccggagatgaccgaagacgcccggcctcgaggctggggccacttccggcggaactgcgggtccaagttgtccttcccgcctccgggctgggccgacctcagctccgccctctggtcggctgacggaaattgccgacaaacttgtcgaatgcaaggattctagtccctccgggctttccgttctccaggcccggctgacagagttagccgaggccgccatattgaataagcgacccggcctcctagggggtcgtcgtggtccagacagtttagcagaacagcctccgcggctccggggagaaggtgaggtcttgtatggatgggaagggtgaggtgcgtcggccagaggcttatttattgacgggactgtttcctttggcccacgcgacgtagtcttctgttgtccttgactgggcgccgcctcccgccccgccgcctcggaagcccctgagagccggcagatggggggcttttagccacggtctctggtctgatgaagcagaaaagaagatgaggatcagggggtcctcgggaacgctgtcacgaatgtaggcttgcaggtgaccttccctctgcagggaaaattcaggacatttccctctcagaggaggaggccgttttattccccgggagaggaccagtgtccgatgacttaggccttaagactaagcctttccccccagatttttacacgcctgatacagtgcatgattgtttggtcgctgttgtgttagcaatggctcacgcttctgtttgttgtccttgtttgtttggtccattgaccacgttggacagcatttttttattcctttaactaacgggaaattgagaaaaacgacttttgaaaagttagcccaggattgcattgcaaataacaaaacgttgtttacaggttattgggatccagtgcttgaactgtaaggtcttggatcagacacaactctgttcacacacgaattgacggtatagaagtgtaacgttaactgtttttgatgaataaacaagttatttttgttttgcggaatattcttgttttcaccgacttaaggctgccagagcacctgcactttttaaatccgggaaagtggtctctacaaattaacgaccagaaattagagattcagttcacttaaccgttattgaacatttactacgagccagaaatgagtccgtaaagaagaataaaatggatgatatgctgggggaatcgtaaatgttagatagcctggtcaatgaaac

SEQ ID NO: 26823 - DNA, 1047 bp, Homo sapiens
tctaatgtttttgaagcctccccttcctttccacaagcccccacccgcccccgcgtcaagctccttctcccacttcctactcccacacaacttcccagccactgaaacttttctttcaaatctctattatcctcttaacagttgcttgaataaatttatttttgcactatacattttctttttgccagatgtgtctaacaagtgtgtttggagagacctactcccagccccgtctccttccccgcctccccccgtcacattctctcaggccttctctggtatttataatatatcacagaagtacccagtcttatagccctcggttatgcctttttttgacattttattttttttaagctttttatatatatatatatataaatatattactttgtcaagtttttttgctgtacaaaagtcttaagatttaaaactattatttgtattatatgatggtggtatgttaatgttacaaaattattaatgaagaaaaaatttatttttgttactggtctgtttcataattcttttttaaattggtatattgtaagatatctatgcaaaaaatgttatgtgacgcatttttatttaagaatgtaatatgtgtaataaacagtagaatgtgtttggccttggaatactttactgtatttctccttagcttgtttcactggggaaaaaaatcttcgaaagacgcaagtgggtacttacatacttcgtgaaagttttctttcttggagaaagggaaagcaaaaggttgtattaggttatcttcgtttgggaagttgtgtgtgtgtgtgcgtatgtgtgtattttatagtttcattgaggcagctcaatgcccaaataagggtcactgagtttatttcttcaaggggaaaaagggagccaattgttggagattatgaaaagcaatattttagaatgatagagattacaagatgttatttgtttagggggttgggagaggcttattgaaagcggtttatttggcgagagaaggaggcagtttgttctgggatggtgtttaataggaacctattggga

SEQ ID NO: 26824 - DNA, 1033 bp, Homo sapiens
agggtatttgtcaaagtcttttctatgaatcttttcgaagaaaagcagttttggactatcgctgattgccaatacttttagacaaaaatcaaaacagtaatggcctgtagatgacaaagacttaatatggccatggttaaaaatctgatgagagttcattatagtcagcagttgacaaggaaatttagttatttctgtggatacaacattttaacataattgccagaattgttactgataacattagacttttaaaaatctcacattttcatatcaataatacgctcctaagtataactctaggtttagcattactcattatttgaccacacttactatataatttaatgcatcaaatatatgtaagcccaattattttaatatctttcttttacaaggtgagaaaaacacatattttgtagctttcaagaggcctaactggtaaatctcaaagtaagttcaaggtcaaaaagacttaatttagaatttgattttgggaagtatgtcaaaatgtcaaaaggtttaaaaaaattaaatatgatattggctatctaattaaagtgacagttttaaatagaaaaacaattttctattttttttaacatttttttagagacagggtctcactctgtcacccaggctggagtgtagtggcacaagcatagctcactgcagcctcaaactcctggcttaaagcaatcctctcaccttggccttctgagtagctgggactgcaggcatgcgccactgcacctggctcatttatttttatttttatttttgtagagatggagttttgcagtatttcccaggctggtcttgaactcctgggctaaagcagtcctcctgccttgtcctcccaaagcactgggattacaggtgagccactgcacctggccgacaacaaaagattttaaaggcaaatacaaaaggttgcatagttgtgaataaaatgtaatcaaagacctaataaaatacagcatgaagcccaaaaatgatcttgataaaacacaaaatctttgttttctaggtc

SEQ ID NO: 26825 - DNA, 1360 bp, Homo sapiens
ttgtttctctccatctgtatttttaatcatagttgtaattatgattatatatatgtaaatatatatgtctgcgtatgtgtgttttgtgtatccgtatacacacacctatacaaatgatgttttcacattatgtcataagcatttctctgctactgtatgattttcatactcactatttgtagtcactacaaagtgttaggttggagaagttttgctgttggagcctgagggtaagaaaatgttagtctcttcaaaatagaatcagtgagtactagaataggtagtgattttgaaatgtcaggaagagattaattattattctttttaaagtatattctctttttgtaaccttagtcatttattcctgaatttggggagaacccaccagaagcctggcggtccactgtggatggggcaataaacaggctggcaggtgtctccggaagcttacgttctgagtttagtgggtagaggtaaagaaagaagattaaaaaaaaaaaaaaaaagcggtgctatgtagatattaatatagggtgatgagactttcctgttaaaaaccagctgctaattcctgagtagttcctgtgttctgaggactgtgcattacaccctttcattctcacagtcaccctgcatggtaagtaggccttacctacttatagcgcccttccagtggtgaaagggaggcttcttggagggtaagtaacttgcctgaggtcacaaagctaatggattgtgcttagaatttgaatccaatctgactctcaaatcctcgttcttagtttgaaaatctccctggtcttatggtacttggaactgtagcagtcccccctcacctgtgatcactttccctggcttcagttacccactgtcagccttggtctgaaaacaggtgactagagtatgataagatattttttagagagagagagagaccacattcacataccttttgttgttgttgttgtttttgagatggagtctcactctgtcacccaggctggagtgcagtggtgcgatctcggctcacttcaatctctgcccccgcctccgggttctagcgattctcctgcctcagcccattgagtagctgggattacaggcacctgcctctgcaccaggctaatttttttttgtatttttaatagagatggggtttcaccattttggccaggctggtcttgaactcctgaccttgtgatccacccataacttttattatggtatattgttataattatcttgttttattatttattgtttatctcttactgtgtataatgtagaaattaaactttaccataggtatatacatattggaaaaagcatcttatatacagggtttgttactatctgtggt

SEQ ID NO: 26826 - DNA, 1049 bp, Homo sapiens
tttaatgaactgctaccccagccaaagaagcttctttcacttttgtgctctacagaaagcccaaggggggtaggagggacagagctttgaataactgctttctaacactaaatgtggccaacaggacagagcacatcacacgtataggcaggtgtgagggacagtggctaagaattgcctgctccctctgcatgctctttcttgtttccaaagtccaatcaagtgatcctgggaaacaaatctgtctggattgcggagggtggttctgaaagaactgccaagacgttaaagaagggtgaagagtaggcagaatataagtagctaacctgagtcaagactctcaaaagctagcagcctgatgacaataggatttatttcagccaggatagtgtctgtctgtgagtgcatcattttaagacagtatgacttcatgttgttacaaactatgtatagtatgtatgttttgtgggttgtatatatacataatatatattatatatatatatgagagatttggtgacttttgatacgggtttggtgcaggtgaatttattactgagccaaatgaggcacataccgagtcagtagttgaagtccagggcattcgatactgtttatgatttccatatatgtatagtgcctatcccatgctgtagtcactgttatgttaaatccagaagttacactagagccagcgatactttatttgtagacaatcaatttgaatccatatgttattactggcagatgatacatgattacagttctgaatctgtaacacttacaaaaggaaacccagagcagcttgatgagtttttgtttctgcttcgttcctgggagtcagtagaaacagcagttgtatgtggttatgttagtctcaagatacttaatttgttgaccttacttcagaaaaattttgtatgtattatatttgtgggaaggtaaaataatcatttgagatttttatcaaatatgaagattagttatttatgaaaaacaaagaaatgtctatttttctttgttcccaattaatgtagataaattttaaa

SEQ ID NO: 26827 - DNA, 1065 bp, Homo sapiens
cgctcacaggcaggaccgggccgccgggccccgccgccacctaccacaagcaggtgtccctgtcgcacgtgtaggaggctgccgccgagggactcggccggagagctgaggggaggggggcgttttgtttggtagttttgccaaggtcacttccgtttaccttcatggtgctgttgccccctcccgcggcgacttggagagagggaagaggggcgttttcgaggaagaacctgtcccaggtcttctccaaggggcccagctcacgtgtattctattttgcgtttcttactgccttctttatgggaaccctctttttaatttatatgtatttttcttaatttgtaactttgttgcattttggcaacaatttacctttgctttgggggctttacaatcctaaggttggcgttgtaatgaagttccacttggttcaggtttctttgaactgtgtggtctcaattgggaaaatatatttcctatacgtgtgtctttaaaaaaaaatgtgaacagtgaacgtttcggttgctgtgactgggaagttgttgggtgtgctttttcagccagcttctccttccactgcttaaagtgtccatgattctttaaggtgagctgcagtttatagccccaggtcatacctaggaggggagcataatgagctcagggcctccccaaagtgacaaggttagggagtgcttagcggttttgtgttcagccttagctttgtttatagagggaggttcagtttcttttctgtagtgcttgtaataattctcactcctaacagcaccatcgttgtgtcttgaataagttagaggtagcattatagaggatctggcataaatatttgcagtagtgagagcctaagcgatggtgattggtggagcttgaattttaggctggtgagatggcagctttgtgcctgagaggtagtgggtggttcttaagcttcagtgatcccctttttttttttttttttttttttttaaggaacttgtgttataattttggtaaaagtataaacccactccctctggacaatacttagcgacagttgctaaagggggc

SEQ ID NO: 26828 - DNA, 1050 bp, Homo sapiens
gggcggagccggggcggggcttcccggcgggcattagaagcaggtgacccgggcggggcgggagagggcagccagcctgcggccgtgagtccgctgtggtcgccgccgcgcgcggttccgtgctcgccagaggtgggcgaaagggtgcgagagcgcgggggaggagccgagcagggcacgtcccgagagcgtcgccaccgcccccaggagtccactggagcgcggagccccctgcaggggaggaggcgagcggcgggcgggacgcggcggccggcgctcaccatgcagtcccggcctggccagcgccggctgctcgcggtgctgtgaggcggcggggtcccacggcccccgcctcccgccttcctcccgcccaggtgctgccaggcgcgctcgccctccgtccggctcccggccccggggagaacgcacggcctgcccctgcccggctccgtctggatcatgcggggggctcccgaggaggagagggcgagtgaccggcctgcgccgcccctgttctgggggcgccccccactctgagtcgcccccacctgctgccatgtgccgctgccacgggtacccagcctgtcgctaaactttccgggcgccagcccggctctgagtcgcgcttctcagcggagtgacccagggacggaggacccaggctggctggggactgtctgctcttctcggcgggatccgtggaggtgagaaccttccctttctccctgttcttctcccgtttcctgtgcccttttccgggaagctgagggttctggtctccgggcactgcctgaagggcccagcttggaaagagagggtgggggagtcggtagtttggttacaggaggcggagcggggaggaaaggaaaggggttaacttaagagatttggagacagctcgcggggaccgaactgttgacgcctctccaacagggagtggttgcaatctttcttctcccccttcttttttaaagagtcctttccctggaatccgagccctaaccgtctctccccagccctatccggcgaggagcggagcgctgccagcgg

SEQ ID NO: 26829 - DNA, 1043 bp, Homo sapiens
ttatagaaaatttgaaaagtacagaaaattaaagaaaatattctccattatttctccatttttctacacatatgtatttttaaatagttagaatcatattgaatatataattttatatccagcattttttatcacattgtatcagaaccagaaaaatagtcacatttaatctataaacttatattaatgggtacttttaaagaaaaaaaaaatttttttttttttgagacaggatctggctctgtcatccaggctggagtgcagtggcaccatcttggctttctgcaacctctgcctcccaggctcaaacgatcctctcacctcagcctgccgagtagctgggactacaggtgctctccaccacgcccagataatttttgtatttttttttgtagagatggggtttcaccatgttgcccaggctggaggaaaaaaattttaattggctctaaaatcattaagatccatcgaataaacacaggcaggccagtccataaaaagatcactgggccaggcgcagtggttcacgcctgtaatcccagcactttgggaggccaagcctggtggatcatgaggtcaggagttcaagaccagcctggccaatatggtgaaaccccatctctactaaaaatacaaaaattagccgggtgtggtggcgggcgcctgtaatcccagctacttgagaggctgaggcagagaactgcttaaacccaggaggcggaagttgcagtgagctgagattgcaccactgcactccagcctgggcgacagagcaagaccccatctcaaaaacaaaaaacaaaaagatcactggactaggaacaaagaagtctcgatgtcgttcctagctactaatttgtgtgacctttgacaagccaccactctgctggaccttcataccaggcatatggcactgttttaagcttttattgacaaaaggagtaagatctttgcttctgctccattgctcagcattttgtatttgtgtttgatagtttgtcatgatgttttccgtaaagttggctgatttttattctgtttac

SEQ ID NO: 26830 - DNA, 1035 bp, Homo sapiens
ttagtggtgaggataactaattaggagcattcggatttaacaagcagaaaaacaaagcgtgacagctcgcctgtgttgttccatggcaagtgcctgtgtccgctgcagccggcactgccttcagaaaccactgaacataatctggggcgagacaggaacgaggcctccattaaaacatcactaaatctctgttaactattttagccacggctcttccaaccaattaatgagctaggaaagaggactataagttatttggggaacaaattatgccttttaagcaagtgggttttcaaaaaatgaatgcacaggctaagatcttgctggggaggaggaagggattgagtgttatcctttgaagttttgatagacaggcagcagagcaaatggaaaagtgctgtttctcaagagagcaggtgtatcttgagtgggtgccgaacagttcatgcctcatgctcggtctcccagtgtgtttcacatcgtacagggaggggaacgggaagagtgacaactgctgctaggtgccaggactggagctgggtcttctgacttctcactttcagtcttgatgtccttactacctgctgagcataactactagttttctggtgttttggtgatggggccagttagctgagtgggttaaagcaggtgattagcaaggtgctggtgcagattgttctttatgcaagctgacttttctgttctgcagacccaggcactacagccaaatctaacctgatccacagatgattgaaggatcgggggagctcggcacgggatgtggcagcaaatgtgcggcactaaggacaaagtcactgccttttgtggaagccagatcagaaagatgactgtgtgttgtgagtggtggatagagagccctgttgcccaggtgagaaggagctcagttgagataaggattccaggagccaactcgagcccctcaggtagagacaacaataccggttgaggctgcagctgtggagttggatggtgtttagtcagtgctgaaatcactttcctgggagtcccttg

SEQ ID NO: 26831 - DNA, 1034 bp, Homo sapiens
ctccaacactgggaatcacatttcaacatgagatttggaagggacaaatatccaaaccatatcagtatgtaaaagaagtttcaaaattatttgccttttcttaaatgtatttctggttcatatcagtttttggcatttctgcatcttcaggattttaaagactgtatgttttttcatttctgctgtccttccaaaacaagttagaatgtccttatctagaactggcttttctctcattatgtgcctcagaaatttgttggaaacctgtctgggacttctgaaatctagtctcagatgtgagagctgagaagtaggtcatttggttgtggtgggtgattttagccttattacaactacattacatttattcttctcccttttttcctctcactggcttctcctctacagaaggtggtggtgttgccatggggatgtataatcaagataagtcaattgaagattttgcacacagttccttccaaatggctctgtctaagggttggcctttgtatctgagcaccaaaaacactattctgaagaaatatgatgggcgttttaaagacatctttcaggagatatatgacaagtaactatagttcttttttaactttttctttattctcaagtaagctgacatttgcatatagagtatgtatctccctatccctatgattctgggtaaattgagtgaaaatcatcactgtctcttaaagataagggcaaaactgaggtttagcaggagtgaaacaaaaccactctgacttgcttttataagataaacatgttcttaaataaggtccccacatgaattgttttcagagccaggttctttaatgtttaaataaacgtacgctgttagtgataagttctaatttttcatgtgtgagtttctaagtcagacccatttccattctttctgaagcccattgttagaatttaaaattctgttggccaggcacggtggctcatgcctgtaatcccagcactttgggaggccgaggcgggcggatcacgaggtcaggagatcgagacca

SEQ ID NO: 26832 - DNA, 1049 bp, Homo sapiens
tcggcctttggatttttagccttgaagttaccccttttcaccttgccactagtgtcagccttcttgccttcaggcttcttctccttagtatccggcttctcaactttttcacctgccatcttgtaagatgggaaagagctgaacttaatttttttgataactcaggttcaccaccatgataacattctcaggggttactgagataaatagctgtatatctataaaacaattcactgaataattaactagtacctactgagtgacttctgtgtgccaggcatttggattggataccaggtatatgataatgaacaaaaccagatggaatttctatctttgtgatataaagtctagttgtgaaaaaaaaatgacaccacctaaatgatcacacaaatgtataattttaaaccttgatcaagtgctatgaagaaaatttttattgttaagaatattactttggaattagatcacggttcaatcccaaattgaccaattggtagtattgatcctgcacggcaatctgaattagatagaatgagaacagcctgttttctgggttgtgttgtgaagatcaaatgaggtaacaaatgtgatgttattttgttaattttttacgtgcttattatctgtcttcctggacttgaacataagcttcaggagagtaagaattttttggtctatcttactgaactgttgttttccttagtacttggatcagagagtcacatcatgggcatgaattaatatttgttgaatgaatgaaatgttgttcatgatttcttgcccatactcagcattcataaggaatattttgtacttaacgtattttttcttccctatagtcagattgatattctatttgttgctttcgtggctgtctcctgcagttctgcttctcttcctaatttgactctggactagaaaatcagataaccaatgtgatagatgacatagatgtctctgtaataagagatatttaaaaaaatctgtaagagagaaggcctctcttaaaagcaacaagaggatggccaggcatgatggctcatgcc

SEQ ID NO: 26833 - DNA, 1107 bp, Homo sapiens
agaagtagagagagggggtcaagattacccttcaaggccactgattttaaaggctataataaaagggacatacaaagtcacagaaaatattttgtttttaagatggaggaaatttaagcatctttattaaaataaagggaaaggaaggagctacaggtgagaaatgtagaaaacaccttatcacaaagttatggagggatcttattacaggaaaaaatatgcctgttccttaagagtagcatgaaatagattaagatatgtgtggatgcacttgtttctgaggtgattatagactggttaagattatagactagttaatctgaggtgattatagactagttaagactagttaaaggagcctgaggagctttgacaagtaaaacatttttccttttcccttattccttctcattttccctcccctcctctcctctcccctttgtttttggagcctgagtaatctacccctaggaaagggtgttagtggtttctaagaattttttttttttaatcccttaactataaatatgtttataatgaaaagtacttaattaatgcttataaaactagttaagaattgaacttttaaaatattctctaattgaactttctataaaataagtacatagtagtgaaattctacaaattttagttttttaatgttactcatgtttgagaatattactatagatttttaaaattaatcggagatacaattttatattatagcattatatgaaacagctttgattcaaagatatctggattgaagtaatgtgaaatggatctctatgagccttttgacactgggagtagaatatcaaatgaggcctaattttatttcttatatcttgctattttccaatacctttgttatttttccttcacatagttgtatatgaagaaaacatctttcagattcaaaggtttttaggagtaagggcttagtctatttaatggtatttcagacttgacacttaaaccacaaagcactttctgaagatgtccttgttaagcatataaatacttctcggaagcatataaatactatttatgtatttataataaatgggcaggtaagaaaactcataagtatttttcaaaatt

SEQ ID NO: 26834 - DNA, 1049 bp, Homo sapiens
aagcacaggtaacaaaagcaaaaatagacaaatgaaattgcatcaaactaaaaaggtttgacacagcaaaagaaacagcagagtgaagagacaacctatgaaatgggagaaaatatttgcaaactatacgtctgaaaagggaggatttccaaagtacatatggaagttaaattactcaatagtaagaaaacaaataacctgattaaaaaatgggcaaagtggccaaggaggtgtagcccggtggatcgcttgagctcaggaatttgagaccagcttgggtaacatgtcaaaaccttgtctttacaaaaaaatacaaaagttagccaggcatggtggtgtgcacctgcagttccagccactcaggagactgagatgggaagatcactcgagcccaggaggttgaggttgcagtgagccaagattgcgcctctgcactccagccttggtgacagaaagagaccctgtctcaaaaaaaaaaaaaaaaaggaaatgggcaaaggacctgaatagacaatttctttttccaaagaagatatacaaatggccaacacatagatgagaaagtgctcaacatcactaatcatcagggaaataccaattaaaactataatgagataccgtctcacacctgttaaaatggctattacaagaaaaagaataacaaatgttggagaggatacagataaaaggaaactcttgtacactgtgggaatgtaaacaagcacagatattacagaaaatagtaaggaggtttctctggaaatttaaaatagaattaccatatgacccaataatcctacttctgggtatatgtcaaaaggaaattaaatcagtatgttgagttgatacctgcactctcatgttgatactcatttacagtggccaaagtatgcaatcaaactgaccattgacagatgaatggataaggaaaatgtagtgtgtgtaggtatggatgtcagttaggaggaataagttctggagatggtcagcatagtgactgtagttaataataacataccgtgttgagtccctgacttatgatggctcaa

SEQ ID NO: 26835 - DNA, 1039 bp, Homo sapiens
gtgagccgagatcacgccattgcactccagcctgggcgacagagtgaaactccgtctcaaaaaaaaaaaaaaaaaaaaattggccgtatgtgcgtgggtctgttcctgagctctgtttttttccatatatgtgttcatccttttgctaatgccacactgtcttgtctactagaaattggtaagttgtgtgaatccttcaactttgttcttttccaaattgttttggctattctggttcctttaactttcatataaatctttgaattagcttgtagatatcagcaaaatgtcctgccaagattttgtatctaaacttataaatcagtttgaggagaattagcatcataacaatattgaatagttttatctgtgaacatagtgtaatgcactatttaggtcttgatatttttatgggtgttttgtatttttcagtataaagaccatgtgcatcatcttgtgtttagatttataccaaagcatttttgcaggtgttggaattattactgtttaaaaatttctatttctagttttttatttctagcatatagaaatataaatgagttttgtaggttgaccttgtgtttgctgccttattaaattcattagtcgaggagttcaatcccttgggattttctatgtagaaaatcacgtcatctgtgaatagagacagttttacttactttctaatctgtgctttttatttcttttttttttcttgctctacagcactaactaggtcctccagtacaacattgagtatgagtggtgagaaatgtctaccttgcctcattcccagtcttagggcagaaacattcagtctttcaccattaattatgatgtgagctataggcatttgtgtacatgctttttatcagattaaagacattccctctccttcctaatttgctgagtttttctcatgaatggatattgaattttgtcaaatgctttttctccatttattgacatcatatggtttctctttagtctattgatatggtgaattttagttattgttttcttttttttgagacggagt

SEQ ID NO: 26836 - DNA, 1803 bp, Homo sapiens
ttttgttttgccatccataacatttctgggctgctgatgtgctaaggaattttttttgttttttgttttttggttttttttttagtaaaattggaatgtaagttgaaaattctgttgtaaaaacgtaaaagtatgccagtgctttggtgggcagatcacgaggtcaggagttcgagaccagcctggccaacatggtgaaaccccatctctactaaagatacaaaaaattagctgggcatggtggcatgcatctgtaatcccagctacttgggaggctggggcaggagaatcgcttgaacccaggaagcggaagttgcagtgagctgagattgtgccattgcactccagcctaggtggcggggcgagactccatctcaaaacaaaaaaaaacaaaaaaaaaaaaacagaaaaaataaaagtaaaatttatacccaagaaacatagttggtttttggattatctagaactgttacctattgacagaatcaagattatgtatctagttgctttctttgaaagaggactgatatattttcataacttagttttgcttcttaaattctgtaagtttgatattttcatttctgtgtgttgtgacaaaaagtttaattcttttttccagttttcttccttctaggttcttcgaagttctgcatcattagactaaattcttttagaaaagggacctcttgttcctaagtatcttgggtgtatatgaaagaaataatcatcaaagatgatggtggtgcctagagtaatataataaagtattttagtagttgtaaagacatttcttagatttagcaaggatccaaatactcctgcccaattatgtgtataattggaaacctaaataattagaaactgagtatttataggaagatccaggtgctttttagaaagctatttgaggatttattttccataaactttccataaagcctagaatactataggtgcctaaaaatattaaacaatagatttggccaaaaaattgggggactgaaatatagtagtcgatagttgatccctggttacaagacttggcacacatacagaggaatagaaaatagcttatcaagatgtttatgtattgattacatgttgatatatgatactttatatatatgatgacattaaatttaatttttcatgtttcttttaaaaatatgtctagtagtagcaagtttaaaattacatatgtagccacttcatatttctattggacagttacattctatactaatgtttcctaatttttttgccttgagactccttcacaataaaatatatctcatgaaccttcttccttgaaattttaaaataattttaccattttggatagtatttgttcaagaaatatttattatgagcctgctatgtgccataaaatattctagaatacgatgatgagtgaacacataacacctgccttcatgtagcttttgatctatttggggaaaatatgtgatgaagtaatttctagtaaaaatttttaaatggatcatttgttataagtatactattgtatataaaatttcatgtaatataattttatatatttcttcatttattaagtgatagtttggtgttctctgagcttcctggatatgtggtttggtgtctgacattaatttggagaaattcttagtcattattgtttcaattttcttttctttttctcttctccttctggtattcccattatgcatatgttacaccatttgtaattgtcccacagttcttggttggatagtctcttcttcctcaaaccccctgccatctttgttctctttccttttt

SEQ ID NO: 26837 - DNA, 1014 bp, Homo sapiens
ttatttcacactttctttcaggaaaacgtagatttgggctttagagttagatgggatagagcagaatctaggggatttttgagggacggtgcttccaagtttgtgtcaccggtgtgctgaggaagggaccggtcttgctggaaaaagtcagattgcgtggtgtttggtagcaagaaataccaggcggtatcctggccgtttcagaaaccacaggaaaggaaagaggctggctttgcagtcgggagggcaggcactggatggacgttcttgtaatgttttcttactctgggagagtccgtttttgtttgtttttttgtttgaactgtggtaagcacattccgtttttgattccccaaacttcaggacattcatgttctggcgaggtttaggagacaaacttccttcgtctttagccagtttgcttaacttcatctgagtttgggtcagtaataattttaaatattgctggatggggcaggtttgttagccacaaaacctaagtgaagtgagcactgcagacaaaactggcaatttctgactaggaaaaaatgactctaaaaataattcagtattgagaaagaggcttaacagtgagtggtctctgcctttcccgttcttaataactagccatttctttgggttagtcacctctctgatgtcaaacttgtttcgtttttgtaaagtttcataatatggtctctgtcttaagagattgtaagaaagaagaaatgccttgtattaggaaaagtgattcctaatctctaccaattgccaagtagtgttatttttataacaaaagtgaattttttaaaagcccacatgttggggaaatataaacaatgaattaatcatgaaatagaatatatttgagtatctttaaaatctgttgtaaccattatctttggttctccctcagtttccacctacttagatcagtgtcagcgtctgcaaccatttcctcatggttttaatctacatagattattctctcccgcaaactgtctggagtaattt

SEQ ID NO: 26838 - DNA, 1057 bp, Homo sapiens
ggattatttcttaaaattatggtaaatccatgatgatgctctattcagctaataagaagtcattagatattgttaacagatcaaaatcatattatatggttccagttttataaaaatgcatatatatgtatagttatgtccatagaaaaatattggaaagatatacctttaaaatgttcattccaggagataaaattatttttaaaattatttttctcctttggactgctgtgttcttaatattttatttactaatatttgtttctcttatatttagaaaaataatctattctacacttagagcaggtttgttagaaaaaaatggcatttgagacatactcttttttttttagacaaattctcactgtgttacccagactagagtgcagtggcctgatcatgcctcactgcagcttcaacctctcaggcccaagtgatcctctcacttctgcctcccaagtagctgagaccacaggcgtgtgccaccacacccaactaattttttaactttttgtagagatagagtctagctttgttgcccaggctggtctcaaactcccgggctcaagcagtcctccagcctcagtatcccaaggtgctgggattataggcatgagccaccatgccctgcctaatagctaaatttttgatcaatagagacaggggaaggaaccaaggtgtttaaaggcagcaaagtacatggtgacacgtaatctcagggatacagtgaggtttgaaatgttatgtgagtcccactggggtctcgaatgttagttgggctttgttatactactgtataaaacctggctaatttatataataaatcttaatcatatatttatttgtataagtgctttagaatataatagatcagcatggtttttcagtgcaattgtgtgaacattcttaatactcagcaattttataatggtgtagccagtttgaataatctaatttacatacatacttatatcatttgtataatttaatttttatcatttgatgaattttttatcttttctttcaattacagtgacttacagggaataaaaacaaa

SEQ ID NO: 26839 - DNA, 1034 bp, Homo sapiens
ttaagtctactttgattaattacatgaaatagatcttttctggataaggactagaaaagaaaaggcagagtccaactaaggaagaaatacactaaattagaatttaatgcaaaatagaaaaagcatcctttggcaagatttgaatatatgataagttttttagatgtgaacttgaaaatgtacaaaatgatgcatagattttcaaaatttctttcaggggtacttcaagggtaaaaaaggctgaagaccactgaactaaaggagctacaaaactgtctcatttgaagcttggtgtgggagggatgggagtaggtcttaaataattccattttacagaatctttatcagagattgatgggtatttttatctccacccagattggctttgtaatgtggcgattacatcaacatggtttgcatcttatacacctgcaatttgaaattgtgtgattctggttaaaatactaattttggaggctttgcattattttaaacattgtatatgatatgaaaatttatcagtattactctaccgtactatttgaattttacataatgtgatccatatgtcacctgacaatactacatttcacctcaagtcagacctgtggttagttctaggcatcatcttctttaaggatttggagatggagaccgagttgaataatgataaggtacttcttaattccagctacatgaggtagatcccatcaaaagtggtggcgcccaaatttgaacccagctttgtcataattcaaactctttctacttgcctctcaagtttctctgtgaaagaaatccatgttgttcagtggcactaatttggatatgaagagtaacaattcacttacttttcctattgcatatatatatttttaagatgttctcattccggaggggaagaacgtctagaaactccttctgctaaaaaattaacagatataggaattcgaagaatcttttctccagagcatgacattttccggaaaagtgtaaggaagtttttccaagaagaagtgattcctcatcactca

SEQ ID NO: 26840 - DNA, 1043 bp, Homo sapiens
tcagagaggaaaagtatctctgtgatgcctatcagtgtgctgatgtgatctggcaatatgggttgctgaagaagggatatgggctgtgccacggttctgcagggaatgcctatgccttcctgacactctacaacctcacacaggacatgaagtacctgtatagggcctgtaaggtaggagtcagaaccaccaaatagaaagcagctcggtggctcacacctgtaaatctcagcactttgggaggctgaggcaggcggatcacctgaggtcaggagttcgagaccagcctggctaacatggtctactaaaatgacaaaaaattagccaggtgtggtggcaggcgcctataatcccagctactttggaggctgaggcacaagaatcacttgaacccgggaggcagaggttgcagtgagccaagatcacaccattgtactccagcctgggtgacaagagtgaaactccatctcaaaaaaaaaaaaaaaaaaaaaaaaagcaggtctcccaggaggttgtagaaagagttctagttcatctgatttaattcatttatccctaaaaccataggtcttggataacaaatacagttatttaaggaaaaccttgaaaagcctttcaattaaattagcattcctttaaagggacataattctactcaacagcattaatgggagaaaaaaataaagatgtagggtgattttgtgcctttcttcttgaataaccttgtagatacgtgactcagacagctcattaaattcctcccatgctgtgtactctttcaaaccatccttttctctgcattaatctcctttctctgatgtgaaggtagtgtttgatttttcagagtaatttgtatagacaacctcttaacttttggggttgtctctggaagaaatcactatactaatttaacttggtctcattttcagtttgctgaatggtgcttagagtatggagaacatggatgcagaacaccagacacccctttctctctctttgaaggtattttgtacactttatttatttgccctataatatcagca

SEQ ID NO: 26841 - DNA, 1029 bp, Homo sapiens
gtatgtaggtgccacttttgcgagttttacatgcgttgggcagatatttgcatagtggggccaagcccattgctgtccaaatgagacaaggcagaactgaattgaatgacacacttttcaaccccttatgtggatactcaagttgcataagagcctttagtgctctaggagtttcacatttttaatgcaaagacacttacataaaagtattcagcagttataaataaactcaaccacctggacatatagataagtaaaccacacttaagaaaatagttattgaaattatttaggtctatatgatggcagaagttttgctttgtaataaggatacctcataaaatttgatataatcagcttaagaaggaaaattgtatatacatatccctatccctaagctgtatggttttccaccagtagcatgcaattctgtgaaaccacaaaatattaggaatgatctgtttctgctcaattattactaaggtgtcagacattcaaccacctctctgtagtctctgaatgcatttgcacaatatgtatgctcagagaaaggctcagcttctattaatctagaggttgctgtattaataggttgcacacttcattgatttttaattaatttctaaagagacacagaggataactgctacagcccacagacatctccattctcattggaaagcacatctttattgattggctgcctaaggagtagaagtaatgcactttaagtacacctccctgtgagagttcggacactacatgattcgcttctcctattgtaaccatattggcaagagatcaatgggagaaaaactgtagcatgcttgatattctcttgatgcaggcagatgagctttttactcacaatgtagtgagaaagcagaggtttttcgcacatgctgtttaatttgcttttttgtttttgatttcatttatttattttttggttttcttaagaaggctttcaagccccaaggaggctgttcttcaaatggatgttttaaaagcttgccatgagtggtaaat

SEQ ID NO: 26842 - DNA, 1030 bp, Homo sapiens
cgattaacgctcattctgctttagagtatttttagttttcccagaattgttggcacttgctctggaaaaggtacgttactatcaatgaaacctacaaactcctattcaacccactgcataacacaaagtaaaatttctggggttctgtcactctaaagaaaagatttttagaataattactaacatggacattggaggtcagtctgtggcatatccgaagatctcagtaatatatataatataatgcattacacctttaaaatctatatttttaattcagcaaaaatttgctttacaatattgccacttaccacgtatttcataaaggaaagcatgtaatcaaatactggagagagaaaagagagagagagaggaaaactgatatattaccatttataaggtgggaattttttctctgcagcataatacttatattggagcattaccatttggaagcccacatagatttcagataataagaatatcctcatttgatggctttgtgtgggatgaatttctttttaaaaaaggtctgtaaaccatagcacttttctgacacttttttcttctactcactgaattcattgcagttactgagaaattaataataactagtcagtcacaggtgtgtggtgtttatttctgccacccacagagtgtttcaggcatactgaactcagttgttgataaatttgcaatgttgttggagatcagttctgacacatgtaagtcagtaccaaagaatctagcttggcatcctgtcctggattcaacaaaaatttactctttggagtcttgaattctttgacaataacaaggatgttaactacaaatttggaaaagataactcattcatatttcatggcatcattgaatgtgttcctttttttttttttaaaaaaaaaaaaaaaaactacacaaaaagatgaaagcatgttacttactggtagtaggaagacaccttttaccttacattgaaaagcttcccaaccattttgcttagaaagtgaaggctattacgctaaacaac

SEQ ID NO: 26843 - DNA, 1037 bp, Homo sapiens
cttataataaatttggatgattcttcacctgggtttggatagtttcttcacatccatgtactgatcggtattctagtgaatcctcaaagagggacactctgcagttctctggattatccttatacagttccctattctatgtctctgttgccctgtgaactccacttgctttgccttctctgggattccagttttttctgctcaagataggagactgcctgtctctacttggattccctctccttgcactgtgacctggaaatttacttaaacagtaagctggagcaatcttgtggcttatttctcaggggtcacattcttcattgcctgatattcaatgtcttgagtactactgtttgatatattctttccagttttttaagttgttttttagatgttagttgggagagtaaatcaacatgttgctccatcttaaccagaagcctaaaactatggtggattttattcactgatcatatctagtttcaattttccaggacaaatgaaattctgatgtgtttatccaacaaagtatcctagatatatcgtcctattgtgctataggcactatgttgaatattaagagagacacaaagtcacttaagaagcagctcctcacatactcacggagtatgtaaccatgatcatatattcatatattacctttgttcataagcacagcagtacttccagagagtagatattggtttgtaaggaaaaaaaaaaaaaaagatttccagccctggtgtgttaccttatgagtggcaaattcttcagctccctgaacttcagtttctttagttacaaatatttgaaatactagtgctgtgttaactttaccctgcctttagaatgctgtaaaaaattcagaaacgaatgcagaatagcataagaatatatgaaagtctctattagaagttaaaattaatagggatagtatcaatctcttagaattcaaacatgtgtgttcacaatgtggctttttctattttgtttagttttttttcatctcttcatatcaattatctctttcttat

SEQ ID NO: 26844 - DNA, 1023 bp, Homo sapiens
caagtagggaactgtatataggggtctatttatgggagtggttcaacaggaactacacatttaggactcatgggcatttaggtggtacttaaaacctagaaacagtatatagtgacatagggagggactacataaaaaagagaaaaagttcaaatactcaaaattaggaagtccaaattaggatgatagagagataaggaagaaccagcaaaagacactgagaaggagctgtctgaaaggtaggaggaaaactggactgaatcaaatgtaaatcaaatgtttcaagaaggagagaatgatcaactatgtcagtgctgttgatgggtcaaatagatgagaacttaaaagggatcaacatatttatcagtatggagattatttttgatcatagaaatagaagaggacaaccctacgtttttagcatgttatataggtttctctttaagatataaatgatattatgtttgtgaatataaatttgtaattgtatacatttataataataattattaatactgtatattaattaaaatctgttctggctaagattatttacaagttagttcattttctctgattatttttagaactgcttaatccattttaatgaaaatgattttaaatgttaatgtccatctgtgggtggtactttatttgcgttgtcttctggcatggactgatgtgtgcctagtagagaggaaaatatattttgttcctagcttatattagagagattcaaatatcagacaaggcgtaacagtgatattatgaggttacaagaaggttaatgctatttagacagatggtgaattgccaattcaacctgttgtcacaataatgagtatgtgaaaaagcatcagtgttgcagataggagaaaaatgaaatagttgtttttacatatccttatacaaatttattaacagctctctcataagagaagagttattctacacaaaaggcgaattattatgttctcatttattagtcattataagaaataatatttttattatattcagtct

SEQ ID NO: 26845 - DNA, 1047 bp, Homo sapiens
taggtggcagttgcaggtgagaggcaattgcagtgatgacagtgggatttttactttgtctttgttgatcagggcaagctccaggatgttccaggttatgggcagagcatgggactctcaggaaagggtgggatcaatctagcaatcctgcaaccaggctctctaaggcatgtgcaagcactggccttcacaggggtctgagggttcctcccagtccactgagacaaccctccaggcagaggaggaagcacctctcctaagccacagagccttctcagggaaagagtggtgacctgatgttttcagcccagcagtcggccactggactcacccagcttccatacctgccagcaagtggatctccttccagcatccagcccaagaagcaggcctgacccgttaggctaattctgagccacctgtgcccaaggcgctatgcgggtccagatgttttgaactgtgagtccctgaagcagaaattgcaactatcttgtcacaccattcctgatctggactaggaggaactgctccaagactgccaacaaaccactcaggcagatcaatgtggggtatgctgtgggtctcccattgcggtaacaaccaggctggcagtcttgggagaaactggcgggcctggggacatgtggttcagatgctcctcagttcccaaacagtgctggtgggacccatcttgggcatgtgaatgtggccagctcagttctatcctggctcggcagacagcaggagctgcagccgcttagggcatgatgcagaattttgcagggtgggtgcccagagtcatgttttgctgcagctgcccagctcactgaagccttttggggtccactttggtttaaacggtctctctgtattctctaggcccaaaggtctgcgagggtggtgggaacttctgtaactagggtctcagaggattgcagtgggaatgtggtgtcccagagtttcttcattcatccattcctcaggtctagtctggctccaggggctgatcttggcaactagtgaggccaagcaagtagccatgcttcc

SEQ ID NO: 26846 - DNA, 1047 bp, Homo sapiens
atagcccatattttaattaaaacattgtttcagtttttataaatgaacaatacttaaccaaaaagatttcttaagtagagatcaaagtttctgtttttatgcctgccatatatttagaaaagagttgaatttatttcaccatgtaatttaggcatatattgtattagatcctaagtaagtaccttttttcatattttctatctaactaggggaatataattaactgagacccccttctgtgatgtggttacataaaatgatgtgtagatattaattcaaattgctctcttcatgcctttttcttattacctcagcacattccctaattaatcattttttcataaacatacaattattcttctgtactatgtatataggcaggagctaattagcagagagtgctttgatttatcaacaaaattccattacagtgatttccttctctgccatcatctacccttaaacccaaagaggtgtaatttcattgtaattttgcagtaactcagtactaaagaatgaatgataaggaaagggaacctcacctctaataaactctgaatgcttgtagccatgtaagttttatagcattctgttcttctgctcagagtaaagtgttccatatgcttgagtcatttatggaataattatagttacttttagtagagtaaaaataaaataacaacaaaaaccttttaccataaaaaatttacttgttgagggaaaaacaccatgttttttcctgaacagagcaagataaatttacaaagcaactcctttgttcaatctctgaccccgaaatccgagagttcaaatcccagagagaatagctatattgttctacacaccaggaaagaaaggaccaaagggaaaaccaaaacatcagttttttatttctttctcagagtactgatgtcttttccaaaatcttatatttagctaggagcttgtttttgccacctttagaaaatcctaatatgtatctatatcaggtatgctacactgtgacattgaatatttatgacaagcatataaaaacagtagtcacta

SEQ ID NO: 26847 - DNA, 1029 bp, Homo sapiens
gaaacatttctctggagagtatataaatgaaaaataagcatattaaaaatgtttgacattattagccattttatggaaatctaaatttaaaacacaatgagatattactacacctatcagaatggctaaaataaaaagagtaatgaaatcaaatgtgggagaagatgcagagaaatgtaataatgaatacatggttggtgagagtgtaaaatggtacaatcactctagaaaatagtttgctactttcttaaaaaaaaaaaaaccctgactaaagtgttactaccatataacccagcaattaactcccgagaatttattacagaaaaatgaaaattatatttatgcaaaatcatatacacaaatgtttatagtagccctaattgtagtagctccaaactggaaacaacccaaatatcctttcatgggtaaatagataaacaaattgtagtaacccatactatgaaatactatggtcaataaaaagaaacaaacaataaacacaacaacctggatgaatctctgcatatgtattctaattgacaaaaatgccaattatgaaaaattacatactgtacaattccatttatataaattttaaaattaccaaattatagtaatggagaagagattagaggttgcagcaatggagctctaatgggtaagtttaaagggaaggtgggagacaagtcagtgtgaagatacaagtacaaaattaaggattcttgctatgaggaaatctgtattttgcctatatcaatgccaatgtccggttgtgttactgtactataaactttttaagatcttatgagataaaactgggtatctataacacggtatctctctgtatcattacttacaactacacattaatatacaattatttcagaataaaatattaaatttaaaatatttatattataaacccaaaagataaaatagtgaatcaaaagttgtagagctcataagccacatatgcagaaaaacataaatagaaataaaataaaatcattttaataatcaatttatcca

SEQ ID NO: 26848 - DNA, 1061 bp, Homo sapiens
atcctttagctagacagagtgctgaatggtgcatttacaatcctttagctagacgcagagtgctgattggtgcatttttaaagagtgctgattggtgcatttacaatcctttagttagacacagagcgctgattggtgcatttacgatcctatagctagacagaaaagttctcgaagtccccactcgacccaggaagtccaactggcttcacctctcactatttttcttcagcacaattccttttatggtattatcttactcacactttatttttagatagaaccatattaaattcccttttttctaagtaaaataatgatctgatatatcagttttatgcagttcattccattttaaattctttgagcaaagtatctttactatatatttagaagtcttcttcacctattctaaaagttccttttttatttcacaaaaatatagccaagaaaatagttttaatcagtgattgcaatgacaagagtttcaattatgcagtgttgtctccatgaattaatctagtgagttttgacttatgaacatattctgtagaagttatgtttgaacaggaatctctggaaaattgccttttctcatctaagacaatgcttgaaaaaaattgagaacaaagcatatattctctactgaattaaaaatatagtgtaaaaactcttattttctgctgataagaaacagatgttatagcattaatttggctttaacaaactattagctgtgattttatcatcatacaattattgtaaacttgttattgtttttatccctttagccgataaatatgttaaaaattaaaatggaaaatttgagttctagcttgaaaataaacacttgctagatctaatgattattctacatgtcatgcaatcagaatcttgaatgagatttttaagagagatatggcactaccttttatctgtgtctttaaatattttagtaacagcaaggttaaataaaatttttgaataaatatgttttatattaacttggatacaactttaaagaatttaaaatgctgaatatagaaaaagaaaagaaattg

SEQ ID NO: 26849 - DNA, 1115 bp, Homo sapiens
acagagaggggtcccagaaaaatgagttgctgatttcgtggtgaaatgcaagaggttttatagatgagctagtggaggggcggtatctgatctacatagggtccgaaaaactggttagaccagttgcgtcatttgcatggggcacaaatctcagcccccccgacccccaccccaatcttttattatgcaggcaggttctctgactgagctgctccatgttgcccatttctttcttgtcatacatgtgctaacaaaaaaagggaagatggagcttccatggcagacatacctggccctcaggtagtccttctctattggcgcagctgccagcattcccccgtgcaagcttcaagcttgcttatcgatgtttgcggctcagtatttcaggctgctctttgttagcaaaaaaataatttcttggactgctttttgttaaaagggaaactgccgatgactcttttgccctcactatctgcctaaataatttatttctaccgcctgtatcaccatgacctttgctcttgaccagtctgcttttgctttggccgagaccacttccacttctacttcttggtagccattgcttttatgtgctttgtttttaggattgtaacggtaatgccatgtttcacttctttttaaaatgcttcgaagacattctttaggctcttggtcctatttgtttaaaatttccatggaaagctctggtcttgtgtgcagctgatctgagtgccatggtcttggcacccattgagtggaaagtttgcttaactttaattttccagtcaaaactgagtaagctccactaattgagatgtctgtggcattggatattacttgtgccattaaattgttggtcctcttcaattagggcacaaacaagatgaatattttccttgaaaattgatgtggttggtctgccactgcaggtttcatcttcaatattatcttgtccattcttaacattcatttgtaaactgttcatttctttgggacattttccccatgaactttttgtaaagcatcaatgatttcaccgtaaatttgaggtgtatttttgcttcaattttagcaagattcatgttgctctgatacaggctgttttcaaatggatg

SEQ ID NO: 26850 - DNA, 1060 bp, Homo sapiens
taacccaattggaaaattccagtcttcactataacatgtttagatattagctgctaatatctatcacaagagtgagttgatgaaattggacagatgggggttgttacctcagatgatgctctagacaagcaagtgtcacagacagaggataatgaaatgctataaatatgatacatgtgggaaatgggcacctttagaaaattttggttaggtgacatgttttaacatctaggggttccttatgggtaggatggccctttaggagaaggctctgtgttgacagtgtggatttagggttcaggaacttagcttgaacaaaagaacaaaacctagggaattcatatatgatgatagagggaaaaataaaagtaagacattacttttctgccgtttccgtggtacattttcatagtcagggtttcaggaaagtttggtaggagaactggatgttggagagacaactagacgtgccatgtttcagagtccagggtagctatttcaatattaaaactagagaaagaagaggaattggtgagtaggaaaaaataactggattaaggtcttagaaataagctgaaacaagaagaatgaaaacagaagagataaacaggaaggtaacaggaatcatgtatccagagtgtgttgctattagatgcaggtgtttaaacgtaatagagcaaaatggatctgagaaacttagaataggctagtctctaacatggagcaattatgtttatattgtactgtttcagaagccagaacttaggttcatttataagaagacatattttagttccaatagagaagtaattttctctatttcatattatataaaatttgaattagtggcctcaccggggagtgagtcagtccctcatggatagaattatgtaaataggctgaattatcaccattgagtttttctataatgcatacaaggcacaaagaaattatttctcaaaatcttccaacttttcaaagagtaacgtattttattttattttttattttcgagactgagtcttgctctatcgcccaggctggagtgcagtggcacgaa

SEQ ID NO: 26851 - DNA, 1040 bp, Homo sapiens
gaaaaaaggtcagaagaacacaaatatcattattttaatggcacaatcaagcgctggtacacaccactgcctctttataccaatgaccataactaaggcacatagacatgccaaacttcaagagaagctaagaaatgtgcccaacttcaacacaggaggccttttattaaaagacaagatgccattatccttagcaaactaatgcaggaacagaaaaccaaataccccatgttctcactttataagtgggagctaagtgatgaggacacatggacacaaagaggggaataacagacactgtggcctacttgagggtagagggtgggaggagggagaggatcagaaaaaaaataaatattgggtactaggcttagtacctaggtgatgaaataatctgtacaacaaagccccatgacatgagtttatccatacaacaaacctgcacatgtatccctgaacctgataaaagatatttatgatatctatctatcatagatatcaatatttatactttcttcttttaaacttagatcgtactctgacagcaggtatcccataactatctataatattaacatgtacaaaaatggaactcttgattttttcttctaaacatgcttcctctatagttcgttccatttctgtgaatgtgagctatgttcctcaattgctcatgacaaaatcttcaggtcgtctagaattattttccttttttatttatgacttcaaattattttcatcagtaaatgttgccactccatttatattaaatatatgcagaatcctacatgtctctgcacatccaatgcttccactatggtacaatcatggttatttctaacctggattattagagtagcttctaaactggtcttcctacctccaaccttgccttccaacagtctattttgtacacaacagccatatgctgcttttcagattgtgacacttctcgaatgtatctctctctgggttgagtaactcacaaggctgtaggtgtgctacctctgttgttcttcacactttaatcttttcccctc

SEQ ID NO: 26852 - DNA, 1055 bp, Homo sapiens
aggtattaagtaacacgtgaccatatataaatagatataatcatgacctaatgataattatggaaaaataaaaatattaaagcaattgaatacataaatccaaccaacattgttttatttcctcgttgccaggaaatatttgtcaaaaagggtgctggaaaaggtatgctttgaaatagcttatggatatttattgcagagaatatttcacactataaagacattgaatactatcataacagactaagcatatatgaacattaatattcagggtatgtagcttacttgtttataatattctaataatttacatgggacattagcttttatgtatcagttaatattttacatttttcaatcagtctttaagttacatataagaaaccagttataacatatataatttttaaatttttttattagcttagaaatgtactcttatctagcttataatatatattaattttttatttgtgatacagttatttcaagatgagataaataaaggccaagtctatgctgttcatatgcttctggatgatcttacaacacaaaagaggaataaatgtcttcatgtttgtactacaattgcctctgcatttttatcacttattggtgagaacaatttgctacaaagcaataataaaacggaatgtaatcaaatgtcactatggtctgttatattgcagtaatgtcaaataagaataataggtttcataaaatgctgggcaaatctgagaacaacctgattcagtgggtgttcggaatcatggctcaataaattgtattcatatacatttggtatacactcaccgatatataataagctatgtctgtgattttatttaattatatacgattttttccacagtagattattgaaggactttattaagtaaggttttatgagccaaaattcctcaatagatttgaaaccccaagtataatagtagagagaaaatctacgtaattgttcttcatcctagggtcctttgtcagagaagaaaaagggaccagttctgtgccctgttgtggtccaaatatacaatacttta

SEQ ID NO: 26853 - DNA, 1114 bp, Homo sapiens
acatggtgtgtgtcatgggaaatgtgcccacaggctgaagtgtatgtacaaaggcatcacatggggagaacatgctggaggggttttatttgatgttttcaaattgctctagggtctgtcttgcaagaaacccttttggttttcttttctttttgattactttttattttttatgttttaaaacatacatatttcttttgaaacatactgccaagagaaagagtaaaagagtaattacaaatgaactatgcaatcatattctctctgtctctctctctctctctctgtcacacacacacacacacacacacacacacacttattccaaagataaacagtcaagttctatgtttgtatctgtggagatacctgccacagtcagcagttaggatttgtgaaattgcatatccagaatttgagatcacaaactgtactgagggcaggataaagaaaagatggcactgaagtgaagagctattacatgtacccatgaaggtatattttcatttgcttattggtatggctgtgtgtatttaattatttaaaactattaggagacatatatattttcctactaaatgggagtaattaaaatagcccactcccttgaactcttaacatctcattaaaggttgaaatcaggctttgtgtcaccccaaacttacacctagctcattgtttttggagctttagattaggacaaagtattctgcaaaactatcttttcaatatgccatagaaagctaatttgaaattttaaacctgacaagaacacttcaactttctataagtgactcaagtaattacttcttcacaagacagacatagttttgatgctatattcatatcgttttcatttcatgagtctttcattgcttccttttaaactgaagctggacactcatgggaagcttagtattcataacagacagtttgcaaagaatgaatgtatcttgaaggcccgatggtaaaaggcgtgctctttcttcctcccaggaagaaagcatgctgctaaacttctgtttgcacacaaaagatttctacaggagagtttatgttgctctgtggtttaagaagtccgagccctcttaccaggggtagcccccagcctggc

SEQ ID NO: 26854 - DNA, 1029 bp, Homo sapiens
catctggctttcttacattgttttcaccaccaaaccagttttcttaactatcagtataagaaatctgctgaagtagcatccaattaatattgcaaacacatttctaaactttagtaatctccatctgatataggaaaaactgtgtgatttctaattcctcatttctccaagtcaatgttatgtatctggccacggaaattcagggtaaatgtaataactcttgggctgtattatctgaggattagtcttagcattcaaaagttgtcagaggcaatattgatgaatatcaaaataatatatatttgatacattcctgcttattgatgtgaaaaacatgaaactaaatggtagtgttaatacctttattaattttacaaagtgaggttataaaatcttccttttcagacaatgtcaaaaagattagaaactgtgacaatatactttagaaaggaattaccgaatccctcaaatgttctgttacctactattataccgtgactagagacaccattataacatattttattttatataatcataataaccactggtctaaaattaaaagacttttttttagaaagagacagaaatgaatcattgattgacctattgctgaccatcaaactaaacttggtaaggaaatattctacagtaaaatgaataggtaagatggttttaaacctaaaatattagcaaattgaaaaaaaggaaatcaatcttcaacacacacaaaaattatagacagaggtaaaagaaattcaagcaagatgtcccatttgtagctacaattaatttagtttatgaatgagcatgattaattacaaagcagtaaacactgagaacttttgtgcccatgccgattttacaataatttatttccattcatttgattcttttatgtttagttaattaattttcaataatgtgttaatgtcattcttagttcaaggcatctgtagctaactgaaattaaacatagctccagagtctgaactattcagaatgttttaagatttattcaggataccc

SEQ ID NO: 26855 - DNA, 1051 bp, Homo sapiens
aactgcaatgaattaaaacatatcaaatatttttaagtgcacaagttcataattatactaaaaaacaaccctaattggtcacctttggatcctaactttcctgtataaatttattcttcacggtaaccgaaatggttgataaaggaagttttgttttgttttgtttttctaaaagcattccagtcaataaaatagattggagatgatagaattataatgtcataactttgcaacccctaatgaagtaataggtccaggcaatggccttaaatgactgctaaattaatacaaagagaaacatccagacattatatgccttctgaaggaagttcacatcactacctgtgaaatgctttttttttttttttctttgagacagagtgtcgctgtcttgcccaggctggagtgcagtggtgtggtctcagctcaccacagcctctgcctcctgggttcgagcagttctcctgcctcagcctcctgagtggcttggattacagacatgtaccaccaaacctggctaattttgtatttttggtagagatggagtttcgccatgttgcccaggctggtcttgaactcatgacctcaggtgatccacccgtctcagcctcccagggtgctgggattacaggcctgagtcactgcacctagctgaaatgctcttccaaaaacattgagtctagcttagctcagcattggttaatagaactttctgtgataatggaaatgttctatatctgcactgtccaatactgtggccactaaacacatgggactaaatttaaaataaaattttaaattcatttagtcctgctgcaggaagtcagggacccccaaacggagggaccagctggagccacggcagagggacataaattgtgatgatttcgtggacatttatcaattcccaaataatacttatataattttttatgcctgtctttactttaatctcttaatcctgttatcttcataagctaaggatgtacatcacctcaggatcactgtgataattgtgttagctgtacaaattgattgtaaaacatgtgtg

SEQ ID NO: 26856 - DNA, 1029 bp, Homo sapiens
actcttgggctcaagagatcctcctgttttggcctctcaatgtgctgggctttaggcatgagccaccacacctggcctgtatactgttggagaaaagctatagttgttatggaaaccccacatttggtccaggtcccgttgctactggcacaggaagccaatcactgagacaacaagtattgtcaggaaagaaagcttttttattcgggtgatgtcaaatgggagaacagaagaataatctcacattcacctctctgagcaactaaaattggggtatttatatagcaggagaagaaatgtcactacagtgttgaaagaaattagggaggggtacgggagtagtaataatgaatgaggagtctgacatctcactctctggatgtggttttagtcccttgcctgtgagtcagcttcctgaggaaggaagtcagatgagacaaatacaagtttcgagtttcaagaccaaaagggtccatttctgtgtttattctaaaatctataaacatcatttctattggacaactgggctggtttcacattttaagtaacttttagacattcagtaaaatttggttagtcattacttctattttacatataagcagactgtattagtcatggttctctagggggacagaactagtaggatagatgtgtatatgaagggaagtttattaaggagtattgactcacaggatcacaaggtgaagtcccacaataggctatctgcaagctgaggagcaaggaagccagtctgagccccaaaatctcaaaagtagggaagccaacagtgcagctttcagtctgtggctgaaggcccaagacccccctggcaaaccactggtatatgtccaagggtccagaagctgaagagctaggagtctgatgtttgagggcaggaaacaaccagcatgggagaaggatgaaagctggaagactcagcaagtctgccctttctaccttcttctgcctgctttattctagctgcattggcagctgattagatggtgcctacccagattgcaggtg

SEQ ID NO: 26857 - DNA, 1027 bp, Homo sapiens
aaattcaattttaaaactaaatgtatttaaagaaagaaaccaaagcttcacccaaagtcatgaagatctactttccttttttctgtgttttatagtttgagcttttatatttatgtctttgatccacttggagttaattttctgtgtatggtgtaagacagagatccaaactaattcttttgtgtgtacattacagttatccccatactatttgttggaagaactagtttttctccattgaacagtcttgattccctggccaaaagtcaattgaccaaatatcaattatgggtttatttttgaactcttaaatctattcaattgatttatatgtgtattatcttatgacactaccacattgtcttaattatcacaagctgtgaaaccagaaagtatgaatcctccaaattgttctttataaagactgttttgactattctgtatttcttgaatttcagtgtgaattttaacatcagcttgtcaatttctgctagaaagccatcggagatttttataaggattgcattgagagtgtagatcaatttaagaagtattgatactttaaaaaacatatgcctttaatttgggaaaataagatatcttttcatttacttagatctttaatttctttcaataatatatagtaagtttttaatgcagaagtcttgtactttttaaaaaattattttcattttttctttaagagacaaggtcttactctgtcagccaggctagagtacagtggtacagtcgtagctcactgcaaccttgaactgatgggctcagcaactcctcccacctcagcttcccaagtagctagactacagacacatgccactgtgcttggcttttttcttttttcttttttttaagacatggttcttactatgttgcccaggctggtctcaagtttccagcctcaagtgatcctctcacctcagcctcccaaagtgctggaataatagacaggagccaccgtacccagccttaagtaattcttttgatgctagtgtaaatcgaattgttt

SEQ ID NO: 26858 - DNA, 1032 bp, Homo sapiens
tcctctctcctagaatttatctaccctgttctttcagtatgtccctgttttttctcttactagttttagaatataccattcttaaacctaagaactatagcctattctttactatttgtttggagtactctcagtgcttagtatagtcatacaaaaaaaaaaaagctctcaatgttttctggattggactgtgtatgcaggaggaatttctaaatgagaaaatgaaaataacaaaagtaatgtcctcctcgaagagtcatcaggtagctctctatctcccctgaactttactcaacaatgtcaaaacaggctttttgatttcacaaccctgatattttgtctttagatttatttctttcaaaagacataggagctttacatactccagtataatgattctatgtcttaccaaatcaaatatgatgtttagtaaaagtttcattcatttcaatgtaatttaagagacactgctaaaaagatatagtattacttttatatattaattgtatatttgattgtggtatttctagccatttctataaaaagattagaattaaatcttgattcagatatttaactcttacagtaagttttctatggaaaagccaatattcagtttgcaatacctttatctagactataattttttttctaagcaagaggattttttatgtatttttaaattattgtaatgttttggcgatggaggagagtcttccatcataaagcgaacaaacaaatataaattacctgctcttatcttcaaatctctgactatcaatcttgatatgtaaatggtgaccagaatgaaagtttaaagtttagtggtcattccgccatactaggatgttaaagtcttactttatctttaaaatgaatttcatgatatatatttttacccatgaagcttagggatatttgagtttagggttttcagtactacctctaatacatatgtatttaagaggatgaaataaattataaaagttactgaaacctagtggttatgattgacacctctcactctaatgc

SEQ ID NO: 26859 - DNA, 1068 bp, Homo sapiens
atttacttttgtattttctaatgtaagctacttcagcaattccatagtttggagtatttattaacatgtattgtcaatacatgtcaatataatttgtataattataatggaagattaacatctttatttatttatttatttatttatttattattatactttaagttttagggtacatgtgcacattgtgcaggttagttacatacatacgtgtgccatgctggtgtgctgcacccactaactcatcctctagcattaggtatattttctggttgaaatcttaaaccgaagaatcatctcacatgctggtaattgtgacacaatatcttaaatgacagtctcaatgttaataatagtactcaaatgttttatgtattatagtatagtattgtgattctgcattttttgtctagatcatctttgactgtcatctgagtctatatgcctctgttttcccttttaacagtagagtcaagtaaactccaactgtatttgaccttagggttcggcctctgagcaatatgtaaaatctgatcttagtctaaggcagaggaaaaatgtaagtcttagtattatatatttaaatttgattttaagggagaagtgttctacttcaaaaagtaggcaaatttaaaacttagttcattaccttcagaggaatatgaaaagaaaataatggtggagatagtctgaaattcttatttttagaaataactgctataatatagagaaaatagcaaacatgttgacgtattttatcgctgcatacttctatctttcagtattagtcttttgaatattgttgagtatgttcatttaaaaaaaataaaacaaacctctctttgggtttccttataaatttggttggctcattctgatccctgtttcattctttgactctttagtttatttgcctgcaaaagtggcagagaaaagaagacttattgaagacgtttaggaacaggaacatagtttgacagtcttttgctccagggtgggtaggttgagtaaaatttggttaaaatcaggtcgggaacaatttagttagattaaggaagatcctgattt

SEQ ID NO: 26860 - DNA, 1028 bp, Homo sapiens
ttcatattgattctagcagctgacatctaaattgcattacagatctgtggcccctaacactataaactccaagcactttcattgtaatgcttagatttatatatttgcaactggagactgccactcaaaaaccaccccctgtttcatgatccatggttcagagtatgagatacaattgctctttcagaagtctctaagtagggaggttgtgtggaagtcacctacatactgggttggacaaaatgtcaggaattggatgtttaatatttttcaaataaatatatggaacacctgctaggttttcacatccttttatagaagccagagacctcaaaagtagcaaaaataaatatgatcattgtgctgatggagatcataatggagaagtaagatattaattcatcaatcacacattaacaacaggataagtacagaggtacatggaacaatgaaagtatatcattgggagatatagcttggtcagaaaattttaccccagcattattatttgactgaacactgagggataagaaagccttaattgaatatagcagggagggaaggaccttccagccagagaaaaatatgtgcaaagacattttggcaaatggttggtcattgttaacatatcatctgttgccatctcaaacaagatgggaactagggatacacacaagaagtcagcacctgctatatattatcccaggaacaagaggtcttaggagaatgctatattcctattcattcccttctgctaaaatcatcagaattaactcttaggctgggaaataaaaccaaatctctggtttttataactaggtcaaagcaatgctgggcatttgggatggcgaataaaaagctttttctttgtgtatgcttatttgtgtccacttgatagtgtacttatgtgtttagatttaaaatagatcttccagtctcctgtgacattaagtaatttgtagcaaatatgaaatatagtaggtgaaagtgatttaatgagtacatattcttatatactcaaaaatatt

SEQ ID NO: 26861 - DNA, 1029 bp, Homo sapiens
ttcattttgtttatctctatcagtctcctagggtgtcatgtgtatacacgtaccatggcattgagacctatagaaaataagtataatatatattctgttttatgctatagattgtgagcttctcaagggcaggggcctggtcctatttgtcttccctttgttaagtgtagtgtcctgagcactgaatatctattgatagaaggaataagtgatagcacatatctacccttgtgcctctcctgcagcatgttagaatggaccccagtgggcccctctccacataggggattttccaggggaagaatagagacagtaggaggcagccaactagtctaattccacttccattcctatgtggaaatatgatgaaggaaacactgccaccagtagctatccagagtttatttatttcagatgactttataatgagcctgtagacagcattttgttgttcattcacgtgatcatttactcaggttacttttctattaccttttcatttagtagactaaagatttaaatgtgaaccttttctacacataatattcacggtgctttttttctgatctcagatttagacataaaataaaatatgagagaaacttaattcccattttataatatttatgaatttaataatttaaaatcattttaattgaaataacatccttaatgtaatcatgatagtttaaagcagaatgacaatgcctagtagtaaacctatcttgataattttgaccaggacctctgtaaaaactgtccacaggaagtttgctaggtacacagagagagttcttgtctgtagagcccactgtgtgtttcttcttccagtaatatacagtgcaagtgcttgggacagttccacttggcccaatcccattttccaggccagtgagcataatggcagggtagaaatgagatgtgtctatgtgcctttggtaattactgagtatatgttaatgaagagcttttccttggccttccaccagcacggttaaatatgaccaacgagagcttttccttagtgaa

SEQ ID NO: 26862 - DNA, 1047 bp, Homo sapiens
gttgttgcaggggctggtaccggtttttcctttccatatttagtgcttccttcaggagctcttgtaaggcaggcctggtggtaacaaaatctctcagcatttgcttgtctgtaaagaattttatttctccttctcttatgaagctcagtttggctggatatgaaattccaacaaacatatgaaaaaacgctcatcatcactggccattagagaaatgcaaatcaaaaccacaatgagataccatctcacaccagttagaatggcaatcattaaaaagtcaggaaacaacaggtgctggaaaggatgtggagaaataggaacgcttttacactgttggtgggagtctaaatgagttcaaccattgtgggagacagtgtggcgattcctcaaggatctagaactagaaataccatttgacccagccatcccattactgggtatatacccaaaggattataaatcatgctactataaagagacatacacacgtatgtttattgcggcactgttcacaatagcaaagacttggaaccaatccaaatacccatcaatgatagactggataaagaaaatttggcacatgttcaccatgaaatactatgcagccataaaaaaggatgagttcatatcctttgcagggacatggatgaagctggaaaccatcattctcagcaaactaacaagggaacagaaaaccaaacactgcatgttctcactcttaagtgggagctgaacaatgagaacacatggacacagggaggggaacatcacacagtggggcctgctggtgggtaggggtctaggggagggatagcattaggagaaatacctaatgtagatgacgggttgatgggtgcagcaaaccaccatgacacgtgtatacctatgtaacaaacctgcatgttctgcacatgtaccccagaacttaaagtgtaataaaaaaattaagaaaaagttaagtatgtcatagatacataaaatattgtagatactagtttattttctcatttatggccataaaatatacacaaacctattataagaagt

SEQ ID NO: 26863 - DNA, 1539 bp, Homo sapiens
gctaggtaacaaagcgagactctgtgtcaaaaaaaaaaaaaaaaaaaaaaaaaagtcagcacttatgtaatcatctcatttaatctgaacaactttaatatgcattttctccattgtaaaagagaaaactgaggctcagagaggttatgcaacccatctatatttatattttatatgtattgtgtccagatataacacagagatacctttttgaaaaagttactgaagttgcttttataaatgttatgggtagtacagaaacttatgtgggtctagaaactttgatgtgttcactgaatttcaaattcgttcaatatacttattatgaatcactaaggtttcttgtaggcccacttaaaatatttgtactgttttaaaaaataatttccttctgatattggttgtatttcataataataatgttaatgtttaatgcttcagtaaaccgtaagaaccaatgtaatagtagttagctgcctgttttgttaacaagtaaccctgaattaatatgtacctcttgctttgaaatctcggtctcagtaagatttgaagtgattatgaggagacactcaagggagccaacgtgtaactcatgttgcccattatgacatttgactatatctgtgtcgaataaatgtccttaatgctatgtaaaggacagaaagataaacaatcatgtcaaatcatacatataatatctagccaagccattgacccaaatcaaaacatatgtagaaagaaataaggggcctatcatccaagaaatttgttttgatatctattactgggtatttttgagcctgaatattagagagtctagagttatataaaatctattctactcgaataccaagctgtatattgtaggtatggctaggtattgatgcaaattcttactttataaatcaatttttgatgctcaatttttttataatttttcctcctcttaaaatattgtaagtcctcatttttaacaaactgaatatctgttattgactttgcattccatatatttgtcataatcattttttagatttttaatccaggttgacttcgtaactagcatttgggaccatatatattttcattcctgctcaaataactggcttaccacctaacccactactctattcagtcttcccttgaattttgtcattatggcaaaagaactgtgtgaagttattagcaattttggctacagtctctcttagaatgtttgttgtccttagggactcacagcaggcaaaaaaaaaaaaaatcacagtccccttcagcaacctgtgcttttctgaaatattggctttgacaagcctgcaggggtgagaaataattttgtgtgtgagggtttgcacttcatggatgtctttctgagttaattaccaggaggaaatggaaagagagccattctcacccttaccttcaaccacgtgattatgtgaccatagtgctgaatgattatctctgttttggcgaaagtctataactgagccttcatttaaaactggtacctggcactaatctgattgagtatattgatca

SEQ ID NO: 26864 - DNA, 1069 bp, Homo sapiens
acaatagtcttaaatactgcaaacgcattctaaaggtagaggcctagagtttttttttgggttgcttgtaatattttacttattggcctgggcagtggtttatatgggtgtgatcagtgtttactcattaaactgtataatcgtgacttgtgtacttttctttatgaatgttataccagaacttaggaggaaaaaatttttgagcatactgaatattaggaattggatatctccctaaattattaaagttcatcttccataaattctgtaaaactgaatgtagtatttccccctcttcccatgcaagtaactgatatcactttagaaaacctgatatgaacattatttgttattgtgcttttatgaagaattctgtctaatcttctcataagaagaaagaattagaaccaaaaatctaattatcagatttagtaagatgtaggcaagatccacctatttttttcatttatgtctttcaaaatcaatcacattctattattcaccgatccactaaacagatgtagaattcctattatgtagcaggcattgttctgttaatgcaataatataatcaactaaaggaaaaaaaaacaaaaacaaaaaacccgctgctcctaagctgttcatggtttcgttatactctcaatgttaaacacaatgattgggttaaataataaagctctatatacattagatgttttcaaagtgagaggccgacagactatttcctcttggttcagtccatgacatcatcaccaagtgaatgtctgaactgagacttcaaggatgtgtaaagtaatttcttatttaatataacaggaagtttagagtaatacgggttacttttctagaggcttaactatgttacctgccattaacacttttggctttaccttaggccttgctggttattcgtgtggtcataagacggctgccgaaagcaactgtgatagcatgctgcctttttcacatccagcaggagagggaaagaagtcacagtttaccagttcactgaggagtgtcgtacacatgttgacttacgatattctggaaattcgtatgagttggt

SEQ ID NO: 26865 - DNA, 1041 bp, Homo sapiens
tcctacacctgatgaatctaatctctagggctggagcctgacgttgctatttcttacaagcccagtttgattctcatatagccagggtggagaactcctgggttacatgagtaaaaattcaaggtattttcaacaggtgggaacagaacagaaatctttctttaaaaactaaatcaaacctcagtaggctatgaccatgtaatcaatgaactttcatactttatcatactgtttttccattacagtgttctctggcactataaattgctaatgactgtgtgtaaaagctaaaaaagcaattctatagtctcaagttgctgtgagaaaatcctataaatgacattctttaagtaagtgtgaattatcctgtccttcaggcaagaggcctagttttttttttcttcctctcttctttttaatactttgttattcattgcagatggcaaaataagatctaaactcacatgacactgagttactccttcattattaagttgtctggtacctttaaagtgaaaaaatgaaataacaagctctcagtaaactgaagtggttttaaattaaacaagttcttagtacaatgtgtttctctcacatgctccaaaatgttcactaaaatgggataaacataaggcatttacaattgtaatttaaatttttcttatttggggcaaaagttatcaaatatcatgttcagttcagaaaatgcatgtccaaaattggccctagtcagcactaaatgttttataaggagagaattcacagctgtattcagctgccacattagaatcaaaaaccaaaaggaaatgaaactaaatttttatgtaaactaaatgtttccatataaaatagcacaagggaaattagtgtataattattcttataccctaaaaatttagatttgtctctaaaggagatttcttgcataaatttcttgaagtgtatcagaatatcagtatgaattccccacaaattcctcctagcctacatactatatggtataagaaatcctcagtgtttcagatatttgagttttaaaga

SEQ ID NO: 26866 - DNA, 1039 bp, Homo sapiens
ttatttgttaaaacatatcaattttgtattgttaagatgaatcttatgtattatataatatggattttcaattactctgtgccttattttgagaccctccaaatatgtagctcctctttatacaattttagaacctttatcgtttaaatataacctctgactctaccagtactaattgaaacattaaaaaggttacagaggcatatatatcactatagagaatatttggattttatgttttacagaatagctctcattcaggattcaaaaatgtaatggtaaaaactggtaaggagtaagttaaattaaaagacagcattttctttaaaatatatttttttcaagaatttatccaaatataaaccctgatatagtgatctacttaggaactgtttacctgcttacttatgaaatatgagcactgaaatgaatgatggtccccagacgtatttataatgtccctttggaatttatgttttctcaaccagtagaaaatgttgtcatgaaatgaaatgagcatttaaattactgtatctggatcatatctaaattatctaaattcattggcatcagatttttaataaatatgaatcttgagaggtagctttttatgttcattcattcatgtaacattattgaatgtctgccatatgcagtacactgaatgagactgatataatacttataaaaataaggcctggcttgatccagtcaaggaaacaaataattataatgcaatatgatgagtgctaaaataaattctatattagctgcaattagctgctaccaaataacaaacaaatacattttaactaacaattccttgatactataggaacagaaattataggattaatttatccatgcatatatacatgcattcactcattcacttattcaacaattaattattcagtaccttctttgtacagagcaagacactgttcttgctctgggaatatatcaatgaacaaaatttcaaatatgtcttgtgctatagagattacagtttagtggtataaagaaaatattccctgta

SEQ ID NO: 26867 - DNA, 1044 bp, Homo sapiens
aaaaagcaataatgacttattctttcttgaaaaaaaaaatgtaaagtagaacattctttgtttctgtggtaaatgtgcgaatgtaattattatcttttattttctggtttagcatttgttttcttacctttaagaaaacacagacaatcttcacaatagaatattgggttctgtttcctttgatgtagtaatgcatatacaatattgcactaatgattaactggtgtgcccctgaggtttcccagacaaaactgcctttcagcagattccttatctgctatcaggggagtgtttacagcagctagaactcttaagcgccttgtctctgagactgatggggataattaagccagtgtttgccagccctctgctcttcttggtgaggttggaaactaggaaaaaacagatacattagcccaaaacaaaacctgcaaattcatgttcagcaatttgaaatagattttattggttgattttcttctaaaccttccactttatttctgatagaaacctatctgaaccttcaggcagaatagaaaactgccttctcaatacagatcatcaaattttctatcaaagcgatatagattgatggagatatatatggatatatatatgtatatatatacaagtttttaaaatatgtaaatatttctgacttttatatatcacatttagaacaagtttagatatatacaatagtatttaataagatattgcacagtattctgagtcaagacattttaaagggggcttgctgttgaagatttcatgatttttaagaacaatatctgttgtgaaattatgtggcaaaatatgatgttgcattggtttattttccctcatcctctgcatttctagaagaagagttctcataatcagttttaaatgaattgtgcagagatgtagctgaaatagaataatttataccagttactcatgcagtaaattaggataatatacttttctaaacttaatatatattcagtgaatgtattcatcttttttcatatattgtatatatcttttgacatacaaggtttc

SEQ ID NO: 26868 - DNA, 1048 bp, Homo sapiens
caaaattgcagttatgatgttatttactttacagacagcctatatgcaaaaccttccctctttgatatactaactccagaaagagccactctgtcttggtgtcagctttcaaagatgtcactgcttcatcagtatgaaatatttacctaggctatttgactggtggtgtctagacaaagaaagcatggaggcacatatggtttgattcaaataatgtagagtcttcctgaaagcctcagatcagaataattaaggaaggctttatcaattacattgtatgaaccaaatggaaatgttattacacaaaatttcccttatcctgaaactttaattaaagtatgggttcaaattctttatggaccttggggatagacttgggataatactgagactacacatttgtaaaacatagaataaaaaaaaacttttggtcacttttgtttggatgttgaactcacttgtttagaatccatgttgagttggctgtaaactaaaaatttaaactaaaaatttcctctgagaaaaatctgttaagaagatgggactgtatcatatctgacagaagcaaaatctgggcttattaatacctgattgagacatctctgtttcatcctgattaactcacaaatagttaagtaagtctcagtctaaatcactgaatttttcatcaaggaaaaaaagtgaagaatttagatgattttagacacactgaaagagtagcatgagttagtaatcttatgtagattttaaagatttttcagtatggtcactgaaagtcaccatgctttctgtggtagaaagggtcattttattttccttaaaatcttggtaaatatccatacataatcattaataaaaatcagcagttgctactaagtttggtcatttagcagcatttactgagagcccatgatatgccaaacattagattaggcattattctaataaaaaagttgctacaagagtcccgaggaaaaaagaaattacttccagttacataagggaagcaacagagattgttttgaattcagatatgagacttggagct

SEQ ID NO: 26869 - DNA, 1958 bp, Homo sapiens
tggacctgcccttgacaggtggggggattattgcaattcaaggtgagatttgggtggggacagagccaaaccatgtcaatcagctaatcaccaattcattaatttactatttctctctatatctccctttaatttctcattttttttctaaattttccctggatcctaaaaacatttgaagacatgaaatgtttttcacaatgattttacaagacgtgaagcaaaagagataacttgctttaaacgaaattagtatattccagccagatgcagtggctcatgcctgtaatcctagctattgtgaggctgaggcaggaggatttcttgagcccacaatttccaggctgctttgagctatgatcttacactgcagtccagccaggcatcagagtgagaccctgttcccacaaaataaaaaaaggtagtgtattactttacaaaatcatttattactagactgctagagagcaaggttaaatgacaaaatctctgatggattaaagtaaacaaatgccataatatacaggcattaaaacaagcaatggtaagattcagataaaagaaaatttaaaattaaaaaagaaagaataagtagagatgagtgaagaaaaatagaaaactaaaaatgataacgggaattattaattttggacagatacttatatatttaaacatcttttattgttacatttttttaattcaatgctacatgtaagaaaaggaaatttgacagcagagattagaaagtcaaatgcgtaccagggtcaggtagataacataagtaaatgaagaggactgcaatgaaccctgtcacagggaacatgtagcattctgttgtaaaggaagcagtgtcactcagctccactgttgtcatacagaaatgttagcctatttttatataatcatgcaatttatcaataaattaatctctttttatgaacttttcctccttttaattttggcaaataattcaagaattttaaacagtgtagagaccaaacaaaaaatgtaatagaccacatttagtttgtggcttgccactttttgcaacctttgttttagaaacttaatgagtcctagatcagtgcttgtcaaatgtgcactggggatagtgttacaaggtagattctaattcagaaggttggcctacagcctgcctgagattctgcattccttgtgagttccaggggatgtcaatgctgctggtccacgggccgcacttgtagtagtagggacctacggtgctattaatagtactaaaaccgagctcatatgtcttccaactcaggtgtggagaataggccatatctcccaagataattcccactgattggttatgattaccaagaatagtatggtttctctgggcatgggaaaaaagagtggtggtatatgtgtcttatatttagctagcctagcttgatcattttacaaaggaagaaacagattcagagaaattaaatgacttcctcagcctcaaacagctatgcagttacagaagaaaagctaatattgatggacaccattaagagtctttttttttccataagttattggggtaaaggtgggatttggttacatgagtaagttctttaatagtgatttgtgagatttcgttgcacccatcacccaagcagtatacactgcaccatatttgtagtctttcatccctcgcccctgtctcactcttcccctcaaatccccaaagtccactgtgtcattcttaggcctttgtgtcctcatagcttagcttccacatatccgtgagaacatacaatgtttgattttccattcctgagttacttcacttagaataatagtctccaatctcatccaggtcactgcaaatgctgctaattcattcctttttatggctctgtagtattccattgtatgtatagaccacaatttcattgtccattcattgattgatgggcatttgggttgcttccacgatt

SEQ ID NO: 26870 - DNA, 1062 bp, Homo sapiens
aattacatgttttatgtcaaatcacagtagctatatatgtgtgtgtatatatatatatggatatatatggatatatatatggatatatatggatatatatatatggatatatatggatatatatatatggatatatatggatatatatatatggatatatatggatatatatatatggatatatatggatatatatatgatatatatatggatatatatggatatatatatatggatatatacatggatatatatatatggatatatacatggatatatatatatggatatatacatggatatatacatggatatatatatatatggatatatacatggatatatatatggatatatatacgtggatatatacatggatatatacgtggatatatacatggatatatatatggatatatatatatggatatatatgtggatatatatatggatatatatgtatctccattggttttattacctttcaaccatatcatataaaatagaactataacttgataccttaatacctcccattttgtatccttttcacttttaaagttatttaaactgctacattattcttagtactttcattattaattactttgcttaacaaactatagtaaatgctgtaaaaattctgaaataatccttgagtaaatggaaaaccacacaataataatgaaaactgtaactattactatcattattatgattttatctccagtttcattgactgcaaaaatggctcctaaaaatagtcattgctataatctgattaataatttaacaagaggtgttataggagtttattatgctttcctcacaaatcagttgcaactgaattcaaattaggctctgtcaacttagttagctgtacaatgttggacaagttactaaaactttgtactctctacctaatctctaaaatgtggataatataatgctactttcttgggcttattttaattttatttttggtgttagataaagtatataatgatttacagagaatctgagatatactaaccacttaataaatgtatttagtgttgtcat

SEQ ID NO: 26871 - DNA, 1083 bp, Homo sapiens
ttgctatgggattccagatgtgattttaacaattattgaaaaagggtgcaaggtagtaattataaatgataaagatgtatgatacattttcaaagagcctaaattctcgtgagaaaatatatacataaatactcttaatacattaaaataaaatatatttaatataaatgaaatatatttaagtataacttaagtgtattttttatcaagtacactatcttaaaataaatgagctgcattcctgatgtcaatttcctaaacaaatacatcagttgtaaatctgtttttatcacttagcataacatcatacacacacacacacacacacacacacacacacagagtcattcctcagtatctgaggtattggtaaatccatggatactcaagtccctggtataaaatggtagtatttgcatataacctatgcacatcttcccatatactttaaatcatctctaaattactagtaatacctaatacaatgtaattgctatttaaatagtttttttaactttattagatgtagaatagtgtcaagaaatagaagactgtacatattcagtacagacacattttttcccctgaatattttctatttactaatcattgagtctacagatgtggaacccatggatatagaagaccaactgtgtgtatgtagatgtgtgtctgtttgtgtgtgtgtataatcatgcagcagagtagcagaaaaatataaaatttaaaaaaccttattagatggcagctataaagagacttactgtccttagccctactacttgaacaactctttagcattttctgtatcttcaaagtagaactgatacaggtgcctggtaggtgtgactttgcggtacatttattttgtattttattttgaatatttaaaaatgcttacaatgttttgtctttcattgctttcagcctcccattggtagtatggaaaatgcacacacacacagacacacacacacatacacacacacacacacagaggagagagagaaaagaaaaatatatatgatagaaaaattgagtgtttttcccccaaaatatcagggtgggggattaatttttaag

SEQ ID NO: 26872 - DNA, 1699 bp, Homo sapiens
taaagatggtgaatatttcaagttctattcagtcatcctaaatagctaaaaagtaggtcatttacctataatccttttaaattaaaaatttcgcattgcttattttatttattttgtcaattttggggagtcttgtttctgactgtgaaatagaacaaagacaatcatatgtagatactttaaatttacatgtaccatatataacttcttttatatataatcccacataatattatatgtcaatataatatattgacatatatataatatatgtcaatattatatataatatatatgtcatatatataatatatatgtcaatatatataatatataatataatatatataatatatataaaatataatacataatataatatataatattatatgtcaatataatatattgacatataatattcacattgctgtacaggagagactttgaagaatccataattttatagacagtgctgttggtgatatatctatgaggccatacaatgcagaaggtctaaatattttagtttaggggttaaaattcaatttgggaactgataaggttttactttgatgagagaacataatttattttaattaaagtctgctcattaagcaaatatattaaacatcagctgtgaatgaagcattgtactaggcactgctgacagaaaggtgaccaaaataaatcttacctttaaagatatagtttactattgataatgatttatacttctgttaatcatatagacaatcagagaatttcataaaacttattattgttctaattattgcacattaaatttagttggagttttaagtagaacgcctaaaagaaacaattttattggtgtattttaggacatctgttttctattgataaggcataagatcttgatgaatttgaagttgtctgtgttaaagtaatggaaatattagttcatggatggtggtcatttattaagacgtaaacacagcagtgaaagtgaactgatgaggttatatgctatctcactttcacatattttaggaatttcatcagagagctaaatgtgtctacatgaaaggaattgtgcatttttagatttgttttaaaaccatgaaaataactatttttatttaaccaattctgcatagaatattcacaataaaactgtgctatatataaagtaagacctgtggaccatgaaaacaattaatgtcccttttttgaactttaaccttccttgtgtctgaaagtattaagcttaaagaagaaaaaataaaaagacttgtggaagatatccggcaccaataaagaaattaaggaaatatgatgtcttttgaggagtgtcctggagaaagtgttcataaatccatttgaagaaaaatgcatatgtattagatattataatcttctgtttcagtgaattacattttgtaatccctcattatatattgaaggacatagcatagctttcctttctagcatctaggtcactagtggtatttgagcaatataaatgaagcaaaagaaaaaagaatagatgttctgaacatattgttttggcagaattgttagctgagaaagactttatatatgatttttttaatgtgtgtaaattccctcagagataacaggtgaaaaatgatttcattatttaaaacaataacaagaaaaacaaaattaaataaaacttgatatttagaatgtttct

SEQ ID NO: 26873 - DNA, 1040 bp, Homo sapiens
catgttgttaagatataggaaagagaggagtgtaataacaaggtatgaatgcaaccttgtaaaatcccattgatttggaagacaaagttgcaacctccctccctcccttccccccttccccccttccttccttccttcctttttttctttcttttctgtcttttgacaggggcttgctctgtcacccaggctgagtgcagtgtcaagatcatggctcactgtagccttgacctctaaggctcaactgatactctcgcctcagcctcttgagtagctgggactgcaggagcgtgccaccatgcctggctgttttgtattttttgtagagagtgggtttcaccatgttgcccaggctggtctcaaactcctgggctcaagtgatcctcccgcctcagtctctcaaagtgctgagattacaggcatgaaccaccatggcctgcctagcaatatgtattttaaaaggccattctgatattttataactatattacaggacaatattctgacatctggaaaaataagacatttatatgttttttaacaatagaagaagtatggtaaagattatttaaaatatctaaaatatgggattaaatggttacataaatatacaataccaattgattaatatacagtcattaaaatggaataatatacatttattgttctttgaaaacaatcagattatacatcagaatgattttattttttgtttttatgtacagacacattcttatttgtttaaaatgtaggaggttattatgatgaaaactttgaagaaattcttaaactttatcttcctctgtggattgaggagtaaaaatcacaattagagatgtttaaagaacttcttttaagaaataattcaaaaaaactactcatgtcattaagtaaaaaatataatacatattagaataattggtttgggtctgctatggcttaagtaggtattgtgaaccagtcccatctaaatatctgccacattaaaataattgaaaccccttttttggagatctctgtaggccatgaaatttctgtaa

SEQ ID NO: 26874 - DNA, 1025 bp, Homo sapiens
attatgtttgtggccttttagttttactgagagccttactctatactctaaaccacagtaatagattgccaaggagaataaaaaaaattatataataacgcaatccatgtacaaaaataagattataattttatcatcatgtttaataaacataatggttaatttcttctctgaaatgagaacatttattattataaatacttcataagctaagcttatttcatttatttattttggtgtatgttcagtcatttcttggtacacttgcaaaaactgttataccacatattgtgcagatctgttttagtagtgtaaatatattaacaaatataaaaactttttcaaagcacttgtatttcaaatcaatatgagctttcaaaccagcttttgtagagaaggcatatctaatcaaaacatttatttagaggccagtcatgaagtaagctaatcttctatttatattgggttttatcttttcatatatattatcttacttgatcttcacaataactctgtaaggaagtcatggtattttacaaatgaagaaattctgactacattgctagttaagtctcgttcaagactgcagagctaataatggcctaatggtaaaactgtgactgggatccatgtctaatgctggatccatgtgttctgactagtgaaagcagaaatgaatacacagacattgggtaaataataaagtccatgattaatttttaaggctaatgcttaccgtatgaacactcttttatacctaacttaaaattggcattaagtgctgtatcgttatgaaccaaaacatagcattctctagcaatttacttcagattcagctagcatttattgagctactaatatgagaggtgctcttttaggttgtactatatacatgcaaatattaattaattttgagaagagtttgctaagagttttaacaaaaaattgttgccccagacccaagtagccagtttatctttcaagagttatatctttttattaaagttcagagacagagtgggtaa

SEQ ID NO: 26875 - DNA, 1031 bp, Homo sapiens
tttcatatgcttgttggccgcatgtatgtcttcttttgaaaagtgtctgttcatgtcctttgcccaatttttaatggatttgtttttcccttgtaaatttaagttccttacggatgctggatatttaacctttgtcagatgcatactttgcaaagacatggaatcaacctaaatgccaattaatgatagactggataaagaaaatgtggtacatatataccaaggaatattatgcagccataaaaaagaatgagatcatgtattttgtggggacatggatggagctggaggctattatacttagcaaactaatgtaggaacagaaagccaaataccacatgttttcacttataagtgggagctaaatgatgagaactcgtgagcacaaagaaggggaacaagagatactggggactacttgagagtggagagtgggaggagggagaggagtagaaaagataactattaggtactgggcttaacacctgggtgctgaaataatctgtactgcaaacctctgtgacacgagttgacttatgtaacaaaccttcacatgtacccctgaacctaaaataaaagttaaaaaaatccccctacaacaaatgcacactttccagctgtttgccctgctgattttcttttacttgtcatcctctaacatgccataactcacatgttctgtattttactttttaaaaacttattatctgttttcccttttactactaccagtgtcataaggacagaggtttttttcttggcactaggtgttgggcacatagtcattgctcaaaaatatttgttgaatcaaagaacagatggataaatgagtgaatcaataatgagggacactgtgggaacaacgggaagagtgattacttctgcctggggtccaggtgggattaacagaatttgatctaagttttgaaaaataagtagtttattgagtattgaagaaagaggaggaaaaaggatgacttgagaaagtaattctagtcttgacttggccattgacttgtggcaagatttac

SEQ ID NO: 26876 - DNA, 1066 bp, Homo sapiens
cccgcctcagtttctttatctgtaaaataggaataatgttagttatgtattgattagattgttatgacaataaatgaattaaagcctcagaagggtgtctgacagttattaagcactcaataaatattagttaccactattttatttttactttcaggtattcaattctatagtattgcttattaaagcatgaataaaacttgctcagaagttttgatccagtgaaggcaacatacatacatatatgtatttatatgtgttatatcatatagataatgtatatttatatataatatatgttatgtatataatcttttaatattgtgtgataagcttaacagtcatatttagaaggggaagagatacctaacatagggaatatgggcagtggggttcgggaaaggcttccaaatgaagataacacttaagctattttaagggaattcaccctgttgggaggtgagggagaaaggatttgtgcagagagaagagtatgtgcaaagagactgaagtaggtgttgaaagcatggcatgttcagagacctaagaatggaagggtgtggaatgtgtggagaggaagaggagagtcacctcatgaagacatttgtatcttgtactaaggggtttgggctttttcttgatggtaatggagaatcactgaaggactcataatgcaagtattggtatttttgaaccattaatctattgactcacaaatacattatcccaaatgacaaccagagtcagttcccagtcaacgatgagtctctgagaggtttttaacagtgagcaacaaaggcgaatgtttcattaatgtacccgtcctttactcttcattcagtctggcttttctgtaatcttaaatcatttagtccttataatgaaaactagataactataatatgtgtaatcatcttttatctgcaatttgtaacagcacataagtagtagtaattttgcctctaatatggctttcagccatgtgtgctgttctcattttataccaagaaattggccatttcatcatcccagactgagtggtcatactagttctagatctgtggtc

SEQ ID NO: 26877 - DNA, 1048 bp, Homo sapiens
tactcatggcggagggtgaagcaggaataggcacgtcatatggccagagcaggagcaaaagagaaggagtcgtggggaggtaccacatactttaggatcttgagagaactcactcattaccaaagggagggcattaagccattcatgagggaaacaccgtccttatccaaacacctgccatcaggccccacctccaacacaggaaattacctttcaacatgagatttggtggggacacagatccaaaccatatcacagagagaacaaaatagtttaccaaagttggtaaatactttaccaaaatggagggggagatttaagatttatgaagtgagattcttgtaagctttgatttctattctcacaccctcaagaagggaatgggtgtgggcatgattctttccatgagtatgtctttaagaaaattaaagagagggtttgcaggatatggtggactgatatgtgagaaagaagctaactaattgcctttattttggagaaaaactgtgttgaactcccagagttgatctaagaagaagaagaagtctttcccatagaccagatgtgggctacaggaaggaactggcatggtgttatcttgggtcctgtctaagaggatggtctggagggtctaagtgactttataatatagtatagcatagtatagtatagtatagcagatactataattagggactaagtaagactgctgcattcacccttgtcaggggaacttcaggaagaaatatctcaaccaaaggtgcaagggagagagagactgttgacttccccacagagatcacaaaactacctaggggagaagaatcactttaaacaagtgtttagttctgagagctccaacacgagatcctcaccaatcaagtaacttttctattcctctatgatccaaaatcagaggattttaaaaattggcattggcaagctgagggagaagaggtagacgcatattctagggagggagaaaagctgtcacatccccttcctggtagcagtgtttgttcatcagaatagatatcaccataaatat

SEQ ID NO: 26878 - DNA, 1042 bp, Homo sapiens
agaggaatgaaaggatgttgcaaacagtacactattgtacatttctatcaaaggcaggaagctgcagggcttgatgtgtatcttaattcctctactttttgcccttgctgccatgttttcaacagcttgttcatttggatatggcagataaataggtatgggtggactcatttggagggtaactttccgttgatttagtttgtacagaaagatgctttagtaactacctctcatgtctcttcaatcacactagcaatacaaatgcgagtcaatagaaagttttgttgatggtcccattcatggctagctttgtgggtatgtaattacacaggcccctgtgttaagaagagattcgtgctttgttgctgctgtcttgaaattcttagttcaagaaataaggggcttcatgtttttattttgcactcagttccacaaattttgtagcttgccctggacccatgaatgatatcataatttgaatggaaaaataaaactttctattcgttggatgttccaaataaaaagtcattccacatttggatatcaacacagaaaactagcactttgtaaattattttaaagaggagaattataaatagcattagaaactcagttaagaaaatattgtggtgatatttaactagacactcattttcatatttaactcagtattttctctttattttgtcataaaatattatagtatatcaatgtcttctaaataaatacatttattcttggttatacatatatgtccttttagtcttcaagtaatttggaaaagtctcttgtttagcatatttttcttccatccaaagaactttatgtgtcacgttctttatttactaatattttccaatgatttctaaatgctatttcctttaactgtattgaataaaagatctgcaaatacaggtatacagcatgccaaaataagtgacacacacaaacagagccctatttaaattatttttagttacactactatttttcattaatagtattttcttttctaagtatctaatctaatagtatctgcttt

SEQ ID NO: 26879 - DNA, 1050 bp, Homo sapiens
agacagcatcaaatgcacagacttcaattaaagaattttagaaatagatatgcatgcagtattacaattatttttattttgattatgctatatgggtagcaattaacatttaatcattttcatatatatgtttgtacactaacccagaagctttatacagcagacaacttatatgtagataaaaataaggcacatgtgtgtcatacttagttgctgcttttctacttatagtatgaactgaaatgatcaatatggcattttctccctgaagatgcatgttattttgccaatggttaccaactcttgacattactagttgaacctctatacatggtcttctttcagctcaaaggtgacacctcttttttctgtgattcagataatcactgtagcttttggcatcttctgctgtcactttttagaaagatagtggctgtgttacaaagcttttctttgtgctgtgtttggtgactgtaacgtgttttcagcccatatgactaattgttcctctatgtatgctgatcattctgaatttgcttataattgcatttttttttgcccccttcacttacctaaaccctatatacttaagtgtcatagatatggttatgttactagctttactcagagtatttatttacacagattactttacatttttcatcgtttatcctcttactcaagttattattttggtttcttctaaaaatatggaatatagaattcatatattaagaataaaaaattctttaaagctattgtactctgtggtatttcacataatattaaccagctgttagcaatgactgatatatacttcccattgaaaatgatgtaaggtctgaaaggattcattttgacaattttatatcacatatttatatttaccttaggtggttctttttaatgttttaatttgggaccacactaatttctaacttggtaactcatctcttaccaaaattaataccaagccaagaaaaatggtttcatgaatagaatctactagtcttttatatcttataatggtagatcactgatgaggtagaa

SEQ ID NO: 26880 - DNA, 2356 bp, Homo sapiens
ttacttttgcaccaacctaatattttagtgtgcatttggaaataaatgcacgtaaaaagtaactaaatcaattcaaaacttattctcagatttgcttggagccttctataaagagtgatatcacattcaaacttaaaagtagagaacaatgacaagtaatatatttacaaagttgttagagtctaaaatagattataaagaagttcagacattgtaaaatgtgaaaggagataaagtctcagatttgaatttttgatataagaagacatttctgaagataaatgattgaatacgtgaacattgattcagaagaaaagtttatgattataattaaaccaaaaagctgctaattctcatgattaggtgacttatcctgcatgttaataatttgatttttaaggcattaggtggataggtacaacaaaatgaggaatacaaaaacttttctatctccccaaatgtgggtaagaatgatggataccaactagcaagaaaatgttaggaaaaagaatgaagcaaggacagtgatttaaaagatgttgttcattgatagatcactttataaatagtgaagtgataaagatacatacagtgtaaccaagaagggaagagggagatggaggaatgatgaatttgttacctgtaattttcctaagatctgaaaaatgtgtccttctaaatcaatattatgtttatactataaccaatatgaccaaattgcaattatgttaaaatatggatgtgttttattttgaggagactttttgatattattgttttaaataaccactgcctccttatttttggagaaatatacaattactttgtaataatatactgattattgtataaatatataaggatacatatgtgtgtatatacatatatatgtatacatatacatatatgttcatatatatgtatacatatacatatatgttcatatatatgtatccttatatatttatccaacacatatatattatatattatatgtaaaatatatatctgttatttattatatatcacacatgttaaagttctaaataatttttttaatgtgagcaaatattgtcagactaaagtttattaaaatttgatttacttttacttcaaaagagttaatgaattagatccatgatactaaattaaattcttgactttagtattacaaatattttataatgacagttttaagaaagcttagaaaaatctgctagcatctataaaatgtcatatataaaagataaatctgattagttgtgttcatatttctgtgcagtactttttcttcacggatacatggataacattaggtatcacctacaccattatttttctttatgtataactaaaatgacatgggtcatagtctccagtagaagaccacaattaataatttgatcaattgtctttgtgcttatactttcatttctgaagataagtaaaaggctttttctttgtttatagacataaactaagtatttgtggatttgtatatttttgggttttccaactgttctctttcacaacattccccttctacaccaaaaacaaacaaacaaacaaaaaaagaaaacaaaaaaaaatttgttaatccagggtaatctagttttatctgattactataggtgagctatagctgttattagaggtcaattcattgctccagtaagacatcaacttgatttgtttagcaaagttttagtatatatactatgtactacttgtctgtaaaaatacgtgttagaaaatagcaaggctctcttttttatatagccttgaaaagttgttctcttataattgggagaaaaaataagtgggcttttatgtgcatagatggactttacctgtttcttttggatatatgtggatatatgtgcatggggaatagcttgaaggggagtcaacaggaatggcacagaatttcactcattctgtaggctccctagtggcagggaaagtcctaccattgtaaggtccagacacagtaccagacacagagtaggtaggcattcagtacatatttatttaatgactcatcagtctgaagtcttgaaagtaaaacaaagatagtctcttaggttctaatagctaagtaggtagttgattataggatgacttgatgtatcctatacatcaactttgtattagccccaaggagactcagacaccaaaatgaattctaagataaaatgctaaacaacatctaataagaaatagcttatattaagccattattgccaatgattatgattaattaataattgtagattgtattttagaatttattacttttaaaagcttatgattaaacataaaattccaaaaagttatttaggttttaataataaac

SEQ ID NO: 26881 - DNA, 1047 bp, Homo sapiens
tccagtcctggacaactatcatttcaccctttggttctatgaatttgactttttcagattcctcatataatctttcttcctggtttaggtttcaaaaacaaaagccaagaaggaagattatctctggaaaaaccaatgaggcaaggaaatataatggcctagctatttccttggaattaaagaaaaacataatatttacaaaacataagctgataagaaagatgaattaaagcattgttccaaccactctgtacatataatttaagaaaaaatgttggtataagaaaaagtattttctactgtttaaatattattatcatttcctgtatataaaattcatgcccaatttgtatgtcattcttgaatccatagcttaataaaaataacaacaaaccaaaataaggtttcataagtgatttgtcagttttatttatatatttgcaaaatggagataatttatgtgagattgagatcctttctactatgtacaccttcaatataaagacattattattctttctcagttctgtatttctgaaagtctgtcaaatactttaaaaaatgatcagatctatgcaagtgaagcttgcagaatttgcatttgccctcaatccctcttcttcctctagcttttcatgtgtcttgcctttgttcccatttcactaagcaagcattggcctgctgctaatgcactcacgtttccccacaagctctcacattccctggaatattaaacgaaaagagagcaaccaggacaggcagaccaatttctttcaggtatactgaataaattccagtaaggctcacaaatatttcctttattctctaactactcaaattattgctagtttctctccttacaagaaaataaaatttatttgtaggaaaaggaagtgaattatatgaccagtgatgctattttatttcataatagtgaatttttattgtgtttttcccatatggcataaaaactatctcatacagtgcgaaacacttacaagcactctcacaattatttccacttccaatgtgcaaatcacagggaac

SEQ ID NO: 26882 - DNA, 1095 bp, Homo sapiens
gttcttttaccttacatttggtctttgctaggttttgtgaatgtccttattgtagataatttaccttgccctgagattatacggtttgctttacaaccagtctttggcgtttacatggccctgggatctctagccttactctcttgcttgtactaaaatcctctggtttacctagtctccaacccactcttttctagcctctagtgcttccatttataacctctagtttgcctggcctccaacctattcttgtctctggtgtgctctacccacttccattctttgcctgctggaattaatgatgaagcatttaacttaagtctaacctgcaaaagtctctttggtttgagaaaggttcggccattctagttatgttcatgggattactgtttgaaggtttactggcaaatatagtttgagttttattttgtcaaccttaacttttgttacttgagctgaataaatatagaattcatttatatattttcttcccatgtgtcaaaaatggcaaataatattctataaaactgttgtatttaaaacttgaatgtagagaagctgagacttagaaaggagaaatgaaatctctgagagattgacacaagatcacatagctacttagtaaatatttatcttattctttttcctcttgaggaaatatcagtgcatttctcctggaaattgaatcacctaccagtgtaagctggctaagtcttttaattattgtagatattttcttatcatatttggtggatgtcagtcatgcctacttggagataatgtgcctttctaaattttttgtttttcatttgtagaatgatgtcatatttatttcttttaatatgtgatctatagcggatataaactttttggtttctaaatgaattgattcagttcagttttaagatcttaccgattgctttttctgaggttttttatttaccatgtcctgtttatatggctgacagtgttgactagaaacttattctagagattacatgtactcatttattcatcaatttctcgttttctctatgttatatacaatgattgacaaattttgatggcacattttcctgcttttatggttataat

SEQ ID NO: 26883 - DNA, 1101 bp, Homo sapiens
gcattattgttttcttcataataatacatgactaatattttgtaagtttcatacctacagaaataatgcatttcaacaatagagaacagtgttaaattaaaataccaaagctatagcagcagaatttcataccttagtaacctgaatgtgtagatttttttttcatggggagaaaggtatatcctagaatccattaattcataaccaatggatgtcttctagatagtaagtttggagacggtacatttgtcatagctgaatttgtgtattaaagatcaagtcttcataatttggttgagttaatggaaaacctgataaagttagagatacattttattgcaaacgtagaagtgaggcagaatatttaattttgtatgctgatgagctaggtattccagctgtatttcttgcaacataaccactagcagaataatctcgaagcagtcttttacgtgttctggcctcattttactcatctgtaaatttgagcctatctcagcaaggacttgtacacactatctaaggcaaatcttgagaagtagtgaaacactgttgaaagtgtgttcctttcaaagctagtgcttacttactttctaacagtgtgattattggagagttacttggtctgtctgaatattgaaagggcatccagtttttctaacacaatttattgtaaaacgcaccatgtctcactggtttggtatgctacttttatcatgtttaattcacataaatacataaatctgtttctggattccctgttttgcttctttattctatttgtctgtctttgagccagtatcataatgtttaacttttaaaagatgtaatggctcttgctatacattcattcttctggtttaatgacaatatccctcaaatttcatcccttctccaaaaccaccatcttaccaaattgtaattttgattgaaattatattaaatatacagattaacgggaagctaaggaaagtgtttatattatcattaacagtttgatatgcatttactcagttcttccattcattcaatacaatttatattttccaaagttaggattattaggaatttaacttgtaattgttttatgtatgtgtttat

SEQ ID NO: 26884 - DNA, 1050 bp, Homo sapiens
cattccttattgcaaaattgggtttctcagttttctttaacaaatgatacactttctcatgcatgcacctttctctacttgaatgccgtaatccacctttcctcaccatatgtcccttacagatttctatatatctttcagagcctaactaaaaagagaattcttaccatttttttcctgattccctaccccctaaaaaaaaatggaattttccccttggctgcctttgcatggtcctttcaaaagatattacagttttttgtcgtaatcattctctcctgctccactcatttgctttccaatgtttctgctttgtttttacatgctcagcaaatggcaaagtatatgacacatagtaggtatctaataatatttgttgacatgaattattttaaaaaacagtagggaatcaagacaggcagaacactagctgattatttcctattaaattagaacatacaatagaagaacattatttggtgaatactttgtgtatcataaataatattaaatctgaataataaaaaataataaataataaatatttaccttagcaaagaaaaatccttgtaaatattactagggtgcctacggatattgccagtatcctatttttaaaaatgatctttaagatcaagactttactctgattccaggatgttagtgcaaattaaaaagaatattgtgtttggatttcacatataggcctaattctagtcaatactctttaccaggaagttatctcaatcatcctttcaaatggttctagccaaagagaaaggaattcatggagaaatttgtctgagttgcttaaacaatgttgaataaattttaatgtgagtattaaagataacagatgtagaagtaattaagccaaattatgccaatagagtgataggtagtgatttaatggtattaattctagagatatcacaggacaatcagcaagaaagcaattaacatgaaatgaagcttattatcaccttcgtagaaagcttgggggttatccatttctgagaggatactctgtgtgataacagtgcaagtaat

SEQ ID NO: 26885 - DNA, 2049 bp, Homo sapiens
tgaagtgttgtttctccaatgttttcttctagtagtgtcattgttttgggtcttccatttaagtctttattccagataaagttggtttttgtatattgtatatggtagatgtattagtccattttcacactgctgataaagacatacctgacactgggcaatttgaaaaagaaagaagtttaattgcacttacagttccacgtggctagggaagcctcacaatcatggcagaaagcaaggaagagcaagtcacgtcttacatggatggcagcaggcaaagagagagagcttgtgcacaggaactactctttttaaaaccatcagatctcatgagacttattcacgatcatgagaacaacatggggaagacttgcccccatgactgagttatctcccaccaggtccctcccacaacatgtgggaattcaagatgagatttgggtggggacacagagccaaactatatcgttctgcccttgacccctccccaatctcacatcctcacattttggaaccaattatgcctccccaacagtcccccaaagtcttaactcatttcagcattaactcagagtccacagtccaatgtctcatctgagacaaggcaagtcccttccacctatgagcatgtgaaaccaaaagcaggttagcttacttcctaaatagagtgggggtacaaacattgggtatatacagtcattccaaatggagaaattggccaaaacaaaggggctacaggtcccatgcatgtctgaaatccagtggggcagacaaagctccaaaatgatcttttatgaccccttctcttacatccaagtcacagtgggatgcaagaggtgggttcccatggtcttgggcagctctgtccatgtggcttctcagggtacagcctccttcctggctgctttcacaggctggctttgagtgtctgctacttttccaggcacatggtgcaagccgtcactgggtctaccattctaaggtctggtggatggtggccctcttctcacagctccactaggtggtgccccagtagggactctgtggagggggggttcccaccccacatttctcttccatactgccctagcagatggtgtctatgagagcccttcccctgcagcaaacttctacctcgacatccaggagtttccatacatcttctgaaatctagcagctttcagccatgattgtagcagctgaaatgcatggcaccaactccctaggctgcaaacagcatggggaccctggttcctgcccaagaaaccactttttcctcttaggcctctgggcctgtgatagcaggggctgccatgaagacctctgacattccctggagacattttcctcattgtcttggtgattaacattcgactcctcattacttatggaaatttctgcagccagctggaatttctcctcagaaattgggactttcttttctatggcattgtccagttggaaattttctgaaattgtatgctcttctctatttacaaaactgagtgctttaacagcatctaagtcacttctcgaaggctttgctgcttagaaatgtcttccaccagataccctaaatcatctctctcaagttcaaagtttcacaaatctctagggcaggggcaaaatgatgccagcctctttgctaaaatataacaagagtcaccttggctccagttcccaagaagttcctcatctccatctgagaccacctcagcctggaccttattattcgtatcactatcagcatttttgtcaaagccattcaacaagtctctacgaagttccaaactttcccacatttttcctatcagccctccaaactgttccaacctctgcctgtaactcagttccaaattggcttccacattttggggtatcttttcagcaatgcctcactctactggtaccaatttgctgtattcatccattttcatgctgctaataaagacatacctgacactgggcaatttacaaaagaaagaggtttaattggacttacagttccacatgctgggggagcctcacaatcatggtggaaggcaagga

SEQ ID NO: 26886 - DNA, 1219 bp, Homo sapiens
gctttgaaatttggctccaattttcatatgctttagtgatcctaggtaatttgcttactaagttttttaaatagttattttaggctaaaataggtgtgtgtatattttgtaggaaaacactttgtaaattatacagagatatgaaaatatagattatcattgtcattctgattctgcttcctcatccattcagcaaagaggtgcgctgtgaccatgactgttcgctttccctttcatttattcatatttgccttcttcagcaaattttaagtaaaatcaaacttaggaagttgtcagggcttaactttagcaattttgattatgccattggtcttggtctcttcatgaaaatttatcattcttgagatggaaaagacctaggaggtcattttgttcaaccctccttttaaaatcgggaaacaagtctagagagaattatataaatgctggactgctaaccaaggtatcttatttcctagcctcctgggctaattcttcaatattgtaattctgtccgcttcactttacatttatttcaagtgtgtggcttggaaaatctcacataggtagatgttggcagaactaggcaagagcagagttttactatcgttgtattataatatttctgattgtctttgactgtcaatttgtactgtgttagtttctaaggggtgtgtgtgtgtgtgtgtgtgtgtgtgtgtgtgtgatgtttccctttctaaatagattgcaaaacctttatgatctttgattaaaacaaatagttttgagtgccgactatatgtaaatcattgttgctgttttcaaaagtcattattaattgaccaccatttgttttgtgggaaagaaacagtttaaactttgtaggtaacaaaacttatttggggtcaataggctcgaagtttcactctagaaaactgacatagttgcttaaaatatataatgtacttctagctatgtcaaattgaattactaattgacagacattggtactcttataattagaactcctttgaaactacgatccatgaaatgtgaaaatgagaataggaaattaaattctttattggttctcaggcagctaaactggcactcccatgttaaaatgtctaagtattaatttcataattgctatgaaaaaaatctgttcttacctgtttacaaatgtataaaacaaaaataatgaacaacaaacaaaacaaatgactgcaaaatgatt

SEQ ID NO: 26887 - DNA, 1064 bp, Homo sapiens
tgttattctcacagattaactctacaaagttggacaatagctgccaacatcttccagtctcatatcttcttaactttgccattcaaagaataaggttctcttcttcccttaattccaatttggaaaacctcagagaaggtctctgattggcccaggtctcattgtaaaactgtatgtgtggctgggaggagttggtcctatgataggcaatccttattttaatcacgtagttggagtaagcagaaaataggttcctcaaataaggcacgtatttttttttcacctcaaagctaatgatgataggccagttactgggtgaagaagcacagagaggctggcactattttccagatagatgtgttgtaagaacataatctttactttatttgaagcagtatgagggcttacagctaattatatcttggttgggtatgggtgacaacaaataatgaattagcagtctttgcctttattcaccagaaatttataatctacttgtaggtgtataacagacaaaccggacatttaaaaaaaatatattgtgaacttatgtgatattgaagactgtatgtacaatagaattttcagagaatttcaggattactatgtgctatagtcttctgaaggttttgaaaagttcagtttgacttaacttagaataatacagtattaataattagagctaaagagctaaagataactgatgttccatccgaaaagaggagcatagggaatattttagaaacaggaataggtgcaggatgtgccaaaaaccatgagactggtccattgtagtgttggaaattgttgtggaaaaaaagattaagtatgcatgatcacactagaattttggaaggcattgaaaaatctgaatgtgtgcatattgttaaaaaaatatactgtttggtctcaaatttgaggtagtactctccaaaaaattaaaaaacagtaatatcagtaatatcatgaatagctgtaagagatttacctgtgcagttattgaggaaataagagaattcaaaaagctttttatggtgctaagcatactgttggaacgcaagaca

SEQ ID NO: 26888 - DNA, 1007 bp, Homo sapiens
taggacttttttttgtttgtcaacataacagaaaaaagtagaattatcataaatgcaggaatgtacattggagattttctttgtgaggccatgacctaccattaggcagcaatcatcatgaagtcctctgttaaaatgacattcactttcatcagaacctctctgtgtgctacctctttcaattctagtctcttgccagttttagagctaatggtttccaccaaacatatatctcagataaattttaaatgcattttctatcatcagcacacagctttgttgtaatgttacatgtagggcaaccagacaggcagaattacggtgattgtgagtggatattttggttctagttcagatgctgttacttcctaatattgtgagctgcacacaaattttaatcattaaagtagggatgttaatagaaccttcatactaagagagagagaggaatttaatgagttaatgactttcaagcgtagtgctcggcgcacagtaagtactcaatattgggtgctcttgtgtttataaaaagttgcttttcttaaattgcaaattaagaagtcctcttgggggtacaaggtactatgtttcagagcatggtttaattggtatccttcatggtttacaagtataggatgccctggtcatagcctgggtggctatgagaaagagaaagagaaagagagagaaagaggtagctctaagagatctataaggaattgggggctttaaagaggcaatcaggggagataaagggagtctgtcaacatggcaggaagatggggcttaagtagagaagataatgaatagaagttcctttatgataagaatgactgagaaattttaagaatagggatgcctggcattgaagttattggctgtaatgtaacaatcattctggttccagattttaatagagtcagccatacaaacatccctaaatatatgacactttgtggaatgaagggcttggcatagtgcccagtggggcaataatgatacaacaa

SEQ ID NO: 26889 - DNA, 1030 bp, Homo sapiens
ctgcagactttaacacattcaatcagcggcatggtgggagtttttgttggtttgtttttgatttgggtttttaaatttagctcagccagcattcgatcatttgcaagtgaagcacatcttatttaccaacatgcttatgaattgaaagtctgtagtgtggtcagtgtcaacacagtttgaaatttactctaaatgttcaaagaaatgtacctaaactgaagagtaaatctccagactgtttatagagaagtgggatgtgtgccattgccttattaacttaggtttacattttgggtgcacaagactcaattgctgctaccattaccaggcctgctgtatagagaagacttaaaagcaataactctctaaatagctaagtgtaatttgctggtgctgaactcttttaaacatgcaatatgtcaatctggaaatatatggatgaaaatgtaattttttcagctttctttaaatactttacagctctgcaacggtttgcaggtattgtttgtgggtacttcatctttgagaaacattgctatgaatacttttttgtggaatgctgctgaagacattttccaaactagatgagaagaaaattagtatttgttgtgcttcttctgggtgtcaggcattatctcctttaatcttactgcagctttgcaaatatattgttgttttagcgttgaaaagattggagctcaaggggtacatttcccattggtcacatacttggtattagagaaattggaatttgattcaagggtcagtgacttcttttagagcttctcatttgttttatttggcagagaaagaaagaaatgttctactagaatctctttatgctaggattaaaaagtacccctctttgtgctttctgtttagaatttatcctttggtataaaatttgcatagagtgattttttaaataaaataatgagcaaattgtacctttggaagatgtttaacatactaatgcattaaaagctgctttcaaaaagcattcatatatatgggtatacaaagtcatgta

SEQ ID NO: 26890 - DNA, 1030 bp, Homo sapiens
atgtaattttctgggtagaatacaaggggaaaagaactagacagtgagggcatgaaaatatcaaagtgaaattaataaaaggaatgaaaagcagagggaaagagaaacagtggcaatgctgtcaaacagttatttgatctgtttgttgtgtatttgacagttcgctatgtgcaaggcattgtgctagaagctggagatgaaacaatggataagatgtagacttcagttatgacaaactatagtatatagattaatagaaatatgcgtgtgaaatagagatagaacaaagaaaatgattagtcatcccacacccaggagacaagaaagagaaacctttacaaaggtgctcttgcaagatatttatgaattagacagaaggtctaattagcccagatcattctaggtagtggtaagagatggggctagaaacagtataatgggtttgggaaactgcaagtagttcaatattcttagaacataatattgttagaaacacactgaaagaaaaatgaaggaagtagtaaaagacaactcgagattttagaccaggaggtttctgtgaccataaaaaggagcatggccctttaagcaatggggagacttggttttaagtcacagaggaagttgtatattattagacagtttcttaaagttcatatttacacttgagaatgtgaattaaatacagcatgtgagaactctgctgaactgttcttctatagaataatatatatatatatgtatatattttttccctcaattcccaaaaagagaagtcctagctccactgatatttaaggttcagataattgtttctatttaaatataccatacgttagagttaatttttattggctatcaggagctagcaagataaatatttatatttcttacattggtgaatctgatgacccaaagaaatacaaacatcctctacttaatacttcatttctgatttaatggacttgaggaagaatatcccatggaatgttgattttaattttatggctcagagtttgggggagtgagc

SEQ ID NO: 26891 - DNA, 1082 bp, Homo sapiens
tgtatccagtatacatataatagttatactggccactattctttgtgatgcaaagaataaaaatttaataagaatttaaattagaggtaagaattcttaataagaattttaatccgtaataagaataagaattttccttgtgtttctcttagtggtatattctaataatactcatttctttgtttttattaatgtgctactaatttctactgtaaaaagtccaaagttaaatgggcttattcagactgaagagagtaatcgattaacaaaaattctgagattactacttaaaatcacattttgtaatgaagacattacataaagaagctaaaaggcaaagttacataaaagttttaatttaatgagtgttagcacataaattgctactgtcaagacagaaggaattgtgttgatttgattttagtgaattctaatgttaatgcttgactaaattcaaagaacataaattaaaaattgctgaagttaaatttgctttatgaaatttgaactatgtgtctgcgaagtaatctgtatcctaaatatgactgatactgagccaagttttttagtatgtggaataattgttatatttgcagagtaatgaagcttaaacataaacaatattagcaatatttaccatatcataataaatatgtttgtaagtcctggaaatgtttgtatttttatttaaaaatacttgatgatgttaatattatctctacataacacttctatacttgtctatttctttgcattaaatattaataaaatttgaatatatataagatgatttttaattagtggaagttactatggaaaataaagtacatttatttatatgtgtgttgtgtatacatagcgacacatttataaaagcagctttcaataaataactaaagtcattttaagcataaaatttagcctttttgctattgagtatttagataataactttggttctttattatttataagtataggtacacctagatttcaagaaatgtgaaccaaataatcagaatgtatttaacaccatacgttcactgaaggatttaacataagaaataaacattgacagaagt

SEQ ID NO: 26892 - DNA, 1028 bp, Homo sapiens
caggtcaatcaacaatcgatatactttgtctgttccatatttagactgattctttattctggttttctgcttgaaaatttttcatcctaaaatgttttaaacatcctaaaatgtttaaagtgaaatgttttaaacaaattataaagatttctctaagacaacctctgaaagtttggtaactgcaatttgatcattactacaattggataactattattcaaccaaaatacaaaggtttatctaagagaatctttgaaaatttgataaaaattctacctgatgccgtatcaagtaataccaaatatagggaaatagcactttatataattacaaaaatcacaaatctctggttgttatttttgtgagggagaatcagcaaagtaagtaatcatagagagctgtataaattattaagcaccataaatagtaactacatattacaccgttatctttgtagtctatacgcttaataggtaaaaatagaatcctaactttccaattctgtacctgtatgacattcgtctatgtaatttaagggatctgattttgtaggaaagataatgtattctggagctgatctttcctgaaggctataattatgtgccagggctaattttaggcatcaatggggctctcacaaatgctgtcaggtgagacatagcacgtgcctcgccaggtacatttctattggggccaagtatttattaactgaaaaagtttcagctacatatactttttttgtcaatacaaacttgggaccagatggtttaagacacatacagtgttcctttaattagttgctagtagggttgaaaatgcccttttaataggcaaataaaatagtaggttcataatttaaagcaatttatttttttcctttgaggaagaatgggtgctaaaacttaccaagtttaaactactctgacacaactaagtgattcccactcctggaattgtttgcaaactctgaatcacagggcacagaggaaaagcacatgggtgagagacaggggattttattacataag

SEQ ID NO: 26893 - DNA, 1064 bp, Homo sapiens
ggacagatggtaattcatattacagtatgagagtagggcatttccctagaccaaattattgtctacccagttttcaattagagaaaactgccaattatctggagtgggttttgttttaattaccgggtgattaggacagctaggtaactagcccgaaggaaggagagctcaactgtgtatgtgaatccttattatgcaaacctatgaaataaatacagaaaggccatgtgaataaactgcttcagtgaaatggtagataatttacctgaggcagtctatatccttttactcatttgatcaataaaaagtaagtttgaaatgctaaagtcaccatttatttgtgaactacactttatcgtttctatgagaaaaaaataaattccggggaaagggattatatgttagcaatcagtgttcaacatgttttgtatttaacatgtgtgttaatgtatggtgtcatctcatgagaaatcacttatcaggtgacatttgtcatatgaaatatggctgagacttgaggcacagagacaggatgaataaatccctattcttttctgtgtcttcagttttttacttgagctccttttctacatctgcagttatcctctgaatatttccaattaagtgtgtcccatcacttttaacttcaacagttctaaacgaatccaatttcctcaccagaccagcttctttaccaaatttctatgttctcctctctgccaagggaaccaccacttcaacattccttcaaacatggatggttatagttattgattttatgctatcatcctcctctttctgtcagtcatcttttggcaaatttcgtataccagtacctttatctccatttgggctatcattcctatccagattcccacaggctcacagctaagctactgcaacagctgttgctgactaaatattctcatgtctctaaataattatttaaatagggaacagtggatttatacctgattcctctacattaaaaaatatttctttcattattacatcaagagtaaaatatataaaacattctgcctcaatttcaaggtcttcattaa

SEQ ID NO: 26894 - DNA, 1023 bp, Homo sapiens
tcagtagtgaaaatgggatagaattctgatcaatgaaaggggaaatctggcaggcttccagagaaactctctaatgaaaagagaaacacaggggaagcactacccattttagctaaagatcattatgtctgcatatgacacctggaactggcagcccatcctttggtactggatggtgacacgaatgccatccccaaaaaggcaaaatggattcttcatgacattgtcgagcttctgaatttttacatgcaagacattaaatctctaatttttaagccacgtttatggccaaattattttacttaatacaagccctaaatgttcaattacaataccttggcttacttgttcagttacctaagtagcagattcattcaaatatattcctcttcctttaagttgactcccccttcttggtcattagaaagaaataaatacgtttgaaaaaaaataagtatctattcgtttcacagaatcttggtctgaaagagacgtgaaaataaagagtgaagactggtaggttacctaagattataaggaacacagttataaattaccaagctgttgtacaataatataatttcattgtgctttaaaattgtcctaaattttgtaatagtttcaagagaaataataaactaagcgactctttctttggatgtgcccatttttaagtgttgattatccactgaacactgcacttgaattttaggtgaagctatttgattctcataaaaactgtgtggttaggatggaaggtgttttgtgcccacaaaatgtttcctttggaagcctaatagggaatgctcatcagctttcaatgaaaagatactctgtttgccgaaggtctaaaatgaggtaagacaagacaaaaaagttacagtggcatctttaattcttctatacatctatattatgtcaatcttttcagtgtatttgcaggtaaaataatttagagaaagaatattaactttttccttccttgtctaaaatatccgtttttttgagtacatgccatgtata

SEQ ID NO: 26895 - DNA, 1687 bp, Homo sapiens
attttttgagacggagtctcgccgtgtcgcccaggctggagtgcagtggcgggatcttggcgcactgcaagctccgcctcctgggttcatgccattctcctgcctcagcctcccggagtagctgggactacaggcgctggccactacgcccggctaattttttgtatttttagtagagacgggcttcaccgtgttagccaagatggtctcgatctcctgacctcttgatccacccgcctcggcctcccaaagtgctgggattataggcgtgagccaccacgccaggccttgaaaacttaattaacttctttgtgttttactctcatatttaaaatggggaagatacttttacttctcagggctgttctgatggctaaattgaaaaatatgtataaggtatttagcatgacatttcactcgctgtaaatacttgtgaaatgttactgtatttttctataaaggcggtaactttttaatgctattttttatcatctcagtattttaggagatttgtctttagtattccattttagagtgctgaatatataaaacaaatcaatttatttcatttcattcagcacatacttattgcgtggctacttccataccagtaaaggcatcaggagtttattaaacaatctagtgaggaagacagatgcaaaaatagatactttccaaattttatggtaaatggtaagcaaaagttactctggaataacttagtataactaaagtctggaaaactcttctgggaaagacagtttctgaaatgagttatgaagatgataagaattagatgaagagtggaaaagtggtgcggaggatgtttctgataggggaaactgcaacaatagttttgaaagaaataatctcaagatgtaatttggacaatttatttagagtgattaaagcataaagatgtcaggcacaaaggaagagagtgaaatgtagaaacaggccacgggaactttcatgttctgctaggggcttttctttttcctctttcatttttttcttaaaataattgatggtattttatatgctgatttgatttatggaattatctgataaggaaaatttatgtgtgttataatcaaggtgcatgataccctatcaaactagtatttgacaaccctaatagtcggtgatatatgcagaatgaaataggaaaatatcaagtaaaatactttttaaaactgagaattttgcagagattgaataatcactttaggccatacttctcagaaaggtattgggctttgttgtgagaaggcaagaaatgaggagggcctagaaatggaaacaaacaaacaaacaaaaaccatgcaaacagttttaaatactatttattgggttctgccatgtatcaggttctgtgctaggtatttttgcataaattacacattcctgacaacacagacctgtttaaaatacctgtatcatatttgtttttttttgtgtatatatatatatttgtgtgtatatatatatatactcaatatgtatatttttctcccaatataaagagaggttaagtacttatataaagagttctaaaggtatgaagtcaggatttaagtcaactttcccctgactccaaaggtgtagtgtagaaactattagagggtatttcaatgattacttcctttacctcttccttgctggcagaataaactttaattcaatt

SEQ ID NO: 26896 - DNA, 1046 bp, Homo sapiens
gaaacaattcagggatgactgagatctatactacattcttatttctgagaaggctagtaagcctctctggatttatttgtgctttgagaaaaagagtgtagaaacgcagtttaggttttgtaagtttttcatttttcccagtcagaagtcttgattagaacaccagtgcctgtgattctgggtacacacaggatggcattagtaatagtcccatataacattttttcaggggagatgatataacagctgtcctttttgcctgtgatccctatttggagtagtctcaggactgtgaaaaaaatcttctctaggattattgcctgacatgcaactattcaggtccccagacctgacatttactccctgccctactttctccctggaatcactgtttgtccagaaggagttagatattggatggagatactgtgttagcagatattatctcaacacagtacttattcctcccctcccgttcctgtattttaactctaaacaagtgcatttaacaacttgggctgtctgttttctaaactctttggaaattattaagtataagtagattgtcaagattgatcttcgcaaaaaaagatcacatttttttctaataggggcttgtggtaccataaatggttaatttttacacaaatatttgattcttagtggtttcatgcatcatggcaattctgttagtaccttttgctatgctatatagtttttacaagtatgcaaatgttgaaggatatttaataaccctgacgttattaaatgttcagttatctcccaaggtttttaaatgggtcttgggaaattttgagattaaatcatataatttgtaactgagacataatattcattcttgaatataatttgcagtgacggctttatgaaggaagaactaattactctcatgattgagatcagagacaattattagaattatgttttctaaggttatttttctatgtacaaactatgtcccttgaaaactgcaagctgacgtgtgcttattgtgcttatctagaaaatcagttccttatcaatta

SEQ ID NO: 26897 - DNA, 1031 bp, Homo sapiens
catccttattgttttttaaagtgccttcaagagaaaatggtttttaatcaaattcatgagataactttttatgttacattttataggcatttaaacttcaatataggacacaactaaaacaatgtatgactgaatgtatttttggaaaaatttctgcatgctagagcagaatcatccacatctatacacaaacactgacagaatttgtcacatagaagataatctgtaaattgttgtgattattaagtgctttccctatattacagtttttcacatttattaaggaatcaggtaaaggctatgcatgacatcataaacttcacagagctatgccagtggtgtccacttgctaattaacattgatgtgccacaaaaccgtacatgcttaaaaaagatattagtaatggcaagggcgatttctgctcttctacagttgagtgcttgcttttttgcaacaacctcaaactccctacagtccgtgggttagaatttctaaaaagttatttctcctatcaaccaatgtggaaactttttcaaggatgctgtgaattcttcatttttgcaaaagataagaacaaatttaacaatgaaagctatttttttagactgagagataggtagaaattttgtatacaagctccaccacatgtcattatcttattcagctgacaggtggtgctccagaacaatatgggcagtggggatgtgtgattagatttccatcagtttctgggacaaaccatgagctatacctttaagataaaaaccttttaatgtagtagttgaattaccgaaatttttatgtgcaagaatagtaacccaataaaataatttttacatgcaaataaccttatacattttaaatgtgttttagatgcaggcattgaactagactgggatgaagttttcatgtagtttcaactcaactttttactttactgcaaagcaataaattggagtattaaactataattaaaatcaatacaactgattttcctccatccgttgtattatttagcattattatgaca

SEQ ID NO: 26898 - DNA, 1038 bp, Homo sapiens
atattagacttagattttaatttactatttttaaggaggcaatgaataaaggtaatgcactcaacaagaagtaagtctatccaatgcttctgtctggctgtggtcctcttcatctttttcttactgtccagatgccctcccctgtcttacctctgcgtagattattctaagctcttacccctatacagagctctaaaccttcctgtttctactgcctgctcgatatctccacttggatatgtcacagcatctccgactcaagctattcaacgttttacttatcgcttttcataatttaatgtgcttttcctatcttaattgttataaacttctgtacatcacacattaactcttcattggtaaaaagccaagaaatcataatatctagtacttattaaaggccaactgtatcaggaagtgtgctaggcacttcttatacaatatctcacctgaccttaacaatatggacactaccatccttattttacaaacaaggaaacagaagctcggagaaattaaataacttgcaaatggccacacttgtgcaggtggctgatcagcaatgcctaggctcctattaaattcacatagtctaaatatcaacattttatatatggcgataaatgaaaactcctaagaagtatgctggcaacatagatgaatttcttaagtattttaggtcattgacagtgattttgcttgatactcataataattctaaataaccaggaatatttgtgaatatatcaaatatggaaatgggatcaagtatattaacaataggtgccactcttctaacttaacattgtggtttcattatatttataataactcaaatagagtaaccattgcagtaactttttggaattgatcatgcgaagtaaaactttgcaaggagtaaaatagaggaatctgagaatttaaatagtgcaggtttgagtccaccatgtgagtataggtgaattacttaatctttttaagcttcaatcatcccatctaaaaagggaattgaatattaatgttaacctcatagttgtg

SEQ ID NO: 26899 - DNA, 1028 bp, Homo sapiens
cttttaatgtcatttaaaaaattttaactagaatagataccattgctagccatgaatgaaacaatgcatttcagttaaaataatagagagtgtagatctttggtaatatttttaactaatatgttaacaaatttaagaaacaataaaaagattagtatttcaagtcacagttttaaaaaaatatcaactaaacagttaataatatttcccagttgttaacttcaaatttagcagcccattgtccctggtgatatattgaaacctttaaaaacgtattcggaattaatggaaattgaagtgattggtattcagatataattctttagtggcccttttctttcttctaaatacaggataaaaattgaaagtataaaaagcttcaagatatattgaaatagacaaaacattttatgcaactgttggtaaaaggggcattcattatttttttctgtgcttactgtattgcttgtggccagaattagcacaccatgagccagagaaaaagataagacaaatagaatggcatgtagctaattttgtttggcaaatttagatccgatacatgctatttcactcctacaaactgactcagtcactctttgagaagtacagatgaagtttgtctcccacagtttaacagctttcactcaatatttataggctatataaaaataaatttctataagtaacatatttcttactggcaggatgagctctgtgaaggcagatttattaatgaaaaaaaaggagaaccaaaaatatttcaattgttccagatctgcagaaaataaaatacctgtatgtcaaaatatcagtaatagctttgtttcaaggacatttgtagtggacttttggtattcaagagttttactacttgtgagtcagtcagaaatcccattattttatgataattttgtgatttgaatctggtagaatttcatattctaaaagtagtcattcacctgccagatgagccaacagaatagaatccactgtaataatcaggaagttgcttaaaacaaaacaaa

SEQ ID NO: 26900 - DNA, 1507 bp, Homo sapiens
gacccattcaaaggcattggcgaccgacatgcaggcttagccgagaggaatttctacgaggcgacctactgggggctgtctggttcagcctctgccactgggggaccccgctccgagtccgcagcaatttggtattaactgtgcggctccgagttgagctatgccgaaaagcccttttcagaatttctgcaaggaatgtaatccaaattagttctgcagctgtcctcttcctcgtctcaggcgacactagctcgcgccctcgcttcgtctcttctcgtttccctgggcgaattgtcagacccacaagtgagcccatttagagcgcgaggattagcgtgccattgttgttccgtgtgtgactctgtacttgaaattctgggggcacaaaggcgagcctcacttgttcaaaacacaaagtgatccagatgaaagggccgcacaaagaaaagctctcgggtgcatccctggtataattgcaacacgcatactaaggtgatccattggaaactgtaaatgccccgggggacttcgtttttcatcctcccccacccccaccctgccgcacctggcagggaaagttcagctggttttaatgcagtgctattataaaaacaagttactgtctggggtatgagtgaggctgtgtgtgtttgtgcctatgtatgtgtgtggctgtgtgttcccaactaaatacatattgcgcgtctcccctctcgcggttagcagtcagtagcagtttggaggagtttgttttggtccaaatgagaaattaagtgcggataagtaaactaagctgccagagggcgacaagatgttgagtgaattgcttttagatgaaacaaattaaggaaacgagggaagacaatctgcttctcgcattattagacacgcttggagttcaggggaaagtggcatatttttgaaatgctaatttcttaagcagaaggaatgcaccttatttactgctctatgtgaacagaataaaaatatagggcgggggatgctgttgtatagatctttaagatatttcttaattgtaacagaagagaacctcttttttcttttgcttggaaaaaaattcagcattagagaggatgttttttagaaattctaaaggactttgtctcattttcaattatgcattttatttagatatatctagatatagccaaagtccctttatatggcaattataaagcctttgctaaccaaaggaatggttctaaaattcgtcttccttgtataatggaaaattatcaatattgccttggtattgaagaaaatgtatagtagcattgaggtggtactcttatataccttagtagataaacgatgaacaagttcagttcccatttcttttttgcaggtaactcagtcttgcttttcattctataaaagtacatatagctttcgtacatatttaagatacatcattatatctccaaaatcatggggttatttttcatttgagaagaaaaatgttaataaaagttaagtggtgaaaaag

SEQ ID NO: 26901 - DNA, 1031 bp, Homo sapiens
aagggatgaatagggaacagcattggagagtatatgtcaaatgaattagggcagtagtttagtgagccaatgtgccaatttagaaatggattcttcttcctgctgaagagctctttttaaaataaattacaatcataaagctgccacagtttactgtgcatagacatgttcagaattggctcttcttcatgagggctgcttggtgcaggtatttaagctactgccaataaggctaacagctcatcaaatagaaaatacgctgcaggaaaatacatgggttaagaaaaacagttaaataccgtgctgttattttgtatgtctgtttaagcttttctctcaaacaagttgacttacttaaattgttttttaaaaataaactctaaaagccttgaaaatagtgcagtcttaaaagtagtattgattttagtcaatgctaaaaacactttcaggggaataagatgagaaaccacatgaacaagtttgccaccaatagtggcaacagtgtatgtatgtcatggatttaagagagactcaaataaaaacaaatcctctggtgtatatgtgtgtgtgcaaatttaaagagtatactttcacactagagggtattctttctacttgcttctactgaagcatactagcttttataacacatatcgagatggcatatccagctttgtatcatccaaaatgttgaagaaattatcagattgcatttttctatggttttgtatagtacctcctatggaagattgtaaggaacaagagcctattatggacaacaatatttctctggtgccttttgagagacctgctgtcatagagaagctcacggggaatatgggaaaacgtaaaagctccactccacaaaagtttgtgggtaagcattacaaatgcttttgtttctttgcaaggtgatgttaataggaaaaggcaagttcccatgtattagaaatatatatggtgtgtttcagttcatgaaataaatacccatctcttttcttcattattcttttttactctctgacattctg

SEQ ID NO: 26902 - DNA, 1050 bp, Homo sapiens
ccctcagaaataatgctgcatacctacaactatctgatctttgacaaacctgagaaaaacaagcaatggggaaaggattccctatttaataaatggtgctgggaaaactggctagccatatgtagaaagctgaaactggatcccttccttacaccttatacaaaaatgtatatcatttttttgatttttttattttaattttttggggtacatagtaggtatatatatttatggggtacatatatatatttatggggtacatgttttgatacaggcatgcaatgtgtaatataatcacatcacttaaaatgggatatctatcccctcaagtatttatcctttgtgtatatctttattgaggagcatgaatgggaagagactgacatcagtgaagacaattggtttctacagcctatattttcagatgtatatttctcattaatacaattcagtcactgcaaaacacatgctaccatacttgaaccacaagtgtgatagaagcaggttggaaattagtggctttgatatatttcatgtgataataattgcaattacgggttacactgaccgtataaataacatggtgattttcttgtgattaaaggagaattgagatgcaggagaagtttaaatatctttgaaatctaggggaggaatcatatctttatgcaatggcatctttcactcctgggtgattaaacaccacatattagcatttgatccttgactgactgggtattttgttacctatgaaatacaggactttgtaaaggcagtatgtgatctgttaaactccctctagaagtaaagaaagaatttactgagaccttcatcaagattgctacatctcttgcagattgattctgggtaccagaacattctataatttaaaccaatctaaactaaattgtaggtttgaaaatatgacttctttttttagccttgattatcttttgagcttaagaaatttattacactgatctctctatgcatagtattatcacagaatttagaaaaggaaatcactgtcgattttttttcctcagtaat

SEQ ID NO: 26903 - DNA, 1030 bp, Homo sapiens
ggtgcacataaaagaaagatgagagaacctactatacagtgacctttatcttaatacaatattaccagaaccctggagaatttagagttttcaaaaagaatagagagaaattcattttcaaagcttgcatcagtaaatgaaataaaaaccccacaaaaatcccacaacctttataaatgacatcagttttcctatcaggtgacacatgtggatcaatttacatttgaatttggtgatcagaaaatattgaagtgtgacctatgatttgcaactgcatagggtgagacagtacagctaaaacactgggtagtcattgcgatgctgggatggagacagaatccaagacaacccttggtgaggaaggggttgagagaggaagaaagtaaaggcaggacgaaaataggcagtcttatcataagagaacaatgtgtgccattttaactgcccaaagagcattttttgtctcaactttcagtgcttctttaattaaaatgaagagatcaacacataaacagaaactaaatcattctaaagaaattctaacttctttatcctataggtttgattacaatttgacctggtatgctattcatcaaaaaaggtattaaatgactgttacatagctcacacggtgttgggaatagaggggaaaagaaaaaagaaaacagtgtcgctagcctcgaagggttcaatgactaatggaagagacgagtggtttcatatgatattatttcatattatattttacatgatttaatattattgcagtgtgatgtattacattattgctgtggggtagatcactagaagtggtgaggagcttagattctgcagtcaagctgcctggcttggagtcctactttttcctctttccagctgtatggtcttggacaagttacttacactctgctgcttcagttttcttatccgtaaaacagtgctaataaaagtataattctcacagtgttattgtaaaataaaatgtgttataatatacataaagctcttcacagtatcagacaacagttac

SEQ ID NO: 26904 - DNA, 1044 bp, Homo sapiens
agccttctgaaatgcagcaaagacttggactgtatttactgccagtatgggggaaaaaggaagccactaatataatcccttccccacagctagcattgtttattctttctggttcccttcttgttgaaggaagggctggtttgtgcaactctagtggattgattcagggaataaaaattctgaagagaatcctaaattttcaaatgcaaaatgtttacttcaaaataactatagtctttaagaaaaatttgttgaactattagattcccaacactgatgaggaagaccattctaatttaaacactggcattatgctaagcaattttcctatatctacttacttagtttttgtaataattctatgaagcaagacttgtttttatctttatctcacagatgaggaaatgggctgagaaaggtttaataactttcccagggcctatggtagtaagaggcaaaggcaggatttgaatccagtagcctaactgctataatggactgccacttggtaacaagaatcaccattctgtgtactgatgctcctgctaagaaagagaagtccattaacttgggtgtttggtgcatgatgagattattatggaaacttagagctttttaactttctacaaatgtgagttagaaaaccgtagttgccaaagttaggttgccacaagtgttacattcttggagacctcgacatcttcaagctttggaacctggtaactagatgtgcaggcatctgggagaagtgttaacagataataatccagtaaagaccaataaagcattggaaactgagaaatattctgaggaagatctaagaccacaagacttagtgataagactatatttgattttttgaatagggtttgaataatgaaaaacataaatgagaaaaataaaaacatcacattaatcattggtggcttctcaccctgccctgaacttggctttatttatgtactgtacgccatccctttctgactcagaatctcttatcatatgcatgtgatttcctcttctgttttcattaaattgttttta

SEQ ID NO: 26905 - DNA, 1042 bp, Homo sapiens
ttatacccctctttcttgatttaatgactttaagtaacatttatatactaaccactagaaaaaacggggaatttagtgtatatatgctactttccactcctttctgaattttctttgtagtattctttctagttttgtttccttagaaccacaaattaaatacctaaacttctggattttgaaccattaatcttaagcagggtctagttatataaaattaagaaattagtatacctacacactcccaagtctctttcactccttctgcccagtcattccattgacttttttttcttttgagaaaaaaatatattaaaaaacctataaatatttttatatattatatatatagtgtgtatatatactttatatatataaaaaacatatatatatatataaaacatatatataaaattttttttttttgctctgttgcccaggctggagtgtagtggtgctgtcatggctcactgcagcctcaacctcccaggctcaagtgatcctcccacctcagcctcacaagtagctgggactacacatgtgcaccatcatgactggctaatttttgaattttttgatggagatggggtttcaccatgttgcccagcctggtctcaaactcctggcctcaagcaatctgccagccttggcctcctgaagtgttgggattacaagtgtgagccactgcacccagtttagtacactgattttacagaggtgatttatataaggaaatgtttgtgtgtgtgtcattcacatgtacatagaatataagtgtttatttttctgtatactgatagagaaaatatatgtatttgagagcaaaagagtgtagtgagaaagagactcattccaggcttttaagatttgtccataggttgattataaaacaataaacagtacataatacgctatgattatgtaggttttcttcattacagaactgagattttatgattaagtccaaagagaaggaaacataatgctatgtcattaaacctgtgccatttgaaggagaaattatcggtattacgatcaaatg

SEQ ID NO: 26906 - DNA, 1060 bp, Homo sapiens
agtgaatttttaaaaacttttgttcctttatgttaacaacactagacagtgaaggggatacctgagttattgttccaactttcccgataccctctgctattaaactcctgttctatgggaaagtgtatgaaattctgaagaacgcataggtgaataatatatggttcctaccctcagtgataaaatgaagtattgagcaaaacaacctcaaagacaaataggaaattgtatggagggtttgtttttatgatgaagataattcattgtagtatctagtttttagaatgcttcttgcattttatccacagaagcccggtgaaaaacattgttttcattttttatttccataggcaaggaagcttccagaacaagtaattgggatagccaagtccttcaactgcaaatctcaaatttagtttagttatatgccatcagaacagaagcatgataaatatatatacatgccatcagttccctcgcttggtggtaaacaggcattatccaagatgttgtctctagctgaagctgaccatgtccttcatgattggtcctgggaatcccaagggttcctttcatttctagagcctagcgagacaattggtactggctgccagccagtggccctacttagggattccccacccaggtgccaagcagtggaatgactctaaacagtgccaggctgagctgtctctattgcttttgctttttaacctgaagctgtgaacagacttactcaagccatcaaaagaatgcttttttttttcctgcaaagcccaatcaaatcatctctagactagcaacctcagttgtgtacctgtcacatgccaaacctatcccaagctctgcttgtttattttaggaagcgctgttgaacccctgttgtgtggctagctgagcttggtgctgtagactaaagcacattccttcatgtcaaatcacttacagtttaacagacgattagacatataactgtcaaaatgagcagtatagatggtaagtgctcagtttaggttattgtgtcatggactttttattcaccttaattttgggtaattgc

SEQ ID NO: 26907 - DNA, 1094 bp, Homo sapiens
ttaagtggatattttaagttacttgggaaaagaaaaagacttactggtgactgaatgaagtaaaaccctagagagacccaatttaaaattgaagaaatgagatgccctgggtatagagagctatcacaattgacattttcttgagggaaaaataaagagaaaaaatttatttaaaaggttctgggtgtagattcaatggaaataattgaaaattattagagtaaactaagtaatgaaattcaagcttatatcaagtaacagtctgtttaatgtctttgtctagtcgtctaatgtttttaacactggtatctccttttatattaacagatgaacactgggcagcgtagggatggacctcttgtacttataggcagtgggctgtcttcagaacaacagaaaatgctcagtgagcttgcagtaattcttaaggctaaaaaatatactgagtttgacagtacaggtgaggattttgaattttgggaggtggggtagaaaaaatgttaaatagatgatccttttggagaactacctttgataatttacatatgttttaaccattgggagatggctgtatactttgcatcttgtaatacatctaaattttttttcagtaataaactacttatagacaacaacgtagttaggaaatgtaaagtttaaaggtttgcatatattttaggacaagacagtatttcagaagagcaaatttgtgacttttgctagtgacaaataaattgttgtgcagtgtaatgtcataatcccttagctgtaatttgaaaataaaaatttgtgtttgccaatatggctttaagatatatggtttatgatctgatttttcatattgatggccaggttagagaactagatactaaatagaagtagtcttacacttaagtgtaaaaattgttgcctttgaagattcagatataagcttacaaaatatagatgagttataagaagcaggccaaagaaatactttggcttgtatctttctttctcttactgctttttttgtattttagtaactcatgttgttgttcctggtgatgcagttcaaagtaccttgaagtgtatgcttgggattctcaatggat

SEQ ID NO: 26908 - DNA, 1027 bp, Homo sapiens
cacgatgcagccaagaatgggcatgtggatatagtcaagctgttactttcctatggagcctccagaaatgctgtgtaagtagttcaacgtaaaaattatttttaaaatggacctatattcttgaatcaaggtgtgtgataaagcagactttaaaatagtcaagttgatggctttcttcactttcacaactaaaattagatgtgatcatcacattctgcactcataatcagccttcatgccctttttatgatacagttggtccttcatattcttgggttctacacttgaggattcagccaactgcagatcaaaaataattgggaaatatcaatgacagatcggataaaaaaaatgtgttacatatataccatggaatactatgcaactacaaaaaagaatgagatcatgtttttttgtgggcacatgatggagctggaggccattatccttagtaaactaacgcatgaacagaaaaccaaataccgcatgttctcacttataagtgagagctaaatgatgagaattcatgaacacaaagaagggaacaacagacaccagagtctacttgagtgtggaggatgggaggagggagaggagcagaaaaagtaactattaggtactaggctcaatacctgggtggtgaaataatctgtacaacacacccccgttacacaagtttacctatataacaaaccttcacaacttaaataaaaacctagaataaaagtttaaaaaggggaaaaaaaataacactacgataataagtaatataggtaaaacaatatagtataaatatttatacagcatttcatactattaggtattacaagtaatctggagatgatttaaagtatacgggaggatgtgtgtagtttacaagtaaatactatgccatcttttataagaaacttgagcagcggcacattttgacatcacgggttgaggaaccaattccccatggatagcaatggggataactgtgctgacatatttgggggagatttactttcttaattcagaaacagtt

SEQ ID NO: 26909 - DNA, 1028 bp, Homo sapiens
catttgactatcagaaatggctcctccagttcaccacaaaggagctgctttttaccctacaatcagctgttccttttactgacctgttcattgacgttcattctctttaattattgcctcaacacctgagatgtggcagcgttttatggaacctggcctgttttctgaacacttggcagtggttaatctttgaaactgacacaaacactacatgtgaaatagagcagtaggcaccatagctttataagctttgctctgtgatttcatgcaaatgttaggaaagtatgatatggtagaccttagtactaaattaggatagcttttatgcagtctcagcgactgtacgtagtcaattcacccaggaaatcctttggtcttctggatgggtagagaactttgggacacctgggaggaaccacttggaggtccacaaacatgaggctggtgggcaacataaaacatttgagaagaacatggagtagacattgagtgtggtccaaagattcctgtatttctgtgtggagaaagggaatagcataaactgagcttatcccagctgctgctggtttgttttccttgcttttcttccagattaatgaggaatacagtcagctctgtgtatctgtgcattctatgtttatgggttcaaccaactgcgaatcaaaaatatttgggagaaaagccaataacaatacgcaataaaaaaatgcaaattaaaaaatatcgtataacaactatctacatagcatttatattgtattaggtgttataagtaatttagagatgatttaaagtatactggaggatctctgtaggttatttgcaaatacatcattttatatgaggaatctggattttggtatctgctgggattctggaaccaatcccccacagatactgagggatgactgtactctatttctgataccagtgaggcagggaccttacaacatgaccacatatcctttggacatgttgaatttttgcacttggctctggttgtgttttagtttgatttttgcaaagcc

SEQ ID NO: 26910 - DNA, 1041 bp, Homo sapiens
tcctttaattccttaaacttactacagttgccccttgaataacataggcttgagctgcatgggtccacttatatacagattttttttggtcaaatgcagatggaaaatacagtattcatggaatgcaaaacccaagtatacagagggctgactttttctacactctgcttctccaggagtgagtacaggaattgagtgtgtgggtattttggtatccaagggagttctcgaaccagtcccctgataatatggaggaacaactttgtatgctctctgctattgggcttttgaacattttatcatcttgctcttgcctcttggtctaggtaacttgtgatcttttagaatgctttttaccatttctattactgtaacacttgtcagagccaatatatttcctcttggatgatagccacataattggctattgtttctactcttttctttccaaagttcctcctccacatggcagtcagagtggtaattctacaatataaaacattatatcccttttctgcattggatgtgagatccacaggactgtttcctttacatcatttacatctcagctcaaaaatcaacttctccttgatgccttccttgatgaccttaattaaagtagcaggtgagtgtaaagaagagtatctctcacaaaatctggcactttgtgtacatagagacaattttttttctttttaaaaactctgctgaatctttgtatattctgtctaccctcaatggaatctttgtgttttaattcttgattataaatctatatttttcaaatttttaaaaagtattttatatatatatatgtagaaaaaatatatattttctaaccatatagtttaatgaatttgcacaaactgaactcacccagaacaaaaacaatactctggaagcccctcttgtgctccctttcagtcactacttttccctgtaggggtaaccaactactattctgacttaacacattaaatcagttttgactgttttatatttgatgtaagtgaaaacatataatgtgtatgtagtttattt

SEQ ID NO: 26911 - DNA, 2426 bp, Homo sapiens
agcaaattacatgagcaaccttagatttgatgtatgtattttactctttaaaacagtattcaacaaggatattacaattgaccattgtatgttagaataacctctgctccatttatttctgttcaaactgtttagtttttggaattaaattctgctgaatgggttgcttttttttttttttttaattattttaaagtaattgtgtaagtgactgcattggaactggatgtccagtgtgttacaccccggcctggatacaagacttgaagataaatagacaactggacagcatgattcaactttgtagtaagcttcgaaatttgctacatgacaatgagctgtcaggtaagaactatccctatctctcttagttaaattcatcagttaaaaactgatgaattcatattcataaagtatataaaacatctatctggagttctggaatacgtatttcagattttaaaatctgtaggttttttttttttttttttaaatagccattgagtctctctatgttgtccaagccggacttgaactcctgcactcaagggattccccccacctcagcctccctggtacatgcatgtgacacacccggtggttttttggaagatcattttgagaaatgacgggaaccatagagataattaaagtctaacccccttattttatagttgagaaatcaaggtccagagaggtgaaataaccttgcctacagccgcatgtgtagttagtactagaagctggagaaataaagcccatttctgactgtaaatccaggaacttttttgctgctttacattgcctgctttttacatttatgataacttctgcagaatatatatggaatagtgattttggccttaatagcacttaactcacttaaatacactttcccaagatagaatacgacatttttccatggatcacttttctagactgaattaattagatgagcacattttgaaagagcagaaatctaatattcattttcttttctatttaagtgggggttaacgttttttaaattgtccttagactctgtgtattaactgtgtatctttccattgtgctttctgctgagaactaattaactgtggaaagaaagtaaaatgttttgtatcttcataattggatattagagttgtctttttattgaccagatcatgctattttagtgtgtgtttgtagaagaacgtgttcttgactggcaggatgccatggatgattgataatgctcatataaaattgttagatttctatttttaaatcttttgttcttagaatcctgccatgatgtcttattgtcagctaaagatgaagttgattatacaaaataaataaatgtggcaaaaactttgagtcttaccacaggtccatatttttaagaattagaacttaaatcactttatacctattaaaattttccttcagctagttatctgcgtcattgtattcaactccattcttttatgataaaatgtgctgtagtgcagaagtttttcttactttcagatgtaactatacacacacatttttaaaagttgccgttttttaaaaatgatattgtagttgtaaacctttttaagaacacactgaagaaaaattctgtcattagttcatctgaactcttcttatttaaagacagtactgacaatgtttattttctagttaaaagagattggtgtgtgatctacctttctctccccacatagataccgagggtcagtgcaggggttcttaatcaagggcccatgcacctttggcagtgttcagagttgaagtgggtaagggatcagtgagcttcttgagttaattgtgcagtatgaaaactgttcatgtttgtgtgaaagtgacttttgttagattcttaggagtgtgtggtctgttaggattattggctttgcactgaaatttggagtgctactttgggatttgtggctatgatgatattttgatttggttcttcaccagttgctgtatagtaatgtattcatttgctagaactgctgtaacaaagtatcacaaactgagtggcttaaacaacagatatttattgtctcacaattccagacactggaagtctgagatgaaagtgtatgcaaggttggttctttgttgaggtctgtgagacagaacctgttttaggccagtctccttgtcttgtagatggccatcattatgttaacatggttttctccttgtttgtgtcaaatctccccctttttaaaggacaggagtcatattgcgttgggagtccaccctactccagtatcgcttcattttagctagttacatctgcaatgaccttatttccaagtaaagtcacattctaagttactggggggttaggacctcaacatgtgaattttggtgggggaggaacacaatttataacaatataacatttttaatgatgataaatg

SEQ ID NO: 26912 - DNA, 1036 bp, Homo sapiens
ctatagctaaagagttcagtcatcttaggaaggaaatttaaagttgagaaacagaatcaaggcgttgagtcaagtattgccagagaaagccggaaggctacggactgcatcctgggggtatgcctacatggagaggtaggaaaagcagctaaggaaatgctgaaataggcagatcaatgtgtataaaaatattaaaatgcggtggaaggaaaggtttcaggaaagaagatgaggtcagtgctgtttcccagagtggtcagagagaaggggaccaaaaatgctttggagaacagtttcagcagagtggagggagttaaagctaggaaggtgaggagatgggagtagctggtatggagcactcatttaagaacttttatctgttcaagaaagggaagagatggagcagaaggtagaatgggaggtatgatcaaaactgtgttttttctgtgtcaaaggagagattacctgttcatgtgtagatgcaaatgagagaagaaaggcaagtattatgaatatctagtgctttgggaggcagaaaagatatgggaactataggtagagtagcacattttaggaagagtgactaaaggagatcgaattttcctcttagactctaggaagggtaagatgactggtgaagagataaaaatgtatttaggtgttaaaaaacttacaccattaagttccagtaaagttaatgagatgaggaagcatagagattgttttgaatagccatctattcatttgtttgtttatttatagaatattgaatacattactttggtagagatacaaacatgaagaggctaccaaataaattttatgtctttattttattttattttaatatttttgagacagagtctggctctgtcactcaggctggagtgcaggggtgtaatctcggctcacctcaacctgtgcctcctgggttcaagtgattcttgtgcctcagcctccccagttcctgggattacaggcgtgcactaccatgcctggctaatttttatatttttaaaattttatttatttattt

SEQ ID NO: 26913 - DNA, 1004 bp, Homo sapiens
ggcatcagcgtttgtaagagtaaaccccaacacttgagtcagggaggcagaatctgtaggctcagttaaagattatgggggtgtaaaaatggacagtgaatgggatactagaattgtaatggaaaatgtttgccaggtgcagtggctcatgcctgtaatcccagcattttgggaggccaaggtggtaggatcacgaggtcaggagttcgagaccagcctgaccaacatggcgaaacctcgtctctactaaaaatacaaaaattagccaggcgtggtggcacacgcctataatcccagctacttgggaggctgaggcaggagaattgcttgaacctgggaggcagaggttgcagtgagccgagatcgtgccactgcactccagccaggatgacagagtgagactccatctcaaaaaaaaaaaaaaaaaagggaaaatgttttacaaggcttgaacttaagtaataattctcagctgttaaaggaaccctattgccattgacaagcacaacatactgccccttttattaaagtgtcagtgtgaccaggtttgtttgtggggacacagtgtgctctagatgtgcttggggtgattagggaagtggtttagtttgtggctgtaagtcttaaaaaaagaatataggtaatttgagaagaactggggtaggtcatgaaaaatatggaaaaattagaaagtagaaatcaagctatggaagtggggcgggatgagcaaaacccattgtcaaatcagatccacgcggatcatgaattttacccatcattaagctttactaataattccgaagaggcaggctattgagaggctcagataaagcagagagaggtctggggcattgaggatgtctccctgggaccccctctccctccctagacctgtccctctgattcacaatactaaatgggtctaagtaaggtgtacagtgcaaagcttttaagttttaaaagaactccatttgatacccctcattattttgttggctacatga

SEQ ID NO: 26914 - DNA, 1062 bp, Homo sapiens
taaaaaaaaaaaaagttgcttatgttttcttctaaaatgttgaaattcattttccctacagattggatcgcatattatgtactgttctgtactttgcttttttcccacttaatatattttggacatatttccattttaatatgcttagatttacttttttgcttcagggaactctctagtattctcttgcacggattcaccatcacttattcaaccagttcctattgatatttacgttgatttattttttttcctgttggaagcaatattgtagtggacatccatatatatttgtatgacctttcgtagttttttcagtagaattgttggatcaaagtatgtgcatttgaaatgttggaattgtgacagtgcttcatgtattagtctgttctcatgctgctaataaagacatacccaagactgggtaatttataaagcaaagaggtttaattgattcacagttcctcatggctggggaggcctcacaatcatggcagaaggcaaaggaggagcaaagtcatgtcttacatggtggcaggcaagagaacttgtgcaggggaactcgtatgtatgaaaccatcagatcttgtgagacttcgagaacagaatgggggaaactgctcccatgattcagttatctccacctgaccctgcccttaacatgtagggataattaaaattcaaagtgagatttgtggggacacagccaaactatatcacttcattcttgggaaactaggaaaaacacttcaaggtggagaacagaggttgcaatctcagatctctccaggaactaggcaataacatcagtgagggaagtgggtaccccctgcccttcaccccacatattgaatggcattggaaactcatactgcttttaatgggagcagctgttaagctctagatagctgcttgccatgttgagaatgtgaacccactcgccatgttgagaatgtggacccacaaatactggaatttttaatttttcaaaagaagctgaaaatccagattttcatataaaatgtccagattttcaaataactcaattaaaaaatatgccag

SEQ ID NO: 26915 - DNA, 1050 bp, Homo sapiens
atgttcagtataaagaataactataggctgggcatggttggctcacacctgtaatcccaacactttgggaggccgaggcaggtgcatcacttgaggtcaggggtttgagaccagcctggccaacatggtgaaaccctgtgtctactcaaactacaaaaaaattagcttggtgtggtggcggcacttataatcccagctactctggaggctgaggaagaagaatcacttgaagctgggaagcagaggctgcagtgagccaagactgtgccactgcactccagcctgggtgacagagctagaacctgtctcaaaaaaaaaaaaaaaaaaaaaaaaagaataactagaaagtgaatactcgtgtaaccacctccatggcaagagatagctattgccagccccttatctcctccttgatcatgtctagacttctagctttcccacctatgtgtgcaccttaaagatgtacttttgttttgcctgcctttaaactttgcataaatgggatcaaactgtgtgttctcatagaactcactttgttggtggagctttgtgagattcctccgtgttgttgtatgtagccttgttcatggtccttattgctttagactgtattccattttgttcccctattctactcttggtggacttttgggtggtttccagttttgggctattaagtatggtttaaagtcagcatataaggtgaaattaattattcatctctcagtcatactggcttcccctggttcctcaaatataccacccacacccctgcctcagcgcctctgcactttctgcctgccctgccttgaagactctttctctagttttctgtgtggataactccttcactttatttagatctcttctcaaagtcattttatcagaacattctaccctgaccactctcttaaaacagtgccccacccttcactgtgtcccttactcactatgtatttctttacagttctgaatgtcacatggcgtaaacatatgtgcttatcatctgcttcctcccacaagactgtaaggccaattttcataaattta

SEQ ID NO: 26916 - DNA, 1013 bp, Homo sapiens
ttctgcatgcaggagtttctcctgggcagctggtcactccccagagaagctgggccttcatggacacatggaactaagcctcccaaatgggagttctggctgagcccagggtggggagatcctgggaagggaggcactggaggaagacggcacctcttcccccatggcagggtgtgagggaggcaggtttggaatggtgcgagtatggcaatctaagcaggggtctggtctctttgactccaggctggcctttggccgactgtctgctcacccagagaccttggactccggactatccatggctccgaatctaagtgctgcccactcccatgctcacacccacagaaggtcttcccatcccctttagattcgtgcctcactccaccagtgaggaagatgcctctgtctttcccacgactgccaggagatagggaagcccagccaggactgaccctccttcctccagcctgccctgacccacctggcaaagcagggcacatggggaggaagagactggaacctttctttgacagccaggcctagacagacaggcctggggacactggccccatgaggggaggaaggcaggcgcacgaggtccagggaggcccttttctgatcatgccccttctctcccaccccatctccccaccaccacctctgtggcctccatggtacccccacagggctggcctcccctagagggtgggcctcaaccacctgctcccgccacgcaccggttagtgagacagggctgccacggcaaccgccaagcccccctcaaggtgggacagtaccccggacccatccactcactcctgagagggctccggcccagaatgggaacctcagagaagagctctaaggagaagaaaccccatagcgtcagagaggatatgtctggcttccaagagaaaggaggctccgttttgcaaagtggaggagggacgagggacaggggtttcaccagccagcaacctgggccttgtactgtctgtgtttttaaaaccact

SEQ ID NO: 26917 - DNA, 1032 bp, Homo sapiens
atgtctgaaaaaaaaaaaaggaaagaaagggattgaaggagcttgccaagggtaggctgcctaaattcacattttccctgggtctttccgtgaaatggggacaccagaaacccaagggtcgggtctagtgccctcaactctctggggatgagagtcttgccttggggtagacaagaggcagggcagggaggagcagagccctggggtgcggccgtcctcaccgcctgttgctctactcaccccagtgcaaaccttcccgtggccgcaaacgtggcatctgctggtgcgtggacaagtacgggatgaagctgccaggcatggagtacgttgacggggactttcagtgccacaccttcgacagcagcaacgttgagtgatgcgtccccccccaacctttccctcaccccctcccacccccagccccgactccagccagcgcctccctccaccccaggacgccactcatttcatctcatttaagggaaaaatatatatctatctatttgaggaaactgaggacctcggaatctctagcaagggctcaacttcgaaaatggcaacaacagagatgcaaaaagctaaaaagacaccccccccctttaaatggttttctttttgaggcaagttggatgaacagagaagggaagagaggaagaacgagaggaagagaagggaaggaagtgtttgtgtagaagagagagaaagacgaatagagttaggaaaaggaagacaagcaggtgggcaggaaggacatgcaccgagaccaggcaggggcccaactttcacgtccagccctggcctggggtcgggagaggtgggcgctagaagatgcagcccaggatgtggcaatcaatgacactattggggtttcccaggatggattggtcagggggagaaaggaaaaggcaaaacactccaggacctctcccggatctgtctcctcctctagccagcagtatggacagctggacccctgaacttcctctcctcttacctgggcagagtgttgtctctccccaaatttataaaaac

SEQ ID NO: 26918 - DNA, 1026 bp, Homo sapiens
taaaatatatatgggaaacaataaacctttacccctacttcacaacatatataaaattatttgagctagatcatagacctaaatgtaaaaccataaactataaagcttctagcaggaaagatagtagactatctttggtattttaaggtaggaaattattttttagatggaatacaaaaatatctaaatataaaacaaattaatcaattggaattcataaaaaaccaccaaaaaatgataaaaaacaaaaaaccttcacacaaatatctaacagaccaaaataaaactgattaacaacaccgaatattggtggagcaattgcaacattcatgcattgcttgtgagagcgtaaaatagtacaatcacttgaaaaaatagttgcacattcctttttaaataaactatacagagagtgatgccagtgacatggcaatgtaaggacctctgaaaattttccctttcataaaacaatttttaaaacctacaaaaaaaagtcagaatcaactttttttgaactctggaaattaactaaaagtttgcatcaatcagggaagatttagtcaagaaaaacagctaaatcttggtaagaacagtgaatttctggtgttttaaatttaccctattttaattcttatctctcccactccatgaaagccttgaaaatcaataccttgctttctgagtaaaaatcagcaggctggaggccaccagagggcgcagaagagggttggcattctttcaaaacctaattcccagagattatcataatttgacctgtctggtgattctctggaagattccacttgcaaagctgagagtatttgaactgacttggcactggcccagtataaaaagctttttcttttaggggtgtttgttgaaaacaattatggacaattatttatttctgaggctgcctaagacagtagataacagttggggcaaacaatggctaagaacaacaacaacaataaaactttaaaattaaaaggaaaaggtgggaataagtttacatgggggctttga

SEQ ID NO: 26919 - DNA, 1047 bp, Homo sapiens
atccagtaattttttcatctcagatatgctttttatattcacaagttttatttgagtgtatttatcatccatgtccctacttaaattttgaaatatgaaataaaattataactatttcaataaccttgtttgctacttctaatatatgtgtcaattcggggttggtgtcaatttattgaccttttccttgcattatgagtcataattttttgtttcttggcatatatgtaatctttggctgccagagattttgaatttcatcttattaggtgctgaatattttggtaatcttataaatattcttgaatattgttctggcataccattaaattatttgtcaacagtttgttatgtttgaattcttctgttaagatttgttagaatcagatttgcatttattctaggtctgattatgcctcactcctggggcaagatcctcctaatactctactcaatgtgaattatgaggtttccagtctggctaataagaataggcactattcccagcactgtgcaaacctcagacactgttctttctaatcctttcaggtgattctttaactggctttgattagttccctcacataacaggcactgatcctgactctgcagtatattagaagggactctctgttgatctcctggattgtctctgtttgccagcctctcttcccttgtactctcccatatgaactctcacgaccttggtctacctggactctcagatgcatctcctcaagtcaggaagtcttatgggcactacctgtgcttttctgccctgtgccaagacctacagaccctaagtcagtaagctggggcaatcagagttcacttcatttgttcccatctctcagaggtcactaacatttttgcccagtgtccagtgtcttgacaactgttgtttcacatgttttgtcactattttttggttatttcagataagacactaaatccatgaattgttacttccccttagtcagaagcagacatctgactattctgtatcttgactgtcatggttttcatgactgcacacatttgtcaata

SEQ ID NO: 26920 - DNA, 1064 bp, Homo sapiens
aggacagttgatggactcttaaaaggtctgggcagagcagtgagggatggtaaagcaccccgagtgctccctatcaggagcagggagccatcctcccaggccttaaggaaccaggagggagctggagggcagggctgctgactggagtgtggctagagggaggtgggtaggggatgtagccactggcaccttgcccttctctctccctccctctcataccctgccagtccctccttactagccaaaggccaaagctatcctgagccagagactaagggggtctggatgacatagtaaataaaagtctgccttcagggatgcagatcagggtagagagtagatcaggagcgacgtcagtgaattggggaagagcacacaccttcacagtgtcattcacataggtttcaacttgaacttcagggaatgagaaaaatggatgtgtgcctctgaggtcttactatgtgtctctggatggggctggagggtaaggatcatgcttctgtgactttgtggagcacatgcagattgagggcctgctgtgtgccaggtgctgtgtgagggctcggcacacagatcagctaggcaggctctgggagcccacgggcagccaaagagtggctttctctccctggctgggagagaggtggtgccgagagccgtggggacctgggtgtagccatgatgagtgcctggaagggtctgggaagagttttcagagagtgacctagggtggcaagagacgggaggggagagtggactctgatcttgggtgtcatttgcatggctgtgggtgagactccctctgatgttctcttctcccaagttgggttaccagttgcccaagactaaagacactcactgaaactattggcttcccgacttgcagagggttgtatgtgcagtgggtaagggcaggttggggccagactgcctgggttccttggctgactgtgccccttgccagctgtgacctgggcaaggtacttacatcccccgaatcctacttttcctgtataattgtttgctctttttatcactaggaatagccctatggagttggcttt

SEQ ID NO: 26921 - DNA, 1063 bp, Homo sapiens
attcatacactaaggaccagacagggaggtgattggagttcagaggtgggaaagagatcctacttgctggggtggccagggagggctaactggaggaagagagccctccttgtaggaaaagaagggaaagcattccataagtaaagacctggatgtgggaacaggcaagaagagtttaggggctggggctgatggagcagagcctttgtgcttggaaatggaggtgtgtgaggcccagtggtgggtggcctgaaagcccactgaagtaatgagactggctggctgcactatttcaggctgctgggatttcacttagagccccaagatggggttcaaatcctgccgtctctattagagttgatgatgttggctcagtcatttaactttcttatctgtagagtggggataaaaggtattaatggtactcacctccctggattcttgggaataaatgagatgctgtaagtcattgacctctccaatttgtggggtcagcaactgtatgaaccagaggcctggcgccgggcactgagcgtgggtctttggtgaaggtttgtggaaccagatggttctagcactattaggatggttttccacatgtcaaactctccctcctgtgcttggggccagccagattatgcctgagtcttgggttggcctcatcatccctgtctcagggggcattctgcccatcagggccactagccatggggagagagcccatccctgggatgtctgccctaagggctcatgctgtttctccttctgtccacagcccatcaccactgagaatgcaccaaagaatgtagtggacaaggtgagtgatggcaggtggtggtgggggagctggaacagcctgggcaggtgtgagaaggctggaagtggagagtggatttgggggagagtggacagatgtggttggggaaatgcttccggagtagatttggggaacttgcagggaagtagtggggcggctgctgactctgggagaagggcatctgaccatccctgtgtgtttggaaatgggctgctaggcaactgggcaggcagagagggaggggca

SEQ ID NO: 26922 - DNA, 1054 bp, Homo sapiens
agtgaaatgaagtgcacagaagtgcttgggactctaagtgtcactgctctgcacgctcgggctcaggcctgctggggttgtttaccttctttgcagtggtccctccttccctggtctcactagggccaggctctcccgggcctcagtgctgcccagccctgctgctgcagatgtggagtgttattcatacggagcccagtggagggtcatctggcaacagcgggggctggggggtggagtgcagtcgggcttggaactgccagcaagaaatcgcgcttggattgcagagggacaccatgggagtccgaggagggcgggcggggaggggtgagtgtccatttctccttattccagctgaactcccaccttgtggctaagaacagaatgtccttggctgctttatgaggctgggggttcagggtttagggaccaccaggcagaagctagatgtctggctgctgggagtctcatgagctttgtttacatgaagagcggtcagaggttaggacaaaagggaataggttggcattccagctggggggactgcagttagaatccagaagagactcgtgcctgagcaaggctgcgtgtctctgtgaggtgccccgcctgtgcagggggctctgcccttcgaggaggctggatcagccacctggtggtgaaatggctgtgtcaccagacggtgctcccagaggctcccctgcctgagtcacaacccgcctccccagcggtaaagagcgagggagttagaccacctccttctgcatcccagctcccccgctccctggtgtacgaccctgacattgctaacctccctggacctccgtttctcttcttcataatggacgttagtgacggtacctatgctgtaagcctgccaaaagaccaaagtgagcacattaatccatttaattcatgttttccaagtccttcaatgctggcccacctcactggagcaaaagctcaggttcttccgttggcccaagcagccctacgtgacaggtttccttttgcctcagctccttctcgttcacccgtgtcttgtcattttcct

SEQ ID NO: 26923 - DNA, 1067 bp, Homo sapiens
tttaagttatagatatgctgaggtaatgatccccatatcccttagggcaggcagcaggtggcaggatctctgagaggctagaccatttacccaaatgtgccatacaaatacaatcatgttctgtgtgccatacgataaacaaggtcaagaatcacagtgaaggatgcctgcacggtgcttacttaatatgtagtagttacttattcaatatctacccccacccccaatcctcaagagccctggttttctcagttgtaaatgagatccactatctgtcacagaaatgaaatgaaaccatgttaaggcatatagcacagtgcctagctcatagaaggtaatcaataaattagttcttctcctaggtggagtcagagatcggactctgaagctgtggttgggagaggttttaggattgcggtaattccctgaatcaggaattggttagcagtacaaggaaaaacagaactcctataagtgtcagactgctgtaatgtctggaatcctagaacaagccggctgggtaagtcctcagagttactgcctggacaacccaagacactaaaacataatcaattcattcagacaggttttaagagctattcttaaaaccctttagaaaaaattttcttctatcttttctctaaggaagcttctagaatgtcaataatcaatccagaaagggcttctggcaactgtattatctcatcttcttttctcattaacaactttggggtttttactcctgaatgcaccctaggatccaattccccatttttttcttttttcttgagatggggtctcgctctgtcacccaggctggagtgcagtggtgccacctctgctcactgcaacctccgcctcctgggttcaagtgattctccagcctcagcttcctgagtagctgggattacaggtgtgcgccaccacacctggctaatttttgtatttttagtagacatatgttttgtcatgttggccaggctggtctcaaactcctgacctcaagtgatccgccctccttggcctcccaaagtgctgggattacaggcgtgagccagggtgcctgg

SEQ ID NO: 26924 - DNA, 1084 bp, Homo sapiens
ggcccttcagcgccgtagcagctaccaccgccgccatgttcagatcccacccccgcttcaccgcgctccccgccgggaattgtagtttgcgtaaggggcctcccccgctccttccgtcctgcctacagaccagaaactacatctcccagaagcccgcagagcggacccaggagaactactcttcccaggagaccccggaggcgcgcgcgctcgcttgtttccctccagttgggggcggagtcaggtggggcggagtttgggttctctccgccacgccccggccccatcttccaatgccgctctgtgattggtgaggcggccagccaaccttcgtagctattggccgaacggccgtcgctcttcctgctggggagtcgcctacgcctacttcctgccgggaggaggggctcgagttccgcgtcgtcgcgcagagctgactctgggaggcgtttgggcccagagaagtggatccgccgcttgcgccgcatggagtccgaatcggaaagcggggctgctgctgacacccccccactggagaccctaagcttccatggtgatgaagagattatcgaggtggtagaacttgatcccggtccgccggacccaggtgagaactgccgctcctcaggccatgggacaggagacgctcacccctggcctctgactcctgcttttccccgctcccctccacacccgactggtcattcctaccgatatccctcttcccctcctcccccactcccaccctcacacttagttctcaggcctggctggggtgggggttccctgacgcctcctctggcccttcccctcacacacccccttcccatcatccccttggccctcccttaccgcacggtctctggccagccgtggcctcccgtcctgtgtcccgcgcgcccccgcggaccccggtgtgtctgactccaccttcccttctcgccacatgacccgccccagcctcaggcctcctcatgcttctctccgtacctcttaccgcctcccgagccccatcttctaaccctctccccaaagcagatgacctggcccaggagatggaagatgtggactttgaggaagaaga

SEQ ID NO: 26925 - DNA, 1078 bp, Homo sapiens
cagggtcctcctgctctgtcacccaggctggagtgtggtgacacaatcacagatcacctgcagccccaatctcctgggctcaagcagtcctcccacctcaccctcccaggtagctgggactacaggtgcacgccaccacaccgggctaatttttgtattttttgtagagacagggtctcactttgttgcccaggctggtctcaaactcctgggctcaagcaatctgcccgccttggcctcccaaagtgcctgggattacaggcatgagccaccgcactcggctgagtacttggttttggaagaagagagtaaatataaatgatttggggatcagtggatggggagaagctgccataccccaaatctgtttgtagcaccctccccccaggttcctcacagctgtggctgctatgtcctaggtctttgctctctctggtccagccaggctggctcttccgctttgtcaagactgctggactctgacccctcaggctagatagcagggactacccatcctagtggacttgtatctttccattggtcctgttcttgaactctgcagtcctgccagctgattaccagcctcacccatgcctacatccgcctccctgttgtttactcatcagtgcacaaatacttagattactatcttgctctgcctgcagccagacccaccaccccactgttgtcactggctcaccttgcaagattggagcagacagagagatctgaaaacctctcctacactcccacatgacactgaactcagctctcccacaagaatgtatactacttccatgattaaaaaatcagctacaggccggccgggcacggtggctcacgcctgtaatcccagcactttgggaggccaaggcgggcagatcacaaggtcgggagatcgagaccatcctggctaacacagtgaaaccccgtctctactaaaaatactaaaattagccgggcgtgatggcgggcgcctgtagtcccagctactcgggaggctgaggaaggagaatggcgtgaacccaggaggcagagcttgcagtgaaccgagatcgtgccactgcactccagcttg

SEQ ID NO: 26926 - DNA, 1064 bp, Homo sapiens
ctattttgaatgaatttattttattatttttatgtattctccaaatttgtacaaaatatatacttatttcaatcaagaaaaaataatgtattcttatgtatttattatttttaaagttagactcaccatttagtttatatattggttattgattgttaaataacccaaagcatcaaagaaaggaaactttttagaaataaagttgctactttaaatactaattaagattgctatatttgtaggtattctggtttcttctaaaagtaactctcttcttcaggattcaaaattatgcccaatagagcctgacaagtctgaattggaaaactcaggatttgacagaatgagcgaagaagagcttctagcagctgtcttggagataagtaagagagatgcttcaccatctctgagtcatgaagatgatgataagccaactagcagcccagataccggatttgcagaagatgatattcaagaaatgccagaaaatccagacactatggaaactgagaagcccaaaacaatcacagagctgggtaggtttaatgaagattaaacctctgtgaaacaaaacataactctttcaaagttttgtagtgacaaataacctccaaataacgggagataaatagaaaaattagctgagcatggtggtgtgtgaccctaatcccagctactcgggaggctgaggcaggagaattcgcttgaaccgggaggcggaggttgcagtgagccaagattgcaccactgcactccagcctgggcgacagagtgagactccttctcagataaaaacaaataaagggaggtgaagtggatctgtatataacagggttgatggcattttcattctgtattataaaaagctttgaaaaatgagaagcaaatattgtgactagtacacagatactagtggtaaagtatgccatatccctttaggtatacatcactagtaaaactagccttcttatgtgcatttaatatatgtttgtgtcagttctgaggtgcttttctcaccactgctatttcagaaattcatataattctttcattttcctatatct

SEQ ID NO: 26927 - DNA, 1049 bp, Homo sapiens
ttccaagaaaatggcaacagaggatacagctgctgagactttggaataattataagaactagctagtcaatttttaattcagtaatgtgtaatattcagttatattttgttgccctgtgttgtgctgtagtctttttctgttatcccatactttcagtaaaaacctgctatagacacatacacacatgtatataagaataaaacagggagtaattttttgcagtttgtgcgttccttcattctaaggatcttataaattagtaaatttcctgtaatcataagataaattttctgatataggaatgaaattaacttatattgtatctgctctgtataaacataaaactgaagtagttacaaaaaattattatgtggttacaggacagcttttagttctttccaagaatagatcgcaaacaccaaggttgttattaacattaagtatttatgtagcactttgcctacagagtgctttactttcttttattagcttcaatattctgtcagtaagtgtggaatttctggaacctagcccctagagactagttcttttacatttcataatctactcctttctagaaaatgggagttggtttttttttttggttgtttgttgttgttgttgttgttgttgttttgatacagagtcttgctctgtcccccaggctagagtgcagtggcacgatctcagctcaccgcaacctctgcctcacgggttcaagcgattctcctgcctcagcctcccgagtagctgggattacagctgtatgccaccacacctggctaatttttgtatttttagtagagacggggttttgccatgttgaccaggttggtcttgaactcctgacctcaggtgatccacctgccttggcctcccaaagtgctgggattataggcataagccaccgcgccgggccaaggaagttggttttaaagaaatgactttataaaggctgggtgtggtggttcacgcctgtaatctcaacattttgagaagccaaggtggaaggtttgcttgagaccaagagttcaagaccagcctgggc

SEQ ID NO: 26928 - DNA, 1026 bp, Homo sapiens
gcctattgtctagtatctgaaaatagctgttttctctattttgtccagttttctcattgtttatagtaggaaggtaattccagactctcaaacttcctcataggcagaagcagaagcagtagttctctcaggtactcaaaattgacatcacccatgggcaacacaggaatatcatgtattcctggatgtgatgcccttagaaggatacagtgtccaccagacatgtggctcacacctataatctcaacactttgggaggtcaaggcaggcagattgcttgagcccaggagttcaaaaccagccttggtaacatgacaaaattctgtctctacaaaaaaatacaaaattagcctggcatggtggtgcgcatttgtaaccccagctactcaggaagctgaggtgggaggatcatctgagtccgggggggtcgaggttgcagggagccaagattgtgccactgtgctccagcctgggcaacagaatgagaccctctcaaaaaaaaaaaaaaaaagattggatgtgagggcgatctgactgtgacatctgtcaccccgttgttcaccagggttgatttggctgatctgactggctaggcgggtatccccttcctccctcaccactccatgtgtgtctgtcgcaaacctgcgtgctcagtcaaagaggatgaccatccccaatagaggaggactggtcttcagccaagagtatacgagtagctgcactcccctgctagaaactccaaacaagctctcaaaaaaaaaaaaaaggcatgacatggtatcactgtttgttcatgtgctcttccagtttaggctgaatctcatcatgaggaaatagcaaacccagtatgagggatgttctattaaaaataaggctaggtcaggtgaagtgcctcacacctgtaatcccagcactctgggaggctgaggcaggtgaatcacttgaggtcaggagttcgagagcagcctggccaacatggggaaacgccgtctctattaaaaatacaggctgggcacggtggctcat

SEQ ID NO: 26929 - DNA, 1034 bp, Homo sapiens
gattacactggctggaataaaccaagagtgcccctttcctctcaccaacagcagcaactgcaggggtaggtcaattctttcattttactttcttttttataaagtgattcaatagaagtgtgctttggtgtaaaatgtaattaaaggagtcacattaaagttctaaaatatttagaaattagatcacttattaaagatttattacatccataagtaatgttaacttcattttctgttcaccaaacaattttagaactttggaatatatataatattcattttaaagcagaaaatgtgtattttccaacccagtacacttcattctgctgctgagatactttcaacattttttatatattttccctaggttcttcatggttatatatatattaaacacaaaaatgagatcatagtataataactgtagtaattatagtagctatcttttaaattttttttttaatagaaatgggatctcactatgttgcaggttggtagaactcctggcctcaagcagtcctccctcctcagcctcccaaagtgctgggattataagcatgagccactgttcctggccagtagctctattacctaaagtgtttattacatgccagatactgtctgctaagtgcttaaattgattttttttaaattttaaatcttcgcaacaagtctttgagatagatatattaaaaatctggttttatgaataaaataaggcttagcaaagttaattaacttgctcaaagtgatatagtcagtagtacagcagtagtaaatccaggcagtagtgctgcagttgcattcttaatcactatgctatattgcttctctgttatctttttcactgcacattaatcttggcacctatgtatattaatacagaactttcaaccatgtaagtgtgcataaggtttctcttttttccaaatgtaattcaggctagagtgaagatcgttatacacatatgtatgtttttaatgcttgttggaaattttctgtaggataaattgtcggaagtaaaattgttaagg

SEQ ID NO: 26930 - DNA, 1045 bp, Homo sapiens
cctccacctcccaggttcaagtgattctcctgcctcacagcctcccgagtagctgggactacaggaacgcgccaccatgcttggctaatttttgtatttttagttgagacggggtttcactatgttggccaggctggtctcgaactcctgacctcgcgatctgcccgcctcagcctcccaaagtgctgggattacaggagtgagccaccgcgcctggccacagtttactttttaattgattcttttggtcttagtagctgaatcattttatctggtcttgcttttggccaagaaaatctaataatcttgctgtctctgatttgacttttatataaagaaaaatgctcctttacttttgctaagttatcagagtcatggattggattggctcttgagatagtaattaaagattatttttgtaattttcatttgtttaagtcattgaccttttgagactaacaatcttgtagcttaattttcaagcatatcaatgaatttggcactttaaatgtaaatgttttaatgacaactatttaaaattaagaacaatatttttatacacctgtactatattgatgtaaaattattaactataggaacaacaaggccatgacagatccctccagaaagtatttaaccagcagtagagaaaagcagctgagtttgaaacagtcagaagagaataggacatcaggtaagtgtttgatcttacaataaataaggtgctcatttattatatatttattagattagaaataaaaacctaacccatctgtacattctttttatttttatttatttatatatattttttgagacggagtcttgctctgtcgcccaggttggagtgcagtggcacaatatcggctcactgcaacctctgcctcccgggttcaagtgattctcctgcctcagcctctcaagtagctgggactgcaggtgtgttctatcatgcctggctaatttttgaatttttagtggagacgagatttcaccatattggccaggctagtttcaaaatcctgaacacaagttatccacctgc

SEQ ID NO: 26931 - DNA, 1062 bp, Homo sapiens
aatgtagggttactttattagcattcttgtttctgcacatcagggaggtacaccagaatgtggttgtgcatgccagtctagcatgttcactacacttttgggaagtcccagttgttccaattagaagtctgtctgttaaacactaggttaccgatccttgttctgggttactaatacttttacaccatcacatctagattttttttaagtttgcactccttagaagctgacctagatgaatatacttgtgcaaatgacatttaaagcagtgcttatagaggagacaaataacagagtgggagaagcaggccagagaagaagaggaagccaagcaagagtgtgatctcaggtaaaagtaccacagagaataggcttcgtcttgatctagcagggaaactcttgggttgttctagcttgaggcagggaggctgggatttcctatttccatactggaccatctttggttaccagttgctctggctctgtccaggtgggcaaaatgttttaagtagttaaatgcagtcctctgaagaactgcagatgctgactggtgaaccacattgaaaatacacagtctaggggtgtgtaaaggataaaaaggatcttagagactctgatggagcgtcaccattgtccactaaaagagttggtactatagttcccccttcccctagcttgtaccgtttatattgactcctgtcttgtattaagtttattccattttgtcatggattcttcatattgttgcttcccacttctggggaagaatcttacaaaaggaggcttagtgggattaaccacagtgtgttgctgcaggtggtcttagggctgtaacccatattgacatctcttcctaccatcaattccatgcatcctctattaacacttctgctcatcttgatagtttgactgaatggcattaccgagatcttcatctgagggatttgagcctttggtcaccatgtgcttgtcagactgtggttgttgtgattgcccattataattacatgagagctatgcttatcactgagcatgagagcattaagaggcaccctagtgaat

SEQ ID NO: 26932 - DNA, 1033 bp, Homo sapiens
aacttaatcacatggttatatcaggttatgagaaggtctgggaaatatgcctgtatttcaactattgtggcaaaagcgtacagtggttatttagggacaactaatacaactaatagtctgccttagtttgcccctacagccactgaaataacccagttcactattcttccatacatagaacacccttatctctatccaaatggagaagaactccaaatctcatgagaacattgtatccagctcagagtctaggatctttgagtgatctttctctctgggtgcggtcttctctagaaggtctaaatgtaccttggaccatgcccctcatggtctggtacctaaaaactaaaaggcatgttaatttgcattccccactccagacctcatgcacacatcattatacattgctggagtaggaacagaataatcacagtaaaaatttctgtttaaaatagacaagaataggaaactggaggggtcttgggtctatagcagtgataaaatcttgctaggtggaaattctgaggacagtgaaggcgttggaataagttcctggttagcccatctagcagtctgattctgttgtctgggagaaacccccttgcccattgtactccatgtgacccctggctttgccctctggcagattttccttgtttgttttctttaaaggctaccaccaaaatagattttgaagactatatttttcatcaaggccatatagcttttatagcctgcttcatccaagtttaaagattctttaaaggtaaaacaagcaggcttgagaaagaattggggtctctctctctctctctctctctctctctctatatatatatatatatatatatatttttttttttttttttttttgtgaaacggagtcttgttctgtcacccaggctggagtgcagtggcacgatgtcagctcactgcaacctccacctcccaggttcaagcaaggttgaagcactgcctcagcctcccatgtagcttggactacaagcgtgtgccaccacgcccagctaatttt

SEQ ID NO: 26933 - DNA, 1034 bp, Homo sapiens
ttttcggtaaaagtcactgaaaagtaagtaatgtttttgttttggatatatgtttcaaagagcatgcaatctggcgggaactgacagttttgtgtttgttttgtagtaatagtttttgtgttttggccatactttatttaccactgaatgctctctgattaaggatgttttcaaagcagtacctaaaatgtgagcacttaaataaatgtacagggcatagaaacatttttgctaatattgttgctttgagcattcatggtgatgctcaaagttgaacagtaattttaataattgtgaagaaatttagagaaagaatctctggacatatttaaagaataattcattttaattatcttttgtcttcttatttttttgctttaataagacaattaccattaccgagtttaaggaaaccctgtctttgtcttaggttcataggaagtttaactgttactggatcatgcttcatgctgaaaaagaaacttagttttttactcttaaccaagtagagcaagccctgataatataatgaatgagcaaatgtagctgtcaattcatttagtgcaaaagcaggtaatgaactaaattgaggcattatgaaaaagtttattatattggttctgccaattttatgtcctacatcttttatataaagctttttaaagagggtaatgtgtaaattgagtcttgattttagagccaggagaagaaattaaggagggttggggatggggagaacacataaaaatcctctagacatgacctctgtgtatgcaaaggtatagtggcatgagaacatagagatttttgaggaaattataagtaattcagaaggatttgggggttttattgggaatagacaggtaagcagggcctgagtcctgaagggcctctacgtcacattagtgagtttagattttattgcgagaacaagtggagagctattgaatgatataaagcaagagagggatatgatttgatctgcagttcattataaggctgtctgaaaggtgtatggaggtagaatttttttt

SEQ ID NO: 26934 - DNA, 1061 bp, Homo sapiens
cggaccctcggcgcaggtaaggcgggccggggtagcttctcaattgagccgttttccctacctcctcctccttctgtgcgatccgcccactcggcgttcactcctctggagttcgccctgctgctactcagcccgcccacaacccctcgatgcacccccagcctcacaggtactacctttgggtgcactgccccggcttccacctctcctttgacttggtctccactgccactcgctccctccgaaactcaaacctggccccttttctctggggctgttgtcgttcgcctcttaccttctaacagggcctgctgtctcttcaggtgactttcgttacggcacatccaccaggccttggacatgatactcattcactctcttgaccatcttcaccttcctcttgaccagtcctcactgcaaaacatgaattgtatttttgttgtgcatttccttgcgcccatttctagccgccagatcaggttgttagatgtaactattttaagtcatgatccatgaaaggaaatgatgattgatgataaaatcctgtgtcctgaagagttgtcctaaagtggttttggggtattcctctcaaaatttcagctctgtataaattcctttattgaggtggcaattcctgacaagtgtctaactggaagagatacctgagagggaatgtcaagtaggcagttggatatagtgggtttggagatcttaggagagttctgggctgcgtacgtaaatgtgcgcggtgtgtgtatgtgtttgtcatctgccatattgatagtaattgaagccatggatgtggatgaaattgccgaaaaagagtatagtgctgtaaaataaaggcacctaggatggagcattgacgaattcctgctgtttaataaccaatagaggaggatgcgtcttgcaagccatgaaaaaagtcatcagtagtgttgcattctgctgaaaggtaaaatggaaggaggactgaaaaacccagtgatataaaagtactcacttgtcttaaagatgtttgatgaagtaaaatgagtatttgggttcagtcctaggtcctc

SEQ ID NO: 26935 - DNA, 1114 bp, Homo sapiens
tttaggaaggcagtacagaatagggcttagaacacaggccctgaagctaggctgtctctgctcctggcttactttgtaaccaaccttaggcaaattattaacttctgtgatttagtttttctcacttggaaaatagagataccagtttcatagggtagtgaaaaggagggttacatcaggtgacacatgtatgatactgagtgcagagcctggcccacagtaagtatttactgactgattcttagttgttgtgattaattattgtgattgcctccccctttccctccttgccaggtatcagtgcaaccagtgctcctatcgctgtcaccgggctgatcagctgagcagccacaagctgcggcatcagggcaagtctctgatgtgtgaggtgtgtgccttcgcctgcaagcggaagtatgagctgcagaagcacatggcttcccagcaccaccctggcacaccggccccactctacccttgccactactgcagttaccagagccgccacaagcaggctgtgctgagccatgagaactgcaagcatacccgcctccgtgagttccactgtgccctctgtgactaccgcaccttcagcaacaccacactcttgttccataaacgcaaggcccatggctatgtacctggagaccaggcctggcagctccgctatgcaagccaggagccagaaggggccatgcagggcccaacacccccaccagattcagagccctcaaaccagctgtcagcccgacctgaggggccaggtcacgaacctgggactgtggtggaccccagcttggaccaggccctgccagagatgagtgaggaggtcaacactggaagacaggagggcagtgaggctccccatgggggtgacctgggtggcagtcccagcccagcagaggtggaggagggcagctgcacactacacctagaggccctgggagtagagctggagtctgtgactgagccaccccttgaggaggtcactgaaacagcccctatggagttcaggcccctgggactggaagggccagatggactggaaggaccagagctatctagctttgaaggtattgggacttctgacttgagtgctgaagaaaatcccctt

SEQ ID NO: 26936 - DNA, 1062 bp, Homo sapiens
aacctggccttgagtcatggctctaccactaataaacatagtagtcttaatctcgtagaatctcaggaccttgttgtcatagggctgttggaggaccaaatgagagcgtttattaagcctttctttatcaaagtcttgcccattgcttttaaaacggcagcaattattatggagaataataattattttcagaaggatattctccattttatccattcctgtgcctttgtaaagctctttacagaatttgaaagtaaagctcttaaccatttatattgcagatattatccctagtttgtcattttcttttggaagtttctggttttcacttgggcaaaatatactgtcttaatgctttctggatttgcttgcttgttcactcatttaacaaatatttattaagcacctatcttgtgccaagtattgtgctaggaatccaaacacacgtgccagatagatggtccctgaccttatggggcctacagtccaggtgtaggaccagacttaaagtccatctgtactctacgaatattaaaagattcacctacattttctactagtaactaactcctatgagtcttgttccatctgattctatgcctttctctgtcggtcctctgcctgcaggtgtcctggtaaaggtggtggaggtgtacttctgtgagcgctgtgaacagagcttcgcagagcccactctgctggccctgcaccagtgcagtgagacccatatacagcctgtgcagggcctctctagccccccatgctctgtagagctgcctcccagcaacccaaccctccctggccctctgcagggccagagcccgccagttagccccctatcatgccctgtgtgtagacaggagtttgcccaaccccaggccctgaagagccacttcaagattcaccggggcactcctgacaccttctcctgcccagaatctggctgtgtgttctctgctgaagatcgcaagggtctgcagcaccacctgaggcagactcacagagcagttcctgtgccctgttctttccggggctgccccctgcttttcgggagccagcagg

SEQ ID NO: 26937 - DNA, 1049 bp, Homo sapiens
gactaagccttaggtatgactaagtctttttcttactgatttttaagagtttttaatatattttggaaatgagttctttgttggttatatgtattgcaagtattttctcctacattatagcttgcttttttgctctcttaagtgtctctttagatgaacagaagttcttaattttaatctagtccaatttatcaaccttttcctttatggtttgtgtcctgttaagaaatctttacctcctcaaggtcatgaagatcagtaccttattttgagtgtgtgtggcaggtgggggaggtggtgcgtcaccctatagagtacgatttctcagggcagagaagacactgtcaccctccagagaggcaggcagcaggcgggatgggggcagggagtccatgagaacttggctgctgtgggctgtgttcccagctgtcaagcgtgtaatctggagtgaaagagaatccttttggtggtggaggtcctacagagaatactgcagggtactctaaatcaactttgtgccctacacacccagttgactgtcctctcttcgcaccaagtcagggaaaaaaaaaaggaatctgcactcctgcacagtgctagtagcacagggcagggatgaagagctttcagagccagactatctgccttatagctgtgattttctttttgttattaaatctgatgcttttgttctttccagtttctaccacattgtttcacttccatttgggaagaggatgttgaggtggctgaatttgagagaggtgctaaaataatgttcaaactgcttgttcccctgctaggctggtcggagccccttccctgagccagagctgacaggagctgcttgttcttcttagaggagtgggagtagagaaaagaaggaatgagagttgctcctacactttctgaggggctctgaggatccgtcccccccaggaaaccacttgcgttccccgagcccctctgctgctcgttagttgccctccagactagaaagccatggtttgtgctggggctgggtggggctccagggacagtttaggctc

SEQ ID NO: 26938 - DNA, 1044 bp, Homo sapiens
aaggttatcatgtctagtctcagacgtcacttaggccatctgtctaacttgagcccctaatcgctccttttttatcctttcctcccccaccccaagtcaattatgtgaccctccctggaacttcttcaaacttatctctacagttttggtgccagggtgcctgacattgggcgcaggagccaggcaaggtcttcttagacccaagagaaaaagaccatttctctgtcttcaaggcatgatgcctcctagtcctgggatctgaggcagcttagttttgctggtattacctttctttccattcattcatggaatgaacgtttagtgagcacttagtatatgctggtgccttattaaacaccaagaatataattctattttattaaacttaaaagacatttaagtaattactatttgcaaggcattatgttagaagatggatcttcaaggaaaactgaaactgaaaccttgccttcaaggagcttataaccccatggaagaattggacatgtaaatactgaattgaaatacagtatagaacgaaatgagagcaaatataggtccaagtaacgtaccatgggaaaatgaataaggaagatttaattctggccatttgaaggagggaggattgtaggcagtagaaagggatcagggaagactttaaggaagagaagaaatttgagttggaccttcataaatgagatttccctaattagaggataggaagacagtgtattagacagaatgaacagaattcattctttatttcaagaggtttttttgaaagaatgagaaaagggcatattaaatggaacagcatttgttaatatttcttctttaaatacttcgtgaacacctcctatgtgccagtcactgttctagaggcagtggcagagcagcgaccaaagcaaagtccttgttctcatagagcttgcagtctagtgagctgtcaaaatggatgtggcagggtttcccttctgtcccattgctgtgataattaaccacatgtcttactgtacaagttctttgaactaaaaaaagtctctt

SEQ ID NO: 26939 - DNA, 1025 bp, Homo sapiens
ctggagtctcttcatttcattccctgtcatcattccttcccccaaaatgaaatgcttcttttccaaatctcagtttgcaacttagtttttctgaccccatcaaggatcacttgtgggtctgagatacctgggagctgtaaccccataggtttttccctgaagggtttctggctagtgcacttacttgatttctgagctcccttcctacgtgtttcaccatcctaggttcggtcagcagcccaacagtctacctggcgagattttggcaggaagctccgcctcctgagtggctacctgtggcctcgagggagtccagctctgcagctggtggtgctcatctgcctggggctcatgggtttggaacgggcactcaatgtgttggtgcctatattctataggaacattggtgagcaggaggagcaccagctcagtgtgctggtccttcatcagcctggtggctgggatggtccttacctagggaggtgggacagagctgggtggtcagaaagagactgtggctggtacctggggccattttgcctgaagagagtcctgggcgccataagtgggttctgactcgtttcctccacagtgaacttgctgactgagaaggcaccttggaactctctggcctggactgttaccagttacgtcttcctcaagttcctccaggggggtggcactggcagtacaggtatgagagactccgccctcaccctgctaggtataggtccctcccacaggcattccctcagcatccgcctctcccagcattcctccccagcccccatgtactctcagacctttcacatcctggtgctgggctgacgtccctcagctcccaggccctactgaggcgtcccccggctccctgcaggcttcgtgagcaacctgcgcaccttcctgtggatccgggtgcagcagttcacgtctcggcgggtggagctgctcatcttctcccacctgcacgagctctcactgcgctggcacctggggcgccgcacaggggaggtgctgcggatcgc

SEQ ID NO: 26940 - DNA, 1079 bp, Homo sapiens
taccccttcttttctcaactgctctgcagggcttggtttttccttaccttacctccccaggaatcaacctttcctgtccctttacctctaggtttctatggggctagcaggtatcaaccagaagctgaagactatctccattaccaaccctttctccccacaggtatagacaaggctgagcagggttcctgtggcccaggatggaggccaccgctgccctgccatcccgtctgcctgccatgggacggctcctctgagtgttccctggccccacgtgtgtggtgtttgtgtgtctgtgcctggccaagggaggtgccaacactgggcttgccacagccccaggagaggaatttggggcctaggaaccgagggcacacgggactctagcctcatccccaggacccccttggctcagagtgtggtgctagaaactggcccccagcccagccccagtactgccacctttacacctacccctgcaagtccccagagggctgcccacgatagaagctgccaagcagggagaacctgtgccaactgtggagtggggaggttgggcctggaccctcaacccctgcaaccttccctagccccctcaatagatgagcaggtcaggctgtggcccttacctcacccgcagttctcgcccagtgctgcagccggctcacctctctccgcttcttgcacatcactggcctgtgtgtgctgcttgctcctgttctgttcgcttgctcccgttccgttcggcttttgctttgcgttagggtgaagaccctagcgtccagctcccctcaacgctatattttgacactaaaaaagaaggtttctaaattgtaggagcaggatggaaatactttgctgcccttgccatcttttaggatgggcccccaggagactgaggtcttcctgggccctcattgctgcttatcgtaccccccatcacctgcacatgggacagaccgggctggagggtgaccttggctgtgtgcgtcccagcaaaagagctctggcccgcatctcgctgtgccctgaagggggatgaagggcgatgcctcgcccgaggctttgggctgctgcac

SEQ ID NO: 26941 - DNA, 1074 bp, Homo sapiens
gcctgctcctaggcagagagcctcctgggagagagaagccatatagcattgccgaaggggaaggggttaggaagccctccctcaatcagaaaactcccccaagggcttttaactacaacctcaaaaggaaatcagagactggagatcagagacccacaggatgaaaccttcgagagtccagtagtggtggctgaggttaccatgaggtgaggaaagtaggctgcagctgtggcagctgaggctaagagcaaagagtgggcctgagacagtcctgtggggctgaggagcagagagggcccactgggagttctccaggcccttccagttcccagtcttgttctgccacctccagactctcctcttcccactgggtttcactggagcctctctggctctcagactgcaccccttcttcccaactccccaggcagttcctctttgtggttgccttcactaccttcctggtcagctgcgtggactatgacatcctatttgccaacaagatggtgaaccacagtcttcaccctactgaacccgtcaaggtcactctgccagacgcctttttgcctgctcaagtctgtagtgccaggtaagggctgcaagtcaagaggacaccatagccttgagttctgctagcaggtgggtaatagagtggagtctgaggcagcaactcatactccagaactgactcaggcttggtctagcaaaaatacttcaggatagcagcgtctctgccaagactccttcctcgagggccacctctcctccccttctttttccccaccaggattcaggaaaatggctcccttatcaccatcctggtcattgctggtgtcttctggatccaccggcttatcaagttcatctataacatttgctgctactgggagatccactccttctacctgcacgctctgcgcatccctatggtaagactgggaagttgggcagttagcccatagtctaagacgtattgggaggtgtgggtgtattcctgggcatcagttatccttatctgtcattgacaaatcaggaactgtctcttaagctcacaacccctgaatctcacttcta

SEQ ID NO: 26942 - DNA, 1055 bp, Homo sapiens
tcctgtgccctcatctcctaaccctgatacagccctccccccgccaaatctgtccaccgtgctcctttcttcctgcaccctggttccgaacttttttggtcaggaccttaggttgggtgttcaggggtgtaggcagggccaagggatgaggattgactgcaacccctgcccagagctggaggcctcatcctccctctctccatctcccccggccagcgaggcagctgagggtgctgcggcctctggaggacgtgaccatcagtgaggggggcagtgccaccttccagctggagctgtcccaggaaggtgtgaccggggagtgggcccggggtggagtacagctgtatccaggacccaagtgtcacatccactcggacggccaccgtcaccgactggtactcaatggcctgggcctggccgactcaggctgtgtctccttcacagcggattccctgcgctgcgcagccagactcattgtgagaggtgtggcctccaggaccacagcctgcctgctgacctgtgtggccctacttaccccaggcatgaatactgacccccaactcgtgtgacccccactgaccatgcctgtctcagtgtggccctcattgacatccctgccagagtgtgatccccctgactcataggccctgtgtggccccagagtcctctgcctgggtgtggcccctgactgcccaaggctcagccaaccactgactctgctaccaagagcatgcctttgccattgtggtcactgctgtctgcccgcctgcacaccaccccactgaccactctaactgtgaccctactggctacactgtctgccgtggctccctctgcccgcctaagtgtgggccccgtgaccactccagtcccttgaatccactgactgcctacgggcgacatcactagcaagtctgcttgagtgtcccccatttttacttccagtcccaggatgttcccactgaccactccactggcatctctgcttgtttccccattgccctctggcccccagcttctcccccactgaccaccttaaagtgtgactcccagtt

SEQ ID NO: 26943 - DNA, 1051 bp, Homo sapiens
aggccagcagatcaccagaggtcgggagttcgagaccagcccaaccaacatggagaaaccctgtgtcttctaaaaatacaaaattagccgggcatggtagtgcatgcctgtaatcccagctattcgggaggctgaggcaggagaatcgcttgaacccgggagacagaggttgctgtgagccgagatcacgccattgcactccagcctgggcaacaggagggaaactcagtccaaaaaacaagctggccgtaaagaacttctctggcctaccttgtctgataggccgtaagaccctcattctggaagagatcctgcctcatacctgggaggaaggaatgctacacagaaagacctcgttgggtttccacctgctgtctgttactattaagtggcacactttttgcccaaccacattactgcaggctgtccatttttcatagaatctaagcattaaaaacaagttttccctggctctttgggtagccatttctgaaggctcccatgtcatgtaaaactttgattaaataaacttcttagtttattttagatttttctcttaacctatcttgttatacgagctctgacccttatgatgaggaagaaaggcatcacaacttttcagcccctacaacagctaactagtatgcaaatataaagtcagagtaagagctcagtatattttgttgaattattaatcccataacctgacgattgtcagtccctgtttattaatcatctggaacttagaagggcagattctcccaaacagtaactgccaactctacccctcttaggcaagaaacagattcttttcaagtcactgacattgcagtgtcttgaaatctgtttcagccgtgccttttcaacccatagttattttctgagaattgctccacccacatgggtagcccctgtagccaggtttgctctatatccctttgcttctcagaaacatggaagtggacaaagggagaagcaaagaaagctgaactacagagggagagaaaaatagatctactaagggaaagcaacaggagactccgtagttctt

SEQ ID NO: 26944 - DNA, 1033 bp, Homo sapiens
agccttccaaggggaagggagctaggatctgttggacgcccacattgtcttgtgtgtgctcacagtcctgtgctaggttggccctctccagactggctgcctcgtctcaggcataataataagaggagctgttatgattcccatttggtcggcagaggacagtggagactcagggaggctcgttacctgccatggtcacagctggaaagcaggctgccgacaggtttgggcatcattatccatgtattgaagtgactctccaagccacaaacaaaatttttaactgaaagagatgaactgtcctcctaagtctcacatggtgagtcccaaggtgggaattcctagggtgggaatcagctatgcctaggcagagcacagctgtgccccaaaactcagaatgggagacccagctgttgggagttgagtagtgtcccccaaaatttatacgttgaagtcctaacccctggtacatcagagtgtgcccttatttggcaataacgttcttgcagatgttaagataagggtggactcatccattatgactggtgttccagtgaaaaggggaaattggccaggtgcggtggctcacacctgtaatcccagcactttgggaggccaaggcgggtggatcacgtgagatcaggagttcgagaccagcctggccaacatggtaaaaccctgtctctactaagaattagctgggcgtggtggcacacgcctgtaatcccagctactcaggaggctgaggcaggagaattgcttgaacccaggaggcagaggttgcagtgagcagggatcgtgccagtgcactccagcctgggtgacagagcaagactccatctcaaaaaaaaaaaatatatgtatatatatatatgggggaaatttggacaaagagacgtgcattcagagaacgctttgtgaagactggagttatgctgccacaagccaaggaactaccaaagctaggagagaggcctggaacagatccttccctagtcccttcagagagagcctagccctgcagacacctcga

SEQ ID NO: 26945 - DNA, 1051 bp, Homo sapiens
aaggccctgtgctacattcaggaattttgagtctaatcattttcatagactttgtttatgtatttctcagagtcctgatcctgggaatatctatattctagcagctccctctcttcaaatccatcaagaaaaagtagccctgagaagggtacttagtctgtatgaagggttttgggcggctgctgggctgtgttgagaaaagcagcagcttgtctccctagaagtgaactgtgcttgagtggcttcactgattcacatcacactgaacttgaatccttgtttttatgggaaataacagtgtaggaaccaaggtttacattgaaaatattattgagaaaaacttattaaggcacctcccttcactgtctgtatgcatggtgtctacatgagataattttttcaaacattcttccgtagagaataatttaggaaatttagaaccatgaataacccaggattgaagctccaaagggctagttaaggtaggaaggatgcgactgtgaaagaaatgagttgagattgactggatataagggacaaagtagagtctgcatgaaggttagttgaagactatttcaagagcctcccaactagttccccttaagttatcctatacagtgctgtcaaattgtccctcttcaagactagttttaaattgtatattataaacttgaaagcctccaatgaataaaatgtaaacactttctgtacaataccccatgcacgttgtcataacagcaatttcctcattttcacctccacacttctgcaaagctcacctcttccccaattttcctgtgttcacttttaggctactgcaaaatccactttaagagaatggaaaacaagggactggatccacagccagatttaatttcttgctggtctctcagcaccatctccctctgtacttttctcctctccaccctctctgccttggcaattttcagaatatatccttgcattaaatcccaaattatacccccttttcattatcattattaattagcccacagacggttcagcccaagaattagatatgcaaatgcca

SEQ ID NO: 26946 - DNA, 1028 bp, Homo sapiens
gttgactcttctgagcagttcatcttttccagaggtaagggtaggaggccaacttcagggtctgggtctgagcccgtgggcaagccctggccgagtgagctccaatgctaactcatgtgccgatctctagagcagtgggaaactaccccgctgcaccaaatcaagtagcttcaccttgtgtatgcaggccccaagttattttttagcaatcttacgagtgaaatgttctggtgggttgaaaaacgttcttattttaaagaaaggttgtgctcgctacactgctggtgtgtgcattctgagacctcttgtattcaatctgtgaaggatatgtgtattaatccgtacacccgtatagcctcaatatttgtctgaagacacttaaattctgacccataaaggaaagttctagaagcaatattttcacttatttaacattctccaaacaacatcaagcattgatacacactgaagagtgcgtttattttttgtatcactctaagtatgttggaatatgcaaggactgtggttcaaattagaatgtataaggcatattataatttagttcatactgaataagaaattaacagaacattgttcggttcacacgttccaaactttgagtgatttctggagttagacatagattttctattttgttttaatttgtcaaggtatttttcttcccttcatgaactttaggtacacataacttatgtcatttatttatggtcttttatacctagtttgtaaaattgtaaaatagcaaactaaatgcaaagagtttgcatttgaaaataataaagtagttgccgtatacaaccctgcaatctggttgtctctttcaataacttttgctatatatatggtgtgcctaaatgaattaattatttgttgtcatttaattaaaacaaaaaatcttaaattccaactgagcatacttagaggttaaaaaattattatcttctaaagattcttcacccttcagaacaatgcatttgaaaaatctgacttagaccatcgtaattaag

SEQ ID NO: 26947 - DNA, 1022 bp, Homo sapiens
agaataaatgtgtgactttcaaatcccctttcgcagtgaaagaaacagcaaacacttaagattcagcatctgttctccagttgcactgaggaatgcactgtctcgcagcaccagctctgcagagcccttgccccagactctttgcggttttatttatatgtatttccatatttcattcctgtgtgtcactgctgcattggtgtggcagcaagtgaccaaatgctacaggtcttactatggacaccaggtcaggtgcaaccacacaaaacaaagccagttccatgagctgcctatgatatgcattgcggaagtaacattttacccagggtgtgccattgcagtgatataaatatatttttttcttagactaaatatgagctgactatctcttttgatgtgtgtacataggtgtgagtgtgtctgtatgcgtgcctgtctgtgtgcgggtgtgtgtatgtgcgtagcctcatgcttaggactacccatgaatgttgtggaatgctacacctggagagttctggttttccaccagtttcaagatgaagaactacatgatacagtggacctggagaccatccccttggaaagacaacccagagatgttcagcatcctgtatctacacgcatcctgtatctacacgtgtattttgtagctgtcacactaaccttaataagaattctacagctttggacagaggcattttcaccttaatggtgaagtaatttaaaatataaatccattcaggtgacaacccatcatcaaaattacaaattttctgattgaactcatctgaatcatcagttccttgatggagagagagaaggagatggaatgtgtctggtaaccccaaatggagtacaagtagcctttgttttcctgcataaatggacttgttgaatgcgaacgaatatatgcaattcatatacttttggagatgaacgtagatatgtgtgtcagctttgagatggtgtgtcctggattaatactttgtctcccaatatcacagaaaaatacatgccag

SEQ ID NO: 26948 - DNA, 1064 bp, Homo sapiens
gatgtaacacgaaagggtaaatctagatttaatagtattttctttttttgctttgagctgcgtaatcatcctactcatttaaaaaaaatctggaatgcctctcattttgattgagtataattttacacagcctctataaagtatctacattcttgcattaaattgcttaatgaaacattttaatacacctgccttgttgtgctgtattaattgtggctgattcaaacgtgtgtctgcatgaagcccaagaaaagagattgtcagtccctgtgacttcttctgtcccttttttgtcgccctatgtacagggacctggcaagaattggtatcacagccatcacgcaccagaataagattttgagcagtgtccaggcaatgcgaacccaaatgcagcagatgcacggcagaatggttcccgtctgagccagtactgaataaactcaaaactcttgaaattagtttacctcatccatgcactttaattgaagaactgcactttttttacttcgtcttcgccctctgaaattaaagaaatgaaaaaaaaaaacaatatctgcagcgttgcttggtgcacagattgctgaaactgtggggcttacagaaatgactgccggtcatttgaatgagacctggaacaaatcgtttctcagaagtacttttctgttcatcaccagtctgtaaaatacatgtacctatagaaatagaacactgcctctgagttttgatgctgtatttgctgccagacactgagcttctgagacatccctgattctctctccatttggaattacaaccattgtattttgtttgtggcataaattacagtcatctgtctttcactggaatgaagaccatgcctaggaacattttttaaggactcagctgtggcttttagggcttggttcataccatgggggaaaaaaaagtcctaggagaaagcgacgtggctcattagtgttgcctcttcagtgctcaagccgcctggtggattcctatgacacagggggcctggaaagaaagggaaagtggatttaaaatatatatatacgtaacccaagccccat

SEQ ID NO: 26949 - DNA, 1008 bp, Homo sapiens
ttgactggttgactaaatttaaagtgcttaagaggggtctacccatgaacaagcattagtgtcagatacctccatcccggtaatcaatgaacccaaattgggcatgtttgataaaaagatgatagatttttgacttcaagaaagaaattttgttcacaaattattaaataagaataaaaggaaaagcagaagagaaagtagagttgaatctgaaggggattgacatcctttgaaattatccagcaagggtacaaggaggaagtggcttttgaactaggcaaaaataggcaggtttttgatagctctcggggaaggaggtacattcaaaactgctgccctttctgaaatgttcaagtgtctttctctctccaagtggcttcagaacactgaaaactgtgacccattcagaagttctacctcctaagactttcccaaaggtgacccttatgcaattgtcattcccagtgccttcccggatcattggagatggggctaactccacagtccttctggtctctgtctcgggcagtgtggtgctggtggtaattctcattgcagcttttgtcatcagccggaggtaagcactgaagccactcactgtgcagcccccgaccttcccagtgtttatgatggtttttttctcttccacacaaagctaaggcttttgattgcgtcataaacttggcatctgcatcccaagtttcctccttgttgctttgatcttcccacacccctaccaaagctgctagctgtaccctggtggcaggctgagaggtccggaaggacccagctaattgtaggaaacaaagctgaagagcaagccagtgggagatttctagatgctttaagctgccaggtgttacgtttatccctctcttaagcctggactcactgccaaaggcaagaaaaagccctataaaacttgggccccaattttgagctctgccatttgccagctactactacataaacctttttgagtctttatttctattctgtaaaatagag

SEQ ID NO: 26950 - DNA, 1050 bp, Homo sapiens
gtcttttatttttctacttccatttgtgattactatgaaatttctgcctaagggctgccaggaattttgtaaaaattaaacaatacaaaattctttgaaagaggattttgagtcccaggcatgctgactttttaagctcaaaaagtacgcgtggcttttgcaagcagaagcaagtcctaatgctttgaagaatgtaaaatataatcagtatttcagaggcattgaggtggttaatctattaatctatactagggtaataaacctaccagtataaacatctgctaactagaatttggagctctcaccttaccttagagagaaagtttaacctaattctgcagtttcaatactaatcatgggttagatttttttcattgtagatctcacttgtccttgctttcttgagtagtcttagagcgtatttgtttgctgcaattaaagcagccgtagtctgattattttcttaacttgattgtaactgggtacacttggctgatcatgtgactctctaaattagctgttataagttaattcccaagcctttgaggtgtcaactctgtcctcagccacttagagctaatatttgaaggacctccagggtacttggagggggaggtggtggtgcttcaagaatcccatttgcccacagcacagtggaggagtacgatctgggctgtgtaggaggtgctgatttttggactgaaaaagcactgaccccctgcagaccacgatgtcctgctgtgattcttcccttgtttgaggcagggctacagatacaccccatggagccagagaacagaattccatgtgtcccccaaacccaaatcatatacccaaagccctcagccctcagatttaagaattcctagcctagtagctttttcgggtggtttctctgctcccaagaaggatgtccaggaggtccatgggcccccagtccccctacttcttgcagggtgctgccctgtggcagagccacctctaccttcatgcctgctgcagggattcacccatccttaagtcctccagcccgttgctggtttgctccat

SEQ ID NO: 26951 - DNA, 1044 bp, Homo sapiens
catatgtatggctcagatgaaatgtaactggcaatttttcattgttgttgttctttatttacctttctcttttaatcatctccctgttccaactaaacaaatcacccccaaaagccagtgattaaacacaagtgagttcaaagagccaaggcaagtctgcccaagagtggccgactccccctacagaaggccaagtctgccaattgcagtcttcactcagagcctggtagtaaaactgctgagaataaggtggtttcagaggcaaacagtcacctggcccagagggcttctgcaatggagccccctcagaagggctaggctatgtgagaagtggtgggtgttggccgtgtcaaacagctccttccagtaggcatccaggaactgagtggtgtgcaccccttaggaggccaagcctaaggcaccagctacagacaaggtgcccaggtggcagaatgcagcccctggcccggccaaggctgtgtggatctataacagacaattttggcatgactgcattgactttcactctggtcttctgggttctaaaatgttggttccttaagtaggaactaaaagttaatatctgcccttgtgatgactaggaatttggttaattcatgtgcctgcttagcaaattaaaatggccagtaatcagaactagaatgttaaatctcaactgatctgagtttttctcatcttttgatagaataaattgaactatctggctgggcacagtggctcacacctgtcatcccagcagtttgggaggctaaggcagtcagattacctgagttcaggagttttagaccagtctggccattatggtgaaaccccgtctctactaaaaatacaaaaattagccacgcatggcagcacgtgcctataatcccagctactctggaggctgaggcaggagaattgcttgaaccctggaggcagagcttgcagtgagccaagatcatgccactgcactccagcctgggcgacagagtgagaccctgtctcaaaaaaaaaaaaaagaataaattgaaatatctgtgtgac

SEQ ID NO: 26952 - DNA, 1045 bp, Homo sapiens
gtgagaaagcagtatttgtcacaatactagaaatgtcataaatttaaagagtaattgagtctgaattttctgcaggtttatttactagatcaaagagtgacttcaactttcagtgcttattttatttgccagcataaacttacaggttcagtcaaatgccaagaaaataagttaataatctaaattatgcagattctggcaaattctctttcttttgggggagaaaaaaagagagagctttgagtttttatctcacttcagcaaatccaactgactataatagtaagaataaaactctagcaattaatctaatagctctaggctgctagtcattccagaaaagtgacattacacagaatatactagttactctcattgcatgtcattgatatataattcaattgattttcacattttttacactccaaaatgaaatacaacttttgtcatgtcaccagattggaattcattgacaatacattaacatgccaaaaataatattacacacaagaataatgtagaaataaattacaggtagagcagtatccctaaggagattttcatttgtgtcctataacagaagacttataaccctactcatacatctgtttcatcccactacgttttagactcttcgttcaattcaataaattactcattttgccacacactcagcactctgtcagttttgctgggcagtatacttacacaaaagagtctgtataattctaaagtataaccccccctttttttttagcaaacaaatacagagactttcatgcaaatgaatccttgaaaaagatagtctggataactgtaaggctgccacaacttttgtggaaatgttttggaactgtcttcttcaaaatgtctgggaccttctttttattgataatctcctcctcctccttcttcgtcatcgtcatctttgtctttcttcttccttctttcttcttcttcttttcgatggaatctcactctattgcctaggctagagtgcaatggcaccatcatagctcattgcagcctccaactcttaggttca

SEQ ID NO: 26953 - DNA, 1049 bp, Homo sapiens
cacagtctaaggtgatgggcagacctagaaaaatgattgtaatatgttataactaagttcaggtaaagccctgggggagggagatgctgagtcctgctggggatgaggtataaaggaaggtttttggaaaattaaacaatgttgaacagcagttgactttcaactataaacctttcctaagcatctgctcagacaatggaaaggcaaaaatgcctgacatggcctttaagtgtagaatcttgtggattaagcaagtgcattccaggtcaacagaagagggacacattgtgtgcgggtggtgtgtgtatgtgaatgtgtgtactgccgggagcccaccaatggatacagtggccattggggtttaggggatgagtgacagggaaagctgtaacttctaagttttaggcttgatctattggtgcatggttattccatccttagtttcagaaaatccttgaggaggaggtaatttttaaggggtaggggtttggcatggcaggatagaaggtcagtttaatttatacttgctgaaagtagaatatataaacggctgagagtactgatccaggaaaggagggtggtcaccttttgttttgttttgttttttgttttttttaagatggagtcttgctctgtcgcccaggctggagtgcagtggtgcagtctcggctcactgcaacctccgcctcctgggttcacaccattctcctgcctcagcctcctgagtagctgggactataggtacctgccaccacgcctggctaattttttgtgtttttagtagagacggagtttcaccatgttagccaggaaggtctcgatctcccgacctcgtgatccgcccacctcgacctcgtgatccgcccacctcggtctcccaaagtgctgggattaaaggcgtgagccaccgcgcccggccatacctttttatttgctttgtaattctgaatttgactttgtagaaaagcaagttttgagaggctttatttagattgatacctttgggagacttatcagtcagttcaggctggcataacaaaaaatacaat

SEQ ID NO: 26954 - DNA, 1050 bp, Homo sapiens
aaacccacgtggagacctaactcttgatccatttgtttctaaaatggcttcttgattttttccacaggtgaatttttttttctaattaatgtctgatggtgtcttctgtctcaacacagtgtcagccctttgtgtaagaacttagagtagggggagactaattttaaagaagaggctataaactacctaataatatttaggatgaggcagataagggggtaaaggaaaagaaagaattcctatctaatgaagtgattgcagtgtgggtataactcattaatctaaagacagcaccaatagagttcaaacttagccacttactagctgtgcattttcacataaactgtttaaactatctcagcttcttctgtaccttcttgttcaacttagacgatactaaaaaaattgtcttgtagacttaggctgaggaacattaagtgatttttgataaagtactaatgctattgcaacagggtttcattattgttgtcttaaaaatatcatgtatggccaagtgtggtggctcacacctataatctcaggactttggcaggctgaggtgggatcgcttgtgtctaggagtttgagaccaacctaggcaacatagtgagacctcgtctctacaaaacatacaaaaattagctgggaatggtggcctgcacctgtactcccaactactcaggaggctgaggtgagaggacagcttaagcccaggagggtgaggttgcagtgagccgtgattgcaccattgcactcagcctaggtgacagagtgagattctgtctcagaaaaaaaaattatgtgaatctctgacaaaaatatacttttgcttgtccatgaaaaataaagcaaacacggaaactgagtgacatcaaaggaaaggcggtatgttggtaaattggagtattttcaagtattctacttagacatttcaaagatctaaggattcatattgatgtccatttagaatgcagtaactctaaggtggctggataagatagtctccagaaatataatgtactaagatcaatttatttgagaaattcaggt

SEQ ID NO: 26955 - DNA, 1025 bp, Homo sapiens
gttgccacagggcatgactagattaactcctatgtacactgacactttcttttgccttagtggaaagagtactggaatgagagttttactttttgagtttaggctccatatattattcatatttgcatccctagtgcaaaggacagtatcagccacatctcaggcatttaataaatgtttctttcatgatgtgtcatttgagataacctcacttgctctctctgggcttcatctgtataatgaagggattggttcagggctcctttcaaggattctgcaattttgtaaatgctttgtcttggcattttcaattctctactcatttgtcttcttacttctttgcataggcttttggcacaaaaagtgtagtatttaactttcttctaaaacctgccttttttttattttccaaacatctcgtgtcatgctaatcttggcaaagtttccttgtggataaagctgtttaggttttgtgtatctttcggtagttttgtcctagtaagggtgacaggagaattcttttgttttctacctgctccaagaggctctctgtataactaacttgttatctcctttacatattgaacctttgtttatttgttgacttttaaacaacatatgcacacaacagcaaaaatatttgatagtggaaaataaggatgaaggcaaagtactttgtctttgtcaattatgtcatgagacttattgaacactcatgtcttattcaaagttctgtaaatatagctaaggtttagatttcataagcagagttctttcttggtaactgtacagaacataatttccacctacaccaaccaccactgaaagtattactcaccttttatgcttatgttttcacaactgatttacagggttgtgatatctgagtcctagctcagtggatcaagaagaaagaagaagtgaagatattggccacagtttttccttcaaccctcatcaatcctatttctcaaatgacaatgctgatatgattttatattagggtaacctctctgagttctcat

SEQ ID NO: 26956 - DNA, 1027 bp, Homo sapiens
cacaaattatatgatttttaaaaaacatattagcaacttcagctactcagtaggatcaaccaataaattatgccttctgcctcgtttaatggtacagcagaacaatgtttgagtggttagggggtgtcactatctcagagacagtcaatagagcagtagctgcttaactaaacaggaatcacgttggtggcattgcaaatttccttaggtgtcttgggaaaaaataccacaaaatgtcccaaataataataaaaatgtaatttacagtaaattataaaataaggggaaactcaagtaatagaataagctaggatacttttaccaatagtaagcagtaactctcttccacttacagaaagaatagatttttttgcaataattttgaaaaagtgttttatttaaaaaaatacatagcatattttgatgccttttgaaagggtgactaaaagtcatatatctggaaagattaggaagtgtccatcatcttataatactgaaaatattgatgtaccttgtagctcacaatcagtgacgtgcaaagggaaatatggagtactttttaattgtattcctcctcatacctccttggtgacttgcagattttcatcaacttttgtccttctagtctcttttttcttactccttttccatgcaactcaaaaatgtgtgctatgaggagtgaaggctggggaacagtggtgagagagaacactttgagttactttttgtctcccattttaacttttcccaccttcttgaactatcagttagaatcatgtgcaatctccgggtaagagtgtggctgtgaataaatttatcaagataaaactggtcacttgttctgtttatgctttggtgaatttggattgaagtggctctatccagcttacagagcagacttacagttattgcacttgtagcgcctgctgtatacaggttcaatgccatgtgatttcataggttgcaaatgcaacaaactgattctgttatttcctaagctgcttcctagaagtacataaggaattcc

SEQ ID NO: 26957 - DNA, 1027 bp, Homo sapiens
ttttattgcacgaatgcaaaattggcaactcacttttggagaccgatggaaacatctgaacaaggacctcccttgtacgtcattgagggtaacataaactctgtttaccaaagcatccagtgaggggagagaagccctgacaatggtctgaatgttatgtctaccaggaggccaacggttcagtttgtagctgagcaccaaggatgctagtcggagcttgagctaagatgataattcaccaggactgaaatccttctttaatcatcaacctctctgcaaggagaatgatgaagaggggaaacagggcttactatttcactctgtaatcatttatgatttgagctgtattttaccttgtgttgacctctggtgctgttggtttgctcattctatagcctcagctacagtgttgcaaggggacaatgcagacagtggccactgcatggtgatttctttgtaagaaatggaaaaatattatctaaatgtgtagatagagagatacagttttactattttaggctcgaactaaattctttctactaaaagaattaagtgtttaagcacaaatgttcatttcaaaagtaattatgtcttgagctcactagcacattttttgtgaaggtggcattttttccttctatgttaaagtcatcacattttccctctgtgctacccatggcacacaatttcaaactgaaaatactttatctcggcatattgttgaactttgcccttggaatttaaatgttgaaatatggtattaaaaatggtgaagggatttgctgattaagtacgacttttttttttttttatggaaaggtgggagagaaatgtgcagcttgagaatttagccttattatttattttatgttgtcgttgtttgtagacttttaaaaaaatttgtttactcttgtttgtttgcactaatcactacttaaggaaaagtaagtcacaggccagcctcctcttcacgaagcctttagccatggtgaccgttcaggcataaaaacgtgcttatctgcaaatg

SEQ ID NO: 26958 - DNA, 1046 bp, Homo sapiens
ctaatggggtgccagtatataccttggtcagataaggagaccaaccatttctttattataaaatacaaatgacacagagagccaattttttttctgaatctttgttggctaactttcataattttattgaattactataatttaatgttactagtttaaactaacattttttcccctgaaatgtatcttttctatttttttgtaacatgaaaacccaagttaaattcattaagtaagacaatgactatctttcacattgaaatttctggtgcttggaaaattcttatggaaaaacttcaggaaaaataaaaagaactgtcactcagactacaatttataggaaaagatgttaccagaacaagtgtaggcttttcacaggcatacttgaaaattctcctaccacctaaccctcctctaccaaaccctttgaaaatgtttttccccactttccttccataaagggccctgtgggctgaccttaggtgaaaagagtgaagtcagtcttgggtgctgttccctctcctttcctgaatccctgtccctgccatttgccttgtacattcctactactattactactacaccacacacacacacacacacacacacacgcacaggcttgcactcagctctacctcattcacatagatactcaactggttggctgggcgtggtggctcatgcctgtaatcccagcactttgggaggcccaggcggtcggatcacttgagatcaggaggtcgagaccagcctagccagcacggtgaaaccgccccgtctctactaaaaatacaaaaattagccaggcttggtggcaggtgcctgtagtcccagctacttgggaagctgaggcaggagaattgtttgaacctgggaagcagaggttgcagtgagccaagatcgcaccactgcactccagcctgggcaacagagtgagactccatctcaaaaacaaacagacaagcaacaacaacaacaaaaacaaaagaaactcaactggttaagcctttaactggttaaatggaaagtatttgctcttttctaaa

SEQ ID NO: 26959 - DNA, 2105 bp, Homo sapiens
agggcagcggctctagggccctggctggtgtttgggggtggggggtccttcccgcacagccctgcttgtctcaaccatgtgcgctcccttgcttccttcctcctcccgcccccagtgagttccatcagccgcatcctgagaagtaaattcgggaaaggtgaagaggaggaggccgacttggagaggaaggaggcagaggaaagcgagaagaaggccaaacacagcatcgacggcatcctgagcgagcgaggtaagcggtggcgccttgggcggcgcacttgctgggtgacttggagggcatcggctagctgacattggtgatctgacggcagccaagcccagctcggatcaaggtcccttcatgcgcggtgtctctgcgcctgagtaacgacatggaactgaaagaccagagggacactaggaatcaaaacaaacatttctattctgcttagtttttctgttttgtaaatctttctttcttaaccactttcagcccctgggattctagaactgtgaattgtgctctgttgtagggggcaggggaagctctcactctgttgccattaaatgtatgagactgggcatctctgagcaattgtagggccggggatagagggtacttgaatcttcagaagttgaagtagcttttatgccctcaggaaaggccctggtctccggagtttcctcgcattaaaggagagagagagagagtactcttttgggcaacggccctccaaaattgcccccacattggctgccttataaatatgtctgtgtgttgactggtttgatttgtttgaagttgattttcaaatgtgagggggtttaacctgtgtgtgcctgggaattgaaaggaacccaagctctgggttacaaattgaagggatctgggttcttagagtgctggcaccctctgtcttctaggggtacagatccccattccttttcggctgtgcactgtcggcactaagaaaaaaaatctcccccatgggagacagaagtgcagcttgcttccccttcacctgccgcaagccatcctcaaactttaagggtacaaacgcaaaaagaaagaaagaaaggaaaagaaatgctgaaccaggaaaggatcattgcagcaggagacggcaggggggaggggaggattgtgtctcagtggctttggccttgggggtggttgcccctcttcaaatgcacaaatggtcaagagtggccaggggtcccactcatgcctgaagtttcctcacctgggacttggagttcattgggcaaagttagttttggagttgccagagggacaggcggctttccaggtgggctcacagccgttgccgactgtgactagctgggtccgagcccttaccagagtggcatccaagtgggacttcttttatcttcattgcccaactctgtggcagccagtggctctcctgagcagctgctttacaaagcaatgcaaaatctgcacacaacctggaaggaacatttagatttggaagttacagatccaaatggctgatttgagggaaaaacaagtgtagatactctgatgcacacaagaaatcaaagacatgtcaaaccacagcaggttgggcagggagatgcttcctttgctttatgacagaggcctcctatggactcagcctaaatcctctttttggagaggtgcatttttctgccttggtctctgagaagacaccttggcttttatcccaggcctagctgcagaatagaggtgctgagaagggaggaaggcagggagtcagacaaccccaaaccaaatgtgctcctgtgggcagtggggagaagagcccagagcagtcacagaggctggggactcacggctttgctacttgttgctggaggctccggcgctggcagactggctgctctctcgcagtacaggcgactgaggcccaggagacaaaacgtcccaaatgagctggtcaaacatttgtacaacttttccagcttttacaaagaagtccttctctacacaatctacacttggagatgaacttgggagacaaagcctggagagtccattgaaactcacactttagctcagcccagacaaagctccagctcggagcagcttgatgtgaaca

SEQ ID NO: 26960 - DNA, 1050 bp, Homo sapiens
cagtgatttaaagaatagttatttttaaagtagactagtgggcttttagtgttaaatgtctattgatgttttgccagaagaaacattgatttttctcttactttctctttttcagggcctgctttcttccccgggcgatgtgcagagatctttgccaggggtcaaagcgtcgggaagcttggggtccttcatcctgacgttatcaccaaatttgagctgaccatgccctgctcctccctagaaatcaatgttggaccctttttgtgaagattggtctctgtggtgtgattctcttcccaggtgtccctttctcctcccctagtgtccttaagtcctcctccacagggaacatctatttgggctttgatgtttaataaagtagaaagcactgtctggctgtgtgggtagagaccatcctttccctgcatattaggccagcttgtgccatataccagtgtggtgtctgtgtgtgaagctgcattgttgggtaaaagccccgtggagtgctggagaaatgcactagcagagtgcaggatctgttctgaaaggcagacgtgctcctcagacatcagaacatcacattggaacggattactcctgcataacaagatcccatttctttccttattgataaaacaagataatcgatgagaattcatgttgcatgagttcgagataactgaggggtttagctttgattttctacatttgacatgtattcatcattgagaaacactaaaataacaatatttttagaaaacgtttaagaatcaattatggtccaacaattatagcttctgaggtcagtttaaagtgaaagaaaaatctgtaatacaaggattcaaaatatgtgagggtgcataggtattttttactctatctgtgatactctaagatagagtacatgcaacaaagatctgttctgctgtaagagttaaaatggacaagtattgatatcaatgcagtatgaacattaggaaacaatgagaagcttatttttgccataggccatacatgttactgtaatcagtcagttataaaatcatggtt

SEQ ID NO: 26961 - DNA, 1987 bp, Homo sapiens
agaccaccacataccgaccctcaaaccaagatgttaaaatgattgtcttgatgtttccgaagaggaagaaagtgcaacttcttcagggcatccagaaaaacaatagggagtttctgcaaagtgagatgggcctttggaagaataggtggagacaggggaagcaaggcaaactaatgataggaaacacaggctgtatgtttggaaacacagcagacagtgtagtgtggtttggctatagggtgaggaaggagcttgaaactatatttggagtcttgaatgctagggaaaggctgcagctagttaggagaaaagcattaaagcttcttttttttcttcttttaaagcaggtaggtgatattagatctgtactttaaaaggattaatttagcagcaatatgtaggttgggtgggatggagagcagaggtgaagagaatggtgggaagggattttagcacattgtagaggagtgataatgaggacttggcctggatcgtgctcataggatccaaggaaaggactgatttaagaaaccttaagaagatagaagccacagcattcatcatttggaaaattttgtgatagtgccacttggaactttttgtgatacagctaatttgtgttgatcttctgcttaaaagtcaggtttttctaattctaaacttatgatgttataatttgaattccatataatttagcacccatacagaatataatacttagtatctagtttcctaacatgtagatgtctgctgtttttgtttagaattttttttttttaattaggaaatacacattcctaaactgtcactacttctgatgtggttgtaggtctttatgttcaattttgttaggccaggttgttattttggtttttgatttagcatgaatatttacagactcagacttgtggttccttttgaatctacattggctgtcatagtagaacattgtaatcttttgaagtttttccatgtatgaaatgtccaagatttatgaacatgaaaagctttttacacatgggcagcctgaatcagtatgtatttcagtatatctaacgggctttctttggaaaagggcaggagatttactttcaccccctatcaccatcattggccgcattagtctcttggagtcctgggcacacatctagctctgagtgctttttttctcagggtgctttctgcaagaaccatcaagccacagagaattggtatcattacaaataatggttcctcatttctcatagggatttctgttttgattatctaatggcaagtatgattatccttttttgtttatggttgaagaaaacaatgtataaagaagtggcttgtcaaaataagtcagtaataaagttggtattaagtttttcatctaatatatatgtatgtgtttgtgtgtgtgtatataaaatacacacacacgtacacacatacataccacaactaaggaacaaaattgtttttcagactcctaagcaaatcagtaaacacaggaattttgttactggggcatgtttagctgcatcatttcctccagtttattgttattttacatacagctttttcaactaagaaaaggtcttcagagtattaaaaagtagagtggaagcagattaagaactactgttccctgccattcttgattactgagttgtctgatattactctggcatatggcttactttttaataattaaaaatctctagtggctttgcagttataattgagctaagtctgttctccagagattcctgcatatgtcagttacgtcggcacttatacctatttcttcctgtccttttaatgtacactactaagctttcttttgtactgctttgtttggtggtagggatgaatggaacagaactcgattcacctttgagaaacctggctccgtgcgttataagaaatctggaaattcatctgattgatcttcgcattaacctatggagttttgttgacattggagcgtaaccttgcttgt

SEQ ID NO: 26962 - DNA, 1023 bp, Homo sapiens
acattaacaatttttgaagtaacacatttgcatacatgatggcatcttaactgtgtaaatacatcatttttaatatagaaagttattttagtacatttggttccacatagttaagatctgctaacgtgagtataatgtgtcctgtcatgcattgaatattgtgttttttttttaataggtaaaaaatccattccaggtttacattaactaaataaaagccaacccacaaggacgtactttttccttcatgcgttgagaaggtcatagatttttcctcatatttgtttcttggcttttcagcactattttaaaaaggaagttctgtactttggtgctataatataggagggcattttaaggaaaattgttcttaagctttatttctttttaaaaaaattgaaaatatatttgtgatgttttaagacctttcatgaatatgtatttttaatttaaaagcaattctaatcttttcttatttttttttttttaatatccaacttctccttagtcctactcttagaattagttgccggcccttttctgtgctcatacaagcatatgttatgcttttatttacagccatagataatggataaatactttttaatgtttatacaaatgggatatactttacctgtcttgttctgcaccttgtttctcctctgagcacattctatcaacttcatttctttttaatggctggataatcttccatcatatcaatgtactataatttatttgcttagattgttatgaatgtttagatttttaccaaacttttgctaaactatgtctgttgcaagaaatgtccttgtacctttatacaaataggtatttttagaactagaattgatcattccataggtgtaaacatctaaatgtgtgataatttgttgaattctcttcataaaaggattttttacaaacttagcatcctaccaagagaaaggttcctgtttacccacatttgatatgatttttggaggcattatgtcttcacaagattcttgttgcatttgtgaa

SEQ ID NO: 26963 - DNA, 1027 bp, Homo sapiens
gtggcatgttatacttttgagagtgaatgagtgataagaaatattcataaggacatttccaaaggtgttgaaaagcctgggatttatgtgtgtgtgttctcacctcactaatacggtggagttatatactgtttgaaggagactgagtaccaaattcatcattgcatttctccacctggaaatggtaagaaaggaatatcttcatcatgctcttagacttagtatgatggacactgtgatattggaattactctttcttggtcatatccatctgcttgcataggacgagactgaaaatctttagcaggatttataaacgtctttggaatgatgtagcacaacagtgttttactgtggggaatggggaatgactatctgaaagggaaaattgtttggcattttatattatttccaggcagtgcaaactgtctagcaagtagaatgttcatatatgaatctaatatagcaaatttatccctcataatactgtttttgaaacatcaagtttattctcaatgtgtggctctaatgacaatttcttgggaacgtaatagaactgcaataatgactaatggaaaagactctaaagctgtatctgatgggaaatgatttactttttaaactctttctatttaaggaattagcttaccgaaaggagatggtgagagctgacctaattaacaaaaaagttggaatcaggtatgctctgaaaacttcacttaattcaagaacaaagtacacgtatgactaattttttttttgcgatccttcagagtctgttaaggaatgataaaacatcagttaagatatctggtttctgatagaactcaaaaagaaaggttactgtttcagctagtagcatatgttgaaacacaatgtaaacattaaaaaaataatccaatgaagtttatggtttgttcattcctttttcagagaaactccagaaaatcttgccaaacttctgaccaggatgtatttaaaatcagaagtcataggtgatgggaatcagattgagattgaaatccct

SEQ ID NO: 26964 - DNA, 1078 bp, Homo sapiens
aataataatggctatagagcactcatgttctgtctgtctatccatcccctacctacccacccgtgtgccaggcgctacactatgtgcattacatggatttagtcttcaccataatcctgtgagggtaggtgctcttattaagctttttccagatggagtccctgagaccttgagatgttaaataccttgcttattatttttaagtggtagagctaggatctaaattcagacagtttgacagcagctgtaaacacaacattatacaacaacattgtgtggtcataattcctatgatttattctattaactagttaactgagtagttttttaaaaaatgtttttattctttaattggcacataataattgtacatatttatggggtacagtgtgatgtttctatacatgtatataatatgtaatgatcaaatcatggtagttggcatatccatcatatcagacatttattattttgttgtgttgggaacattcgtagtctgctcctctatatttgaaaatatacaataaattgtcgttaattattttgtagcatcctacagtgctgtagaacaatagaacttattaaataagtaatttatagtctcactccttttaagattactcagccctccgaacatagtctgttcacgcttgaattaacagttgctgaaggcatcactgtaactaataaataatttcaaatgtattattaagactaatttagtagtaaccacatagttattttcaagcgtaagatcttggtaaaaaatctaaaccagtattattcttgggtggttttgtccccaagggacttgacataaagatgactgttctaaaacataacagtatcacagtcacttcgtggttctcattcagtgagagcattctttgatgagcttttccttcccctttgaatctttcactattcccttgccatttatgaagtaaatcacagcctgaaatagtttctgctatttaaatagcttttacagtagatgaaacctgctaagatcaaaacctccccattccggaagacattaacatttagcatcatattttattctagagtgttaattata

SEQ ID NO: 26965 - DNA, 2104 bp, Homo sapiens
aaagacatactttaatttaaaagataattttctgatagttagtattatttttttcctaagccttctatcttcacctattcagtgcttttataacactaccttaggtgtaaagttaaaaaatgttcaggctaaaaaattgtacattatcttaccttatttttcctgctgccttactaatgttacagaaagatcatctttgtactaatctatttgtatacttgagaaattggctgagatttctgtagtttataagttgctattcgtaattttactacacctcagaattatgtttgaaattatgtgatatctaagagtgttggactggatgttagattatttgagttctagttctaacatttactagctgtgtaactatggacaattactttgcctgtctgaactctatagtccagacgagtctctctgggcctccttttcatttgtgaaataaggggtttggattatatgatctttatggttttcttttttgactctgaaatttatgtgattttaaatttctgtaagattattgtcaggtagcactgacaaattcagtctttacatatggtcattgtatgagctgagatgctgaaactgaaagaagatgtaagcttctgtgtctttttttttttttgcaaaggaattagatctttttttacagtagttcctccttatccacagttttttgcctccacagttttggttacctgcagcaaactgtggtttgaaaataggtgagtatagtacaataagaaattctgagacagaaagagactacattcacattactcttattatagtatattattttaattgttctattttattattagttgttaatctcttactgtgcctaatttataaattaaactttttcataggtatgtatgtataggaagaaacatggtatatgtaacatttagtcctatccaatgtttcaggcatccactggggagcttgaaacatatcccctgtggataagggggtgctgctgaaaaatgaatgcagatgccttcatttctccggttattatattatcttctctgtatataggtccctcctgagatctgccatctcctgggaggtgactcagctttcttcactattgaaacagtaattttattaacccctttgattgaacattgtttaaactcgaattcttcctcttctctttttgcctctccccattccccttcttttcttttccccctttttactccttcctcctcctcttcattctcttgtttttcatttttcattttccctaattataaaaatttgcctcctaagtttgagatgcccaaggtagaggttttttggagcccagcaccaccttgtacagccccagcattgcatagactcctgtggttcctcaggtgggactttggcacataatactcgtggccagaagtgaatttctctgcatattgtgcaaatgtggatataattcttaatttggacaaaaatttgaactacttatattgtggcagtgggagggcatcatgtaaaacaaaaatcattacatattttgatagaaatccatcagttattttagcaggttgttggtggtggaaatagtaggaattctggttaagtggagtttccacataattaaagcgtaacattaacagttggaatacaacttgtaatcatttcaagtgaaaatttcttaaatatatttacagttccctgctgtagtaaacataaggaatagagtgtaacttctctgcagtggttatgtttaagaaaatctgttactctgctgtagtgtggtgcttgagatattctaaactctttgccactgcattaaacgtgattctagtggtgtttcttctgtcatctccctcttggctgccttcattctgctgcactatccctttgctatcactagtttgcttcccattgtacctattatcccttctaatttttaccagtgtctgatggtctctgactgtttttagtttttatactacccctctcattctcatgtggacttgggtgcccacaggatttaggttttagagtcatcctataagaagttgtgtttcttttatttagtgaatcatctttcttttacccctttgacacttttgttgttgttact

SEQ ID NO: 26966 - DNA, 1047 bp, Homo sapiens
aagtgctggtattacaggcgtgagcaccacactggccaagcatttctcttatcagacattcactttatgatcaagcttaactttttctcagttgaaagttacttaattccagccccatatggatgtgtatacaaattatactcaaactttgattagaatgcaaagattttatatccatgtatccttttgacaacttgttttcaacaatggcaaataaataaaagaatgcagaagatttcacagtctgcggaaggctgtgacttaaagggaaaattgttctaatttattgttcgctttcagacaatggaagaatacatgaacaagcctacattttaactggaaatctacttgaagactccagcactacatgttatgaagctgtaaataagcaacgcctcccatccggttttttgatggagcctcaggcaccatgccaaaaataatttaaagggattctttgttaactaacaaagttaaagttgtttaacatatttataattactatgtgtctgtattattaaaaaaaattatgtgtctgtgttatactgtataggtacttgtagctctaaatgtttaaagtaactaccacctaacccaacagacaatatttgtaatgtattaactccatgttatgtttttaagctggtttagatacattagctgcaattttttttgcatttgacacaatattgtaataatccatgattttgaatgtaaagtatatatgatgtcattaatactttttctaaatgtttagttttctaaattgtataataattcaaaattatgttaatagtgcagagtttatatgtaatgctagacatttttcatacacttaatagtactgtaactgcaattcacatacaaaatgtctgattttaatgtgctgaattcatttattttttttagaattgggattatgaaaataaccaaagagtatagaacttaataagtgtttttgatgccttagaagctgctatcttgactgaggttttaatttatcttttaattgaatataagggacattccaataaggttttctatgaa

SEQ ID NO: 26967 - DNA, 1123 bp, Homo sapiens
tctttgctactgtgaacagtgctgcaacaaacatacatgtgcatgtgtctttatagtagaatgatttataatcctttggtatatacccagtaatgggattgccgggtcaaatggtatttctggctctagatccttgaggaatcaccacactgtcttccacaatggttgaactaatttacactcccaccaacagtgtaaaagcattcctatttctccacatcctctccagcatctgttgtttcctgactttttaatgatcgccattctaactggcatgagatggtatctcattgtagtttttgatttgcatttttctaatgactagtgacaaaagctaaaatagacaaatgggatccaattaaactaaagagcttctgcacagcaaaagaaagtatcatcagagtgaacaggcaaccaacagaatgggagaaaacttttgcaatctatccatctgacaaagggctaatatccagaatctacaaagaacttaaacaaatgtacaagaaaaaaaacaaccccatcaaaaagtgggcgaaggatatgaacagacgcttctcaaaagaagacatttatgcagtctggagactcaatgagcagagtttcaggagaacagcttcagttgggtgggtggggtatggtatggaaagagaaggtgtcagtgagtagaggaataagtagggagtaagacagcaaggatggtgtgtgagtacgggaaatgagctttatttggatgatgggagtgatcttgccatacttgctacacttaaataaacaccaaaatctatcagactctgctttgatccgcgccagggattctggatgtgaaatcccgcagtccggcggcctcagcatcacctgggaacctgttaaaagtgcagattctcagttctcatctagacctcctgagtcataaactctgggggtgggctgtagcaccagtgtgttttaatgagcctttggaatgagtttgagaaccactggctgtgacataattttgagaaaaattagcacagttgagctaattttcctctgaagaattagtttctgagagagttctaaagctagaagccaagatttacagagcagagagcaggagaaacaaagctctgccctccttcctgga

SEQ ID NO: 26968 - DNA, 1090 bp, Homo sapiens
agattcctttcaaaatattattgcttgttggccggaaacggtggctgacacctgtaataccagcactttgggaggccgaagcagacagatcacttgaggtcaggagttcgacaccagcctggccaacatggcaaaatcccggctctactaaaaatacaaaaattagccaggcacagttttgcacatctgtaagtccagctgctcaggaggctgaagcatgagaatcgcttgagcctaggaggcagaggtttcagtgagctgagattgtgccactgcactccagcctgggtgatggagtgagactctgtttcaaaaatacacatacacacacacacacacacacacgcacatatttgtatatatatgaaatacacacacatatatatgtaaatgtatgtatatttgcttattgaaaatgcacctagtcacccaagaactctgaggatggagacataccatgagattaatgttgtttttcatgcctgctaatacaacactcattctgtagctcatggatcaaggagtaatttcaactttcaagttttgtgatttaaaaaatacacttttgctgggcatactggctcatgcttgtagtctcagcactttgggaggctgaggtggcaggatcacttgagtgaccagcctgggcagtagaatgagactttataaaagccttaaaaaagttagccaggtgtcgtggtgtgtgcctgtagtcccagttactggggaacctgaggtgggaggatccctggagcctgggaagcataggttgcagtgagccttgattgtgctactgcactccagcctgagtaaccgagggagaccctgtctcaaaagaaaatttttttataaggctataactgccgtagatagtgcctctgatagatctgggcaaagtaagttgaaaaccttctggaaaggattcaccattctagatgtcattgagaacattcatgattcttgagagaaggttaaactgtcagtattaataggaatttggaagaagttgattccagccctcatggataactttgaggggttcaagccttcagtaactgcagatgtggaaatagcaagagaattagaatta

SEQ ID NO: 26969 - DNA, 1047 bp, Homo sapiens
ctgcttcaccctggtcaactgcatgatccttattgtaatagtgaatcagtataacactttagacatgcacacagataacacgctgttgcaagagttcatgatatgtctgctgtccaactagttttatttgcctgatcctactggtttaggcactgcctatagtctcgagttcacagaaatgttgggttttttccctccccaaagtcctcattttttataaactgtagaaaggcaaaatgacaagggaaaaggaattctaagagtgaagggatgattgttatattggggcaagaaccacagagtggctcaggctttggaaaaaatatggtgtggatagtgacaaaaaacataaatataaaaattcaagaaaaactaccagttttgaacaacaaaaacaaagggagagtttatcctttataattttaatatgtaagaaaaaattacataaacttttcccagaggaatattttataaatgtgcattgagtatttttcgtactgtggtataggagtatattttgtactgttgatgtctgctactgacttagaacaaattgattattgggttactatggagaaaggtggtcttaagaacagcaagggctgagcagcagtaggttggggcagagtgtacagtagaaattatttagtgtggggcctttgtcatttaatatctagctgagttacttaggactctctcaaggtcttgcctatagaaagttgaaactgaacttgattcctaaagtttcctttaagttttaaagtccatacacacacacacacacacacaaatgtttaagggatgttatcctgtagtttgtaatttcaaatgtgtaagtttgtttgattttctaaaacctggtttgatttactgaaggttctacttagccaaacacagtggtcgacagctcacactccagcatcatatgggttctgcagatctcaatgccacattttatggaccagttaaaaaggtaaatattgatagtttgaacgtattaagtaacttaaagttagtctattagagctgatgtgtgatttatgttga

SEQ ID NO: 26970 - DNA, 1070 bp, Homo sapiens
ttgatgagtaaagtaaagcaggcataatttatctctagaaagattgtttatatgctggcatttgaaatgccttttatttagagcagcagtaaaaatggaaaaagagaaagtaaatgatgatggaaaactagacccagagaattccttggacttttctgaacacttcagctaactccaattgttggaaatacgtggataccttattcccactagtactcagagtctctgagatggcagttttgatgaggaagaggagcaagatgaaaaaaaaacaagagtgatatgcaagaaaaaaacagagaaagatccaagcaaatattttttttgggctgctgaaaataattggcttatccagtgtggagactgctttgtgaaaagaccactcgtgtgaacactagggatgaagatgagtgtatcacccccttcatcgagcagcctaaggtggacacttagacattgtctgtgagctgattgcacaaggggcagaagtttttgcagtgaccgtagatagctggacacccctgcagggtgcttataagtggaataataccagagtggcttctttatttcttcagcatggtgtagattagttatcagtgaccaaacaaaaggtctcttgacccacttgcatcttgctgctgggatcagagacagcagagctactctagaacatctactggtgaactgttaacctcaaaccagatctgaaaaaacaactgggaagaaactgtatttgatattgccaggaggacaagtatctgtcacgacctctttgaaattgtggaaggcactgtacaaattcttcaccttagtcttaatgattctagtaattgtcttaagtgtccaagtaccagtgccttctttgtgtgagatgtaaaatattcccatagtaaaaggttgacatcaaacatcttactacaaaaaattcattggtacttattaagatgttcttccaggtgaattgcctgaccttgatgtcaaaatgtatttgaaagttgtttgaatatatcttgaatgatttctgtggagtttgtgatttgtatcagaaataatttcgacttgcctacact

SEQ ID NO: 26971 - DNA, 1021 bp, Homo sapiens
actggaagacttaattaaccagcagtatgccagcaaagcttatgataaacatgatgaatctttctggttataattttacattaaaacaaatcaaaaaagaatgtcccactgtatcttggagtcagatgcttctaagcttttgaccctcactggcgtgtatatacttgttctgctattttttggagtacattggcacagtttgaaaaacattgcttacagataatgttttaatttagtattatgtaaataccaaaggctttaaaggatataattcagactatatcagtctttcgtgtaatgagaaattacacaaaatgctaatagtacttattttatttaggctgatttattataaacactgtagaaacccagctaaaagcaaaaacactcttttcttctatgtttaaaaaatatatatatttttaaatggcagatggaaagccagaaatttttagcagaaaatagtgcttcagtatatataaagaaagtagaagctagaattaatgaagaaatagaacgagtgatgcactgccttgacaaatcaacggaagaaccaattgtaaaggtggttgaaagggaactcatttccaagcacatgaagactatagtagaaatggagaattctgggctagtacatatgttgaaaaatggaaagacagaaggtaagtgttaccgattgaaaaataattaaatccttactctgccttatcgatatttttaaaattttcctacaattaaagcagataatatcagctttcaagaagttttggtgtgtattgttaatttgtctccattgttaactttaatgggatttccaagcttgattctgtcttactaacgaagattttagatatttctaatgaattgagcatttcctgtctttaagtctcattttacatttaatccagaagataaaaggtgtaatagtattggtgagcccagtgagctcctcattcattcctgtacttcctgtataccaaagggtgtgggctctctttagtcctacatactctcttggggt

SEQ ID NO: 26972 - DNA, 1003 bp, Homo sapiens
acccaccaaagcccagagagatccttgctgagacgagaaaggaattacattactaatccttctgtgcattacaaaaaacagtagttttatttcagtgtattttgctatcaatatggattttcaaggaatgcacaacacttctggattatctgtgctttataaactgagatatctgtaatcatgttggtaagaacttgaaagtaataatctgtttgaagtgacagtaagtagaggtgttttaattatgtaatacttaatgctgctctattttatgcattaaagccttttaaatatttatcagtaacaatcaatctaagttgtataaatccgtactttattcaactctcagttttacttcaaagaatatgatcttcaactacagtatttaagaacgaaccatgtttgagtatgctgtagctttggggagaaagtgtgctaccttactatttacctttttttactctgtttttttcttcctggctatgatgcttactttttaccctttttctttaggtaaatgggccaccatttatagccattgtcaattgtaaaaacttaactttatataacttgagaggtgctggaaagttgcacattgcttaagatcatttgaagtgtttctcacctgaaaaatgattgcttttggaattttatttcctttatttgttattgtagcacacaataattattatgctcacaagaactgtactcatatttatatgactttaactgtaggaccgtgtgtatgtacaacaaaataatgtggagaacgtctacaatttgggattaattatttttcgagatcaagttgtacgttatgggtgtattagggatcatctacggcaaactctattggatatgattgcaagagagcggaaaggagaagtcgtagacaggtaaaatttctctctttactcttgtggttttggttttagtgattatatcttgagaacgattcactgtcttagttttattaaaataaataaaagtttgaatgttgagc

SEQ ID NO: 26973 - DNA, 1028 bp, Homo sapiens
ggtttttcccctttggtttttatacttttgatcctgggttgtttttgttttgttttgtgggggaaacgggcaagcatggtgttttaaaatttgaattccagtattgtttgtgaaaaattgtggaggccctgcatgataccttcctccaaagtaaatttaattttgttccggcaggcaggtaaagtacagtcagatcaccgtgatctagttgaggctagcttttagttagtgttggtctgttaacagtttgcctttatttccaggacatacctattcacagagcatagttcctctggggtctgaactgaaagaaagcctgaggtgtttgccaggttgccttctgaattaatgttcctagaattctaacagttgtctcttcagcacagatcttcagcctccctttgatagtttctgtttggattcttggtgtcatcaccccttgcttagggtgctgtatcagtaaacatctcagtgaaaaatttcttgcagaaattgcggctctttgtgtttctctcctcttcagaaccttgacatcttaagtcctagctgcttggtaaccaactccacttttgtctttctggttgggctcttatttccagtcctccaaagacagcaagtgactgaagggaaccagtgaaggctggtatggggctcctctcagtatgtttgccttttctccggaatcttggccctacaagtctaggttgcctttgttactcttgatgcttttaaacactgggggtttttggtttgtttttttaattgtggtcaaatacatataaaatttaccatcttacccttaagtgtgcagttcagagctattaagtgtacgttcacattgttgtacagagctgtcaccaccatcctctccagaattcttttcatcttgcaaaactgaaattctgtactcactaaacagtaactttccattttcccctccaccaagcctctgccagctaccattctaccttctctgtttatgatttgatcactcattacctcatgtaagtggaatcataaggtgtttg

SEQ ID NO: 26974 - DNA, 1042 bp, Homo sapiens
aggttggagaatgataaacttgatcgctgtgccttgtgaactgttttctgggtatatgcagtgatgattttagcagtccatgacattaagtttaggaaggcaagtattcagtgtttacactgcctaacatgaagtagaccctgtggtcagaaatagagcacattatttgtttttcttttcttttttttttttttttttttttttttgagacggagtctccctctgtcgcccaggctggagtgcagtggtgcaatctcagctcactgcagccttcgcctcctgggttcaagcgattcttctgcctcagcctcccgagtagctgggattacaggcgcccaccaccacgtccagctaattttttgtatttttcttaaagacgggattcaccacgttggccagactggtctcgaactttcgacctcaggtgatccacctgccttggccttccaaagtgctggaattacaggcatgagccacagcgcccagcccggaaatacatcacatcttgatagagtaaagggaatgaacttgtatacataaagtggactctgacaatgtatatgggaagtttggagtagtgagaagaatgtttaatgtgaattaagaaactagttcctgctttgtcattaatttgctcaagttatttaccctctcaagactcttgttttcttatctgtaaaattattggacaagagatctgattcttatcttttgggagtcatagatcctttggaaaatggtcatatttcacgaactctctcctggaagaggcaggcatgtgtgcatgcacataccatagaacacatactttgtgcagtttcaaggggtttatgggtgcctgaaacctatctatggaatctgtaaggatatgttgattagattattttaaatgttagagcccttttagctcttaagttttataccatcttaaaactgaaagtgaacagctagatgtagtgtctgaggaattatgataatgaaggaagaaaacagagtagattaagttgatcacagtttctttaggaactcttcaagtaggtta

SEQ ID NO: 26975 - DNA, 1031 bp, Homo sapiens
tctgaaaaaatcaaaaatctgaaacacgagtggcctccaagtgttttggataagtgatattcaaccttagcagatttttattatcttagcttctgggtgaatgttaaaatactatagatttatagaatgacatacctttgagttattgtacctctgtgatactttttaatgtcctggtataattaggatgtgctccatgttattatgtctcattttatgtttttaatacatgattagtatttttttgatggacagtaatgccaagtataaatttctgtactttggggatttgtctatatttggacctaatgttgtcctgaatttggagacttgtttaccaaggaagtcctcaattttcagtattccatatcatcattgattatgtgactctgttttagtttcaatgaactttagaattaaagtttttaatttgttttagctgatgatttctttgttttacctagacatttaattaggattggctggctgggattttgccccaggcattgaaatgtagagtgtgaaaaaattttaattaatgattaaaaacaattatgtgtgttgtggggtatgggagaactgtgcacattatgtccttcagctctccagctagcccaagagctgctggcccagtattgcttccttgtcaatccatggagatatttgggaatgaaaactcaagggcaaagtttggaagcctgtagctcctggtcattcctgctgttgtctcctgtcatcctcctttccagctccttttgtttctctttaccagtaatttgactgacttgaggatgtgtatattgcagcttggacattaatttatcattaagcaggttttattatacagttgaaaaataggccagacacggtgactcatgcgtataatcccaacactttgggaggccaacgtggaaggatcactttgaggccaggacttcgagaccagcttgggcaaaacagtaagaccccttacctacacacgcatgcgcgcgcgcacacacacacacacgcacacgcacacagccagaagt

SEQ ID NO: 26976 - DNA, 1046 bp, Homo sapiens
tgaactcttccaatgcatgtaaaatgtaatttcatttagaaaataaattttattacaatgccttgctttaagattgtcaaataaaatgtgaaataccacacagactgataaaaacttctcatagtctttatgtggtattggggtatttattttttaagttttattttgaaaaaaaagtttcatgaatagcacgatgtgaactcttgtgtacccttcacctagattcaccagttgtttacattttgctacattttttttgccagtttttctattgatatgtgttataattactgttaccaatattattattgctgaaccattagagagtaagttttagatttcatctaccccaaaagactttgcaacatttcttttaagaataaagaaatcttacttaaccaaagaacaatgatcaaaatcaggcagtttaacaatataatactgttgcctaatacattccttattcagatttcaccaattgtcctgtttagtggtgatttcctttatagcaatttgttttctgatccaggatccagtccaggatctcatgttcagttcctcagcctttctttgtctttcagcacattgacatatttgaagagtataggtcagttgttttgtagattatccctcagtttttggtgtgtctgattgtttcctcatgactagtttcaggttatgcatttttggcaggaataatacataagtgatgttgtgtcctcagtgcatcacatcaggaggcacttgatgtcagtttatcccattattggtgatgttaactttgatcattggtgtccgccagatttctccactgtaaaggtaccttttttccctttgtaattcataagtaatctgttcagatatattttgacactgtatgaatatcctgttccctagaaactttcatgtgatggttttagcatccattgatgattcttgcatgaatcattattactatggtggttccagaacagtaattttctatttctgctctttcttctgtaatttctttctcttaaagggaattacatgagccacgcagttag

SEQ ID NO: 26977 - DNA, 1033 bp, Homo sapiens
tacacaatgttgaataaaggaactaacagactctttaagtttgtttcctcctctttaagatgagaactacagcagtctttcacaaattgtgaggattaaatgaaatcatgtcagaaaatgctaatagtggtatcactatgacatttaaaagaatttcccaatcataaaatcaaaattttcaactataattctgtttcatgtagggcagttattttcaaacgtttacagggagcctggagggtgtctaggacccaggaggcctaggaagtgttaagtagaaatctttgaaagctccctctgtggtccttgagagcagctcctgtgttaccatttgtatatggggttctgtaaaagatttcattttaagaaatgctgttaaccattgctttaaaatcactagtaataattattaatgaatcttttttaaaggtgaggagaatactacttgctcaacttgataacggttaataggaaattgagaactgatcctgtagttgccttaactcctaatccaaatctgttgctactagacagcattcttttttttaaattcagttttaaagttgaaaatgtaactaagcaaaacttcctaatttgacctccatttagtacttgtaatcattgagaaaggattggacccaaatttactctttaaatgagaaatgttactgctgagcagatgaataaaacgacttcaaaggggaatttttacctactttaagaaaatataagattccttagagatactttcttataaaagcaagccatcattgctaagaggaattccttcacatatgtgtttgtaagtcattcttacctaaaacagctcttaactgagcaacacttagcctcttctgtttgccctgtcctctccaaagtaatggtgaaaaattcctttttctttttcatctccaattcctttccatttccactagaggttgccttgtaagattagtgacaacttgttgaatgtctgacttgtggtaggctgttttagatacttttaactaattatctgaaatcctgaaaacaa

SEQ ID NO: 26978 - DNA, 1030 bp, Homo sapiens
tgagttgaaattgtcagtgaccctgaattgggagttagaagacttagtctgcggtccagtctttctgtttactagctgtggtctacatttcacttcctccaccatgactgttcttcgcatctcatcccttcctgtcacactgttaaattgtacactctggtcccctatttctcaggcttatctttttgaattgaggtttctattacagtccttgaattattgggcccagatgtggtttattgccacttccatcatcatcttttttggcttgagaattactctcctgctctctccctatgaccatctgacttcctgaactcatgctccctcagtcattgaggagtttaataccttcctcacagatactatgttaatacattcctcacagatattatgtctagcctctattttaattttgttcattgcatgtggaagtcattcatttattcaatttaaaatacgtttattgtgtgttgctgctatgggtcaggtcctggatctacagtggcgatcagacaggcttgtattgcagggatcttcacgcttagagcttgtcatcctactagtttaaaaatcttcaaacttccattttgcattttatcctagctcttctgtttgttagatgtaggactttgagcaaatcacttagtgtcttgtctgttccctcttttgcaaaaaggaaaaaatgatgatacctacctcataaaattgttttaaagatggagttaatacatataaagcttcttagaatagtgcttggcacataataagcattatacataaatgcaaggtgttattatttaattattctatcttgttgcttggttccttctcacgttaatgtgccctttgatctcaggaagacccatttattctcccaagccatggtgctgtcacttccacctatgttaccagttgcccctttcttactacctccccagaacaaggccagaaatagcagcagaaagcatcttggatcgttctacctatttgcccccactgaacatattttctagctactcctggagaa

SEQ ID NO: 26979 - DNA, 1034 bp, Homo sapiens
ggtaattgaacttactggatattttatagatactactccagataaattcccatcagtaatatcagattctttttagtgttttgagtgcattttttttttcttttttgagacagagtcttgctctgtcgcccaggctagagtgcagtggcacgatcttggctcactgcagcctccacctcttgggttcaaccgattcttgtgtctcagtctcccaagtagctgggactaccggtttgcgccaccacgtctggctaatttttgtattttaagtagtgatggggtttcgccatgttggccaggctggtcttgaactcctgatcttaggtgatcagcccaccgctgttacgcaaagtgctgggattatagctgtgagccaccgcgtttcagccttagtgcgtattttaagtataccttcatcattgtctgtagaagttataatacacaacagtttaatgcacaatttgcatttttaaatagaccttttcctagaagttctttttaagatggaagacaataaggacgtttctgtatttgtaagctgttgacaaaggaaaagtttattccagtttataagctttcccgccttgcacaaaatgtatcatttcacatctttttgataatgtttaaattttaatttgtatgcagaggaacaaggaccacaaaactttttaaagaaagcaggctgtaattgtgaaacttctggaaataatgtgggtctggatcaaataattctgccccagggagtctcttccttactcctgggctttgttccactatgtaggattagttgctttcaggtgaaccttttattatctttatctttgaaaaatcatttcttaccatttttactgtctggggttttgcccacatgggtttgatgagcttgattagaattggagaggatacgtttgaatgaaaatgctgtcctttcctgtatcaaacggtaataaagcctttcttggcctagccttcagagtttgggaaacctgttatgaaggtgactgtctccagaatgtaatcaggctcttaagatc

SEQ ID NO: 26980 - DNA, 1026 bp, Homo sapiens
agctaaccgcaacctccgcctcctgggttaaaagcctcctgagtagctgggattacaggcatgcgccaccacaccgggctaatttcgtatttttagtagagacgaggtttctccatgttggtcaggctggtctcgaactcccgacctcaggtgatcaccgacctcggcctcccaaagtgctgggattacaggagtgagccaccgcgccaggcctatatacaacagattttctagcagtgtgtgcagccttacactactcaattcttgaagtctcatgttctaaataagattttttgctaaaatgtggagtaactcaaatttgacatcaactcactcaagttaatggccttctgattgaccagttgtacgttaatgtatgtgtaattaaactctttgacctcttcaggtttccctgctcttacctgttttgccatcatttaatttgttcagcaaatactgaatattatgtgccaggcactgttctgggggtctgtcagtatagctagaaagaccaagatccctgccttttggagctaatattgttggggagaagaggtgggagagaatttcattattcctttagctgaccagtataataacgttgtgtgatacgttaccacatagtactggaactgaatttttttttgttagcttcgttatgattatgagctaatttggatccattctgtctataacttttgcaggtttttctgaaaaccttacatgaagtaagtgactagttttggtattcagtagttaatagctgctgatttctaaaagaatttttcattactgtttaataagtattaataacattcctaagtgattcccattggaaagaactattacagtttatggccctttgttacagatagatgtatatctcagtgttagggtgtttcatagatttatcttactaaccgtgtgcttatagaccttcaaaattcctgtcttccagattggcagtcttgttcataactacagactgcgtgagttgctagtcaaaagtagttaatacctagtgtt

SEQ ID NO: 26981 - DNA, 1047 bp, Homo sapiens
agatctgagcgtcccccgcggcggccgccgggctccccctcccgtcctcccacctccctcccccggcatctctcactctccggctctcctccctccctcctcccccctccaccctctgggccggatctcgtctcgctcaggcggaggaggagaaggaggaggaggaggacgacgttcggcctgcgcagtgagatgtttgtccgtcgccgccgccgccgccatcgcggaggagcgcgataaagggagccgagccggacgtgagggggaccccgcggagccgccgcgccagcgcagccccccagccgcatcggagtcgccagagtccgagccgccgccgccgccgccgccgcccccgccgccgccgcggctgcccaggggccggccagctccccagccctgcccgggggtcgcgccgccgccgcccccagcgtcgcccctagcctgcctgcccgccttaaatgtgacaccggcgtcgcggagcgcgacctgaagccgccgccggggaggggacgagcaccatgtcgaatctgagcaaaggcacgggcagccggaaggacaccaagatgcggatccgggcctttccggtgagtctctcctcggcgtccgggaccccggggccgggggccgggccgagagccgcacgcgaggcccgggctgaagtcccccaacaggccgcaggcccggcctcccctcccccacgcccgccggccgcggggcgcgagccttcccggcaaccgggcggcgcggggccccggcgcggccgccctcccgggccgttccccgcgccgggagcccgggcctggcgccgcgcccccgtccgggagctgctccttcagccgctccgcgggcgtcggctgcggccggggcccctcggccgccccacgcctccccacgttgccggggttgtaggcccagtctccggcgctgctagcagccgcggagtcctccctgtgtggggcgtgtgtggaacttttcacgtggggtttcgctacactttgaaaatttacccagcctagcttttagggtgatgaaggggctgccctctct

SEQ ID NO: 26982 - DNA, 1067 bp, Homo sapiens
tattgctaaaaagaaatttgattcaaaagtcagttattgtttgtttgtttgaatggaagacttatgtagggtctttttttaaatggcaattaaaggtgatttggaattactgggaggatagtgaataattctagatgaaataaaacttgactagtatcacagaaaccaagagagaaaggccagaatacgtagatacctgggccattggcaatgggatgcactcaccatgacctaatattttggaatgtagctagtcaaggagagaactatttctgtgtctgtgttgcttttggaaagcagatggcatcttttaaaaaatagccttgaaattcaagctccctggattgctcgtttcattttcacgttggcattcaaagggggtaaccaccaggatctgagatgtggcatgcatgaatggcagtttttgtggattttgttgtagtatttttgtcataaatgtggacagtagtcttccaagacagccttaatgcaggactgtgagaatcttgtgtaattcaagactgtagaaagcacaacatggtataaaaagaaaaaccccaaaaatgtagtaatttgaataaaaagaaaccaaaaataggatggtatgggaagtgtttagggaatggtgaattcaaactaagatgcccctccagcagtacaaggccttcagcaatgcattttcttcagtttcttttttcctgaaaccaacagtcttccctttcttgccgttggaggtactgtatcatcatttttccccctttatctttctattcagaaagttactgtacattctttgttgtaaaagcatttaaaggaagatgatgatataaatgttcccaaatgagttttctcttctggatgatcgcaagagtattatacttttttgtaagaataacaaatgcacgcctgttaacgctctggcagaccacttgttaggtaagagttttacctgattccttccattggaaaggtgttttatatttgtaggcttgtcactttgagctgattttgttcttatgatcagcctcttttggatttttattcctgatttacaatgaaatatgtat

SEQ ID NO: 26983 - DNA, 1026 bp, Homo sapiens
agtgtatcaaccaccctgcctctccttttagttcagaaaatttaccccttcatgaaggatgatggaagcagtaacaccacctgtccttgcttcagttactggttttatggcactccttcctactaaaaattgtgagctatttgagagtaggctcactcttcatttcatgactccattatccaagttggtgctcacaaaacgcttgacacattgaaaacatatttatcaacagttcagggaagagtcttggatcaagggagaggatggctttagaaaagtttcaaacaagaacaataatgtggatattttttgagtatctcaaaccatttcatttgtccaatatttaaaaaattcagatttaacaatatcagatatattaaaaagtccatcaaaattacaagactgtaatctggtatgactgaatataaaaacttggataaaattaattgcaacttcctatgtatcttaaatcttggacacttcctcccttcccccaaaccattcttttgaagattgacaggaactttgctttgttttgacaagatttatttttgtgcttccaacagtagctcatcaacttttattctactagtatagttcttctgatgttaattgtagcttactgatctaggtcatagcatagcatttttactgacgtttcagatatcaaaagcaatgagaaaattatttgaaaaataagcattatatcacagctacctctattttaatttaatttaatttaatttaattaatttgtttatttgacatggaatatcatgctgttgcccaggctggagtacaatggtgtgatcttagctcactgcaacctctgcttcccaggttcaagcgattctcctgcctcagcctcccaagtagctgggattacaggcacctgccaccatgcccagctaattttttgtatttttagtagagatggggtttcaccatgttggccaggctggtcttgaactcctgatctcgtgtttcgcccgcctcggcctcccaaagtgctgggattacaggcat

SEQ ID NO: 26984 - DNA, 1055 bp, Homo sapiens
ccttccttatcttaaactatcttaatagtttctgggagcccttaagggtgatcttatcaagttgttctctgtacttttgttctgtgatttcataatactagggcaacataaacagcagcgggaagcattgatttctattcatcctgccctaaaaagatcaggagtaagagctttttagaaatatgtatttagagagaagtacctatctattttgtgatctctcaagaaagtaattatgggtgacgttctccttttgttcatgtaccaggatttgtgaaatattattcacacaccgacccaccatcccacgggcctggcctctcttgtacaggatatgcaggaaactctgtatgtgtctgggacccattattaagagttatgggagttcatcctaggatgtctgccttatagttatctcttcttgcactgagacattacagatatcatttgggggctactatatatcttctgtaaaattacttttatttgttgagaagaatgcatactaagtcaggaacatgccttaatttgttttgttttgcattgagtagaagggctaaactgtataccctccacttttagggttatttgctgtgtgcctttaagttcaaaagtagacaccacagtaaatgctgaaagttggctttaggtcttctgtggctaatgccgtattaaaaatgaaaaacatttgtaataggaaattagcctgcccttcgttctgttgatcctgttttctggtggtcataattgtgggtagaagagagtacagtttgcaaataatgtgatgagttggcaatgcagaagtttccagcatttggaaacactttactctgacaaactgattatcttgtgaattttatctatgctccacagaatgagcttttaaaagcactgatttttcttaatttgtgtccattcataagaaattaatctgtgccctggtttcctattgacaggtatttatttatcatgtgttcatagtcttcttaattctgtttccaatatttgatccatataattctctattttatagaacaagaaaaaggtatatgaac

SEQ ID NO: 26985 - DNA, 1041 bp, Homo sapiens
tctcttatgttctaactgatgttaaaccatcataaaacctagacaaggccctgcatcctattcagtattttcccaaactgctatacatcatcatcaaagtcttggccatttctgcagttcacttttcaaggtcatgaagggacggtcagcctggtggctgtgggatcacccttaagaggctgtgatgaagacctcagggacggtgtgtgtgttctcaccctctccaagtggccaaatcgcctggtttcctgagttcacttcatcttatcatatagccattagtacactgatgtagaaaacagggctctttcttaaaagaaaaaaaatgggaagtggtgttgggaaaggggacataggactcttcagaatagaagtgtgaaacaatgcaccatgtagctcgttaggcgcatggatccaaagagcctgagacacaatcccatctccagagagtccctggccagggatgcaaactcctgtaccaggttagtagtgagtagaaacgaatgaggagggctgggtgaggtctgtagcaaaatggagctttggctaaaagctgcagcgcagctccagccaattatagtctacagaaatgtgggcctacactctacactctcttcgttcaaaatatcaacttgtaaaatccttacaggtcaaaacacacgagcaggcctgattcagtccacaggctaccactttgtcgtctctggttgacagtgtagatggggagagcctgccagtcttgcagaaccaagggtagaacacaaaaaataccttttggtttcaatgtctaacttcaccttttgctcttggcaattagaaacagctcctggccttctgcaatagttcagccccttagaggtgccgaaggatacagaccctgctcacgttctctagaactgttgatttcccatctgccaacaagaatgctagaacaaggccttccttccatttccctctcttctcgaagaggagagccaaacttgtagatgtggatcccaagcctttggctttctcagaatggaactgataatatgctggaac

SEQ ID NO: 26986 - DNA, 1043 bp, Homo sapiens
gccaaggcggttcacatttaagatatttcgttttaaatgtaatgagaaactgcaaaaatgtctcctaattatactttactgagtctcacaaaaagtaattgttgtcttaattttaaaatgcacataccatttgtttattctcatgtaccattatctttggcaggcccaccaggggacccagggttccctggccgctatggagaaacaggggatgttggaccacctggtcccccaggtctcttgggcagaccaggggaagcctgtgcaggtacggatgccctgatgtgccctggcttttacaggtcagatttcctgcatcatcatcagcaccagtagctttcaactgtagctgatattggaatcaccttaggattgtgtaaaataataccgatgcctgtgcacaccccagaccaagaatgttagactcttgggagatgggcctggggatctgatactgtagaagcgctcctgtgtctgtaacatatagccaaggttaagaaccactgaactcaaaccaattaatcacttacttgggaggaatacaggtttctcagctgcaccccagaacattcaatcaatatcataggggtgttgtaaggaatatgtatgtataacaacaggcctcccacaaagttatcgcatgcagataaggcttggaaaccactgctaggattagtgtttccccatgttttcccaccctgctggaaggctctccctgttgacatctacttgtaaaatttagtacattcacctaatcccttgcttaaatctcctgcatgaaaggtggaagtaaaaattatgattaaaaaaactttcattcataattactttaaaaaagtcttcttccctcgcgtcaaaaacaaaaataagaaaatgatgggccacagtggcatttggtaaaaagcctgggaaagagtcctgttggcataaggactttgaactccttcaggtgctgcgctggttaatattcctagtaagattaggaattgaagtttagagggtatttgcagtctgtgaacccaggagaactgattaaacctgtg

SEQ ID NO: 26987 - DNA, 1104 bp, Homo sapiens
atattcttctaaaaattccacctatcaaaagcattagtagttttagtaatgatatattggggaatttactttgttaccctcaatacgggaagcattttatgtatattatctattcaatggaagaatagtttgaggtaggtaatattacaatctccatttcacagagaagaaaaatgaggtttcaaggaagtaaggaaatgaggactgagagaggttttaaggaacttgccccaagtgacagagccagtaagggcctggtttgcaaacatgggtgacctatgtatagcctgttcttaactatgacaaaaagaaagatcatactaagtgtagaataatagtaatacccagaaaagcacaaaatatttattttctaattaatggtgagaatttatgattgtggcaaaattcattcaagaaacattcttttcttcagtagaaaaacatctatcatggcataaataaaaattttggctattattttacagttttaaaatattattgaaaataaatagaaataatctaatctaaccagagtgagatggcttaatacatcacagtacattcttgtgatagattatttattggcactaaaaatcaggattgttacgtgaggccaggagtttgagaccagcctggccaacatggcgaaatcccatctctactgaaaatacaaaaattagctgggcacgatggtgcattatctgtaatcccaggtactcaggaggctgaggcacaagaatcacttgagcccgggaggcagaggttgcagtcagctgagattgcgccattgtgccccagcctgagtgacagagaacactctgtctcaaaaaaaaaaaaaaaaaaaaatcaggatcctgaagagattttagtataatagaaaaaggctcacaaaatattgtaagaaaaatataaaattatttaaaaatttaataaaatatgctgtatattttaaatcatgtttatatatttattatagtattctgattatattttcataaacataaaacaaattgtttattcacctatatacacatatatgtacatatatacacatatgtacacacaccaccaaaaattatatcaaagttttaataggccgggtgc

SEQ ID NO: 26988 - DNA, 1076 bp, Homo sapiens
aacctattcctggattgcgtttaaaaatcttgttttattttctaaatgctcaatttgtttttaatttttgcatgcccctgagatggtgaagtggcaatagttgaaatagttctatagtatggtgggtttgtttcagtgcggggtcttccagaacatgttgcaaatgattgctatttacaaaaatctcgtgtatgtctttgaagaacctagactgaaatcctggaaggtaaacactgagtgattttttttctgatgggactggttaaagaatgtctcctccaggctatgatatctcagaatggccccattaaacaagcaagacaggtggccatggagcctatgttttttgagcaatgcccttcatggaatcaataacaaatataaaggcttccaaagtaaaaatataggtgcctgttataaagagatgaattcaagtgagaattgtaacctaactcctctgactgaaatggcagttctctcaggtcaaacttttcccaatttcagtttatctgttgtccttgaatatacatttaaaaagaagaaacaaagaaaaagaaaaaaaaaacagccagcatgtatttcaacagtgcccttttcctcactgagtaaaattaagttgaatcctaagtgcacatgtggttatttattgcaggaagcatttgctagttttttttttcagactaccaagtgtgacatgctaagtaattgtctctgataatattggcataagtttttgcttgggatgattggtagcaatttaaagatagacacacaatgatgttttccaattagctgatgaagtcttttgggatggccaatcctaattcctctctgaagggtgactcagctttgcattattattttttgatgctttgtatacccactttctgtactgtattttctatgctagtgatcacaaagtactttcatgtacattactcagatgctcctgaaaagaacctcataggtgagcatagcagttatttcagagacgaggaaactcatcctgagagaggttacatcacttggccatggtagcacagctagggcatgattgatgagactagaagcctctg

SEQ ID NO: 26989 - DNA, 1030 bp, Homo sapiens
gagccactgcacccattggtcaatattttttgagccccagttccacttgaaagaaaatgatctttaagtgatttttatttctcgtcttactacaaaatgttttgctgtgggaaatactgaaaaaataacaagaagaaaaaattaaattccacaaatgtagcacctagaaatgtagcgccttaattgaaaatgtaaaaaatgaaatagagtatagaatagaaaaatatcagcgtatattggaggtactatgggtaagtattactttgtggaacttttatttcagttacaaatatacgtatatatttgcttccatagagttgagctaaaaatacaaataaaatatatgtgtatgtataattaattagttacagtgtcaactgtacttctgactatatgttgtggtaaaacccacttttggccaggcatgggggctcacacctgtaatcctagcactttgggaggctgtggcaggcggatcacctgaggtcagaagtttgagaccagcctggccaacacagtgaaatcccgtctctactaaaagtacaaaaattagcctggcatggtggtgggtgcctgtaatcccagctactcacgaggctgaggcaggagaatcacttaaacccaggaggcagaggttgcagtgagccaagatggtgccactgcacttcagcctgggtgacagagcaaggctccatctcaaaaataaaataatccccccaacttttttttttttttttttttttgatacagagtcttgctctgttgccaggctggagtacagtggtgcgatctcactgcaacctccgcctcccaggttaaagcgattctcctgcctcagcctcctaagtagctgggcctacaggtgtgcaccaccacgcccagctaatttttgtatttttagtagagctggggttcaccatgttggccaggatggtcttgatctcttgatctcatgatccactcccctcgccctcccacagtgctgggattacaggcgtgagccaccgccccagggcctaaaacccccttt

SEQ ID NO: 26990 - DNA, 1055 bp, Homo sapiens
aagattatgagtagagaatgtgatacttttttttttttttttcaaagtccatttagaacagacagcccaggaaagatgagcaactttttacattgccaatactttcacaggctccggctctaatttaaattatgtttttaggttttttatgatgatttaaaaaaaaaaaactcagtagtactgcttatttcaattctgaattttgtacacattggtaaaaactgacatttcaatactaaactctttcctgctacttataaagtttttttatgaaggtttctattttactgctatgttgtgtttcagaaagatggctgggctctgaattcagacaactgaggctcttatttgaatttgaccttgggtaagtcaagtaactttcactgggtattttttatctgtaaaattatggaagcagaccgattaagtcccctttgggttctaaaattctaagtttctaacctctattgcagttcttagattatctttttcagatcaactcgattgaagagtgtgcattagatcctattctaatcaagttgaacaaaataaagtaattgttaactacacagttttaatgccaaaataaaagtgcaggtttcttttgaaatatatattgagttgcatacttgtgtcactattaataccagatattaaaacaactcaggaaataaatgttatttttgttttatttcttgatcttttaaatccatcttaatgttaagtactagtgggttttcttggtttccaccaacttgttcaatgaccatttgtcaagttaggatgtgagactgggtaggactgggatgttactaaccactgccattggtcagattctttataccccaaaacgtagaggtgtacagattcttggagctggaaggacgtccattaaaaaggcaatacagccatctatttaaaaaataatacagttgatatatttcacctaaaattacatagtttgttatgctaacaatggagtgagatatataaccttaagtaatcctaatgctggaaagatatttaaggtactgcttatcagaccccttcatacc

SEQ ID NO: 26991 - DNA, 1067 bp, Homo sapiens
aaatataaatgtacccagggaaatttcatgaaactgcagccctgagaattgcactgatatttggcaaagacgatttttttcttccccaacttgaattttctgaacttgccatggccacaagataaattagtaattactcttgcatctgatttccttaatgtatgccagggtgctgttgatatttgtagcaatacagctacctcttaaccttttctgagttacctgtttaaggaaataagtgttaacaattgagttgatcttgttcttttgcatttcaagaaatgccacctgtttattaaagtgtaatatgggtagagcatagtttcctgacagttgtactttctttgtagcgtactgtgaaccgagaggagctgctgaaacaggcggagtctgtgatgcaggacctcggcagctcacgggccatgttagaaatccagtatgaaaatgaggtgagcttggagtctggtgatggttatttagcttgacttgtgctcttaattaaatgttatttgagtttcttggtactatgaaattctgaaagacagttgggagactttgctctcttttctcttgaatgatttgttctaagttctccatttttcaaaggttcaactaaataataaaaggcagtttttttcctggcgtaagaacacatttgtgttgttagtctttaagttgataaattgaaaggatattttaaacagctgataactttcaaaatgtttgaattgccttttttaaaaaatcaggtttactgagatataaataataactgcatacttcaaaaatgtagttttgtagttttaagggttgacagatgcaatttgttaccactttcacgtcaagataaagaatactctgatcaccacaaaaagtgcccccatttcactttgcaaaatcagtcattctatcccctaccccatcctcagcccttgataaacattgatgtgttttctgtccctgtaattttgtcttttttacaatatcataaatggagtcatgcagtatgtagcctttgtcattcttctttcacttagcataatgcttttgagattcatccatgttgc

SEQ ID NO: 26992 - DNA, 1035 bp, Homo sapiens
agaccaagaaagaatcttgtcttctctcactgaaacttttttcattctaaattaggagttcaaactatctcctgcctttaaaaattgatcccttatgtaatagttggaattaatcagatccatttcattcccttaacaagtcactccaattagaagagcctgaaacaaaatcctttatatgttttgagtctcttataccagttagctccagtattgctaacttaatctgtgtttctaatcttggctccacatttgtggctctgaaccacggggccctgagccatttccagtggagaccgattctacagttctcaccagcactgtttttacttaggtcttttctgttcatttacctgtttttttccgctagggatttaagtttcttttcctaaagcctttatctccaaaagtttcataagagacattagtaataaaataaaggagttagatggatggcagggagtgaagtgtatactgaaaagcaaaacaaaacataaagcaaacattgtagttaaaaaaatcttcttgggcccggtgtgtggtggctcctgcctgtaatcccagcactttgggaggccgaggcgggcggatcatgaggtcaggagatcgagaccatcctggccaacatggtgaaaccccatctctactaaaaatacaaaaaaaaaaaaaaaaaaaaaaaaaattatctgggcgtggtggcgcatgcctgtaatcccagctacttgggaggctgaggcaagagaatcacttaaaccagggagttggaggttgcggtgagctgagattgcgccactgcattccagcctggcaacagagcgagacgccacctaaaaaaaaaaaaaaaaaaaaagtcatcctattcgtatctttattaggattccataagcactgatattggcataaattagaaatctagcaggaccttttaaaatctcatttgcaggtgtttgtagtagtgcttgtaggatcttggcagatcagagccagtaggtttccagctcacctgtttgacctgtcacctccatatctatttct

SEQ ID NO: 26993 - DNA, 1027 bp, Homo sapiens
aatattttgaccggaggcctagaaaataggaaatttgtttggtttttatttatttatttatttatttatttattttgggacagagtcttactttgttgcccaagccaaattacactagtgtgaacatggctcactgcagccttgacctcctggctgaagagatctttctgcctcagcctgccacgtagctggggccacaggcatgtgccaccatgttccattaatttttttattttttgtagagacggggtctcactttgttgcccaggctggtctcaaactcttgggcccaagtgatcctcctgccttggcctcccaaagtgctgggatttctgagccaccacactcagcctagtttggtttttaaatccacattttgacgttttaaaaacatttaaaaaactttgtttgaattaaaaaccatatgcatttttgagtgataaagcaatcacatcatggactagggtttcttttctgctttgaaatttaatgtagtgtgtggtattcagttttgatcgttatgatttcctggaggagttcatgaaataagggggcattttgacctgtgcttgagaaaatcatgaagctttttgtgtccaaatttatataaaatatgtttgcatatgtatatattcataaaatggaatattctccacatccctatttgtgtgctttatgtgcaggagggtccaatcttttggcttccctgggctatattggaagatgaattgtcttgggccacataaaatacaccaacactaatgttagttgatgagcttaaaaaaaaaaaacactcattgtattttaagaaagtttacgaatttatgttggcctatatacaaagccatctgggctgcatgtggcctgtgggccgcaggttggacaagcttgctttgtggaatcatacagataatcacagtttaagtttgtatctgactcctgccagagcttttctgaaatgagcaattaaacatcatgaccaggtttcaactgcagtagctattaaaccgcttcgttcaaaactatt

SEQ ID NO: 26994 - DNA, 1027 bp, Homo sapiens
gtatttttagtagagatggggtttcaccatgttagccaggatggtcttgatctcctgacctcgtgatctgcccgcctcggcctcccaaagtgctgggattacaggcgtgagccaccgcgcccggcctgacagtattttattactccctgtttctgccattttagtttgctttttcagtgagtgaagatataaaacagtggtaattgctaaacttatctcatattttcccatggacagtcgattaagtgatgttctaaagagaaaacgactgccaaaacgagggccaagaaggccaaagtactcacctccaagagatgatgacaaagtagacaatcaaggtaacccctttgatgaaactatggggaggtaaaggggagggtggtagcaggtgcagaaatgtactttattaaaactgccagtagctcttgaagtatgcctaagtttcctgaggactaagtgttcttagttctttcagttaattaatctgttaagactgtgaatcttaaaaatcagttgtttttcatcacttaaactaaaatgacttaactgtagttcttttttcttttcatagctaaaagccccaccactactcagtcacctaaatcttctttcctggcaagcttgaatccaaaaacatggggaaggttaagtacacagtccaacagcaacaacattgagccagcacggactgcgggaggtagtggccttgccagggctgcctcaaaggataccatctccaataataggtgaagtggggggagttttatgtttcttctattcccatatcagaaaaacttaaacattatttcagccagtacgtttattgtgtggagacgatacatagacacagcactttaatttgttcttaaaagcatagttcaagaattaggtagtttctcagtttatgaaccctgcatctggctttgtcctaagttccagtcatgtgctttgaaactccttccagcatacctagctgaaagtcttatacgttcaaaaccacattgtattccttggggaacctcttcct

SEQ ID NO: 26995 - DNA, 1048 bp, Homo sapiens
aacacggtgaaaccctatctctactaaaaatacaaaaaactagccgagcgtggtggtgggcgcctgtagtcccagctactcaggaggctgaggcagaggaatggcgtgaacccgggaagcggagcttgcagtgagctgagatcctgccaccacactccagcctgggtgacagagtgagactctgtctgaataaataaataaattaattaaataaaataaagggccagatagtaaataatataagtgttgcaggttatatatagtctatactcaccaccattgccattgtagccctcaattagccatatacaatatgtgaacaaatgtacatggctgcgttctaataaaattatatttacaaaaaccggtggtggactggattcggcttacagaccgtactttgtcaaccccttgtatataacttactgcttatcagttatcttttccttacactttatgtcactaagcaaagtggtagaattaccttctttatccattttacaaagcttttagtgaaatatggtgcatttctagaactcagtttcttaccactggtttggttggttaggattggatttccctattgtttcattgaatgtatatcagtaaaataaagaggtacagtgcggtgatgaattgttactttcagctggccccaatgggtcactagttttctagacagctgaattttgtctgtcttaatgttgcctttagcatctttgtaaatcctagttgatcatatcatagaagttcatgtgttctataatgaaaaagttttcatagcatttcaagaattacactggcttgagtattttatattgtttattgtgtttctgaagtctgtcacttcaggattgcacatatatttttttttaatgtaataggtggatattcagagtcaaagaaggatgatgctcgagcacagcttatgaaagaggatccggaactggctaagtcttttattaagacattatttggtgttctttatgaagtgtatagttcctcagcaggacctgcggtcagacataagtgccttagagcaattctt

SEQ ID NO: 26996 - DNA, 1052 bp, Homo sapiens
aatcccaggcattatatacagtcatgtgctgcatgatgatgtttcattcaacaacagttcacacacactacattagtcccacaagattataatggagctgaaaaatgctcatcatctagctaatatacagtacagatttttaaaccatacttttatcatttagagccaggggagtccagtctttttgcttccctgggccacattggaagaagaagaattgtcttgggccacacataaaatacggtaaccctaactataataacactaatgatagctgttgagcttaaaaaaaaatcttacaatattttaagaaactttacgaatttttgttgggctgcattcaaagccatcctgggccatgcattgaacaagcttgatttagaatgtattccttctatatactaaagaagaacattaactgtaaccctcagtagtaggtattccagaagaaggcattgttgtcataggagatgacagcttcatgcctgtcatcacccctgaagaccttccagtgggacataagatgtggaggtagaacgtaatgataccgatgatcttcatcccgtgcaggcctaggttaatgttcgtgtttgtgtctgagtgttttaaaagacagtttaataaccaaaaaaataataataataataattttcaaaataggaaaaagcttatactctatggatataaagaaagaaaatgtttttgtacagctgttcattgtgtttgtgttttaagctagttaatactacaaaatagttaacaaaagtttatgaagtaaaaaagttacaggaaactaaagttaatttcttttttctttttcttttttttttttgagacggagttttgctctgtctcccaggctggagtgcagtggcgcagtctcagctcactgcaacctactcctcccaggttcaagcgattctcctgcttcagcctccccagtagctgggactacaggcacgtgccaccacgtctggctaattttttgtatttttagtagagacagggtttcactgtgttagctaggatgttctcgatctcctgaccttgtg

SEQ ID NO: 26997 - DNA, 1046 bp, Homo sapiens
aagtgctgggattacaggcgtgagcctctgcacctggtctgctatgcattcgtagatttggacataatcagaactgtacagacctttatagtgttgataaagtcttgcaaatgctagtggtactaaagtaaggaatgaactatttttctttatgcttgtaaaataatgtcagcttcattttgcattgggtagctttatagtttcggaagaaatgatcagggttagatcacataaagaaagtggtccaattttgttaactttgcatcaattggttaaagtataaaaatttgtcactccatgtagaatgtttgcattctgatttagacaacatctctccagtattttcacttgtgtgtattggaaactgtcttacacagtactgtgaagataggctaagactaaacgggaaatatctgttgaaaatctggcattggattttatctactgatagtcacatttttatatttgactctgggaacaaatctggcctatgcctaaggaggtttgaagccttgacgaaagaactgtagctgactgctgttgattaattacattttcgtatctgcatgaccttacagaacagctatctctatactactacttaaattagccagaggcttggctggtttaagtcttctaattttgtaaaacatacaaaactagtagtttttttgttttttttttgttttgttttggtaaaaccaaactaattttgtaaaacatatacaaaaatagtttttatatatgttttacaaaattagataactcataactcatatctaaactcccactttagataacctaaactacttcataaaagggaacaaaagcttaatacttgctatcagaggtatggcaaaagaatccttttcttcacaattagtttccaatttctgtcaaaaccagcaccctaccctctactgataatcagacttctggcagtagctcacacctgtaactccaacattcagaggccgaggcaggtggatcacttgagttcaggagtctgagatcagcctgggcaacatggtgaaaccctgtctcta

SEQ ID NO: 26998 - DNA, 1046 bp, Homo sapiens
gtacactacattgcagtccagccatagtattaagcactttacatatattcttatttaatattccaaacaacctgctgaggtatgagtgttattattaccattttttaagtgaggaaaaacggagacaaacattgcttatgcttgctcagggttacaagctgtgatgtgtgacttcccaaagccaggcatatttgtaacagcattgttgtctaatgcagttacaagagtttatataatttatacgaatatataattgaaggctggaatgggaacggggttcaaaattttgttcccctatttatttacctaagaggataaaagcatacaggaatcaggctcatccgactgcctttctaaacagttccaggcattacactgtcatttatgtttcaaattacagtgtggtacaggtgtttcccaagctgtgtattgtagctggtgataaaaaatacatgtggcatgtgcacttgtattagaaaactgacttcattacattttggaggatagatctcttatgaattataggaatttctctgctgactcatgaaagtatttatggggaaataagctaattatttagcagctttacgttaagttcttcatgataatgtgctttagtttctgcatgtgtaaaatgggaatgtagaagaaaatacctaaattagtatggtgtataggtttgtggacttagagctctttttgacaagtaaacgttttcggatagtacttgtatagtcgatataagactccattggaaacatttatttggaaataatgttgttattattttaaaaagcccaaccacattagctcttcatgtaagaaatgctagcctttgaagttgaaagtgtagtgtttgccacgctttcccacgagtcagaggcagactcctgtgcattctttttttttttcttctttgaggaaaagtttctctctgttgcccaggttggagtgctgtgttgcaatctcagctcactgcagcctctgcctcctgggttcaagtgattctcttgcctcagcctcctaagtagttgggactacaagtg

SEQ ID NO: 26999 - DNA, 1031 bp, Homo sapiens
taagtcatgccacttttttcttttttttttttttgagatggagtctcactctgtcgcccaggctggagtgcaatggcacaatctcggctcactgcaaactctgcctcccgggttcacgccattctcctgcctcggcctcccgagtagctgggactataggcgcccgccaccatgcccagctaattttttttgtatttttagtagagatgggttttcaccatgttaaccgggatggtctcggtctcctgacctcgtgatccacctgcctcggcctcccaaagtgctgggattacaagcgtgagccaccgtgcccggccagtcatgccacttttaatgaggaggacacgttctgagatatgtgtcattaggtgattttgccatgcaaacatcatggagaacacttaaaacaaacctagatagtatagcttactacacatctaggccgtgtggtagcctgttgctcctagccacaaacctgtaaaacacgttaccttacagaatactgtagacagttgtaacaccatggcaagcatttatgcatctaaacatatctaaacatagaaaaggtacagtaaaaatagggtattaataatcttgcaggaccacggtcatatacgtggttcgtccttgacagaaacaacattatgcagcacatgactgtagcttgttccctctagtaaatgcatcaacactagtaatgcaggggggaatgattttagcttacgttttcccactcaggttagcagaaaggtctttccacttcttttggttcttatctctactcttggcggtgttacaatagcgacataagtaaacagtacaacttggtgcctataagtcataagaaatatagctttgccaccttaaatcttttcaacctgtttttaaattttttagattgtttaaaatatctggatttagtacacctgtttgcttttgaggttgcatagcaacttttctgaggatttctgaagaaacttcttagttttccagagtttttgtcctattttgggccaaattttgaatcttaa

SEQ ID NO: 27000 - DNA, 1048 bp, Homo sapiens
tctgaaaatgtttgctcttttacattcaggttattctttggagcagccacactcaacttcatgtgactgattttaaaatattattcctcctgtaataaaagtgttacatgttcattttagattattttgaatatatagaaaactaaaaagaaaaacataattccacacttataacgtgtgctgttgacattggttactattgacatttcttctgtcttttaaaaaactgcgtgtagatgtacattatgtatgtgcatgtaagtaacttgtacctttagaacaactgcggttttatgcatattaatcctcaggttgcattgggactcttgcatgtgaactgacaatcattgtgggctatcaacagcgcattgcttctaaaatccacagtgtttcagcatggtcattttttctatatatcagtgttatgtagattaaaaaattttttttaatttattttttgagacggagtcttactctgtcactcaggccggagtgcagtgctgtgatctctgctcactgcagcctctgccctctgggttcaagtgattctcctgcctcagcctcccaagtagtagctgggattacaggcgcctgccaccttgcccggctaatttttgtgtttttagtagagacgaggtttcaccatcttggccaggctggtcttgaactcctgatccaaccgccttggcctcccaaagtgctgggattacaggcatgagccacagcgcccagcctaaaaaattttgtaaattgtattatgtttttattttatttttagagacagagtctaactctatttttctggctgtagtgcagtgatggaatcatagctcactgcatcgcaagtagttgagaagacaggcgcctgccagtatgcccagctgtgtatttaacttgatgcaaaagtaattgtgatttttgcagttttttttaatagcaaaaatcacaattacttttgcaccaacctagtatcatgtattttaaaaaaatgagtaaggccgagcatggtggctcatgactataatctcagtacttgaggtggctgagg

SEQ ID NO: 27001 - DNA, 1054 bp, Homo sapiens
catttttggcatgtggactaaaagttgctgtctgtgtgcttttgagacctgaagaatatcctctgttacatgaatgcagttagtattctaatggattatacaagccatctgagctaagacaggatttatattagggaatgagtggctctgtattttagaaatagcttagcaatagctattcaggataattgatcatcttacagtgttctacaaaatagatttttggtctattttggacctccttgtgaagggttacctcctttcttctttgcttttctcacacctgttaatcacagattcaacaagttaggcacgtacttccttacttggagttgtcatcttctcatgcctcagagattgatatgctcttctgatccaaagcttatgctcttaatttttttccccctgcgggatcctgttagtagactgtcctttattcccaaccttttctttcagtaattcttttctttacctaaatacatatgctcaaaatttatttttttaaaaacgacaaacagggaaattacatatatccatgcaaacacagcctttgtctctctgccttcccttctctcctggctattgtctcttctctttataaagtctagcacttccagaagagagttggtatttattatcttaccttataccctctccttccccaccatttctagaaatagctctcaacattttcttttgttttttttttggaggcaaagtctcgctctgtcccccaggctggagagcagtggcgcaatcttggctcgctgcaacctccgcatcctgggctcaagcagtccttccacctcagcctcctgagcagctgggactacaggcgcgctaccacgccctcgctaatttttgtattttgtgtagagatggggttttgccatgttgcccaggctgctctcgccattttctaaatctgatggacatttttgagttttttgaactctgcctatctgtcttcctcttggtgtctgccaacaccactatcctgatttattttcccagtgcttgtggtaagttcttgattttccttgactggattctt

SEQ ID NO: 27002 - DNA, 1068 bp, Homo sapiens
gtggccatcattagtgaacattggtttattatacttagccttaaggccctcattggctattggatactcctaaatggcctgctttttatagaacttaattgctttgtgcagtgcatgtgttctctccttgctctgattggtgggcgtcttggtgtttaggcactgtgagctacaccctcctcccccagcttttaatatgcattgagttgcaaaactactttctagacttgtgtaccttaagttcagggtaaaggcttgcattatgtggctttaagacagtgataattttggtagctcaaaggtatttttaaaagtatattcgttattctcagcactttgttacctgaagggatcaataatgcttttgttatttttgaagatggtttaaaccttttgtgtctgaaaactgttttaagagactgcagagaagacagtataataactgagggccttattctacaagtgagggtctgtggtgtgctgggtattcattattgtgtataacgttttgcccttgactctttcaaaatatatcttctctcttcctaaatgactttgtctttttgcctgctataacttagtaatgactcctattatctgcacttgcccacttgaagagtctttttaaatacactttttttttttttttttgagacggagttttgctcttgttgcccaggctggagtgcaatggcgcgatctcggctcaccgcaacgtctgcctcccaggttcaggcgattctcctgcctcaccctccctagcagctgggattataggcatgtgccaccacgctcagctaattttgtatttttagtagagacggggtttctccatgttggtcaggcaggtctcgaactccccacctcaggtgatccgcctgcctcagcttcctgaagtgctgggattacaggcatcagccagcgcacccggcctaaacacactttttattttaggtcagtttcagattcacagaaaagcttcagagatagagttctcctatactccacatccagtttctgtttgtgaaaattttaacattagtatggtacatttgacacaactaatga

SEQ ID NO: 27003 - DNA, 1046 bp, Homo sapiens
cttttaaaaagtacaaattaatattacatagtttaatcaaattaaatattctaataaaatattcgctttgcactctgcatagtagagttgttacccctttaattgtttttaaaattttattttgacacataatatgtatgtatttatggggcacttagtaatgtgtcaatacatacaatgtatagtagtcagaccagggtaattagcataccatcatcacagacacttattatttctttgtgttgggacattcaatatcttccctctagctatttgaaactgtatattaaactatagtcaccctgcagtggaatagaacaggagaacatactcttcctatctagcacagttttatatcctttaacagataccattacttttatacaagtatgtatacaggattttaaaaatgagaagttaggttgtatggtggctgaagagaaactaaaaacaatttttttcagtgttctgatagctatgatatttagctttctttagcagcttttatttctggtgtgttcttacagactttcctaattgcagtttggattaatttgattcttatgtagaaagcagagatgctagctatgcagatttatgactcagaattgtacctgtttgtagagtaaggaaggctgtattgtccaacattttgtggactttagaataaaaatattcgtgaagtctatctgttttactgctgtagcacaagagtgcctgtttttctgtaaaacagccacccagcttcatatattttttcctttatatgaagcatgtattttcatttcttcccacctagggaaagcagcttagtctcaagggaatttgaccctgctctctacccttccaccccaggtccaaatgcatttgtgcccttcccccagtagatggcaacaagtaggctgatgtttaagaagattcagtagtcttaactttgtgatcagacctatttactaattatttctcaactgtcattagtaatgttagtgttgattttcacattctggcctcaaaatcctttcagaaaactagactgttaattgcag

SEQ ID NO: 27004 - DNA, 1021 bp, Homo sapiens
tacgtggtgaggagataacggaaggggcagcttccaaacccttaagacaaatgttgtgtttttttgataatgctgttttactttgggggaggtttagcctaagcatcgagtctggtggtgggcatagtttaattgcttctttagttaattgggggagggaatgtgtttgtgtgtaaaggttgggccggtgcggggggaggcgggtacggttaatagcgcagtgaatccgttctaagtggacgtctaactgctctcctgctgtctcctttcctagtcgcggtcctcgatcttgcctgggctgccagatcacccgatctccgggctttactccgttttgtaggccctttagtgatgtgtttaactttatgttcctctcgagagtctcattaggtatttttggcatttcattttttaaagacctagcaagttgagtctcagagtctcctctttaaaaacaaaacaaaaaatacggggtagaaagttgaaagagctattgagtggggtaaaacgacgctcagaacaaaggtcctagttgtgttagaaaaaaaggcaagaggcctgtatatgaggcctgtgtgtgtcgcatttacaccccgggggggttgaggaatggaattagcagaggtttagagacaataaattgtagaggattttattgaggctgattttcatatttaccacatgcaaagtgatcaatattaagtgtaagttttaaagtatacagaatttctaattctttcttttgacacttcctgctgtgtgttcagccccagaaatgttgaactgctgtgactatctttgtgagattgagggagttttattttaagcttaagagtacataatatgattggggtttgtgggctttgtacatgtctgcctttctatgaatgtgccaatatccataagaattggaaaactgtaattaagattatcattgtttccattcaatccccagtttttctggagtgtgagcagtttttaagtctgttcagctgacatttatactacttagtttgagtct

SEQ ID NO: 27005 - DNA, 1033 bp, Homo sapiens
aaggtgccgtttccctaaacctgtgtgtttgtggggcgctcatgaggcccctctctcctggtaaaaacccaaacgacccaggagagaaagatgtgcgtggcctgccagcgcactccacagaatctgtgaagtcaactggacagcagggaagaacagaagagaaggatggtgggctcgggaacgaggagaccctctgcgacctgcaagcccaggagtgccccgatcaggccgggcacaggaagaacatgtgtgccctccggattctgaagactgtcagctggctcaccatgagagtcaggaagggcttcgaggactggtattcgggctactttgggacagcctctctatttacaaatcgaatgtttgtagcctttattttctgggctttgtttgcatacagcagctttgtcatccccttcattcacctcccagaaatcgtcaatttgtataacttatcggagcaaaacgacgttttccctctgacgtcaattatagcaatagttcacatctttggaaaagtgatcctgggcgtcatagccgacttgccttgcattagtgtttggaatgtcttcctgttggccaacttcacccttgtcctcagtatttttattctgccgttgatgcacacgtacgctggcctggcggtcatctgtgcgctgatagggttttccagtggttatttctccctaatgcccgtagtgactgaagacttggttggcattgaacacctggccaatgcctacggcatcatcatctgtgctaatggcatctctgcattgctgggaccaccttttgcaggtaaactctctgaggttttaagagctcagagtgcatgtacatatggtgcgttatgttataaagtcccagataaagaagaaggtttccatttgtgtacattttccttttatcttcccattcctgccctttactttctcatttatacattttagcaagttaaagcctattctttctttttttttttcaagacggagtctcgctctatcgccccagctggagtgcagtggtgcgctct

SEQ ID NO: 27006 - DNA, 1043 bp, Homo sapiens
gatcctacaacactggaggccagaccattgtctgtatcttacagaggaagaatatgcaacactcagagacattaagtaacttactgaaggttgaacagccagtaagtgtagaactggctttaaacctggtccatgggactccaaaattgtgtctactatgacactgcctgccattacatcaaatgagaactgaaaacatacttgaaatgaataatacaaatggtttttacgttctaatcattgtaagcacatttgggctacctgttaaatttagaaaggtccgtggttttttctttttttcttcttcttttttttttttttctgagatggagtctcgctctgtcgcccaggctggagtgcagtggcacgatctcggctcactgcaacctctgcctcctgggttccagcgattctcctgcctcagccccatgagtagcatgaattcatcaccatcctgcagaaggtcccaacttttaataaaacgtaatcacctcatttgtattgtaaaccacaaaatatctgagactggtctcaatcaatccggaagttaatttagccaagggtagggaggtgcccagaagaaataaacacagaatcacagaaacagtctgttacctgtgcctttctccaaagatgattttgaggacttcaacatttaaaggggaaaagggggctggaggagaaagggagggtacagtcatccacgtgttgcaagagaaaaggtgcagataggggaatcatcaattttgtattcatctcacactcagtaaatcagcacttttacataaaataaggtgaacatagagtagctacctgtggagctatataaccctttctctgtgactaactgcttaggaataaaaggaaaggcagttgcttgcatgactcagctttcagcttaatttttttcttttggcagagtgaattggggtgccaagtctgtattttcttttcacagtatctacagcagcctttgtgaggctagctctgaatcattcttgggggatgccctattgttgggggaatccacaggctacacaaga

SEQ ID NO: 27007 - DNA, 1013 bp, Homo sapiens
tgtgatggctgtaagatgaaacaggtttcatagaagcacttgctcctgggaaacagtaaggagtgttttcaaatctgtatggtgacaaagattaacctgaagatcagatgtgatactggagccactttgaccctgatggggaggtagagctgcacaaagaagatgaagatatttttccttttgatgttccatgaaattatttgttatatgtatttcagaaaaatcttggaaaatgtataccagtcatgaagatattgggtatgattttgaagatggccccaaagacaaaaagacactgaagccccacccaaacattgatggcggatgggcttggatgatggtgctctcctctttctttgtgcacatcctcatcatgggctcccagatggccctgggtgtcctcaacgtggaatggctggaagaattccaccagagccgcggcctgaccgcctgggtcagctccctcagcatgggcatcaccttgatagtgggtatgttcatgtgtgacctgtcgtaaaactgaatcgttatcaaatgacaattccccactgtaagtgatgttttatattgttgtaacattcgatattggatgttactagctactatttttcaattgtgataaaatatgcataacataaaatttaccattttaggccaggcacggtgactcacacctgtaatcccagcactttgggaggccaagttgggtggatcagttgaggtcggatgttcgagatcagcctggccaacatggcaaaaccctgtctctactaaaaatataaaaattagccaggtatggtggcatgtgcctgtaatcccagctactcgggaggctgaagcaggagaattgcttgaacctgggaggtggaggttgcagtgagctgagattgtgccattgcataccagcctgagagacaaagtgagactccctttcaaaaaaaaaaaataattttaccattttaagcattttgagtcccattaagtacgctcatattttttcacaaccatcacca

SEQ ID NO: 27008 - DNA, 1091 bp, Homo sapiens
tcactagaagggaggaaaatacccgtgtgtgtaattgatcaggaaatggaccctgctagctagactgcagaagaaacgcttcttaggaaggaatttccaaactcttccacatcatggtatttctggcaatcagaccctccactcccacctggaagtcacccatgggccctgctgtactgacagccatgtccttgctgcatgtaggcactacacgaatgcacattctgtcccacccctcaccactcagtcaggctttagggctggcttcagtccaagagaagaggcccgcagactcccctgctactccttccacctcacagaggaagtctctcttgacctggaaaggtagaaggccacaattaggatgaagaggttcagggtgaattcacagaggatgggggtagatccaagaatgggctttttcttacaggatcctcagtgaagtgcattcggaatgaggatggaacttggttaacaccaaatgaatttgaagtcgaaggaaaaggaaggaacgcaaagaactggaaacggaatatacgttgtgaaggaatgaccctaggagagctgctgaaggtattataatgacgggacagataggtgacaggtttaaatccttgaaggagaagtggagctttaagagcagaaatgtgaagagctcccgttaggattcaacagcatgatttataaggagttaaatgttcatagaaaaaaaactgtgggtgacaaagttaggagcacatattgttcctgatggtggagaactttaaatgcaagtaaaggagtacaggaactttaaatgccggcaaagggctttgaggtgaagagagatgtaagaacctaaaaagaaactagctgaagacagatgcctgcaaccactcccctgcatcctctacctgacatctactcaaggcccagctcatctggcccccctgcagcatttccaggctgcccagtccgtggtctgtctctccgctgcatgtccacagcacactattcctgtcctgagaacaactagtgtctatgatgacaggacccaacacaaggcctctctcagcaacactcaagaaattatcactaggatgaaatcctaa

SEQ ID NO: 27009 - DNA, 3636 bp, Homo sapiens
gtatgttctgtctattgaaatgtaagggttttattaacattaatgcactttcctgctttataaaagaaatattggtttgatttccttaggcgtgtaatcttggacagtttaacctgtaagtttgtgcctcagtaacccatctgtaccatggggataatgtactcatagggtgattttaaaagacaagctaatacttacaaagaagcaagaaatgtgcctatcttacaataaatactttgtaagtagtagcagttctttcagtgaggtgaggttactatgaaaaaattccaagtatttgtaaaactagtgggaagtaagagggaagctcgagttttgattgaaaagtggcataaaactaagggcatttattgtactcagatctgaagcaagttctgtgttgctgaggtaaaagcatttgtgttaatatggttttaaaaaccatgagttcttctccctccattgcaggattgcttatattgaatttaagacagaagctgatgcagagaaaacctttgaagaaaagcagggaacagagatcgatgggcgatctatttccctgtactatactggagagaaaggtcaaaatcaagactatagaggtggaaagaatagcacttggagtggtaagaaattaggcttgttacaaggtttcagaattggtggagggaactcctttgtgtctttgtatttcataagtttataaatactttttaatcaaagttactcaaatgtaggtgaagatcaaggacatgataccccaagtcatactcttatttggaatagtaatttccaatcttgaatgagagctctaaaatcattttgcattggaatacagtaggcaaatcaagcttcctttgtaggcatgttttatactttaaatgacttgaccatgtgcgttttgaactcagatgattctaggaaaacagaccagtcatcagcctatgtaagaacaaccagcaggacattgcaacacgtactaggtacttaatatgttgagtaacagaaatggatttagcttacgtcatgagtatttgtatattaactcaagcactgaaattcttaggaataagatattactgttgtgaccgaagctgggaaccactgtttcagagtcttaggaatgtggcatctctatttgcaggtgaatcaaaaactctggttttaagcaacctctcctacagtgcaacagaagaaactcttcaggaagtatttgagaaagcaacttttatcaaagtaccccagaaccaaaatggcaaatctaaagggtaagataatacctttgtatcatcagttataggctatatatgtcttagaggtctaaaggaacgtaaggtcatgtgatcctgtcagaaaagccaaataattttagctacgtaaatgagtgtaaaataaagatcatcatttaggtaccaacttgagagaaggggcttggcagcatcatgtgacagtgaaggagcatgtgcctggtaacttactctaagcattaactgttcatcctcaggtatgcatttatagagtttgcttcattcgaagacgctaaagaagctttaaattcctgtaataaaagggaaattgagggcagagcaatcaggctggagttgcaaggacccaggggatcacctaatgccagaagccgtaagttcacctggttagggtgctgtggttgggggtagcactctcggtgctttgtttattttttgcacaaattctgtgtttcctgttgctactgagtgaacaataactggatatgatgactgattacctgagaaataattgatgaaatctcaagaaaattcctctagatagtcaagttctgatccagctgtgtcaactcagagtagcaagtttgcccatgatttcctgccccatccactgggccccacctgcttgggttgcttctcccactttccatagaagatctggggcaggatatcaactatgcaatggcaattaaaaaatgtaaacccagaatagcctttactttaattaaggactagttggcttagttgcttttaactgctttttcactataacaagtattcttggctagtagtcatactaggcattgtgcaaattcagtgttacgaactgtgacttcacataaagtcacatttttttttccttcccagagccatccaaaactctgtttgtcaaaggcctgtctgaggataccactgaagagacattaaaggagtcatttgacggctccgttcgggcaaggatagttactgaccgggaaactgggtcctccaaagggtaagggaaggaagcgtgagtgctgcttccacttgaaggggtttttgttctgtgcagaccttgagtctaatgtgtcttctcattgagctcctttctgtctatcagtggcagtttatggattcgcacgagaagaagagagaattcacagaactagcattattttaccttctgtctttacagaggtatatttagctgtattgtgagacattctggggttcaagctgtcacaccagttagttttccatagagagctactctgtcactggtatcttttcccaaataaacaaggctactttctgtgggatggctccccagcatgtacagttaacttgggacatgtgtagtaggtgctttttataatgggcaatttcatttggtgttctaggtttggttttgtagacttcaacagtgaggaggatgccaaagctgccaaggaggccatggaagacggtgaaattgatggaaataaagttaccttggactgggccaaacctaagggtgaaggtggcttcgggggtcgtggtggaggcagaggcggctttggaggacgaggtggtggtagaggaggccgaggaggatttggtggcagaggccggggaggctttggaggtaaggcacgcagagataatgacaccacatagcatgtgctcttcagaccctgtgccctgtcacggttcctaatcactggggaggaggagctttgtacccattcttttaacagtgtcttgccttcctcctgtagggcgaggaggcttccgaggaggcagaggaggaggaggtgaccacaagccacaaggaaagaagacgaagtttgaatagcttctgtccctctgctttcccttttccatttgaaagaaaggactctggggtttttactgttacctgatcaatgacagagccttctgaggacattccaagacagtatacagtcctgtggtctccttggaaatccgtctagttaacatttcaagggcaataccgtgttggttttgactggatattcatataaactttttaaagagttgagtgatagagctaacccttatctgtaagttttgaatttatattgtttcatcccatgtacaaaaccattttttcctacaaatagtttgggttttgttgttgtttcttttttttgttttgtttttgttttttttttttttgcgttcgtggggttgtaaaagaaaagaaagcagaatgttttatcatggtttttgcttcagcggctttaggacaaattaaaagtcaactctggtgccagacgtgttacttcctaaagagtgtttcccctggaatgtcactggagagcatggcaaagccagctctgccacttgcttcacccatcccaatggaaatggcttagtgcgtgtttccagtatc

SEQ ID NO: 27010 - DNA, 1324 bp, Homo sapiens
ttctcctgcctaagcctcccaagtagctgggattacgggtgcacttcaccatgcctggctaatttttgtatttttagttgagatggcatttcaccatgttggtcaggctggttttgaactcctgacctcaagtgatccacccacctcggcctctcgaagtgctgggattacaggcgtgagccaccctgccagtaagttttaataatttggtgttaggtgggagaatcgcttgaacctgggaggcagaggttgcagtgagccaagttcgcgccactgtactccagcctgggcaacagattgagacaccgtctcaatttaaaataatgtttattttcttggaagtacctgaaactattagacctgtctagtcatcatagtgaatacttttatccagacaggattctcctgtattagtgcttataggtgttcttttgtcagctgctactgtgaattcttataagcaatttagctccatgatgaagacctcaaacgtgaatgtgcatgtcatatcttcatgctgagaccttgttctgtagctgcagtttgcagagccttgactttgttttgctaatactaggggtgctttttaaaatgtgatctttgtttgcaccatcacatttgtctagaatacatattgtggattttgatttgtgttttcacctgttgtaattttgccctcctctccaccttgaaggaaatttggttatgtggattttgaatctgctgaagacctggagaaagcgttggaactcactggtttgaaagtctttggcaatgaaattaaactagagaaaccaaaaggaaaagacagtaagaaaggtatgtaaggctttatgagattatgcaatgaactcaggagctagactgctagggaaaatgctttgtaacccatttcccttggtttcctcttatttttttaaatcatttttttcctttggtttcctcttaatgtgggaattaaatgagctacagtgtttacaagagtacttggcactgcttgtcagtgttatagtgtaaattcctgagttaggcaagcaagagcacttttatacagaacaagaattattagatgcacctaaattaacgtaaagggatctttcttcactgaaactagattaggtccctaattactccctatatacagttgtaatgttttgaattggtacattcactttttttgttatgcgcgtctactctaggttgaactccagtgtacctaacagagagtttgacatcagctgtgacaacatggagggaccacttgtgtgttgacactgctatatctccatatttagcaccgagccttgtacattataggatctca

SEQ ID NO: 27011 - DNA, 2281 bp, Homo sapiens
taacatgctaatgtgtctagtgcatgtggtcttgaaccagaggcattgccagagtctaacatctcattgggaccatggttatctttttgggtgtggggctggacttactggtttggttttcatttattctcaaggtcgtcatacctcagaagaaaggcaagaaggctgctgcaacctcagcaaagaaggtggtcgtttccccaacaaaaaaggttgcagttgccacaccagccaagaaagcagctgtcactccaggcaaaaaggcagcagcaacacctgccaagaagacagttacaccagccaaagcagttaccacacctggcaagaagggagccacaccaggcaaagcattggtagcaactcctggtaagaagggtgctgccatcccagccaagggggcaaagaatggcaagaatgccaagaaggaagacagtgatgaagaggaggatgatgacagtgaggaggatgaggaggatgacgaggacgaggatgaggatgaagatgaaattgaaccagcagcgatgaaagcagcagctgctgcccctgcctcagaggatgaggacgatgaggatgacgaagatgatgaggatgacgatgacgatgaggaagatggtaaggagttgtcttggtagttactgggcttctgattacaaggtatcttgagattctgggatcaacatattccttccacgacaacctggagatgagattagaatccttgtgggaattctctgggttgttgtggtgtgctagacttaattacccatgaatgatttttgtgcctcttgagaaaatttcaatagcacattctattagtgttttttataatgtaggattttgtttctaagtgattttttttttttttaaatttttttgagatggagcttttgctgtttcccaggctggagtgcaatggcgcgctatctcggctcactgcagcctccatctcctgggttcaagcagttctgcctcagcctcccgagtagctgggattacaggtgcccaccaccacaccctactaatttttgtatttttagtagagacgacatttcaccatgttggccaggctggtctcgaacttttgacctcaggtgatccacccaccttggtctcccaaagtgctaggattacaggcgtgagccactgcgcccggccccaagtgatctattcttgccatgactgttaactaaacatggtgacaggattgcattttctttacattagatttgaaaaccgatgttggttttgggagattgctgcaatttttaggtgacttctctttcagactctgaagaagaagctatggagactacaccagccaaaggaaagaaagctgcaaaagttgttcctgtgaaagccaagaacgtggctgaggatgaagatgaagaagaggatgatgaggacgaggatgacgacgacgacgaagatgatgaagatgatgatgatgaagatgatgaggaggaggaagaagaggaggaggaaggtacttaaattagattctgacatacgacatgagttatgtttaaaggaggcacttaagtgtttgtggctactgatgtgtgatacattgtttgacatcttgtccagagcctgtcaaagaagcacctggaaaacgaaagaaggaaatggccaaacagaaagcagctcctgaagccaagaaacagaaagtggaaggtaacttgcagaattaggggatatgggggagataaacagcacaaatgatgaataacaaagggacttaatactgaaacctgatgttacattgtagtgtgctgatgtgctgtgtatagaaattttgctttggaaactaactttttaccacactacaagtagactgagttgagctttttttgtgcaggcacagaaccgactacggctttcaatctctttgttggaaacctaaactttaacaaatctgctcctgaattaaaaactggtatcagcgatgtttttgctaaaaatgatcttgctgttgtggatgtcagaattggtatgactaggtaagtgcttcactgcacgttacatacacgtgggtctgttaatgcttttccttcccctgttagcacagttactttagcctgctactgttaaacatgaatactgtaaacatcttcaaggattagcattagtgaactaagttagaattaaactgtagatcccctaagttgcaatttccataatcagtcgtaacttggtatagcacagaataatttttagtaagtttttttgttgtttttgttatgtattgagacggacgctggcttttgctcaggctggagta

SEQ ID NO: 27012 - DNA, 1023 bp, Homo sapiens
accccatcgctactaaaaatacaaaattagccgggcatggtggcgcatgcctgtaatcccaaatactcaggaggctgaggcaggagaatcacttgaacccgggaggcggaggttgtggtgagccgagatcgtgccattcactccagtcggggcaacaagagcgaaactctgtctccaaaaaaaaaaaaaaaagaaaagcaattaagtccttaacctggttatttacagagaaaagacattcatgttgtggaaatcaaccatgtatttttagctacttctctcccttgaaataaggggagcttaaatttactattcactaaatgccagatagaagactaatttaaaacatctttcttttttatcatttaatacatagattgaagagtaagtcctggccccaggctttgcttttctgacctctgccagtcacagtagtgctttttctggaagttcagtctgctccaactgcagctttgtgcagggaccctccgggacttttctagttttgctagaatgcctcatctgcctgtgagcctggaactgtagaagtcattttagttttgtttagtcttattgtttaatttaagaaagtctgatgtccatgttgccgtagtgggtacataggacactatcggctgtgaaagaatgaaaagcttgttcagagaaggtcgaatgaggactatgtcttcagaaaaccttgggcttagctgcctgggacagtttagatctgagctcagaggggattgatagagcagtagtatctgttgttttccttctgccgttgggaagctttctcttaacatatagagaccctgggatgtgtgagcatatttatagtaattataattgtgagacatgacctaaggaagtatgtgaacttgcttttgaatttagttgtttaaaaaaaaaaagtggagtttgaaaatatgaaccagaggaaggcagatcacacgggtggagaggaacggcactgtctggagatgtattgagcatagaaggagagtttgttaggaattgcacacc

SEQ ID NO: 27013 - DNA, 1027 bp, Homo sapiens
tgagttattcatcttatatccctcagtctctccctggtacaaactgggtatgcaggatagctgggggtgtcatataaagttaaaaatcacagatgttagaatcaggcagtcaaaaaccaacttgaccacttaactggctttgtgaccttttagcaatgaaatgaagcaaaaacttaccatcctcaaacctgtacagattcctcatccatgtaagagctataataataatgcctatttcatagggttatgtggattaatttatacatgaataatatctaaattattagcatactatctagtactcagtacatcttagccatcatcattatatagtaaatagatactgaatgtgaagactgtatacatttctgccaaagtttcatatacctaagcgatgtgtaacacaaatcatgtgacaacagaattctttccatatcttggtaaagtcttccccttactttcttctattgatttaaacagaaatttacttggatgtgacccatttgataaggaccagctgataaagtataccagctgattcaaataattgctccagctaatttacatgaaggttttcctattttattgtttttagaaattattttggaggtataaaagtctggtagtgacttatgaatatctttacattaaatgtttaccttattgttctaaaaaatactaaacatttctcatttctatgggaaagccctcaggagaaaaacacttttttccctgttttgggggctatgtctctagcctgcctggaagtttagaaattcccagaaggatattgccaagaagccgcaaagggatgccatgtttgagtttcttgccattcttactgcttataaagagaagcatttgggcagtagttcactgtttgttgttagttcctaaagcactgccacgggagacttatactcctggggtctcttcatgtccccaagagggagttgatggaagatggttattaatctataccaacttcagtttattagcttttctgcttcccaaacatgtttttggc

SEQ ID NO: 27014 - DNA, 1044 bp, Homo sapiens
tgggtcgtaatgccactctgttccccaggcagggcccaccccggcctcccaggtgtcccctgtgctactggatggctccttcccataggctccaggtacccttggcaggaaggaagtggatgaggatggcgacagaggagatgagcacacagggggcgatgatgttgatgacgtagaagaggggcttgcgctggatgagcaggtagaacaccaccttctggtggcctgcttcctgggctggcgccgctgggtccaggagcatcttggctggtcggtgctggatggcccactccccattctctgcgggcaggcaggcaggcaggagtgggcacaagaagcgtgagctaggcagatccctgcagccgagtgacccagctgcaagggcagcatgtgccctaaggagcaccagcaggggaggcacccttgagggacagaagtggggtgggagattggatgctcgagcctcttctaaaattggagacattatcatgaggaaagtcagagctttgttggacgttttaaaaagcatattttatggtttgctgtagttttcattttgagttacatgggagggatttgaccttggtccagccttgaccacagctgggtccagcaggagccctggatgaggctgcctggggagcccttgggtgggggttacctgtgaaggcctcagggtcaatgaaaatccactcgatggtctggccatcttcctgactcagctgcagatcaatctcattggtgctgtaagtctgggacctgggagtcaccgaggaaagaggctaaatgtgagcgggtggacctgccacgactgcatggggatgaccttctggggacaagtgtgggcagcttttcttcaacaaaatgcagccccacgcttctgagttctctataaaaccccactggcgagatatggagagcaggaggacctagggctctttggggtcaggaagatggagttgaaggcccaggaggctgcagggccctcacctggctgatgggcccagggtcactctgcatttgtctctcccactgctgtctggc

SEQ ID NO: 27015 - DNA, 1030 bp, Homo sapiens
cactagggcagcaggccgagcttcagagcagaagccagaggttggcgtgaagggcttgtgctgctagggaccatggaggcagcataccggggcagtgacgtggccttggtaaagctttctatactggacacgagcctgggtccccaaacttcagtgcacatcagaatcaccagggcacttgttataaacacagattcctgcccccagccctcatgctattctggcctagaatgcctgggacaggcctgggaatctgcatgtgcaacaagggcccaagctgaaggctgcaggtgggctacagatcacacagactggaatcagactgccctggcagactcctgctttttcgactttgtagtgcacttccttgggcaggttacttaacctctctgcgcctcaacgtcctcatctgtaattggaggtgatatgggttttatgaagatgaaatacattaacatttgtaatatcccgggcacctaggaagcaatttcattcctgtattactgtaatcgattttggtccatgcgtccagatacgcccaggatgggtgtgctgtggaatgccacaggtgagtactgccggggcgtgcgagagggaggcgtaggggagtgggcagcgggatgttgaagtgggcagggagggtccttgccttgcggacccctcgggccatggagtgtgtgtgtggagaccgcaaggagacattgagcacaaccacagcattcacgacaatgaggatggtcaccaccaggaggaaggtcaggtacctgtcagggtggggtgggcaggagctggcagcccataccatgatgccacccccacgcttagtggctgccccccctcaggcctcctgaattgaggatggggggggtggatggagggcaagagggcaatgcaggaggccatcatgctcccaagaagggagagtggcataggcgggtggacatgaagaccagccttacttgctgatgagtggcaccgcctgggaggtttcaggcaccttcttggccacaaggaagaggaagacagtctg

SEQ ID NO: 27016 - DNA, 1067 bp, Homo sapiens
aggtccttgtgacccgcccgctctcctaagggagcgtgtcctggccccctcccgcagcggctcggaaaaaaggcagcaccgcgtcgttgacggcgcgggctctggactcgctgcttggtaaaaaccttcctcttcctccagtgcgggacgcactctctggtatctcttttgacctcccggaggctttcctttgtcggtcgcggcgccactgtactatggcatacctcgttttattacgcttcgcagatagggcattctgaaaacaaatggagggtttgtggcagccctgagtccagcaattgtatcagcgccatttttccaacagcatgtgctcacttggtgtctctgtgttacattttggtaattctcaaaatatttaaaactttttcatgatttctgtgtctgttatggtgatctatgatcagtgatctttgatgttgctattgtcattgttttggggtgccacatacagcgtcttttataagacgtggaacttaatgttgtgtgtgttctgaccgctccacccacagaccgttccccatctctctccctcttcttgggcctccctattccctgagacacaacaatattgagattaggcgaattaatgactctgcaatggcctctaagtgctcaagtgaaaggaagagtcgcacatctctcactttaaatcaaaaactagaaatgattaaactgagtgaggaaggtatgtcaaaagccgagataggccgaaggctaggcctcctgcggcaaacagttagccaagttgtaaatgcaaaggaaaagttcttgaaggaagttaaaagtgctactccaatgaacacacgaatgataagaaagcgaaacagccttattgctgatatggagaaggttttagtggtctggatagaagatcagaccagccgcaacattcccttaagccaaagcctaatccagaacaaagccctaactctcttcaactctatgaaagctgagagaggtgtggaagctgcagaagaaaagtttgaagctagcagaggttggttcatgaggtttaaggaaagaagccatttccataacataaaagc

SEQ ID NO: 27017 - DNA, 1101 bp, Homo sapiens
ttttattattttgcggtgactttgaaatgtgctgtcactcaaacaaccatgtttttattggcttctgcacttggaggactcctccatgaagcccgcggacaggacagatggctccgtgcaagctgcagcctggggtcctgagcttccctcgcaccgcacagtcctgggagccggtgagtgttgccttcgtcagagaactgaagtcaggagggaccaggtctgacgcacctgttacaacagcttaaagcctagattcctcagtagtgaagtttttattttttctaaggtatatcttaaaaactaaaatcatgttaaagtaccctgttgattccttctgagctctgccttgcccacagttacatccggtgcctgacatatgaatggtactcaggtgttttttgagtaaataaacatgcccctccatgtgaaaagttaatatccagatttagtaagacttaagatttgcccctacagggtggtgttgtgaaccctcacttctatagggcagcttcccacttcgtcctcctaggaggctccttccttttccccaggccagtctcactgcccacccccatcctgtcctcttttctagggaatctgtccctcaccccttccttctgtcttcagtctctgtcccctggatccatccgtcggtatttagatgcgctcagactcacgttagatacatcagacccttcgtggctctcccctgtcctgggccccttccttgccacatccctttgcccagttccctttaccaccagagtgaaataacctgctccgtttggtgccatggattccctaccccaccaaccccgtgtgttcctcctctcccgactcctttcggctccatctctaaagcccaactctgggtgaggtttctcacaaccccattgctaaatcctgttagcattctttgggttttattctttgggttttgcgctctccattgcatttaaaccttccagaagttctggcctgggcctctgtggccccctgctcctcggccccatgctcctccagttttcctccttctgtcttcgtccttccaagcctgcagtctgctcgcctcccgtccctgctggatgccctttctagagg

SEQ ID NO: 27018 - DNA, 1082 bp, Homo sapiens
gaaagaaagaaaagaaagaaaggaagaaagaaagagaaagagaaagagaaaccacctagagaatttaaaagtcaaaatacctggacaagaaaggtaagagagcagctgaatattagaaatgtagaggaaaaaagctctttatttcttcatgtgtgcaaattccaaagcacctcttaccaatacaaatattagtcaaaaaaaaaagataaacatcagaagagaggactatgtagcaaactggagaaaacagtatttcagtgccagacagcagagaaagggagggcaataattttcctttaaagcaattcagagaagttctcttattttctcaacatcccggaagcatgcttgcctgtatgttgtaagcaatggcagatattgacgagccgaattttctcatcctgtccagaaattgtctgaggaagtgctccaaggcatctccccctgtcaaacattctgggacacacaggtattgcaggggcagcatctgcacttttgcttggagggacgctcagacctcatgattcagcagatgcagtgcttaattgggaagccaccgtcttgtcggagagcagtgaaagaagcccatttgccccacctagctagcaactgtgttccatcatggggcaagctcaacagtcatgcccagcctgcagcgagtatgtgatggctgagaagggtgttttcagaacccaccccagcactgctcacaagccctctttgtgcatctccttccccaattccagaggtgcagcctgcacccgaaaagctgttttgctcaatgttatctgtacattcattgtgttttccaacctctcgcctccgtacttttatttccacatctgtaatccacttcatcctctcaatttaatgcaccaattatttttcactttttttgttaatttttagggatggggtctcactctgtcacccaggctgtagtgcagtggtgtgatcatagcttgctgcagcctcaaactcttgggctcaagtgatctttctaccttgtagctggaacaagaggtgcacatcaacacatccagctgatttttaaattttatgtagagacgagatctggctat

SEQ ID NO: 27019 - DNA, 1034 bp, Homo sapiens
gactgaggatcacgtgatacaaaatatggccacccctgcatgaacctggagcaactgccctgggtaggtacccgtacaaggaaaggcaatccttcaagcaataatcttttggcagtctccctcacctctgttcacccctgggtatttttggcattgctgtttttaatgatggggtgtgatgtttcctcagcctgttaaacttcattgtgttattttttaactgcttctgagaaactactaaaatgctgttacctccctttttattggcctaagccacacttttcacatactgggcttttcattcattagaaagtaaccacttattttgagtaaaggcaaaaatggaaatggtttcaaggtatttaagcatttcaagtgaagctcagcacagtgaattatttcaacaacaaaatttccatgcagtctcttagaagaaaaatgtatcttaactaaattttaggacttcacattttgttttgttttgtcttggcttatttgttatttaaatgtgcggatctgtgaaataacatcatttctttttaaaagacagcaggttctaactttagtacttcctgagcaaaaagaactaaggttgcagaaagcttctctttcaggctgtctttctggcattgctgcaggcagtgctgcccttgctgggaggtctccaccatccacattagcctgcatgtctctgtccctttgcttcgtttcccacctctacccacctgcccaccacactctcacacttcccctgcccaaccagaattgccatcaggggctattggtccaatcccaaatgctagtaacagaactgaaaagcccaagtttgaagggaatttcttcttccgtgaagtcccctgggagaaaattttctggaagactcaccatcccagaggctacacagctcaggacaacccctgttcttttaagggaaaagtgaaagcctggacttgtaggttttccccaccagttttcacatggagctgatatcggcatctctgcaaggccaggaggagattgagtgacctctctgg

SEQ ID NO: 27020 - DNA, 1049 bp, Homo sapiens
ctgatgatagtatagtttttgaaactctctgaattcccccataagaatagacagaaaactagatagagaatcagaaagccatggatgacataaacaataaagctaggtcacaaggcattcttaggaacatcaaaatataagcagatgggaataaaccattaacagcctgaagacttgtaagtttgtgtgtttgtgcaagaaataacataagaaagcaacaggactgagaaggggagaaccccaaggtagccaaaaggttttcaccataaagcatagaaagatgatttgagcacagccgctgaagctgagaggggcattgccaactttagtagcaatgattgcagttgtcgctgctaaagtttgaagggaccagagctgtctagaccctgttgaccctcaaaattacttacaagggctttcttccaggacagggccccatgcccagaagaaacatctaggggtggaataaacagtttgaagaaaaggggcagttgagaaacaggaaagagaaggttcagatacggctggaagaaggaaacagccaggaaatttctaaagccaagctgcatgtttttaaaacacaccacaaaaatacacagcagagggagctctgtggagtcagaaaagctggtgagccatgattctttctaaatgatcaaggaaacaacatcacataaaaatgaacaacagaaagagattaatagaaaatcccatacagattctatataaaaaattgaggaaaatagaccaaaaacccacaagaaagatgggcaaacacatgaacagattatcccccaccagtgtacaaatgaatacataagaaaaaatgttcatctttatccataacataaaataaaagactgagatattggttttcacacatcagattggcaaaaattcaaaagcttgaccacaagttgcattactgtggctatggggacaaagctgctccctttcatccttgggggagagcaacatggtactattccatgaaggggaacttgacaccatataaccaccatatgcatgcctttcctgtaagaggttga

SEQ ID NO: 27021 - DNA, 1032 bp, Homo sapiens
agtgtaaaacttaaactctgaaaactactcaacaatgttgaagaaaattaaagacctaggtaaatggaagacatcccttgttcatggattgggagactttatattatgattgcaatactaaaattcacaagctgatcctaaaattcatatacaaacttaaggaatgcagaataccccaaaacagtcttgaaaacaaagaactatgaggattcatactttctgatatcaaaacctactgttaagctacaataataaacattagatagacatttcggtaaatggataataagagtagacataaagatcaattaaatagaattgaggatgcagaaatgagcccttgcattgatagtcaattgattttcaaccagggtatcaagaccattcagtgggggaaagaacagtcttctcaacaaatgatggttgaacaactgtatagctacatgcagaaaaatgaagttggacctctatctcagaccacctacaaaaattaactcaaaatagatctaagacgtaagtgtgagagctaaaactatagaaaaaaataggataaatctttatgtccaggcattgggcactgatttcttagatatgacaccaaaagcacaaggaacaaaagaaaaaaatcgataaattggacattatcataattaaacttttgttcttcgaaagacaccatcaaaaagtgaaaagaaccaagaattgaagaatatttttacaagtcacatgccagataaaagacttgaatttaaaatatattgataattcttaaaactcaaaaataaaaaggcaaataacctgatgttaagatggagtaaggatttgctcagatgtctctccaaagaagacagatgttcaaaacacacgtgaaaagatgttctacgtcattagtcatcaggcaaatgcaaatcaaaatcacagtgtgatagcacttcacacctacttgggtggttataataaaaaggcagcagcaagtgttggtgaggatttggagaaactagagcccttatgccctgctgaaggactatacca

SEQ ID NO: 27022 - DNA, 1177 bp, Homo sapiens
cctgtgtcaagaccttggcactcacactttcatacacgcacacccacacacgcacacacttacacatgtgcacacacacctctacacgcccacatgcatttacacacatgcacaccccccacattcactctcacttgcacccacacacatttacaagtgaacacacacacacgcacacacacacagctttccacctgagtttctcttttagtcaaagatttccggtctttcctgaaaaactcaggcccagtgcaatggcagttcaagcccagtggccggcagagggaagggcagggcggcagctgcagggtgggctcggcttgaacgagaaaagtgatctagttcctcagcagggctcccttccctactctgttcccagaaggggcttctgtgcaaatgtagcctccttcactcgagttttgtcagtcctccttacaggcagaggcagcggtcacccaggtgtcgctgttgtttctcttccacggcatcccacctcccccaccacatttaggacgaagaccgtgtaaacagctgcagacaagtggctgatggggagaccccacacacactagaggctggcgcaggggaagacccaactcagggcttagaccgacgggcgcgcctcccaaagagaaaaggccccagcttcaatggaggctgtggagagatggagaagtggggtgaagattttggagaatctcgggggagagcaaggggagcaaagggagacagcgtcagtctgagccctcgttgcaagttggggtgggggagagaggatcctggcagcagagctgtgccctctgagagtgactacatgggctgtgtgcttgggcaggcacaaaaacatgggcacgaggttactcaaggcttggaggggcagtgggcggccagggtgggtttggagcgtctgtctggggagctggctggggagctcagtggggacaaatgcagggccggccgagggatctccgggccaggacaggaggagtgcactcacgatggtggatggtgcgagagctgggggcatggccggccacacctgctgccagctccatgtctggctggacagtcaggagcctgagctgtgccctctgggatccaccacaggctcctcttcctgggagagtcccggaggccaggggaggggcctgcacaggaaggcccccattcctcggcc

SEQ ID NO: 27023 - DNA, 1090 bp, Homo sapiens
ggtcaagggttcgagaccagcctggccaacatggcaaaactccgtctctactaaaaatacaaaaagtagccgactgtggtggtgcatgcttgtaatcccagctactggggaggctgaggcaagagaatcacttgaacctgggaggtggaggttacacagtgaagctgaaaccatgccactgcactccagcctgggagtcagagtgagactccgtctcaaaaaaaaaaaaaaaaaaaaagattaagagcaaatagagactgaacatgttcataggctaaagggagttagccaacaggacgtgcaaggaagaggagccaaagtcctggaggagacgataggggatgaagttaagagtaaaggtggctagggaagttgataggcatggggagaattcattctctaaatctgtttggaaggctgtaaggataggagcccaaggacaatggacaaagtgacgattcatcccaagcactccttgggccagttaggcagcaataaggtttgtgtttccaggtgaacatagtgagtgtagtggtggagtcagacaagatagtgtccaacatggctggtgataccccgaaagaattgagtacaaacatacagaagcccaggtgctgaggtagcccagctgaaaacagtttagggtacaacacgcagcagcagctaccaccattccaagtatactggtcacacatgcaacagatgacctaccaagatgtctctaatacaaacacaagtgccccatagtggccagacatttgaggaatggcatctccatgaagatagtgagaggtgacagcgtgctggcagccctggcagccctcgctcgctctcggcgcctcctctgcctgggctcccactttggtggcacttgaggagcccttcagcccaccgctgcactgtgggagcccctttctgggctggccaaggctggagccggctccctcagcttgcagcgaggtgtggagggagaggcgcgagcgggaaccagggctgcgcggggcgcttctgggccagctggagttccgggtgggcgtgggcttggcgggccccgcactcggagcggcctgccagccggccccgccggccc

SEQ ID NO: 27024 - DNA, 1048 bp, Homo sapiens
ccccgcgaaccctcgaggggaagtgccggggccgcggcagcagggccagggccccgggggtctcccgcaggccaccctggacagtgatgagcaggtccgctggacctgcgcgtccgttagtcggagcggctccataggggacctggatggcgtgaagttaagagtcacgcatcgaggatggacttgaggggatctggagtagaggatgggagggcattgagaaaatagggccagagatgagggactctaagtgggcgtggaaacgcaggaaagattaattcaagatctgtttaggccgttaaataggaattggggcatgagggacaggaaggaagcaaggattagacaagtgactgggaagatgttagtgcctttatctgggtaagagggaagacgggagggggaaagatgatgggtttagctttggacatgttgagttgtctgtgagacagtcacaagtgtaaacatccaccaatggttggtgtcccgccaaccattaagaaaagtcagttgagaaagtggtagaaatgagcaaaaatcctcacgaagccatcctaccgtcactttttttgttgttttttgtttttttggcataatagtgtctacctttaattgagccttgaactatgccaggcagtgttctaggtatttttcgtgtgttcactaatttaatcttgatgattaacccagtctggtaggtatttatgtatgaggaatccaagatacagaaaggcatcttgcccaagttcacacgagtagtggctggagccaaaattcggtttcaagcatgctttgccaagaggttgaattttaattggcttttcatgggctttctctattttgtgtcctgttggggtccagaataacttggcttttccagcacagcaaatctgcaaatttctggactcattctctctcattcttccctataaacgcagctcatttcttgccaaatgcagccaatagcaaagggcccaccaacatttaagaagcaaatggatgcacaggagcatgagaacagtcaaaagaggaggaaaggaaagggaat

SEQ ID NO: 27025 - DNA, 1072 bp, Homo sapiens
gtatggttctctgccttgcctttacaaacaagggcctgaaggggagagagcttgcagctgcctaaggtgacagtgctgcagcctagaccagaattgttctttggggcagtaggcttccccaaatggtttttccttggcaataggactgtcccttagatgtctcttcccatttgtagatcactgccccatctcctccatatcccctcacctaaaatagaatgggtgaaactatgatgctatgcaggatactgtcatttacattaacattaaaccgtacctgtacttgatgcaaaggacatgtgctccacaatccaggaatagccactttcagggattttccaaatctaattagattgaaatgcaaaatatccctctgttctagctattgttaaccctggctgcatgtgggaaacactcaaggagctttaagatacaaaacactgccaggctcccttacccagtcagtcaaatccgattctggagttgggacctaggtgtgtgatgagaactgctgagtcctgtcgaaggttaagctgggcagcactgcttggcagccactggaggtgctgttcccacccatgtgcagctgggcagggtccctaccccagggcagcagttaatggcctagacacccctgcatatttgagatcaagaaatgtcagtagtggttaataatgtgaattccacagtctgtatctttcacacttccattctctgcttttaaggtgagattctaagtactgtggacccataatctgtcaggtagagtctgaaatgtttttcctctcattttagggatgggcgtgttttgggcgtgctagaggtgtcacgctccattggggacgggcagtacaagcgctgcggtgtcacctctgtgcccgacatcagacgctgccagctgacccccaatgacaggtaaaaggccctataagaggcacaggtgtgtgtgcatgtgggtttatttctcttcctcacttccagtttctatcaagcctttgttggagggaaggtgtgcatggtgctaggccctgggggtgcagagataaacaaaatgtggtttctgctctggtgg

SEQ ID NO: 27026 - DNA, 1028 bp, Homo sapiens
gtgttacatctcttttagaatattagacctttagcaggtcttgcagtcttcaccagaaacactcccacacctacacacacacagtgtttttgttttttttttttttagacagaatctcgctctgtcaccccggctgaagtgcagtggtgcgatctcagttcactgcaagctccgcctcctgggttcacgccattctcctgcctcagcctcccgagtagctgggactgtaggtgcctgccaccacgcccggctaatttttttgtattgttagtagagatggggtttcaccgtgttagccaggatggtcttgatctcctgatctcgtgatccgcctgcctcggcctcccaaagcgctgggattacaggcatgagccaccacacctggcccacacacaagtattttttttttaaaaaaagataaaatgctgtgaaagttacttaaatatttgtctcagttaaagccttttttttcccatttgtaacagtgtgactggtgtcttaaccagtgtgacttcctctgacttattaatgttcactctttgagacgaaatttaaaagctttaatggaaaagtgtggtttttgctgtgagaatttgattaactctcaattcgttctttcagtactcgggtttcatattttgctgtttttgatggacatggaggaattcgagcctcaaaatttgctgcacagaatttgcatcaaaacttaatcagaaaatttcctaaaggtgagactgagaactaaatcagttgatactcaaattggttattgctgtttggttggctgtgtgaagcagtcagatgtgttattttggctttagcagagaatcattgatgagtcttaaaagagtggtgctgaggagtggatgccaaggcttccaggagtagcggccatgcaggtgtgacttagaatggcacttctcatgattctaagtgataggcaccttttgtcaatcgtctttgggttcagttagtgtcttgcctttactggaaaactagtaaaccaacttcaaatagcactgtgttat

SEQ ID NO: 27027 - DNA, 1030 bp, Homo sapiens
ccttttcgagtacttgttactttttggaacgtgattaggatatgttagtttgcttacagattttgtaagtgtttgtttaacactaagagcctgtggatataaaaacatgtatatgctacaggccaaaaaaaaccatgtatttttaccactgggaaaagtcttttacaaaccccttcagcagggtcagtttgactcagggcctggatcttaactttatgttctctcactgtgggacccccctccccctccccgccaaccatgaagacacaactcctgggtctgcctgtgtctgccagtccttgcttcaaatgaccttgtctttgagtgctaggatgaagcccagtctactagtgactttttccaacagtctacagctgtgtttctgtctggcttttactttatttccaggttctcttgccacatcaatatcccagatggtaaagactgaagggaaaggagcaaagagaaaaacctccgaggaagagaagaatggcagtgaagagcttgtggaaaagaaagtttgtaaaggttttcagacaatttgaaaacaaatgtattagacttcatattttaaaacaacccagagcaaaaccagtttcagctttctaataatactttctttttatgtctgtatttaagaaataagtagggttccctttttgcaaatgaatttccaagtttctctgtgctttctcctacttttcatgtacatctatctctgatcctacctttgatcagataggaaacctacatttgttcctcaagagttaaaaaatacaggtggtttttttcttagccttctgcagtgaatggttagttttttgaccacctagtctctctctgacttccaatctttgtttgcagtttgtcaattagtgctttgaattacgtgatttagcttagtaggcagcttccctaagcctggaaaaagccgttgaaatttgtagtcagttgtgtaacttgtcaaagttagtgaggaagaaaacgaaaagtattaactaaagagaatacttcagttgtggtactaaag

SEQ ID NO: 27028 - DNA, 1061 bp, Homo sapiens
ggtggctttacctgttcccccaccctcctcatcctcctcactgtggctcggggctatatttgcagagtcaccacctccagcaggcgtggataccacgtgagtcagcatgagtgggcacctgcgtcctcgtgggctccaggaggacgcgggcagcaagcagaccgtggaggaggctttgctggggatggctccgttgaggggctgcttggggaaaacatcccttaacctcccctccagggcccccaccatgtcccttccttctgacctgtatgcgctgcgcatataggttggggcgaggttctgagcacccagagtcgttgctgaacagcagacgcctagagttctcgaggcaaatgggtcacattgtgttttctttggaaagctttaaccagatgatgccattgttaaaatgccgttaaactaaacatatgacaagccaaacaaatccttgtgtgaatatcgagagcctcagcggcctcccacggtggatgtgtgtgcccaaaatagcagcagaccccttcagaggtgaagggatctttggattggacgtggccccttttggaagtcacattcagtcagagcggaacctggtctcattaaccagggtcaagccgcaccgatggttaaagatcctctaagactgtccgagcgtgtgttttccagtagcacggatagatctcaggagacactggctatattttcccctggatgcttgctgctatgtagggaaaatgagaggattcagctcagagtgaacactaatagtaggttgctttattttgaactaagctttttatagtgagcacaggaaagctgaccttttgcttttcaaagtcacttagcttctgcattttctggtcttctgttgttaggtcactaataagtgtttaaggatttatctttttggtgtttaaaattgtcttgaaaatcaaacgaggtataaaattggtaacgtacatgtcctagaaaaagtgaagtcagtggcaaaactggaaaatcagaaatcagcatcatactttcttttttgaaaccatggccatgttctttttgttgggacttct

SEQ ID NO: 27029 - DNA, 1049 bp, Homo sapiens
atagtaggataagtgtttgtcccagctgcatttgtggaacaccctgttttttccacagtaatctgcaaaggacctgcatctaccctctttgggaccacctcaactgcttctcagttcttcttccatgtagttttatattcagcttttaagatcatgaactaccttgcactggacctgtagttccgtttggagagaatcactatctttagaatagtaagtcttcctatccttgaatacgagctatcttgccatttatttagaccatttaaaaatgtctttcagggccaggcacagtggcctgatcacacctgtaatcctagcactttgggaggctggggcaaatgaattgcttgagctcaggagttcaagaccagcctgagcaacatggcgaaaccccctctttaaaaaataataatacgtaaactagccatgcgtgatggcgcgcctctgtagtctcagctacttgaggggctaaggtgggaggatcgcccaggaggtggagactgcgatgagccatgatcgtgccactgcactccagcctgggtgacagagtgagaacctgtctcaaacaaagaaaaaaagtctttcaatatattttataatttttatccataaaggtcgttctcattttttgttagaaatacttctaggtgccttgtattttttttgtttcttatgttaggttttctgcttgttgcagtatgttgaagtggaattggatttctatgttgatcttatctaacaccgtattacatttccttattagctctattgacttccctgtcattcttctctttgcaggtggtgggggtgggaggagctcagtatctgtagccttggagtctggatcaggagttgtgttccctccctttgtgcctgtatcattacatcagctttttcaggattcaccattaaaagcaatatttgctgggaccttttaatagataactcttttttggttaaagaagcgctcttttatttctagtttgctaacagcttttataatgaatagctggattttaacatatacttactttcattctgaagat

SEQ ID NO: 27030 - DNA, 1029 bp, Homo sapiens
accagatgctcttagctttgttggttggagctgtgatttttttttccagagggtttcccagaatgctcccatctcctcccctgatgtggtgtcaggtggcaccatggtgtcccccgctcctgtgcacagaccttggctttcctcagcggtttatgtcagagaacgggccgatgtccgctccatccccttcgcttctcttttattcttctaaatggtattcgcaagaacactaataccatctgacagggttctccttcatgtagaggaatcatttaaggcgcctgtaaacggggaaggtaaagagagacagggcggtgaggcctctgtgcctcactcagcgggtcacacgccaccgcccgcagaatgagctgagtccaagggctggtgggagggaggtcttcgtggtgagggagtacctcgccttggtcatgatgacaacacggtaccaaggtcggtccctggctttttttggctacagaaggtggaaccagtgggggaaacctggcggaagggtacctgcaacctctctggactttcttggcaacttcctgtgaatctataattatcttttaaattcacaatattagtgtgagaaacctttaataaaatatatggctcgtttcccatctgttatccatttaaagttgagatgtgtcattccatgggattagaaataaagaaaaaaagatggatgttcgtagatgaagctgaatgactaaggttgatcattgtggtagccggatacgtgggtgtttattatattcctctcgctaactctgtgtgtcgttgaagattttcatgatgaaaggccgctgaccagttcctaagagtcttctggcaccatcttctccgaggtcactgtcttcccctaccaagcacaaactgtccccaccataggctttatcgcttctgcctagatccgcaatctgtcagatttctttcatctttattatcttcttcctctttttcagtgcacagtgtatgctttaattttctagttatttttctaactttttgagtctaatgttt

SEQ ID NO: 27031 - DNA, 1059 bp, Homo sapiens
ctgggttctcagcacctaaggtgatgtctggaccacacgtgtctcctgatagtgcttgtcagagtcatggaataaaagcagggtgctttgtttaaccagaggacatccacgcatcctcataggagatgtggagcggggtattccctgcaattccgatgggagaggccgcggtggccatcacggaggatgctgcgctgggcctccttccagaggcgggagggctgtgcacggcctccttccagaggcgggaggcccggaagcagagcttccccttggatgacgcgtcacagcaggaaggagcacagctgtcgcggggtgagagacggcagaaccagtgtggagcagccagctgacacattaaacgagtcttcactgcttatgtatattttgtgcacattctttcctgacacaagagttttgagtgcagtgtgtgtcacttaatattcagctccttgttttttttttttctttaatagctcagctaaaggaatgaataaatattttagaagattagagcccctcccaggatggcgtggtatttggatagtgagatttcgggtagagtaaaggatgctgctgaaatacatgttgttgtagaatatggagaacttgaattttgaaccattgacacaaattctgaacattttggattttttttttcctgagaaagtcacaaagtaatgattcaaaggaggtttagacgtactgtttgctcttcaaaatggtgattggctctcttaaaatcagcaggttccatcaaatctgcattttggatttccggcttgcttctccccactcaagtctctctgtcttccctacctgggtgagtgtggcacacccacgccaagtccatcgcagagtcctgatggatccctttccccatctctcccagctctctctccgcctcccccgccttccgcagcccctccccgccctgggcgacactccgcatggtggctgaagtcggaatggaaggtccttaccatggccttcggacctgcagccgtgtctcctctgtctgccccgtgggaacccccaggcttgttcccctcccaggcc

SEQ ID NO: 27032 - DNA, 1034 bp, Homo sapiens
taatcctgtggccaggggcacatattcgcagctctgggaatgtttatggttggaagcccctccgctgatctgttcttccctctcacacaaaatcactccaggacagggctctttgcaaagattacttgtaagaaagccttaattaaaaagagatgtcaccatgcccctcccctccttcaaaccaagaggagcagcagaagggggagtggcccagggtcagaaggacagctgggaggagcgtgggggccaggccaggcctagggaagggccatccacctgggacttctgagccttttcttttctggagcagctttggggatgaggcttgccctccgttgagtcacggtgacagctctgcactgtgctgggctgagagagccccgccgtggagggccatctgggaaagtagggttcccagggccccccagcttcactggcttgctttgctttggttattttcgaggtaggcaaatgaggttctcgtttttaccgtgaaggttacttgtattgttgttgaattagctgttgaatggtagctgttgtcctagtttcctagttagtcatggctgtggctcgtggcttagagaccagcggcgccctggctcattcccatctcttgcgggggcccatacatgattcgtccttaaaactgggaggggacgccggggtgcactgggcttgtcctgtcgtttggtaatgatcacaagtgtgtttatatgtgactcttccagggaatcgtggaaacttagtggccatgaggtcccctggctctgaaatttctctctgaatgagctgggagggtgtaaccttccacaattgtgagcccaggtttatgtttgcaacaaataataaacagcaaaacagaacagagtgatacccccgtccaaatctagcaccttcactggctatctttcattttttattacggaaaatttcaaacatttacgaaagtgaaaagacaataaggagcggactaggctgctgtccccatcttcagcgatggctgagcagggccaggcctgcctcactgtatt

SEQ ID NO: 27033 - DNA, 1063 bp, Homo sapiens
ccacgcccggttaatttttgtatttttagtagagatggggttttgccatgttgaccaggctggtctcgaactcctgaccacaggtgatccacccgtctcggcctcccaaagtgctgggattacaggcgtgagccaccacgcccagccctgtgtttaagtttttagaaaccaccaaagtgttttccacaacactgcaccattttatgttcctgcccaccacgtatgagggttccaatttcttcacatccgcaccaatattttttattttccaattttgaaataatagtcatcctagtgagtgtgaatggtatcttattgtggttgtgatttgtatttgcctaataattagtgatgttgaacatcttttcatgtacctattggccgttggcatattttctttggataaatgtctcttcacgtcttttgcccatatttgaattgggttgtttgtttttttgttgttgtgttgtaggggtacttcatatgttatagatatataatctgcaaatatctccttctattctgtaggttgtcatttcactctctggatggtgtcctgtggtgcacagaagtttttcattttgatgaagtgcagttaatctgttttttgttgcttggcctttgatgtcatatctaagaagccactgccaaatccaaggtcatgaagactaaccccctgtgttttcttctatgagttttatggttttagttcttatatttagatcattggtgtattctgccttaagttttgcatatggtatgaggtaggggttcaacttcattcctttgcctgtggcaatttgatggtccagcaccatttgttgaagaggatgttgcttgcctttagctgctgtaagagagcatgtgtcttagaggaaagatcttgctcatttctgaagttgtgctttggaagtgtctgagctgcagttgttcttccttcccaggtcggtgtagactctgctcttcctaagccagggcgctgcagccatattcagtctcttgttctttggctcccgtccctgtcgctgcgtccctacagcagcacctcgcccacgcccccttc

SEQ ID NO: 27034 - DNA, 1154 bp, Homo sapiens
atcaattcatatgatgagaatggcactttcccccgtggtcttcctctcagtaacccatagccccagtccaaccatgggaaaaacatcagacaaattccagtagacacccttcctacagtctactcttgccaggcccactcgatatgccaaggtcatcagaaacaagcatcctttgagaaactgtcaccaccaggagggatctcaggacatgcgacacctaagtgtgatgtggaattcctggatgggatcctggatggatcttggaatacagtaaaagacattagtgggaaacttcaggaaatcctaaactctagaattttagttaatgacagtaatgtcagtattggttcccaattgtgactaacataccgtagtaaggtaggatgctaataatcgcggggaatgtgcaggtggtattggtagggtatatggcagctctctctactgtctactcaagttttaataaaatatgtcaagaattttgagttcacaaaatgaagtacatttatagatactctcttttgcttaatgtttgttcatgaatggctgtatactgtagttactttagcacctagcttttacagtttttcctttggggactcttttttttatggttgtgcatggatgtggtagagtaacttaacaagtcattgttggtggacagggagtttgttttcagcctttccattgttgttattataaacatgtagccttgaagaccgccaatgtctaagtgaactttttaactgaagtatcacaggcatccaggaaagtgcaagaatcatgactgcttagcttgatgaactctcccaaaaggaagatgcctgtaactgctacccagattgtgaaatgggacatcccaacacccagaagccccgtatatgtcctctctcagttactgtaccctcactctcacaccctctagataccacttctctagcttctaacatgagtttctcctggttttgaacgtcatataaatcacgtaatacttattcttattgtctggattatttcacttgacaatatgttagatttattgatattgtggcttatagtagtagtttcttcatttaatgggtatataatatttcattgtatgaacatatcacaaattatttattggttcaattgctgatgacattttggtggtt

SEQ ID NO: 27035 - DNA, 1079 bp, Homo sapiens
gctgatggaaactggcagagcaaaggacttcactgggacagtgagcagtggggcagccctgtgtttacaggcaaccccagaccctcttatgacagaaggggagggcagggcagccggccttcacctggataggaacagcaggtggctgatgtatctgagttggtatattcattcagagacattggttaaaattacttgtcaatataacatctttaccattgttttcttcaaagccagattctgtattttctgattttatgtaaactaaatacatagttttcttaaatacagatgacctctgccttcacagtttctttggatacctttcaagtcagtttaacacacatgctctccggaaacaaaactcagccactggggaaccgaacctacgcttttggtagaatctcagccttggggggagcctggaggccctgagccctggatgacacctgctctggaatcctccaccagtggcttttgaaatgtggttggtggctgaatctcacttctgccttggatgcttatggaatcttctggatggactgagctcagaatctcattgaatactgtggtcctctcagtctgaactttgtacctaaaaatccacgggaatctcatagcagctgctgaggatttggagaactcccttagaaaaataaaaggaatttattttttcctattttatgtagtggctatttaaattttgaacatcaaatggtagttttggattttaaaagctcagtgtgaataaactttgagctcagatgcagccgttcttttagtgtgtcaattttaataggtgtcatttgatgtttgcactagggggttggacgaaggtcggtgtgagaatctcagggataactgggctgctgcaggggtcagacaaggcctcctgtaatagggattttggggcactgatggaatgaagggaagcgggaggagagggtaacgagtagaggctgccgctgccccagttgtattagagggtggtgagggacgtggtggataggaagctgcatgggcctccaggaactcactgcactggctttgagtcgcgagagaggtgccacgggaggtct

SEQ ID NO: 27036 - DNA, 1036 bp, Homo sapiens
gacgtgtctgtggtcaccgggatgatgctctcgataggaagcagtgcatttgctgggacgtggatttgctgggacgtgtctatggtcaccgggatgatgctctcgataggaagctggttgagcaggcagtggtcggtaacttgagcatcctctcgctcctggaatcttggtgcgaggtacggataatgtttagttcaaaacaaaataagtggccgggtgcggtggctcaaacctgtaatcctcgtgctttgagaggccgaggtgggcagatcatttgaggtcaggagttcgcgatcagcctggtcagcatggtcaaaccccgtctctactaaaaacacaaaaattagccaggcgtggtggcacgcgcctgtagtcccagctactcgggaggctgaggcaggagaatcgcttgaatccgggaggtgaggttgcagtgagccgagatggtgccactgcactgtagcctggccgacagagcaagactgttgtctcaaaacaaaaaaaaaggattttgtgggaaacgtgtgtaacttaagatcagtgtgttcatttgggccattctatgatttcttaatattctgttcagtctgagctacccccatccacataaaagcagctaaaaagtctctgtccacaatgacttggtgatgagtgagttcatggtaatacagttgcttcagaccactgttgagtgttaaccctgtgagtccagggagaaggctctcctctgggattgcttccagtcctcatgttctgctctaactttatttgatcttgaatctgtttattttaactattgtggccgccaagattattatattttaatatagaaatgatccataaagatgcatttttatggcatttaaataatgctctgcagtggttgaatgtctcaggaataccacaaagtgtctgtgtgtatgtgtgtgttagagtgtgtgttagggtgtgtgttttagacaggttgtatgtgtgtgaatcagggtgtatgtgtgttagggtgtgtgcgtgtgatggggtgtgtgttttagacagg

SEQ ID NO: 27037 - DNA, 1034 bp, Homo sapiens
gttgccgcgctttctcccaccaggtacagagagggaataaatggtaatggattgatcgggcgctctttgagcgtattgggtttgcaaaactaactgcttccttgttgcttcattgtggcccagactgcgcttgccgtgggtttctctgtggcgctcagaggagccagttgaggaggcacctgttccggctgagtgcttaagaagccgacctctgccacccctgcccctgcctgcccacatgtcatcagatctgtttccaagccctgctccatctcccgagaggcagctttatccttctttcagattctgaactcacagacactgacgtttgtccagcctccaagcgaggatctgctcagtggttatgcactttacgggaaggtgcagggctcagagcagtgccagggcctcctgcttgtgaggggcatcatggtggaggattccccctgtgggctggagccagggtcaggggtggccacgggaaacaagcacatcttcctcgacaaggggagcctttgggtgagcggggtgagatccgtgaactggactgtgagaccgtgttggagaacactgggtattaagccaaccatgcctgtaacgtgggcagttacacagtgaaatgaacacttcacttgagttgttagaaagtgtaagctgttgctcacgcctgtaatcccagtactttgggaggccgaggtgggtggatcacctgaggtcaggagttcacgaccagcctggtcaacatggtgaaaccccatctctactaaaaaaaatacaaaaaagttagccagtcgtggtggctcatgcctgtaactccagctactcaggaggctgaggcaagagaattgcttgaacctggatggctgaggttgcagtgagccgggaccgcaacattgcactccagcctgggcaacaagaaccaaactgcgtctaaaaaaaaaaaaagaaaaagaaagtgtaagctgttaaagaaagctcccatcacggtgggctggcttttcctggcctggccccacccacaggacccctgggct

SEQ ID NO: 27038 - DNA, 1041 bp, Homo sapiens
tgtgattttgccactgcacttcagcctgagtgacacagcgagaccctgggctgtcccccccaaaaaagtttatatatgtaatgtataaacataaaatagtgattaccgaattgctctctagaaaagtcttaagtgtcaaaatcttaaatgccattctccttgtccccacagttctacattttgaaatctattctaaggaaagaagataagtgtgtagatatccagacgtgtgtggaggtcggggctgcattatttataaaaggagtacttgttaaacctgctggcatttctgcactgtggcatcctccatgtgtagacaggcagaagtgtgcagtgtaagagggaaaggcggggtctggagcagtccccgggccactcctggttttaagtacatgggtctctaaggtaaccatcagaggtgaggagacggggtacacttttcttttatacatggtggtattgtagagattcttttggtaagcgtgtattacttttttacagtagtaatttgaaaacatttagatatcttcattggaaagaaaagtactctttaagtccttggcaagttgataaatatgctttgcaatagaagaatttaggggcatttgtttttctaactcacatgtaagctcttcaaggtggggactgaccctcggggtctgagcgggctctgctacagcccatcctacaaacagtctcccaggtttccaccagaagcaggtttgtacctctcattcccttgcttgaaaccctggcatgactttcctgtattcttaggatcctaaggtctcagggccctggaaggcctgcctgatcctggcctctgttttaccagcctcatctgatagcacttgctgtgtttgtggagtttcagctgccacctgctttactttctagctctctctaagtcccctttgacctcggggcctttgcacacactgttccccttccttggaatggcctccctttaccttcctcttctccagcccctcagttcatgctcatcctctcatcctttgatcccctgttaaacttagccta

SEQ ID NO: 27039 - DNA, 1046 bp, Homo sapiens
tagtggtgatttgtgagattgtggtgcacctatcacctgagtgataccatgaaccaaatttgtagtcatgtatccctcacccccttcccatccttttccccttagtccctaaagcccactgtatcattcttatgtctttgcatcctcatggtttagctcccacttatgagtgagaacatatgatgcttggctttctgttcctgattcacttcacttagaataatagtctcctgggctgggtgtggtggcttgtgcctgtaatccaagcattttgggaggccaaggtggatggatcacctaaggtcaggagttcgagaccaacctggccaatatggtgaaaccctgtctctactgaaaatacaaaattagccaggtatggtggtgcatgcctgtaatcctcactacttgggaggctgaggcaggagaattgcttgaacctaggaggtaaaggttgtagtgagtcaagatcgtaccattacactccagcctgggcaacaagagtgaaactctgtctcaaaaaaaagaataatagtctccagtcccatcaagattgctgcaaatgccattaattcatttctttctatggctgagtagtattccattgtgtatatgtaccaccacagtttctttatccactcattgattgatgggcatttggggtggttccacattttttgcaattgcaaattgtgctgctataaacatgcatgtgcatgtatctttttcttataatgacttcttttcttctaggtagatagtagtggaatggctggatcaaatggtaggtctacttttagttctttagggaatctcaacattgttttccatagtagttgtacttgtttacattccaaccagcagtgtagaagtgttttcttttcactacattcacaccaacatctgttatttttttattatgggtgttcttgcagaagtaaggtggtatcacattgtggttttaatttgcatttttctgatcattagtgatgttgagcattttttcatatgtttgttggccatttgtatatatccttttgggaattgtc

SEQ ID NO: 27040 - DNA, 1028 bp, Homo sapiens
aggaaaaaataactttttctgaacagaatgttcttggttgacagggatgcctataagtgagaccagcctggaaggcaaggttgtgtcatgcctggaagccaaagtccctgggtagtccctgcgccctttttaaccgctgggcaacatggggaaggcacgtggcttccccgggtctcccttcccttccctgtgtgctggtggactggagcgggagggcctctgatctgcaggtgccgaggtcccagactctccccaggtggagccaggctccgcctgatcaggggaggaggctgcaggattctcatcctcatactgagctggaaggagctgggtcagcaaggaatggcctgttcctcagccggatggtgaagaaagtaaggcagcatgagaggcctgcttgacacttttatccattttgctactgggattcccaatcagattttatttttcaaaagtgtttgtgctaattgtttgacaaatatgaaattaatcagagttcagcggtgtagctgacatgagctctctgtgtgaaaatccaaatcttgcctatgcaccagtagacatcaattaaaaaattatagtacaaaaacagattgtgtttcaaatccctacaaaaatatgtccttagaaacatgcctgagaattgttttatggagaaagtcatacagatttcctgacagacaagaggacaagaaaaaatcgagaaggatgccatgtcataggagggaaagactccttgttgtaaacgtatcagttcaccccaaattaacttataaaatcaatgcaaatctaatcaaaatcgcaaaaatgtaatagaaaaaaaagagttttcagaggatgtcagcaagatggctgatcagagttacctgcagcatcccctgccccacaacacacacaaaaagtaccaaaacaacaaataagcaactgtatttcaaccagcatgactgaggatgtacactggagagcaccagggccgtggcacagtctgtggagcacagaagcccaggatagcaccgtaaagacgagag

SEQ ID NO: 27041 - DNA, 1050 bp, Homo sapiens
gtcctccaaatatgtcgtatgtttaattttctctcccccactacgtatcacagaattatggagctacaattgacatgaataaactgcatgttttagcattgtacagtttggtaaatgtgctgtgtgtttacacccacgcagccttcactgcacaggatgacgaccatgtccaccaccccaggaagtctcctcacactgctctgaagtctctttctcccaccctgtccatctttctgtcactatccattaggtcgcacatccaagaattgtgtatcagtgcagtcacacagcatgcacgcctttctttatttgttagtcttaaaaatctttgtgtttcattgtggatggtttctattgctgcctttaggtgcagtaatcttttcacctgcaaccttaaatcttctgtggatcccgttctgtgtacttttcatatcagacattgcagttttcatctctagaattttgattttgggcctttttggtgtctttaatgctctatttaatggaaccatctttcccctcaccccttggacatatggagctgtaaacaaaatataaaattctaagccccccacctgacgaatggaccctccctccccttggccagtggaattcccaagttaacctgaaaaattagttcaggctgtggtgggaaggtgggggtcaggcatgcctccttctaccctcctcccgttttaattcaggcacagctgaccagcattaacattaaaacagagaccttcagatttcagatctgaagacgaaacagacgctgtagcagtaagataccaaattccagcccgactctagtatagcatcacttgacagattgcaggccctggaagaaatggaagtattttaccccaaaatatatttctttgacatattttgaaacggccctgcaaagctgtctctcgtggggaaagtctacattctgtagagaatcctcattcttttctaggtcttttccctgatcggggagaaaaccaacaggctggcaccgttttaggtctgctaagagctctgaagcctgctacctggaggcttcat

SEQ ID NO: 27042 - DNA, 1012 bp, Homo sapiens
ggctgagcacccgcctctgtgccagctgctgctgctccttttgtttttggttgtttttgtttgtttgctgtggcttgcctggctgtttagggagactattggcattcgctccaggaaatcctctctgggatggaagtacttattcacgcaggcggctggatcgagggaagcacagtttccagcaactccgcttggttatgattaatggagataaatctgcccaagagaagctaaatttagccaaaagttgagccccctgcttccgcactccgccctcaggcaccggcagagtgtgtgttgctgttggccagagcccagataacatcaagaggtggaaaacaatccccagaaatctgaaaaatgtagaacaaggaaagaaaatgttcaatccatcaaaacaaacagagatacaatctcaccccccttggtttttgtaccactgggtttaggggaaaagaaaacaagagactgaatgagagagatatgcattaaaaacacaaaaagattgaagacaggaacagagtgctcccgcacagggtcacagggcttgagagaccccggaccctcaagtgcaaggccctggtggggcagggcagtgggcaggagggaggccgggttccccagggtccacgccaggtgtccctcagccctggcttccctccctccatgcgttgcgtgctcacctttttctcttcccgaccctggctgtttcgataatcttcaggctttgagagtgaatgcattactcctgtcatttatcccacaaagatgtactgtgctgggcacaggcaggtcctgggcctgcaaagaggaataagatggtccctgatccccaggactcgagattgctgggagggcggcccagatggaggtgggaaagctggaggtggcgtctgggctgccctctgggtctccaagcaggttctggggttgcagggctctgtgagctaggggaaccctgctggcatgctgcttgttaagatcatgcttctggtggcttctgtgtctggtt

SEQ ID NO: 27043 - DNA, 1028 bp, Homo sapiens
gggagtgggtttttacggcctggtggggcagctggtgggcgatcgtcctagagatcttattgtaaaatcatcttcacgccagcacgacctccctgcttagctttgatgactgcacaaggggctttcctcacttccagcatgtgctgctgtgaacctgcctggtcctctgtgtggctgccaccctcagtggggttggggtcctgggttggggctgtgtgtccagctctggggaggctcccaaagcagggatggactcccaggcaaacagcttgccctggcaaattggacagtaaatgtgaccgggtactgggtgtccatcctacttcagatgcccccgatccagggctgctgaccagggaggaactggactatcagggaacagacacagtggcaggagcccctctgtcggttgccacaccttgctggccccacaatccatggagcaccgagcatctgcttgtcccctgggctctgtcccacccaggtcctgagcctctttgttcctggctgcacacggaagggcattgccaggaagccctgggatgcccgagaggtaggtttgtgtgccatatggagggggcagcagtgtcaggcctgtcatgcgtctgtcatacatgtgtgttactcatggagtcacagagctggggaggagggccctagagttcttcttgtctatctgccccttctgcagctgaggatactgaggctcagcacagggacgtgcacctcagagtgactcaggtgagaggacgttgatcccgggtaccaggtatgttggtgggctccaggcatcaccagcagcacctgctcctcagataaggccccagcctgagggcagagttgacctcccccagtcccaccagcacttagtgggcctcctgccagcccttgtcacaatctgctcatccagtggtcctccatagagtatgagaaacagagcttggctcgatgccatctttcctggacctcagaggacccagtggtccagactggatattgtgggctcccaggatagcagagccacctcc

SEQ ID NO: 27044 - DNA, 1050 bp, Homo sapiens
tgacaagaatatgttctgcaaaatgcattgttaggcaatttcataattatacaaacatcatagagtgtgcctgcagctcccctaggtggtatagcctattacacaccaaggctgcatgctggatggagcctattgctcctaagctgcagacctgtacagcatgtgactgtgctgaatactgcaggcaactgtgacacaatgctaagtatttgtgtatctaaacatatctcaacatagaaaaggtgtagtaaaaatgtaatatgacaatcttatatggaactgccaccgtatatgtggttctcgttgcctaaaatgtcatcctgcagcacaggactgtacttctgtgggtcagctttactctgaaatgtctgtgtcttaacctgtaatattcaacctggacagtgaagaacttagtacaagatatggtgcatgtagttttgtcctggccaaactttgtttttcaggtacacagaggccattgagaatgttgaataataactgaagttatgcttcctgcggagatggtactaagaaatgctgtattccaacactaatatttgtgtatcattgcaagggggtcctggaccctaagccaaggaccctgttttgatcagtttcttcatgtgagggctgactgtggggccacacattgtgatggatcaggaatatcttttttttttttttcttttgagacagtttcactcattcaggctggagtgcaatggcgggatctcgactcacggcaacctccgcctcccgggttcaagcaattctcctgcctcagtctccccagtagctgggattacaggcacccaccaccacgcctggttaatttttgtatttttagtagagatgggatttcaccacgttggccaggccgatctcaaactcctgacctcaggtgatccacctgccttggcctctcaaagtgctgggattacaggcatgagccaccatgcctggccaggaactctactaaaaatacaaaaaattagccaggcgtggtggcaggtgcctgtggtcccagctactcaggaggctgaggcagga

SEQ ID NO: 27045 - DNA, 1035 bp, Homo sapiens
acaccaacaaccaaagaccctattgtactttttcttacttattctactttcgtgtattagccaagcacttacactgaaaacaatgcatggacggaaagaagacgggaaaagccacagttccttctttcagttcttccattttcaccagtaagctgcaggcagtgtcaagaaggcagtagcacggccagtatcgagaagtgaaatcaaaacccttggtttagttttgcacagcacttccactgttaaggtaaaaattaaatatacatacatatgtgagctacaaaataggaatcgtgtaatctctgtgtttctgcatggggatctaatgcttttatatttgtatttaaaactgacattgcacaatataaaatgaacagtaacattcagctaaaacataaaaattgaaattttctttacttaggatgaccttaagtagcaaataacaatggtaaattattagagagaacagaggaaaaggaaaagttttgttttttaacactgttaagagcagttttccctgttttgtgaacaagggactgtgtgttttcattttatagtttctcccctaacctatcacttttgaagttgctgccctggcttcagaacctatgagtgtggagtaaagccccacctacacctgcacagagctcgggctcccctcctcactcatatgctctgtggtcactgtcctcttcgtctctaggtcccagcagaccaggagcacagatgggtcagcctactcagttctccactgggctccctgttctcagaatggtctgtgtgtggagaagactcctaagtgcctgggaataggtaagtgagttggggcagaggcctggcaggcatcctggagagggaggatgtgacgtggactgggtcagtgatggatggtggggataaggaagagagggtgaaggcaagattcttctctacagggcactgaaagccagtgcccggctaagatagatgtgggggtgaaggagagactgggaaactgggttctgggtttctggtttgggcgactgggtggatggg

SEQ ID NO: 27046 - DNA, 1045 bp, Homo sapiens
gcgatagtttgctcagaatgatggtttctagcttcatccatgtccctacaaaggacatgaactcatccttttttgtggctgcatagtattccatggtgtatatgtaccacattttcttaatccagtctatcattgatggacatctgggttggttccaagtctttgctattgtgaatagtgccgcaataaacatacatgtgcatgtgtctttatagcagcacgatttatattcctttgggtatatgcccagtaatgggatggctgggtcaaatggtatttctagttctagatccttgaggaattgccacactgtcttccacaatggttgaactagtttacactcccaccaacagtgtaaaagtgttcctatttctccacatcctctccagcacctgttgtttcctgactttttaatgatcaccattctaactggtgtgagatggtatctcattgtggttttgatttgcatttctctgatggccagtgatgatgagcatttttcacgtgtctgttggctgcataaatgtcttcttttgagaagtgtctgtttatatccttcgcccactttttgatggggttgtttgattttttcttgtaaatttgtttaagttctttgtagattctggatattagccctttgttagatgggtagatcataaaaactttctcccattttgtaggttgcctgttcactctgatggtagtttcttttgctgtacagaagctctttagtttaattagatcccatttgtcaattttggcttttgttgccattgcttttggtgttttagtcatgaagtccttgcccatgcctatggcctgaatgatattgtctaggttttcttcggttttaggtctaacatttaagtctttaatccatcttgaattaatttttgtataaggtgtaaggaagagatccagtttcagctttctacatatggctagccagttttcccagcaccatttattaaatagggaatcctttccccatttcttgtttttgtcaggtttgtcacagatcggatggttgtagatgtgtggtatt

SEQ ID NO: 27047 - DNA, 1885 bp, Homo sapiens
gtgtatgtttgtgtatctgtgtctgtgtgtgtctgtatatttgtatctgtgtatgtgtgtgtgttctgtgtgtgtgtgtatctctgtgtgtctgtctgtgtgtatctgtatatttgtgtgtgtatgtatgtgtgtgttctgtgtgtatgtttgtgtgagtatctctgtgtgtctctctgtgtgtgtctgtatatttgtgtgtgtctatgtatgtgtgtgttctctgtgtctctctgtgtgtatctgtatctttgtgtctgagtatgtatgtgtgtgtgtatgtttgtgtgagtatctctgtgtgtctctctatgtatctgtatatttgtgtgtatctgtgtatgggtgtgtgtgtgtgtgtatgtccatgtatctctgtgtgtctctctgtgtctgtctgtgtatgtgtgtgtgctgtgtgtgtatgtgtatctctgtgtgtctctctgtgtgtgtctgtatatttgtgtgtgcctgtgtatgtgtgtgttctgtgtgtgtgtttgtgtatctctgtgtgtctctctgtctgtatttatatatttctatgtgtctgagtatatatttgtgtgttctgtgtgtgtatgtgtatctctgtgtgtctctgtatatttgtgtatgtctgtgtatgtatgtgtgtgttctgtgtgtgtatatgtttgtgtgtgcatctctgtgtgtctctgtgtgtctgtatatttgtgtgtgtctgtgtatgtgtgtgtgtgtgtatgtgtatctctgtgtgtgtgtctgtatatttgtgtctgtgtatgtgtgtgttctctgtgtatgtttgtgtatctgtctgtgtgtgtctgtatatttgtgtgtgtctgtgtgtgtgttctgtgtgtgtgtatgtatgtgtatctctgtctctctgtgtgtgtgtctgtatatttgtgtctgtgtatgtgtgtgttctgtgtgtatgtatgtgtatctctgtctctgtgtgtgtctgtatatttgtgtgtgtctgagtatgtcttcgttctctgtgtgtgtgtgtatgtttatctctgtctctctgtctgtgtctgtatatttgtgtgtgtctgtatgtgtgtgtgttgtgtgtgtatgtttgtgtatctgtgtctctctgtgtctgtgtatttgtgtgtctgtatacgtgtgtgttctgtgtgtgtatgtttgtgtatctctgtgtgtctgtatatttgtgtgtgtctgtgtatgtgtgtgttctgtgtgtgtgtatgtttgtgtatctctgtctctgtgtgtgtctgtatatttgtgtgtgtctgtgtatgtgtgtgttctgtgtgtgtatgtgtatctctgtgtgtctctctgtgtgtgtctatatatttgtgtgtgtctgtgtgtgtgttctgtgtgtatgtttatatatctctgtgtctctctctgtatctgtatatttgtgtgtgtctgagtatgtatgtgtgtgtatgtttgtgtgagtatctctgtatgtctctctgtgtgtgtctgtatatttgtgtgtgtgtatgtatgtgtgtgttctgtgtgtgtatgtgtatctgtgtgtctgtatatttgtgtgtctgtgtatgtatgtgtgtgttctgtgtgtgtatgtgtatctctgtatatttgtgtgtgtctatgtatgtgttctctgtgtgtgtgtgtatctctgtgtctgtatatttgtgtgtgtctgtgtatgtatgtgtgtgttctgtgtgtgtatgtgtatctctgtatatttgtgtgtgtctatgtatgtatgtgttctctgtgtgtgtgtgtatctctgtgtctgtatatttgtgtgtctgtgtatgtatgtgtgtgttctgtgtgtatgtttgtgtatctctgtgtgtgtctatatttgtgtgtgtctgtgtgtgtatgtttgtgtgtg

SEQ ID NO: 27048 - DNA, 1044 bp, Homo sapiens
tgatttgggactcttcctcttttctaatgtaagcatttaatacgcaccccacaaattttgatgtgtgtgtttttatttctattttttctgtattatttacttttcttctaggatatttcttgaacccatgtattatttataaatctgttgtttaattttcaagtgctttgagatactcctgttatctttttgttattgatttcttctttggtttccttatggtcagagaacatattttgtatggtttcagttttttttatgaaccaggatatggtctatttggggaatttttcataggtatagaatgtatattatgcagtttgaagtgcagcagtctagaatattagatacttttgtttgatagtgctcagtttttatgcatctttgctgattttgtgtctagcagttgtattgctgagagaagggtattgaagtctacaagtttatttgtggatttgtctatttctactttcagtttttgtgttatgtattatgaagctgtgttgctcagtggctatgtattttggattgctgtgtcttcttgcatattgaccctttcatcatgatgtatgtaatggcctcttttgtccctggtaattttctttgctctgacacctactttatctgataacatatatagctactcatacttctcttcttttaagccaacatctgcctccatcctttacttctaatttaccagactttgatgttcttgagccctggcaatgccagttgctccttggtttgcagcctcatggtaatcattgtcctttctacttcgcaaaggtgtggtatccgtaccctaccatcttacctgctggcacactgcacacctgtgatggggccggggattcttagggtgcttacagctccaggatgacacctggggtggaaacccacttcactctccctcacagtctgcctcatcaattttaaaccaggtgtccctggaatcatagctgtcatatcatgttggtacaggggctgggatgagcccaaggaccaaggcattgtggcgtagaaaagtcaacctgacggacg

SEQ ID NO: 27049 - DNA, 1050 bp, Homo sapiens
tgtaagtaggtgtgcatgtgcgtctgtactcacttggcctgaggttcataacactctttgagcctttggctggtgttcattgtctgtagcacttttttttttttttttttttttgagacagaatctcactcttgtcacccaggctggagtgcagtggtgtgatctcagctcattgcaacctctgcctcccaggttcaagcgattctgctgcctcagcctcccgagtagttgggactacaggcatgcgccaccatgcccagctaattttttgtatttttagtagagacaagttttcaccatgttggccaggctagtctcaaactcctgatctcaggtgatctgcctgccttggcctcccaaagtgtgtctgtatcgctcttgccacattttctgtctgccttggcgtcccacagtgtgtctgtattactcttgccatattttctctctgctctctttcggttccagttggtcatatgttggaccttttcaccatgcaccatattcttcgtgtgtctgctcctttctgtatatcttgtcttttttttttttttgagtgtgcatcagcctagatgtgttcttctaaactgcctttcaagttactaatcatcctttcagctcgttctaatctgttgttagacctgtatttcttatatttgagttttgaattttcatcctggtttgtttttgattctagagttttcattgttataatttcaagtttactgctgatattattttgtcatctaatttcttaaacatattcatcacaaagttacacagaattatctgataattgcagtatctgtgtcttttgtaggcctgtgtgagtggtctggtccctaacgtttggtttggggttgtttaatcttggcgtttggtggcctcatcattggtgttttgttgttttccaatggcagtcattttttgtggagactttgcctggagtcatctcaccctggagaggatgcgctttaccgtcttctggcaggcatggaggtcagggcaggtcccctgagagcgctcaggaagcaagctggtgacgctgggctt

SEQ ID NO: 27050 - DNA, 1042 bp, Homo sapiens
gataggagaacactctgttcatcagctgttatgtcagtttctttactgtcagatgttacttctggtattttcttactctttgtctgtaaataatgagggttccatttctgcagaaggcccttaggccatatgggaggacatagggagggcaggcagagcttgggacagacagcgagggtggaagttggtaggggcaactgtgtcattgatcttcttatccaattgccataccttcttagtgagttatttgttctggcaagattccattaggttcgaggcgtgtgtaagtttcgctgggaaccagcgggtgagttgcagcctgcactgcaaatcccaatgtcagtggactgggaagagcacgatccatatccgcggcagtggtggctgtggtttgttatgggtaaaagtgaaatagttgtattaaatcagaactccaagctatgccttcaacatgtagatgagttgaaatctaaatctttttgcattactataattgtctgagttgatatgagcaaattgcctgaagcacccactgaaagtctgagtagatccccttgcttgctttcttactctacttggcattttcttttaagtaaattttttggattgttttggaagtggttttattcagtgtgaggatttggggaaaacacataaaaccataaagatatctctcagaggcacctgcggttaataatctgtgttcacctccttctgtctttgtacacgtgtgtgagtgtgtgtgctgtttctccctttgtccttgtatacttgtgtgagtgcgcgtgctgtttctcccttatctgtccttgtacacgtgtgtgagtgtgtgctgtttctccctttctgtccttgtacacttgtgtgtgtgtgctgtttctccctttctgtccttgtacacgtgtgtgagtgtgtgtgctgtgtctccctttctgtccttgtacacgtgtgtgagtgtgtgtgctgtgtctccctttctgtccttgtacacgtgtgtgagtgcatgtgctgtttctccctctttgagtggggctctgcggat

SEQ ID NO: 27051 - DNA, 1038 bp, Homo sapiens
cttcagctaatgtctgttcagttatgtgtgttgaacgaaactgtcacatcgtcctgatctctcatgaccactcttgtgcaaatatgtcaaatagtttgtgacctttcatattgctgtgtgagaacaaataatgtttctgtgccagccctgttcatcagggatgtttaagacctctgtctcctatacacttcagttgaatattcacttaggtgacttgcagagggaattattctcctttgtcactttgtgcctttctcttcgtattaacaatgggtagctgtagaggttcaggaagcaatacagcaagtcctgtaattagtgtggccttttccttgccagccctaatggcaaatgcagtaagttactttcctcactatggatttattgttcattctgcttgcagtttctgaccatttatgttgatcttaagggtgctgtgaggagtgcagtgatctcgttgcagtaagaatctgttatccagttgtatgactctgaattgtgagttatagacttgtgtggaacagatgtgttactgagtgattgtagagcttgaagacttttttctttttcctacactttggaagtgatgtgagtcagtaatgatgagacttaataaaatacaagcactttacctgtactacgtaatttaatcaaccagtggtctgttgaagatggtcagcagagttggtgaagtttgtttggtaccattgtaggggtcagatgctgatttcagtatgagaataaatagcttgtacattcttggagtatttacttaccctgtatgtttacatcctaaatgtgtggagggtgctctggtgtaaagatgccctctgtgcctgtgctcatttaggccctgctgtggagggtgctgtggtgtaaagatgccctctgcctgtgctcggttaggccctgggctgtggagggtgctctggtgtaaagatgccttctgcctgtgctcggttaggccctgggcttcgttgtccttccgtgcagcgggcactgcctttggcgatggtatgtgcagctgctgacatggct

SEQ ID NO: 27052 - DNA, 1051 bp, Homo sapiens
tgttattttttcctggaggagaatatggtctcctttttgatactgtgatgaaaatgcagggctacctgcctgttcctcactctgatgcccatcctcagtgccggaattcttgtaggtgctcaggaaatacctctctggatggtgggttcttgtcagggcaacagtaaagctctggttattttttgctgctcctgaaagatccatgggactaactttccttctctgttgcaatagtagaaacagcgagatgtctatgtatgcctttctattgccactctggaacttttattgtttaagcatatgcttgtaagtatgttgtatagctagacttctaagaaccttccatcaagtggcaaaaggagggaactgcaagttcaaaatgtttgtttctcagtggactaactggacacctttgcttattatgctgacatttattgagaaaaacaaagtcatacatttaacattctctagataattcttttgttatctgggaaaacagtatttcaaaaataattctgaggtctaaagtagagctgtcaacttcttaatttttccaagtaaagtcttcaatactgtcatcaggtaaaattaccccattttataaaagacatcacattatcagtaagtctgtgttcttattttgatttttatttcaatgcagtctgtgtctcagtattgcaccttttgggaataactgataggaatatccgaaaaccatttctagattctaagaaaacagtcaaagtgatcaataactacatattttatcaagtaacttcaggtcagatttctgagatggttgtgttatgttgcatgttatgggcttatattacactagagtttcttttataatcagttaacatttaatcttattctacttggcacatagctaatgatagagatttagaatcatatcacctcttttatacttttgttgatttcactcactcctctaatacagagcacctcctatatgcaaggcgcctgtgccaggcacctaggaggctgcaaagatgaacaaagatggtctctgcccagacaccaagtcctt

SEQ ID NO: 27053 - DNA, 1035 bp, Homo sapiens
tctccccggccccggcagcgagggcagcatcttgggtgcccgtgcactcgtgggtgcagacacggcactggcgtgtcctgagtgctgagttgtggctgtgcggtggtgtccgtgggactcagaacagccctgcatgcattttcttaggattgtcttttaaatgaaagctagaaagcactctagccaacactctccccttggactacatgtacgagccctggttggctgaaactgaaagtctgttacgggaaaagtcttttatttcattggatcattgacgattatctctgtattttggactactatataattcattctgaagtgatttcttcagcccttacccttgtaggtgtaactacgtggttttgcttatttccctagattttgaagatctttttgatgatgatgacatccagtgagatgccctctggctgcaggcggggccaagcccttggtacagagccgcagtgtgagcctgcgcaggacagtttcaggtggttttaaagaacacgtggaaatcccttgaatttaggacctggttaaccagaaagataagactgttcttaacgacctagatgattctgttcatctctgaacgggatcaggttttgtcctcactccaattaaaagaaagcaatgtcacatgtggagtgatctctttcttgcacttatgagtgaatgttgcagtccctaaacgtctctgtgtgtttgtgtgtgcatgcatgtgcgtgcatctgtcagcacgctgagagaaccacatttgtctggtagcagataccttgtgttaaggtgctgtatgtgctggagcaggaggcagcgcggcccgtgcacagctgggcctgctgacagcacttggaggaccttgccacggggccgcccctctgctgtgtgggcaggttcccactgtgtgtgtctgtcagcacagtcgtccttatgctgtcctctggcctccacgtcagggcagctgcccctaggcttaagaactaggacgacaggatgcgactgcaggagacgccttctacgtggaaatgcaca

SEQ ID NO: 27054 - DNA, 1052 bp, Homo sapiens
tggaaaagagcaagtcaaattatccctctttgctgatgatattattctatatctagaaaaacctaaagactccaccaaaacactcttagatttgataaatgaattcagtaaaattgcaggatacaaaactaaaatacaagaaaatcagtagcatttatatacaacaataatgacttagccaagaccgaaatcaggaaggcaatcacatttacaatggctacaaaaaaatacttaggaataaatttaaccaaggagttgaaggatctccataaggaaaactataaaacactgatgaaagaaatggaagaggacacacaaaaaaatggaaagacatcccatgttcatgggttggaagaattaatattgtgaaaatggccataccaccaaaagcaatatacagagtcaatacaatccctatcaaaataccaatgccattcttcacgaaaacagaaaaaacaatcctaaaattcatatagaaccaaaaaaatcccaaatagccaaagcagtctggaacaaaaagaacaaagctagagacatcacattacctggattcaaaatatactacaaagctatagtaaccaaaacagcatgtactgatgtacaaatagacacatagaccaatgaaacagaataaagaacccagaaataacaccaaatatttacagccaactgatctctgtcaaagctgataagaacatacactggggaaaggacactttcttcagtaaatggtgctgggaaaattggatagccacatgcagaagaatgaaagtggacctttatctctcaccatatataaaaatagactctacatggactaaagacttaaacacaagacttgagactataaaaatattcaaaatttagggcaaattctcctggacattgatctaggcaaagaaggtatgactaagacttcaaatacacaggcaacaaaaccaaaaatagacaaatgggatttaataaaactaaagagtttctgcataatgaaagaaataatcaacatagtgaagagaacctggtgaatggagaaaacatttgcaaactattta

SEQ ID NO: 27055 - DNA, 1180 bp, Homo sapiens
tgtatttttagtagagatgggatttcaccatattggtcaggctggtctcgtactcctgacctgatgatccacccacctcagcctcccaaagtgttgggattacaggtgtgagccaccacacccagtcaccaaaaagaaacttttgagatctcagataaagaatttgaaatactgatttttaggccaggtgaggtggctcacgcctgtaatcccaacattgggaggctgaggcaggcagatcacttgaggtcaggagttccagaccagcctggccaacgtggtgaaaccttgtctctactaaagtacaaaaatgagctgggtgtggtggtgcatgcttgtaatctcagccactagcgaggctgaggcaggagaattgcttgaacccgggaggcggaggttgcagtgagccgagatcgtgccactgcactccagtctgggcgacacagtgagactctgtctcaaatttaaaaaaaaattcaaaataattgattttaaaaggacctgaaatagaagagaatactgaacaaacaatacaaataaattagaaaaacaattcaggatatgaatgagaaatttatcaaagagacattttaaaaaataaccaaacagaaattctggaactgaagaattcatggaaggaaatacaaaatacatttgaaagcatcaacgatagactagatgagacagaggaaatctcaaaacttgaagacaggtcttttgaaataatccaatcagacaaaggtaaagaaaaaagaataaaaacaaataagcaaaggcttcatgatatttacgacaacataaagcaactaaatttgcaaattattggtatccttaagggcaaagaaacaaaggattagaaaatgtattaatgaagtagggccaggtgtggtagcttatgcctataataccagtgctttgggaggccaagtgggaagattgcttgaggccaggaatttgagaccaccctgggcaacatagcaagaccctatctctacaaaaaagaaaaaaattagctgggtgtcatggcatgcacctgtagtactagctgcttgggaggctgggcccaggagttttaggttactgtgagctaggattgtgccactgcactccagcctgggtgacagagcaagaccctatctctaaaaataaatcagtttttttttttaaaagaaaactaatt

SEQ ID NO: 27056 - DNA, 1031 bp, Homo sapiens
agagccctgggcggtgcccctttggccctgtggccgctgcctcctgcctgcctcgagggttaattcctaccaaattgggtgtgggaaccactccgaggatgcccagcggctggggtggatgcggggaaactgaggccaagtctcagctttgccgtgtggcagcagatgcagcccaagccagttggccacggagcacatggcacaccgagcctcagtttacccacttacaaatgaaattaatgatcctgggccttcagcaaggtggtaacttgtgtggtcctgacatgagcgtgaggatgagtgtgcaggagtgccatgtgtgctagtgggcatgcgggtgacactgggatggggatgggcagacagggaggtggggaggtgggggcactgacaggcctccctgcttcagaacatccctgtctggtcagagcctccttggagggtagggagaaggagcaggtctgttgggtcttcttggggccaggcgctctgccctgagtagaccacctgaagggtggcaggaactcacgttaggaatgaacagtgaggctccaggaaggcggctggtcaaggctcccaccgtgaaggacgaggcctgggcagtgaacacagggctttctgttcgcacacttgtgtcctgatgacagattgggaaagttgtggggaaataaaaggagacactgaatgtgacactatcattgggtacaggacagactggcaggtggaacttcagtgctgcaggcgtgacggctgcagcagtccagccatcacatctgtatcccagaagggaggggaaaggggtccctttcccaggagcccctcagcagacttctgtgggcacctccttggcctggccagcaagactgcgggaaaggggagtgtgcatggtggttgggccagccagacacagggtctgccgcatctgaggggcacagtcccagcagagcactgggatagggagctgggccagagaagagtccctgcagtgggggaggaggagtcgcagaggtcaggtcctagtgaacacttct

SEQ ID NO: 27057 - DNA, 1050 bp, Homo sapiens
acagggcattttgctctggaataaattagcctgctagttcttcgaagaaagtttagtgtttctgctgagtttcactggggactcagggctttatgggcttagctcgttcaaacaactctccttttcccacctgtccccctgggcagtgtgtacccccgtgcttggccccagattcctgcagcccttcccacagcacagctgctggaagggcttccttcccgaatttccactgctctggaatggaatcggtcgctgcccatgactgctcctcctctcagaggcgtctggggtgaggccaggcttctctcgcagctccgtcagtccatgagggcctcgttaggttcacaggggatggggcgagatggaagtatgacagcaagcgtgggctcactgcggcgtttcctgttcactttaacgtgacgttatctgttgtatttcatccctttgcctgaacccttgttgtcattctttctctttgtattttgaaggaccctacaatcatttctctaatttaacatctagaccaaccccatcacaattttccgttcagtgcatccacccatccacactcaagaaaccactgctgtccacagtggctgtgaagattccagatgggtgacgaactggcaccagggccacctttgggtgcccccagaacagggggcccattatgcagacccatgatgggcttctgtccacttggctgtgaaatttatttgtagattttgtttttcttctccggttgtgtaaacactcgtccatcgtttcagcactttaccttcttcacagggtgttgatggggtgagagctgatggctctctctgggcaccagccttgccagttgtcactcaggcggcattgagtgtttgagggcaggcgggtctcactgtccaggccccttagtgcacagcctttcagcttggaaattaaacttttcttccaagtgtaagattacacagaaaacagaatttttggtttaagactcaggataatttcatacctttttaggtttactgattggactccgtctttgaaactgattaaggtcac

SEQ ID NO: 27058 - DNA, 1052 bp, Homo sapiens
cttgcactgtggcctccactgcctacaggcaaaggcgtgggagctgctgggttcctggaagcaaggattggctccccttcttcctctgtccccctctttctccttccctttgctcctcccctcctccctttggcctcctctcctgctcttccctccttcctcttcctcctcctcctcttcctttcctctatctcctcctccttctcctgccccttgttgggtcatacctgacctgctgcctgcatacttcctccccacccactgctgccccagcctgttggggtgtttgggctgggttccctaattgaacccagacctggtacctctgacacgctttcaccatgagacttccatcatgtcctcacctcagaggccactgagacctccctggctgcccccttgcccctccatgcactctctggagtgccctccttcctgttcctcgggagagctggtccgcctcggtccctgggcggcacagcctaagcctccagagatgtttactggctgaatgcatgcatttcttgggaaagttttcttttttgggatttcttttgacgttacaaacatgatcacatgtgcagctgggtcgcgttatctctcctcggtctattgcgcttccttggcaggggctatacaaagcggaccagcggtttgggccaggtgtcgagacctaccccgatggcagccaggacgtggggctgtggttccgagagcagctcatcaagctgtgcacccagatccccagtggcttctccctcctcagataccctgagttctccagcttcatcacccacagccctgccaggatcagcctctcagaagaggagaaaacggagtggggactgcaggagggacaggatccctttttctatgactataagcggtttcttctgaatgacaacctaacgctgcctccagaaatgtatgtctactcgaccaacagtgaccacctgcccatgacaagctctttccgcaaagagctggacgcccgcatcttcctcaatgaaattcctccgttcgttgaggatggagaaccatggttcataatc

SEQ ID NO: 27059 - DNA, 1026 bp, Homo sapiens
ctttgacacagggtcttgctgtgttgcccaggctggggtgcagtggtgtgaccacggctcgctgcagcattgacctcctgggctcaggtgatcctcccacctcagcctccctaggagctgggactacaggcatgcatcaccatgctgggttaattcttttatgttttgtagagttctcactatgttgcccaggctggtctcaaactcccgggctcaagtgttcctcctgcctcagcctcccaaaggtttaggattgcaggcatgagccactaaaaaaatctcttgtcatgctttatgacccaaagtctaatttgtagatattaacaaggctacattagctttctgggattacaggagtcaagtcctgccttctaggcgaggatgcatgtcaagagccccagtggatgccccaaactgtggataagctccagtggatgcctgaaactgtggatagcatcaagccttatatatactaggtttaagtgacgagtgggtggacagtgtgtggagtatggagaagctggataaaggcacaattcacatctcaggcaggactaggcaggatgctgtgagatttcatctcaatacgcagaatggcatgtaatttaaaacttatgaattgttcatttctggaattttccatttattatttttggagtatggttgaccatgagtaactgaaactgtggaaagcaaaactgcagatacggaaggactccagtatttttcctgtgatgcgtctttctctgtaactttactttcaacctttctgtttcattatgttttagatatttcttcattttacattttttgtatttttttcatgacgcatcactctacctaaaaaaagtgtgtgtgtgtgtgtgtgtgtgtgtgtgtgtgtgtgtttattgaaatccagcccaataattgtcactggtcatttagacctgcattgtccaacgtggtggccactagccatgcatgtctcctgagcacttgaaatgtggctgggccaagttcaggggtgctgtgaatgtgaaccac

SEQ ID NO: 27060 - DNA, 1050 bp, Homo sapiens
ttgctgggattacaggcatgagccactgtgcccagcctattttacctataatttcaaagccagtttgtttagtgaagatttacttaaatctcgtgaaaactgcttggacttatttaatactaattattacttaactaattattaattatatttttattaagtaattataagtaattacttattacttaatgaaaattaagtaaataatttacttaagtaattaaataatttacttaatttcaattcataaatttaccttaatttatgagttgaaaattgcttggacttatttacttaatttataagtgctcttttatttataaaccaacttggtagactcaacctataacataataaatttatacatatatatatatatatatagatataaacatatctagacatgtatacacacacacagatacaaagattcaatagctcttaccttggaactccgtgagatagcaatacaaactcaccagtctacgaatttgtttacatgtctgaactctattagcctcaataggtaatccagtgaaggctgtggaccaaaattttaggtaaagcagtttccatggcagtttgatttttttttttttttgagacggagtctcggtctgttgcccaggctggcgtgcagtggcgcggtatcagctcactgcaacctccacctcccaggttcaagtgattctctgcctcggcctccagagtagctgggattacaggcgcctgccaccacacccggctaatttttgtatttttagtagagatggggttttgccatcttggccaggctagtcttgaactctgaccttgtaacccacctgccctgacttcccaaagtgctgagattacaggcatgagccactatgcctggccctttttttttttttttttctgagatggagtcttgctgtcacccaggctagagtgcagtggtacaatcttggctcactgcagcctctgccccctgggttccagcaattctcctgcctcagcctcctgagtagctgggattacaggcgaacgccactacgcccagctaatttt

SEQ ID NO: 27061 - DNA, 1057 bp, Homo sapiens
gctgtcttcgccacaaggtgcgggggaccctccagcggggaggtccgaccctgacctggggcccagggttagccgggattctccttaaggcaagcagtaaaaatccctgaactgtgttactccctgagaaactagtttctggagaaatctgaaagcctcaacactgtgtcagcaacctactgaggaaaacgacaatagatggtaattggaaccttctcatgtcccttcctgcctgcacactctgccacccgtgtcgccgcctagtggagggagggaacgtttccctcacgagatggggctcccaagctgtctccatcttcacagctctgttgttcacagccaggggctgccctggagtctcactgcagcatctcacgaggtccccctgtcaccccatcgtgcttgtccctgtttgtgggcctccaaaactcagtcccagccctggcccagtgtgatgggtgttggggaccagcctcaacaccacccgtagagtgcccaaagtctagtggggacaaaggattgagaagagacaggttaagaattgaaaggtggggagccagggggccagttgcaaaatggaggctgcaaagggctcagagttctggtctccacactgtttattgagcacacttagatctgagaagcagatgttcagggcgaaacagtgaaagggtggcagtgtgtcataggtgtaatctatagcaatattggtttcagtgaatctcctttgtgctcaaacagcatatcttttaacttatcggagagtaactggtgggagcgggcttagctaggagcctgcatgtctgtccacagtccagggcttcaaaggagagtctttctccttgaacacagtgtttacagataagagagcggatctcgctctgggcatgggaacatgatggcaattaggaggctttcctcctcagaggcctcttgtggctttccacaacttattgtcccatattttcatggcctgtttatgcaggcaccccacaagcccttttcccacaagcccttttcccaacaatgggctttgggaggtggctgggtttagatg

SEQ ID NO: 27062 - DNA, 1096 bp, Homo sapiens
tgggtctgagaaaggaggaaggcgcgttgcgtgggcgcggcctccccgaagcggctttggccctcgcttggctcctgcccgtgctggcagctcccacccctagccctgccctggagcagtcttggggactgtcctctgctggcacccccaggcaggcaccgtcctgtggcttggctgaccaggccagtgggccttcctgtgccatggacggtgctggcgtcctcagccccatgatgggccgggctgctccaaggccgctctccctgacgtgcggaggctcaggatccccggcttctggctccagcctggggccttggccttccatgcgcttttccatggccttgcctcctgcccgctcccaggccccacgctttgcagcctccctggctcagagtgggcctgtggccacaggccgcttccctctgcctgtcccccaccccgctcccgctgcgctgcccggccctcactaaccgtgtgattgtttgtgttttgcaggcagtttcttgattcggacatacctaggtatcatctgtgacccttggtttacccttggtttcatttcagcctcttctttcctccctgctcctcccctgaccgccccccatgcccctgagaagttaacttccagcttcctggactcctcacacacgtgctcacctgtcctcctgttcctcccgtcttctttctttttattctcttggaatcttggtttgatttctttattgctttcccaccctgtcctcttggctgagtcccttcttcccccactcctgattttggctgctttgtagtttcctgctccctagtagacactggctggcctcctgctcctcctgccccagccttgcctgccccgcgccacaccctgccctgtggatgggctcggtgtcccgcacgctgctggctggcccgctgcccttggctgcaccaccctgtgaggaccagccccgctcccctctccctgcaaggggctgtagcaggcagagccatgagcacaggggttggggaagggcagacaggatccagcccaggagaccctcacactccggcacattccacagcctctcgtgagtccctcacctggccaggccaggag

SEQ ID NO: 27063 - DNA, 1438 bp, Homo sapiens
gccccccacttggcttctaccacgtccagaacgtacgttcctgggcacttctccccatccctgccactgactgaccctcccagggcctctctgagcatggctcattctccctcttctgaacaccagttgtgggccaggactgccttgtgcaccgggaactccagtgccaggcagggtgtaggagcgatttctgggcagtgggagacccttgatggatttacagctggggcatgggggccgctcagagcccctgggagctgctcatagtgagcatagagccgatggggagccggatgcaggtgcagtggggcctgggatttgtactgagggccgggggtgctcagccagggcagccctggcttgggtgttgggaatgggaaggaggcagggccacaggggctacagggtgccggcaacgtcccgagaggtctggaaaactccaggcaggagagtgatggcagctgggctgctaggatgatggagaggaggggcctttaaggcggagcagctccttctccaggcgggagaactgggctcctggggcagcaggggaaagagtgcctaacggtgataaggaaagctaccagggagccaggccttgagtgccaggccacgggtgtggatttggcaggggtgataacctggagactcagtgggttagttggctgggacttctgtcacaaagcaccacaggtgggggcatctaaaaacaacagaaatgtggcctcccatcgctctggaggctggaagcccgggatgagggtgtgggcaggattgcccccttcttaggcctctatccttggcttatagaacagccgcctcttccttgtgtctgttcacatggccctccccctctgcgtgtgcctgggcccaaacttccgcttttcatagggacagcagccatgttggattgggacctactctgatgacctctcgttaactccgttttctctgtaaaggccctatcccaggatatactctcattctgaagtcctggggttgggacttcaacatacgaatttggtgaggggacatggtccaacccataactcttgctgagtggggcaggacctaagaaggggagtcctgaagagaccagcgctgccctttgtcacctttcccagctccgtgttctgaaagggcagctgagccacgcggcccctgttcgtcctggagagagagcccgagggacacactccagagtctgtctggggcacgtggtgggaggaggggctgggctgaagggcctagaggaggctgctgcccctgggcagacgtgggcccagctaggggtcccagatctgggcctgaagcgcttagctcactgatgtgactctccttcccccttgaatgtgacctggccgtgccctcctgtcctcccacctgcctgcccaccagatcgcagtggaggtgaccaagtccttcattgagtacatca

SEQ ID NO: 27064 - DNA, 1057 bp, Homo sapiens
gcggcttgtgccgtgagggaaggtcccactcccttccctgcctgccccgggctcctccaccaaggtctcccctcaccaaggagcactctttttcctctcaaaggccttggctgcctgggcaccctagggagggagtagtacagacagacagacacacagacaggcagatggatgcagagaggacgtgcatccatggctgcaggggggctcctggctgccgggctggggctgcttagaggagcgacctggagcaggctgagatggccatacccctccccagatggcaagtcccccaactccgagatggctcatattctccaccctgagttacctcatatcccctgcaagatgcaagatgtctggttctcccggctctgctatcctggctgccttgggtgattttaatcccacctaattaatgaagttaatttgactctaatgttaaattctccttagcccataatttctttcttttctttttttttttttggacaaagtcttgctctgtcgccaggctggagtgcagtggctggatctcggctcactgtgcaacctctgcctcccagttcaagcgattctcctgcctcagcctgccgagtagagtagctgggactacaggggtgcgtcatcacgcccagctaatttttttatttttagtagagacggggtttcaccatgttggccaggctgctctcgaactcctgacctcaagtaatctgcccatctcggcctcccaaagtgctggaatttcaggcgtgagccaccacgcctggccagccaccctgcccagcctagcccataatttctaaatgctgtttatagcacctcccactggccatgtcattgcttgtcatccagtcactgtgataccacagtgctgagaatcagggggcccagctggggagtgagggtgaacaccagggaagggccccagccctgctgctggaaggtggggtgtttaccagggctgcaatactcagggaagctgggaacacctatcacctctgtctcccctccaggaggtgccacccccacctcaccaggtcctcccaatcct

SEQ ID NO: 27065 - DNA, 1114 bp, Homo sapiens
tgcagggattttcaacacaaggaaacacagattctcagaggtcatccccccgtccacgctggcagccactcctggctgtgagaagagatagtggcggaagcactctggagtgtagacgcggctgcacctggtggctctaaggggctgtggtgtaggcggcacgagtccagccacatcaggaacttgtccccacttagccatagggtggcctggcacatccccctcccctgtagcctctggaagagctgtttgcctgagggacagccctgccccacatccagcctgttctgcggaggagttctggggagcctgggagtggcctgggcaaggtccaggagttcagcgtctgccctggtcccaggctcactgtgccccctttccttctgcagacagacccttcctgctcttgatcctgtcccaggctcgctgtgccccctttccttctgcagacagacccaggcttgctgtgccccctttccttctgcagacagacccttcctgctcttgatcctggagcttccaggggcagcccagaggggcttgtcccttcttcacagctatgaggctggggcactgtaggatgggggctttttgccagattcccccaagggtggcacttacagatggggacgaccaggcagaaggttgcctcttcatggaatgtcagtgtggaagggtttcaaggaggcctcccagcctttgctctacttggatgcctctggtgatgtgggactcaccactgagtgggcaccctagagcatttagacagcaattggcgaaaacctctcgtgtcaggctgcatgaattctgtttcatggagttctggccattcctgtaaccaacagctctgtcccgaggctgtccctgtccctgtgcccaggagccccatcgttcaggccgcaagtcccacggggaagcagcagcatctggctggtcagcccggaaagacctttcacagtggctgcttcgtcactgttttgcggggagttttcatcagccttcctcagagtcccagtacccgagaggccaaatcattttggggttcctgaccaccaccccgtcatttcacagacggtaaactggggcccaggaagctgtcacacagctggggtaa

SEQ ID NO: 27066 - DNA, 1038 bp, Homo sapiens
acataaaataactaggttcaaagagatcaatgcaaactttagaattttatcagagtagtcaaaacaatcttggaaaggaagtacaatattggaggacttacacttccagatttcaaaacttactacaaatctccagtaatcagtgtggtactggcataaagacagatatacagactgatggaatgaaacagaacccagaaataagccttcgatatataatcaaacgattttcacaagggtgtcaagagcattcagtgaggaaaggacagtctttttaacaaatggtgccagcaaaactggacatccacatacaaaaggatgaagttgggcccttacctaacaccatatacaaaaattaactcaatatagagccaaaacctaaacataagagctaagactgtaaaactcttagaagaaacaatagggcaaaagcttcatgacgctggatttggaaatgatttcttggatattacactaaaggcacaggcaacaaaagaaaaaacagacaaatcggacttcatgaaaattaaaaattttcctgcatcaaaatacactattaacagagtaaaaaggcagcctgaaaacaaaataacagaaaatatttgcaaatcatatatctgataaaggattaatatcctgaatatagagagagctcctaaaactcaacaacaaaaaacccttgtttcaaaaatgagaaaggacttgaacagacatttctccaaagaaccaatgagcacctggaaacatgttcaacatcactgctattaaaaaaacaaacctggcccggcgcggtggctcacgcctgtaatcccatcactctgggaggccgaggtgggtggatcacgaggtcaggagatcaagaccatcctggctaacatggtgaaaccctgtctctactagaaatacaaaaaattagccaggcatggtggtgggtgcctgtagtcccagctactcaggaggctgaggcaggagaatggcgtgaacccgggaggcggagcttgcagtgagccgagatcgtgccactgcactccagcctgg

SEQ ID NO: 27067 - DNA, 1053 bp, Homo sapiens
cccgagggttccctgtccctcacctctcaccactctccacttctcccccaacatgccagggacactcctgacttggggccctggtaactgtcctctggctctggaatgtccatccctcctccatgtctgttcagcatcgccctccccaggaggctgccctcttgctgcaccagccctgcccatccccagcaggctctcctggtctcgtcctgtcatctcgtcctttttccctttgcactcaccacctgccacaccacacaccacactctcactgctgtctgttgtctgtcccctcatctgcaatgaacgggtcctgaaggcagggctttggtctgctctgttctgatgtgtgctgagtatctagaacagtgcccggcacacagcaggtactcagtaagtcatctgttgactaaatggacagtgcccggcacacagcaggtgctcagtaagtcatctgttgactaaatggactgtgtgaccgacagagtcatagagtgttagcaagaaaggacctaagagatgggctgggcatctctccctccacagcccattttggagatggggggcctaaggccacatcatgagttaatggcagaactggggccggcattctcatgagctgtttgtttttccagggggctctgaggaagagaagagaggaaggtcacatcagttggctctgccatccagtggggactgggctgatgtgtgggaaggaaggcctgggggcctggggaccaggagcctgcgttcttctcagcccctgctcctgagctgcatggacttggggcagttattcggtttttctgcctcagctgcctaatttgtgacatggagggaatcgatggtcaaagcaagtcccttctgtgactgcagccatcgtccctcctcagggttagctgggtagctttgagacagcactttgaggagtcaagaacacacgacaaatgcggtaaggcggaggacagaaaccaacttacacgtggtgacagacgcctccctcccagactggaaaggcctttgtctcggagaacagccttgtgcaggggcggg

SEQ ID NO: 27068 - DNA, 1138 bp, Homo sapiens
acgagcgtcataaacacgctggaggaccagagcaggggcggctgtgtctgcaacccggctttccttctgacatcacctggtctctgcccttcagcccctgcccccgtctctgttttggaagtggtccatcacagttccttctcaatttgttgggcctcgaagggagaattctttctctggctttggagtctaagaacaggtttctgcatactgcagaagcgtggctgactgacagcctcactgattccggggaatggcgagctgtcatctcatccgcagagacacagactacaccttcaggaactgcagcttgggtgagggcacaggctgcttaaacgcatcgcaggactcacaggtggttggtcccagaggggtctctcagggtgggctggtgtgtgcacaggcctggccatctgtcctctagaggcctgaggagagaggtcacagaggggactgactccagctaggaccttttctcagggtgtcctttttcatccagtttttagacctcatcttcctgggtgttagaaactcgtgaggttggtggagtgtaacaagaacgtcttaaatcctttgaagaaaaaacaaagtgaagcatgaggagaatgacaggcattcccactcctctttaaatgggctgcttcctgcttctcttagtggccctcagggcctctgtcacccagaggaccccacgttcttagagcaccaggattctaccatatggcagtgcacacggggaggaccccgcgttcttagagcaccaggattctaccatatggcagtgcacacggggaggggcagcctccaccgactacatccccatctttaggaacatgtgggctcagcattgcaacttttaaatgtgaaatcacagcctgttcctcttccctgccctcctccttccggtaacgactctgggtcttttctccaagggcacagctgtgtcaggttgctctgggttgaaatgaattctcgtgttgttcttggatgggtgtctgggtgcgtgtgtttctgtttcctgcttttttgtgtgttgtctccattatttcaagaataggtattctataagtcagtatttgataattagttgggggtttctgatttgtttttatgggagtggatgtgctaggcaagcatt

SEQ ID NO: 27069 - DNA, 1036 bp, Homo sapiens
cgttcggccgtcaggtaagctcgagctgggcgcgcgggcttctccgggtcgcaggcgggcgggcagcgacgcagaggaaccgcggccgccgagtgtttcacggccaggtcgtggagccctcccggaggtccgtgcacgctgacctggttttggcatcctggacccgtggctctgctcaattattgtgggatatagagttgacattttttttttttgagacaaagtctcgctctgtctccaggctggagtgcaatggcgcgatctcggctcactgcaacctccgcctcccgggttcaagcaattctactgcttcagcctcccaagtagctgggattacaggcgcccgccaccatgcctggctaatttttgtatttttagtagagacggggtttcaccgtgttggccagtctggtctgtaacttctggcctcaggtgatccacccgcctcgaactcccaaagtgctgggattacaggcgtgagccaccgcgcccggcctgagttgactgttgaacaagagtttgaacttcacaaggaagataacatgtacttttcattaagaggaagcggaatcagcatagaggtctttaggcttgagcccagttccacgggccgcgcccgctgaccccagcgactgccaggtgttcctggcggagggagcatctggacaggggaggctggagagcagccagagcttgggcttggcagggtggccccagggcgacaatcgatgacgctggagaaggggttgggaccgatgtgaaggttttagagcaggggttccccaacccccggtaccgtcccttgcctattaggaaccaggctgcacagcaggaggtgagcggcaagtgagccagccagactgtatttacagccgctcccttcgctggcattaccgcctgagctccgcctcctgtcagaccagccgccttagattctcactggagcgcgaaccctattgtgaactgcgcctttgaggggtccaggttgcgctccttatgagaatctgatgcccgatgatctgtcactgtttcccat

SEQ ID NO: 27070 - DNA, 1028 bp, Homo sapiens
aggaaataaatggtagcatggatgaggatgtttacggtgacaggaaataaatggtagcgtggatgaggatgtttacggcgacaggaaataaatggtagcgtggatgaggatgtttacggtgacaggaaataaatggtagcgtggatgaggatgtttacggtgacaggaaataaatggtagcgtggatgaggatgtttacggcgacaggaagtaacaatagtcctttgggtgtcttctccctgaagcttgctcctccatttggcccactgtgtgaacacccaccttcaccacgtccttcttgtttgctttcatccttcggtgtttttccctgttcagtctcgtcctgcagcacccttcacatcgtcgccacagccatcttcctaaagggcatgtgtgtccatggtcacaccaagcccgttcacaccaagatcgtgaacatgcctgatcacgtctgaagggcacgtgaccctgttctgaagtggcctgcagctcccgtggccctcagcaaagccaatggacgtgtactctgcttcctccaggaagccctccccccgctcccccctctggtagacacgtcttgtggttggtgtccacaaggaagttcctgattagcctcggagctgcccgatggcctctccactcctggcacatggcctgctggctggcctggggcagaagtgcgtggaaatggagggcgtgtttgaggggtggagtgaccctcctcttgggaaaccactgcctggcctgtgtgctggtcgggaagggccatggtgcttcccatgggcgggcttggcaagcctgcgctgagtgccgtggcgtcctgatgcctcctcctcctcacagctacagagggccggagctggagatgtggtctctgggagtcactctgtacacgctggtctttgaggagaaccccttctgtgagctggaggagaccgtggaggctgccatacacccgccatacctggtgtccaaaggtgagcgtgagctgcaagtggtagacagtcgacactgtccttagagaccag

SEQ ID NO: 27071 - DNA, 1046 bp, Homo sapiens
atgatttttggcatcggtattgagatatagttcacataccatataattcacccatttagagtgaacagttcagtagattttagtatatacagaattgtgcaaccatcaccacaaacgaagaacatttcatgacctcagaaagaaacctcatacccatcagtagtcagtcgcataacccccgtcctgctcgaatttcctccatcccatcctgggcaaccacaaatctactttctgtctcaatagatttgcctattctggacacttcatataaatggaatcatgcacagcatgctcttttgtcactggattctttcatctaacataatgttttcaaggttcatccatattgcagcatgtataagtacttcattcttttttatgaccgagtaatattccattatatgaacagacaccatattttgtttatccgtttatcagctgatggacatttgtgttgtttccattttttggccattaggaataatgcttctatgaacaattgtatataagatttgtgtgaacatatgttttcagttctaggcatatacctagtagtgcacttcatgggtcatgtcgtaactctgtgtctaatgttttgaggaactgctgaacagttttctaaaaaggttatactgtttttacattcccatcagcagtgtacaagggttcctggtctacatatccttgtcaacacttattattgtcttttcatttctagccattctagggggtgtgaaggggtagctcactgtggttatgatttgcatttccctgatgactaatgatgtcaagtgtcttttcatgatcttattggctgtttgtaaatcttctttggagaaatgtctgttctgatcctttgcccattttttttttcttttgagacagagtcttgctttgtcgcccaggctggagtgcagtggcacaatcttggctcactgcaacctccacctcccaggttcaagcgattctcctgccttagcctcctgagtagctgggatcacaggtgcacaccaccaggcccagctgatttttgtatttttagtaga

SEQ ID NO: 27072 - DNA, 1027 bp, Homo sapiens
acgcccggccccctggcccctggccccttctgtgtgggccccatctgagagccatttcccaaatctgagagccatttccctagtcggctgtgaaatcggatggtgtttgtagtcaatcagttgtttttttactgttgtggagtttaccagggactctccaatctctctctcgtttcctctcacacctcctcaaggcagcagcacggacttccccttgcaggtggggccgaggctaggctgcacggctgacggggggtttgggggccctgagatgaagcgagagcgctgaccaaagcattggcaagttctcctgtactttactgttgggcttttggtagcattctctgcaaaatcatttctaaatgtggacttaatttggagaaatttgagactaagtgctttattttttaacttggtcacaaaatttggtctttttcttgttataaattggtggcattaaatgctttgtacttagttctaatggagaatcggtgcaatctctccttttgactcatctgtggccctacatgatggtcacccatgtcattatccccagggtggacaatgtcccagaaggaagcctgccagtgcacggtgaacaggcgctgcccaaggaccagcaaatcactgccttggggagagaggaacctgtggcaatagagagccccggacaggatcttctgggagaaagcaggtctgaaccagtggatgtgaagccatttgcttcctgcgaagattctgaagctccagtcccagctgaggatgggggcagtgatgctggcatgtgtggcctgtgtcagaaggcccagctagagcggatgggagtcagtggtcccagcggttcagacctttgggctggggctgccgtggccaagccccaggccaagggtcagctggcggggggcagcctcctgatgcactgcccttgctatgggagtgaatggggcttgtggtggcgaagccaggacttggcccccagcccctctgggatggcaggcctctcgtttgggacacctactctagatga

SEQ ID NO: 27073 - DNA, 1106 bp, Homo sapiens
gcccacgtccacctactcttctgggtactgaactcctctctgggaggctttgcctctgaaagacttcttcactctgcttggtagggcccggctctgcaggtgcctcctccaggactgacatccttgctgtgttctactgcactgttcaccttgttggcctcatcctgaaactggttctcctttttgttgtacagctgtgctgacagcaatgggagctgtttgcttcttagcttatgttctggtgggagggggacagttgcttctagaagttcgccgagatgctccctgcaaagttgtccttgcttctgtttggtctgaggtggggtcacttgtgtcttctggaatcaaaactagcaatgggaatatggttactcggtggcaccattaggtgctgtctgctgggtttgggttcccgtgtctgcagctcacagtggatacaaaggacaattttaaaaatttgggcctggacgtgcaggtatttctggttaacgtctgagtcaaaatttagtgatctaaggtcatgtgaagccagactctgttctttcttgaggccaggctgtggctgtggagtgcacgggaggctccaggggcctatgctgttcagtgacaaactggcccacgtggacttcagatgcccaggaggcacagcgggaaaaaggatgcatctttcctgctgtcctccccgctcccgcagagggtcccatcagtttccctcctggataggcttgtaactctcagtaacctaattaaacttccacaactttagttggtatttatttactttctcccatgaaggacaaaaaattgcatgcccttaccctccctttgctttttttccccctttccatttcatgttagttacttttacaaagaaacttctgtaacatttacaatatattctgaatagttatattacttttttattattttattttttgagacagggtcttgctctgtggcccaggctggagtgcagtggtgctgtgtcctctcactgcagcctccgcctcctgggctgaagcgattctcccacctcaacctcccaagcagctgggactaccagcatgtgccaccacaccttgctaatttttaattttttttttgta

SEQ ID NO: 27074 - DNA, 1049 bp, Homo sapiens
cctgttgactctgcctcctcctgctcggactgggcactgacttcccttcacggcgggtggccttccctctcaccacttctgggtcccagggccaatggactctttcctgttctctggggtcctgaacgtcaagtcagccccctcttcacgtaggtgaacatacatgtcccggcacctgagctgcagtctgacatcatcgccatcacgggcctcgctgcaaatttggaccgggccaaggctggactgctggagcgtgtgaaggagctacaggccgagcaggaggaccgggtgagcaggaggtggccggggcactgcccagagccatggtgctcagctttgggcacatgtcagaatctagggaagttcttcaggatcccagcatcccagcgacatctggctggaggtgagatgcaggcagtgccaggacgcagtcagcatccaggggtcttgctgtggaactagccaagagcatggcacctttctctttttcataaaaaagtgacaaagttggacttccgtgtaaatttgcagtttctctcaaaaccaaatcagagtggtacctcagacctacaagaaaggtcaaggttgcgagaggcccccaagcatgtgctatgcagtgaggacgagcatcggggacccccactaacctctagcacagggtggtcaaagggcgaatgacttcctggtaagcagggatgaaacccccccaacctctggcaaggctgacgtttgaaggattgtatgagcggagcgctgcagacgcccagcctctggcagggctgacatttggaggattgtgtgagcagagtgctgcagacaggagcaggggttctggaacttggagcagactgtgctggggtgctggtttgctaagggggttggctttccactcctcccgtgagcacgtcgagtctggtgaatggggtggagctcgtgaacctcacatggtgtcagtgtacccctgcgtggactctgggttgtctcctgcagccaggtcatacctgtagcctttggccatgggtgttcaggggctgtggctgccccctctt

SEQ ID NO: 27075 - DNA, 1124 bp, Homo sapiens
tggtggggaggcgacctgtgggatgcgggtcggttgcctctctctcacttgctctgcatttgtgaaacaaaaggtatgccctccactctgtgttatcagatgcccgccctccactctgtgttatcagtcttggttgagctgtttgggcggcaggtggccctgcagcctgctgagtgcacatagtgtcatctctctgggcatccaggaagcatgtcacacacagccattcaagcccctttgttttcctgagaatacagggtgttttgagtaggaaactaataaactcatactgcactctgtctatgttttacacttcagtggttatttaaaactttgattttgatagaatttcacagaatagtataaagacacatcctgtggcaccagtttcttttctcaacttctccccttttacacacgttttttttctgaatgtcatttttagacatgtccctttattcatggtgggtattttcttagaacaaggacattctcttacataattctagcacatttatcggaatcggatttaacattatataacagtagtatctaatatgttgtcggtattcaaatttgccagtttttctccttcagaaacacctacttccccatcctaggatcacccttgatttcaggcaggcgtctgtctggtctcctgctcatttatttacatcacacacctcctgggttctgtcttagtgataattattgttgtgtctgttttgtgacacttattgttgtggtgtctattttggtacacacgcggtgtcccagtgtggcctgtaggagcccctccagctgtcttctgtgtcctgttcacacgcctcttcacttctggggctctcgctttctggcataaggagctggcacaggtttaccttggccttgccctttctgtctcccctagacctctcaccccccttcccactgcctctcctgggtggggctgcgtgctggccgccttccctgatgagccctgcctcacagtcaagcctcacttgtgcagtgggtctgccctgtgttcctcccatgaactaactcatctgatctcactgaagcctctgctgtagttagttgctgttagcttcatcttcaaggtgaagaagggagacacagagctc

SEQ ID NO: 27076 - DNA, 1050 bp, Homo sapiens
agaggcacagaaggagctggaggccttgatccaaaacctggtagggagcgggcctcggcggccgactctgctggggccgtgatggggtggcttatcttccatctcttcttaacactgcaggataatgtggtggaagactccatgctggtggaccccaagcaccaccgccacttcgtcatccgcagaggccaggtcttgcgggagattgctgaagagtatggcggggtgatggtcagcttcccacgctctggcacacagagcgacaaagtcaccctcaagggcgccaaggactgtgtggaggcagccaagaaacgcattcaggagatcattgaggacctggtaggcacttgggtgctcggggaggggttctcaccccccagtggccactcaccgaagccgtgtatgagtgttcgctccaccctgtagggaggtgactccctcatacagccctggaaggcttcagaaggggctttctggtgctcgctcttctttcctcagcctgtctggcctccttcctgatagttggtgagaattctgcctgcgagaagcacttaaaaaaaaaaagagagagagaaggagaagaggagaggggagagagagagaggaaagaaagcaagagaaagaaagaaaatgcattctgtataagggatcaggaaaaatgaaaatgcagtctaaggggtcagctctcttctcccctctgtgaaggaaagaaaatcgatttgagggcatccacgtgaatccatgggaagtcatgagaagacgtggtctttagaagcagtctttagagagtgtcccctccaggccactcccctgccagggccttggattccctttccctaataatcaagtctgatgcctcctcatggagtcagaggctaccccaggaggtcccactcctttggctgaattggccaccctccagggatggcacctggccttctgggacacatttcagaggaggcccacccccttagacctgtcctgctacctccctcctccctgcgcctggagccctggactcgggagaaggggagcatctgtgccaagtgg

SEQ ID NO: 27077 - DNA, 1091 bp, Homo sapiens
ttgagttgaggggaggagcgatattggttttctccatgagtttctttaaattcattaattctttgcagtgttctaatctgcctcatttcatctaatatcattttcattttagatgttgttttcttccctagaagttcactctgaattagtatcttctgtattttcagttcttaacatgttcagtctttctgcttttggccatagacaatacagttaaatacctgtttttctgtccttggctggctgattctaacactgtcatttctgggtggttttctattttcttttcctcgttatgggttttccccctattctttgcatttctggtgtttcttaatgagggtgtttttgtattcctctgaatattattttgtgtttgtgaagtcactctgaaacattttgctccttttaggacttgcttttaacgtttattagggaggatcagagcagtatttagttcaggcccaaatatttccactgctgagataagatccttctgagtactccacgtcccagaaagttgaaactgctgaggacggttctggaccaggctccgactgagctgcaggcactgtttcctggtgtctgagctgtaggtactataccaggccccgactgagctgcaggcactgtttcctggtgactgagctgcaggtactgtaccaggccccgactgagctgcaggcactgtttcctggtgtctgagctgcaggtactgtaccaggctccaactgagctaaaagcactgtttcctggtgtctgagctgtaggccactatacccggccctgactgacctaaaggcactgtatgaggcccagctgagctgcaggcactgtttcctgtgatccttctggggattctttcccaggcccagggtgatttcttcacgcgtatcagtatatgagtggctggtctccggatctcagaggttctcgatgccagtctctttgggctctgatctccggatggttctgtttcctcaccttcccgtactgtggcagcaacttggggcagctgtagggctcaccttgtttcctgtctccagggtcttgaaagtcaccattaggcggtaagttcagtccagtccctg

SEQ ID NO: 27078 - DNA, 1045 bp, Homo sapiens
gtaatttgcaacgtaagttagttgttggacaaatgatctatctcacttaccctcatgacaaacctctgaaggtttgtttgcaaataccagtgctctgtcgtgttcatgctacccttaggggtagaagggatactgtattttactctctagcacaggtggtgaatcgggctgtgttttttgtctttaaggtggaaaatagctattcaatttctgttccgatcttcaaacagtttcacaagaatatcattgggaaaggaggcgcaaacattaaaaaggtgataacttgtccgctgcatcttgcttcttcttgccttgtcctctgtagccctgcaccattttggttttagactaggagggactcttccttacttctagccctgtgctcaactgtgtctcaactctgggagagctctagtcagcttctcatggtgatctctctccctgtagattcgtgaagaaagcaacaccaaaatcgaccttccagcagagaatagcaattcagagaccattatcatcacaggcaagcgagccaactgcgaagctgcccggagcaggattctgtctattcagaaagacctggtaatgggagatgttttctaatggagatcctccagtaaaatctctaacagcctctaagattgagcctggggttgagtcacgcagggtcattgggccagcgcaggctgatgtggaagattgcacctttcaatccaggctactgatgagttggtcagcagttttctgcctttgtctctcacgatacttacttacctggaccctgcagcagtaacatttgacgtgggcacttgtcttattagacattttcttcttgttacctgaaaatcttatctgaaggtatttacggtattttctttcctttaaaaaaaattgacatgcagtaaattgtacatatttacagtgtacaatgtaatagttttgacgtgtgtatacatccatggaatcattcccaccatcaccccaaaaatgtcccatgccattttgtattacagtctccctccatcccacttggcagctcctgaaaacc

SEQ ID NO: 27079 - DNA, 1035 bp, Homo sapiens
ggagcatgtcgcatgtcgcatgctttatgttagtggcttctgtggggcaaacggtgtccttagtgagaggcaggattattcggccacagtatttagtttcctgactatggctccctaaccctccctttcaactttgtttgatggctgtggatatgtccctccctccctcacatctatgtgaagcagtttgggatcagaagccgctccgaagagagctcccactgggagctcaggggctgcagctgtgccattctgttttagctatctctttggttttggtgtggtaggttcacatcgagttcacagagggcgaagacaagatcaccctggagggccctacagaggatgtcaatgtggcccaggaacagatagaaggcatggtcaaagatttggtaaggtaccccttggaatgttgtgtgtgctggtgacaagggaggctctgagttgggcatgggcggtcatctctcgatgacatcccacatgtccgggcacagacacccagggcatcctagctgggtgagtaataggttctgaaacaaccagaagctggtcgaagtcctggaataatcgtgggtggaggaaacttcatcttgaagaaggcatctttcaggggagatgcaggggcagtctccaacaattcctgacagctgagtggtcagaaaaggcaaccgtggagactgctgggttttggttcagctcattggccaagtaaccaggcgcatccatggacctctgtgctcctcctgcagattaaccggatggactatgtggagatcaacatcgaccacaagttccacaggcacctcattgggaagagcggtgccaacagtgagtgaggctgtctgttgcggtggggccagtgtgccctgagacccttgtggggggtgtcagctgtgagaactgtgacgtccgtgcagacagtccaggcccattgctgcctgtaatgggagttacagactttacatcctcctgcctgctggaagaggccacttttccttttccctttggtgcagtggttggattagagctgcttgg

SEQ ID NO: 27080 - DNA, 1726 bp, Homo sapiens
acgtgctgtggagaggctagaagtagaaaaggcattccaccccttcatcgctgggccgtataatagactggttggcgagatcatgcaggagacaggcacgcgcatcaacatccccccacccagcgtgaaccggacagagattgtcttcactggagagaaggaacagttggctcaggctgtggctcgcatcaagaagatttatgaggagaaggtacacgatttagaggaggcaaatccccatgggcaggaatagaaatgaggatttgggtctggagattcagttaaggcctggttctgccccttatctttttgtccttgatgaagatgcttattgtctctacacttgagtgacccgggtgagatcggtgcccgcccccccttgctgttgagcatctgcctggcagttgtccttgccgtcctgggcctctgactgtgctgacaggctgccagctgggctgccccgggtcagatgcacatcccggacttgttcacgtcttagattaagctgttagctcagcttagtgaactttgaggtctgaaacgtgttccttaattgagggaaaggattgggtgttttgcagtgttcaaggacgaagttatcagccggcgggtgactagactgaggggaaaaatccagtccttgaacagtgaagtttctggggattggctagtcctgatcacttgttgttcacttcttgggatcagcatctatagtctgggccgctttggcttgctttctgcagcagtggccatgcccacctgcccgcttcccacacctttccctttgactgccccttatggtgctcttatttagaaaaagaagactacaaccattgcagtggaagtgaagaaatcccaacacaagtatgtcattgggcccaagggcaattcattgcaggagatccttgagagaactggagtttccgttgagatcccaccctcagacagcatctctgagactgtaatacttcgaggcgaacctgaaaagttaggtcaggcgttgactgaagtctatgccaaggtaactgcctccgagcatgaagtgtgtctcctttgagtggagtccgcggggccttcatggatgagctctcgatttgtaaatcctggggcctggacacagtgcaggtgcccaggtttggggagagcgtgcctctgagccccaggtgagcagcctggctttcactgtgacacgaccttgagctctgcaaacccatggctgttctcccattttcttaggccaatagcttcaccgtctcctctgtcgccgccccttcctggcttcaccgtttcatcattggcaagaaagggcagaacctggccaaaatcactcagcagatgccaaaggtaaggacacgtttttcacctgttgtattgaatttgtcttgttttctgtctttctgtttctgatattgctttgttgacctttgtactgtggatgcccttgaaaactggtgtatttttctgaattaactggcctgtttgacatggtcaacttccgtgttagcttaaagaacagcagaataaatgtctgtagatgtctgtaccatccttctggcctttaaccagagaggattgtatgttcttaggtttcataagtatcttaagaaacatgtcatttagtaattatggtgaaataacttcatgatactttggcgggccgggtgcggtggctcatgaggtcaggagatcgagaccatcctggctaacatggtgaaaccccgactct

SEQ ID NO: 27081 - DNA, 1010 bp, Homo sapiens
ttacaggtgtgagccaccacgcccggcctccacggcaatcatttttaaccttgtatgttacagtggaaaatcagagtttgcttcaaaggcaattctcacaggtggtgctgggtaggaccattgttttgcaaatgcaggggtctgctctgtgcctggcattgccatagttgtgatttttttaagtgtgttattagactctagaggacttaaaaattgacgtagcaaggcttgctttcaagggactcaccccgttaggggagtggggctcacaatgtctgagctgatgtttaccaaggaggccatgtggatgggggtaggttcgctgtcagagactgggagtctctggcctcctctagctctcacactcagggtgctgggcctggtgacctcctggggccttttcctatcactatgaattagaagagaggggtggggggagttgtccttggagcatttgatggttcttgtttgtctgtttttaagcactaaaacccttaaaagtgtttttcatgtaatgctaaaagtagtgcttccttttaatctgtgttggctggtccagttgccactctaaattcagaagaggagagcgaccctccaacctacaaggatgccttccctccacttcctgagaaagctgcttgcctggaaagtgcccaggaaccctctggagcctgggggaacaagatccgacccatcaaggcttctgtcatcactcaggtagaaacaccattctttcttttaaaaattttatcatgtaacatgtctatgtaaatttttaaattttttttcttttttttttttttgagacagagtcccgctctgtcgcccaggctggagtgcagtggtgcgatctcggctcactgcacgctccgcctcccgggttcacgccattctcctgcctcagcctcccgagtagctgggactacaggtgcccgccaccacgcccggctaatttttgtatttttagtagagacggggtttcaccatcttaacaaggatggtctccatct

SEQ ID NO: 27082 - DNA, 1076 bp, Homo sapiens
aacttatatagtctttaaatttttaagttgagttctaattgagtggtggtctgagaatgttactatgatttaattctttactatttgtttaattttttttttttttttagctcctggccaggttttatggttttttaaaaaggtgtcacttttaatcatgtgttcaataaagtagatttattaattgtgtttgcatcctctatacattttccaatcccataacctgtgttaccaagagagttgggtcagtctcaccctttaaccttggatatatcaatttctcctagtaaccttcagtttttactttatatgttttgcagctatgttattagatacatgtaatcagagttactgaatttttaagttcttgaccttctctgttcttaataatgatttttatcctacagtctgtgttatctgaaaataatataaccaactttcatatggttagtatttgctcggagtacttcttccatctctttatttcagcctatatgtctgtatggtttaggactgttgaatggcctatagctgctgttagagttggtcagtttagtctgttaacacgtatttagattactgatgggtttgaattcattcctctcatcagttttgtgttttatttaccttgctttttcattgcttcttttacttttcttgcctcctattcttttttcttgttttctctcttttctttaacaattattaatacagtataatgtaaccagtaataatgtacatcgtaatgaataccgctgaacctaccacctaatccaagatctagaacattgccaataacttccatttgagtaagagtttagtttgaatgttaaaaactctttgtttttcctagattgtctttaaatttttaacattcattctcaacaagggctaaaattagtatctctagcctctccccaaataataagaatcttgaaaccttgcaacttcatatcccccttccaccttatatattattgctgcctaagcattttaattctgtcttttattttattttgtacttgcatattctgcttacgtacctatctataatttaattcccttcaaattttatt

SEQ ID NO: 27083 - DNA, 1049 bp, Homo sapiens
ctactcgggaggctgaggcaggagaatggtgtgaacctgggaggcagaggttacactgagcagagatcatgccactgcactccagcctgggccatagagcgagactctgtctcaagaaaaaaaaaaaaaaagaagccatctagctatcaaagtccttagatggcatcttcttgcactatgaggctgtctcatttacactgaaaatctgtttagtgcagctactttcatcagtgaccttagctaaatcttcataactcactgcagcttctacatcagcacttgctgcttcaccgtgcactttcatgttagagagatcttaaacttcaagaaccaacctctgctagcttgagacattttttcctgcagcttcctcacctctctcagccttcatggaattaaagagagttagggccttgctctggattaggctttggtttaagggaattttgagactggtttaatcttctagccagaccactcaaactttctccttatcagcgataaggctgtttcgctctcttaccatttatgtgttcactggagtagcacttttccttcagccttttttctttgcattcacagcttggctatttggtgcaagaggcctagcttttggcgtgtcttagcttttaacaactcttcttcacgtgccttcttaatcatttctagcttttgatttaatatgagagacgtgcagctcttcctttcacttgaacacttagaagcaattgttgggttattaattggtttcccctcaatattgtgtctagggatcgggcggcatgaggagagggagagagatgggagtggccagttggagcagtcagaacacacacagcattgattgattaagttctctgccttgtatgagcgtggtttgtggcactccaaaacaattacagtagtaacatcaaggattacagatcaccataacagatacaatgacaatgaaaacgtttgaaatattgctagaattaccaaaatgtgctgttggaaaagaggcatggaaagacctgcagagttgccaaaaccttcagcctataataaac

SEQ ID NO: 27084 - DNA, 1049 bp, Homo sapiens
ggctcttcatgtaccttccctgccccagacctggattctgccttttcttcaagaaggcctgcttcccttttatggcagttggctctcagagaaacagggtctaggcaccagctaggttgctggagtgttactatacccaggccctctcagtcaacagagtatgtgtatacatacatatacaaaacatacctacagctacatgcgtgtgtatttttaacacagtctcattttttaatatctccatgtattgaaaagcatgagtttattccagtacccccatttccaatgtagtagcacagggtttattctagtttctcgctttccaagtggataactccgtttcccaacagtgacaatcttagatcccagtgtctctaatatgtttacttccttgattattcaccctgtatggaacgaggctcctcttgttgaccttcctgcttggatgcccgctgcctcctcatctcactcagctgctgtcatcctgcacctccacccaccatgagcatcttcctcactccacttgggctctgataccctagctatgtagatattctcttatgtggaagcccgtatccccagtttaaaaacaaaaaaagtccaagtcctacacgctctctttttgcagcttgatcattttcatttaatgtacagtagtctgtgctttttccagactgatacgtgagccgttggattcttgttggtaacagcgccttactgtgtggtgtccttgtcccacttagtatgactgccttcgtgctgacgcacactcgtgttcttccagttctttgcctgtggcatgctgttgtgagcctcacctgtcacacctatgcttctgtattcttttgcaggcacttctggagagtagcatttttgaagtgtgattgctgacttagattgtatatttctattttttgttatgtgtttctaaattgccttctaattttatacttcctcaatggttgagtagtcttttttccccctcaccattataaacactgaatgatcacttttgttcatctttgcggatctcataaaggctgcatgaa

SEQ ID NO: 27085 - DNA, 1849 bp, Homo sapiens
caacctgtcctctgagcatctgtagcagtagtgtggcaggaggggaagatgggcaaggccgagagagccctttcctgttcagggttcttggcagggatgggaccggtggggcctgggccctggctgactccggcctgtgactcccaccctggagcatgcccttcctcttgctgccaaatgctgatgggtttgtctccggtcccagagcaccaagctatggatcatcatggagtacctgggcggcggctcagcactggacttggtgaggcataggccatggcagtggggggtcatgcagtgtccgagtcccctgcccctcagactcatgggctccaggggccacctctcgtttggtgtcatggcacgttaggtgttaattaggaatcgtctaaagcaaaaatgaactgccatctgcacgtctgcccagttggtgctgaaaggggtcctggcctgtgggagtgggcgggggcaggcctgctgggagatggctgggagcctatttttctgttacatgacagtaaggtgaggctggtttatatgctttagaaagagcctccaccaccccactcccatctgaaacttagttctgtttgggaagtaaaggaacacgaagcccccagctatctgcagggacagcccttccctgtgagagaggcagagaactcaggcattgggcctgggacaggagctgaggccctgctgtcgcaccttcctctccagcttaaaccaggtcccctggaggagacatacattgccacgatcctgcgggagattctgaagggcctggattatctgcactccgaacgcaagatccaccgagacatcaaaggtcctgctgggggtggatgtggctcttgtaacgtcctgagccccactgaccttagagaggccggggcctgtgaggggcaagtggctagtggtgcccagggtctggagtatagagaaccttgtggccaccctgaaactgagcagtcctgtctcgctccctttccagaagatactacttgtaacggtttccttgtacgctgaggaaaccagctgtggactgagtgtaggaaagggccacacttggctggagttgttggttccctgtggtgcacggcacagcagcaggtgtagaattgagtagccccagcgtgtggtctggccctgctgagagcagacgggaggctgggccagcccatggggagggacttgccactggcaacgagccatctctgtcatgtaggggacgattctggtggagcagggggcttcctggcaggcccgtgttggctacacccttggtcagggtcacctctgcggtagcccccagtgggcgaagtcgcttgtcgttgggatttgtcgtaaaagccaaatgcaggaagagccctggagctcggagtggagccgttgggctcctgctggcagtgcccctgtggccctaggtggccctgggtttgagagtggcaaggagggctgaggtcctgaggacagccctgctgtgccctaggaggccaggtggatggtaccctggcccttctcagggggcccggggtggagccacgtggagcctgggatgacgcctgcctgtcctgtgtcaagcagctgccaacgtgctactctcggagcagggtgacgtgaagctggcggactttggggtagcagggcagctcacagacacgcagattaagaggaacacattcgtgggcacccccttctggatggcacctgaggtcatcaagcagtcggcctacgacttcaaggtgggtgcagcgggcgggcaggtgcgggcaccatgcctggctcgggtgctcagggcagcaacagtccttgtgttctgtccaggctgacatctggtccctgggga

SEQ ID NO: 27086 - DNA, 1038 bp, Homo sapiens
tctgggagggaagagggagaccgttagaaagcagagccagcaccgccaggcccccagcaccgccaggccccccagcaccgtgcaccagaatatcagcaaaattgcatgaagggaatgcaggagactgttcgggaaggaggtctgtggcctggactgaaggctccaacacaagaccagacccgatgccgtgcacattcagacagtgtgaagggccaggaggcacgggaggtggggacagatggcagccaggcaggccggccggagggcccctgccgagcaggagagaggccttcatggccctcgctggggctccagacatccagaccagggtgccagctcccctcggccacctgcctgctgccccccaggggctacaggtatgccgccgtcatcctcctgtggggccttggagcctgggctaccaggaaggggcaaacccagcttcattcagactctgcctggaacaacagcagggactgcgtttccggaagcccacggactccctggactctgaagttccttctggggaagtgaatgaacgtccaattctcttattcccttcacttcctgctaatacatgaaggcttttccctgcagcctggacctgtggccttggcgttgctcaaagtgtcgtcgcccactgggcacacagtgcccagccccatgccagactccacaggaggaagacaggaggggacggaagtcttggggtttctgtgctgagggacacctgtagccatgtgcgacatcttgggacattgccctctgcacccccaattcagccttcagaggagaccacagcccccgcagaccacgtgacctcaatctctcgagatgctaaagctaaggccccagcagaggggtctgagcgctgtcacccctggccgctgatttacacaccaggccaacacccgctgtacaggaaagaaggctagactctcggcaggggagccaccctccacacccagggcccagcggcaactgcggtctggccggagcagggcaggaagttgggggcgtggagacagaggaagggtt

SEQ ID NO: 27087 - DNA, 1028 bp, Homo sapiens
caaaacaacacaaagccattttctttctcttaactcgttgccatatcagaagtctcaccaggcacatggagacgaggctacacgggtgttgggaagcagagtcagaataggtagcacacaggctgcgcagggttaacatccagggtagcaaccgcaggtaccacctccagggcttggggacaaaaagtattaccagggtggggtttcagggacctcagagcttacaggatgtgcttggttctcgcaagaggggcaggagggcctaggactgtactccaggagccaagggggcaccaagggacctggtggctgggctcagagctgtctctgctcccaaagtgatgctgaaataacctgggaacaccagggaggtcccagccccaactcctgcatccagggctccagcacacccagctggaagggtgtgtggaagggcagcactcagggcagagcacagacaagccaagagacaagaagtcaataactgacggcacagtgctgttttcacaaaatgcataagaattctgtaatgttctctaacagtcctattcgtatttcccttactgcctaagaaatatcctcacacgattggattatcaaagctttattcacgtttgtgtttggctacaaagtcttttaggatccttttgatcctaaaagtccccctcttccctcccctgtgcccttgacttgttggtgaagctggtcacttgtcctcgaaggtgtccccagtctggacttagcatcctccttgtagtgtttaacttgttcctctgtcccctctatatcctgtcgtctggaagttggatctaaagttgtggctggaatcacacccggacggtgctcagttcctcgtgtcacagcctcatgtccaattgtgtcactttgttgaagcattaataagcttggatggcgacagcctgacccctttatcgtcagtttcccctcaactgttcccctgacagttttgccacctgtgggtgaccattgctagaaccagaaccttcactgggactgcagaattctcg

SEQ ID NO: 27088 - DNA, 1109 bp, Homo sapiens
gtttgtttttgatttggggtttttctttaagagagggtctcattccatcacctaggctggaatacagtagcaagatcttggctcgctgcaacttctggctcccaggcttgagcgatcctcccacctcgccctcccaagtagctggggccacaggtatgcaccagcatgcccggtttttgttgttgttgttgttgttttgttttgttttgttttttgtatttttagtagagatggggtcttgccacattgcccaggcaggtcttgaactcctgaactcaagcagtatacccacctgggcctcccaagatgctgggattacaggcatgagccacctaatgagcacggctactttatttgtagtttttgtagagacaagcttttgccatgttgcccaggctggtctcgaactcctgggcttaagcaatcctcctgccttggcctcccaaagtgctggaattacaggcataagccacaacccctggccagaacattttttataccccaaaaagacacctggtaccctttagctgtcagccccaacttccatctcccccaacccctggctaccactaatcttccttctctgtagattgcctgtcctgagcatttcatagaattggggccatagactgtcacttagtgtaaggtttccagagtgtatccaacttggagcatgcctcaggcctcactccttttcatgactgaattattccattggtgatgtgctgtattttgtttatccattcctcattgatgggcaagttgttcgttactgaatcttggctgttaagaagaatactgtgcctcgcgtggtggctcacacgtgtaatcccaacactttgtggggctgaggcaggagatcacttgagcccaggagttcaagaccagcctggacaacatagcaaaacctggtttcacaaaaaatacaaaaagtagccgggcttggggaggcatgcctgtagttccagctacttgagagggtgaggtgggagaatcgcttgagcctgggagccggaggttgcagtgagcagtgattgtgccactgcactccagcctgggtgacagagtgagaccctgtctcaaaataaatacatgaaataatactgaat

SEQ ID NO: 27089 - DNA, 1063 bp, Homo sapiens
cctgaatgtgcaactgagacacagagtggtaaaaatgatactttctggttctgttatatttttggagatattaagctgaccaccaaattacaggcttgttaatccaaacataaaaacaaatgcatgtacttaatttatgtatcaaaattaatcaccctggccagtgcggtagctcatacctgtaatcccagcactttagaggctgagtcaggaggattgcttgagcttaggaattgaagaccagcctgggcaacatagtgagaccttgtctctactgaaaagtatttagccaggtgtggtgacacatgcctgtagtcccagctactcgagaaactgaggtgggaggattgcttgaacccagggagggccaaggctacagtgagctgtgatcataacactgtactccagcctgggtgacagagtgagaacctgtctcaaaaaaaaaaagaaaaaaattagtcacccaatattactgaaaataatagtgcatgtttgtattttacacgtacccctgagctatttggggtcacaaggaagctgttagtatgtggttctcatattcttaccgtacaagaaagcaaaagccccttgaggtccctcagtatcccttcccaccacctgctccccacaggtggagaaattgcctgcttttagggagatagcagtgtaggcctctgaagtagaggagagccaccagggatggggagtggttgaagtatctttattttttaattatagaagtaatacacagtttttttaaagtttaaacaaaatataaaaagcaaaccctcccttagtctccattacacaactatatgttaagaatcttattaaaccaacttggtactatttgtataatgcctagcagtttcagaacggggctgggcacctggctctcagacccccagctctgagaccctccatccccttttagaagatctcattgtttttaaaaatatctcctacctttttatattattattgattgaatgcatgaggtcaaagtaatacatctgcacataaaccaaaaggtgagaattctgggtaatacaaaataacccag

SEQ ID NO: 27090 - DNA, 1031 bp, Homo sapiens
tttgtagtacttttttcccccgttttttgaaagagggcgtctccctctgttgcccaggctggagtacagtggaacaagcaaagctcgctataacaactcttgggcccaagtgatcctcccgcttcagcctcccaaagtgctgggattacaggcgcgagccaccgtgcccggccacgccctcactttttaattctgccatttcttcatgtgttagcttgagtccttcccctctgaagtattacgttgtataataaggaggacaagactcatgattcctttgcttcttcctgctgtgcggatcagctgacagagccgcaggctctgtgggaggttctcgtggacgccttccctcagctcattgtgctgttgtgtgatgtgtggcctgcagtcacagcctttctggtcctacctttcctccggaaacaggacagcatttggagggagatgggatgagtaagggagggagagagggtgctggcacagccctggcaagaagggccagtggatgagactaggctggcacataacaggctctaggagtgcctgtcttcttcctgctcttccacgggagaggagaccctggcgtgtgtgtggcagaaaagacactgccaaggacctcgtgcctgtgtccggacccagctgctctgtgctgcaggcgttctaggccgggggtctccaggggttctgtacatagactgtttgctcctggccagcaggcctgtagctgtgctgggagggcctccatggggcctgggctgtgggtggcggggactggcagccgttctatctacctacttttctgtccacttgtctgtttacaaaggaaaaacaaaggtgacactggagaaaccgacacgtttgaggttctaaaaattaaacgagccacaatataaacagtctcacatcttggtacctcaccaaatgtcccctcattttttcctgtttttacgactttcgaaacaaaaacctagactacactaagctttaactgttgggttctttcttggcagaatttttccctagattggtgt

SEQ ID NO: 27091 - DNA, 1045 bp, Homo sapiens
tgaatttatgttcgtggagggtatacggtctggtctagatttattctctttcatgaggatgtccagttgttccagcagcgtttattgaggaaaatgcctttgcaccattgcatccctctgctgctttgtcagaggccagttgactccttatgtgggtgcccctgtgatttgaaggccccagtgagactggctgagtcgaatgaatcggacttttctttctctgtcttgagcagtgcttctcactagtgtcaggccccgtgtctttgtacatctgtgatcttggcagctgtagggatgatggtggacttgtggtatttggctgagaacatccttgcagtccaggctaggggtcatgagcatggatgagtcacctgctggctgtgcccacgcttcccccgccaccatcctctgctctcttctttgcctgtgctttcttcttcctcgacagggtagagctggcctctctgaccaagacagctgacagtgcatctcctttcccctgccgtgtttctggaacattgaactttaccagttgtgtttgttactatttagtaaggttatcttctccatgttgggttttgctggaggtgtgggtatggcatcttctagagaagatccagacctttttggattaaaagtaaggttacaaatcactgtgctgtacttgttgtcatatgagatttctgagttgtattgttgggataattttctttttctttttttgagatggagtctcgctgtgtcacccaggctggaatgcagtggtgtgatctcggctcactgcaacctccacctcctgggttcaagcaattctcctgcctcagcctcccgagtagctgggattacaggtgcctgccaccatgtccagctaatattttgtattagtagagacagggtttcaccatgttagccaggatggtctcgatctcctgaccttgtgatccgcccgcctcagcctcccaaagcgctgggattataggggtgagccactgcgcacagcctgttgggataatttaagcttgacagttcaaggcctatgaaacag

SEQ ID NO: 27092 - DNA, 1655 bp, Homo sapiens
atttactttatttttaaatttaatttttgtatttttagtagagacagggtttcaccatgttggccaggatggtctctcttgaccttgtgatccactcgcctcggcctcccaaagttctgggattacgcaggtgtgagccaccgtacctggcccttttttttttatttttaagacaaggtattgctctgtggcccaggctggagtgcagtggcacccgatcatggctcactgcagcctcaacttcctaggctcaagcagtcctcccacctcagcatcctgagtagcttagggccataggggcatgctaccaagcccggctaatttttttttttttttttaatgtagagtcaaggtctcaccatatcacgcccaggctggtctcaaacccctggcctcatagacttaatgttttaaagatagctttaggtatatagaaaaactgatcaaaaagtagagtatgtagagcgctccctacatactacccctgccttccccccttccccattatttatgtgctgtgttatgttacatttgttaaaattgataaccaatattgatacattagtaactgagtttatatgaactctcctaccacctttttttgttttacatcattgtagtaggtttcctcttcattcaacacttaatgttgatgtgtgttctttcaatgtttttatttacatttatatacatatgtagaaactactatagttagaattttgttttttaacataaatgaggtcataccatacaaattatttggcagctttctttctaactctgccttacagatttctgcacttacagatcccctaactctgcccttctcattctctttaattgtcgtcgcattgtctctagaaccacggtacgtgtagccagttccctgctggtgaatcttcagtggttcctcatcatccgtgttacatgaaacactgcattactctcctccggcttagctttgtgtcttgcttggaaaggctgtccccactccaagtcttaaatgaaaatgagaccatttttaataatctttttaacacatctagaatttatggaggcaattgttcttctgattttgctttttgtggctttgtagaaaagtgatgaaacacgtatatgcccaatttaaaatgaagaataatcctgattttactttttagataataatcttatcccaggtacccagggctacgtctcttgtgtccatctattctcctacaggttacttgtttccctaatagatatttaagtttcctctatgtctaactgtggcttgatagtttttttttgttgttttgttttggttttttttgagacaagagtctcgttgtgttgctcaggttggagtgcagtggctcagtctcggctcactgcaaccgccgcctcccgggttcaagcatttctcctgcctcagcctcctgagtagctgggattacaggcgcgtacgaccatgcacagctaatttttatgttttagtagagacagggtttcaccatgttggccagggtggtcttgaactcctgacctcaagtgatcctcccacgtcggcctcccacagtgctgggattacaggcatgagccaccatgcccgaccaatagttcatgtcttttttgccctaattaatagtcccttgtttggatgtaccatagttcat

SEQ ID NO: 27093 - DNA, 1075 bp, Homo sapiens
ctaaaaatgggaaatcagtttaattattccaagtaatgattggcgtatctctttggcaaaatctttaccaaaaatattgagtcctgtgaagagaatggagaataagaaaaagtggttgaaaaggttgaaaatggcttgtctgatatatcttattttaccaaagggaatagagataagatgacctgcctgagttcgccagccactaataaagaggcagagccagggctggggtctaggtgtccttactccctgcacagtgctctggctgtgatgtaaacagatgtgatctaaccacctttccatggtggaaagatttaagaataagccctggtcagaagtcaagttgggaaaaaattttagacctaaagtaaatagtaattctcagctttattagacccaatgcccatttcaaaacaagtattctgtgaaatatcccttactatattgaaatggaattcataggtattctaacttacctcatgcacatttcagaggaaatcagtataaagtcctaactataacataaattagaaaaagagagtaattgataagatgatgatgtgtattccatgcgtaggtgcctgagtacactggagagcatggatgtttacacctgtatgtggaattatcttgaattcaacagtgacaaaggctgttgtatatagatgtattatgtcaacaactcaaataccacaaaactctgttgctgttactaacatgacttttttgaaatggtaaacagctgttaggagaattgcaaacaaaatagtgattgaatattgtttcttcagttataccatagttacattcctggaaaaatgtgcttgttttaaagtagtagaaaaaaatacttagtgttcatatataaaatggccttacattcagataatttatttaggctttacacctccatgagtatctaacaagacatttgaaaattgtgtgggatgcaggtcattcttcatttcgtgaaactctactatgaattgtagaacatccagcatctctggtctctgcctgtaaatgccaagaacgccctccaactactatgacaagcaaaaatgaccccagggct

SEQ ID NO: 27094 - DNA, 1047 bp, Homo sapiens
ctggtcctctatctctggagtttaccccacttctgacagtaccaccactcagttatttttgtctgatgccaagattactggcttttttcaagcgcatattttctttgctctgtgttttcacccattgcttggacctgtgcattgtacatttttggtgagtcctctattcagcaaatgtttttctctgtgggttcagggatcctagggttgggcccctgctttagaggcatgcacttcccctgtggcatgggaaataggtgagttagagagataattgctgttacagaggttagcacagagatacttcatgagtatcctgggaaaggctacttggaagtgctgcctgagttgtgtcttcaccggaaagggaattatttcttaaactctctttctgccttttcatgtgtctgaattactacgtaacagatttttttttttttttagggagaaggttgttccaggctgaggaaacagtaggttagaggcatcaaggtctaaaaacatggggctgtccctgaactttagctggacaaaaatgatttgtctggaatcctagcatataccagctgtggagggtggggccagatttggggaagcccctgatgtgaagtacacgaatctccctgtggacagttggaaaccactgaaggattctgagggcaacagtgcctttggctaaagagcctggtgggttggagaggatcaggcagaagattgagcttgtccctcctccatatcgctctgaaggaaggacttggttcccttccttccctgccccacctctccccccacgtcaaggagagtattttgcggcaattaggaacacaggctttgaagaatgatcagctgggttcataccctgagcttacacctttccctgtctcagcacatttagcctcttgaagcctcagttttctgatctgcaccttgggaataattatagctgtgtcaaaggttttgtaggattgaatgtgatcgtggatatcacatgttgacattcagtaaatattcagtggtctagtaactggtcactggaaaaaaatattc

SEQ ID NO: 27095 - DNA, 1040 bp, Homo sapiens
agggcccccagcgcttacctgcaggcaaggtgctgctccacgaccttctccagctgctgccgctgctgaatctgtttccctccctgaaacgtagccctgtctctcagctggcttcctgatctgggaagggtggtgcctgtcccctgttcagctgactcaccttggactgggatgggcacaggtgagggctgtggctgggtaaacaaggcaggttgccagcccagaggaggcctttggccttagtctggatttggaggtgggattaaggccctcacagctgctgttcagacggttatgaaccaagacttcttggccttttcttaaatagctctaaatttgggttggacacctagtcctgctgatcgaggcagttggctagagggcggtttgtgataggtatctaggggtctaggccaggatattaaaaagtggtcatatcctgtgacccagcatttcttctaggaatttgttacagtggagtcacagggcccatccatcactgctgcttctagtaaggaaaatgtagaaatcccaaatgcccatctctgtggtctgcttgaataaatcattgtctgtggaagatcacagagctattaaagtcacttaaggaagaaggtatgaggaaacatttctgagattctagtgagatgttgaaaaatcaatattgtgaatctcttcttgcattttgttttcattttttgtaaagtggatgtgcgttgaaagcagtctaggaggacatacgctaaaatgctgagtatctctgaatggcagcattgagggtgaggttttcagtttgtacttttgtgtgttccaaggtggtttttttttttttaagttagcttttgctctgaatgctcatgacttttgtaagggggaagcaattaagtttgattattttaatgggaatttagagtggttgtctcttgggagcagacctaaggagctgtgtgctgaggtggagatttttttttttatggcacatttttggtgtcttaaattttgaaaagtttaaatgtactacttattccaaaaataattat

SEQ ID NO: 27096 - DNA, 1032 bp, Homo sapiens
gacgtctgacattctggagtctggggccgaggctggacagcgcaacctgccactgtaggtagaattcctatgttgaaactgaatctccaatgtgatagtactaagaggtggggacttttggaaggtgattacgtcattagggcagagattaggactcttatacaagaggtctgagggaacttgtttgcccctttacgtgacgatgcagtaagaaaatgtaatctttgaagcagagagcaccttgatcttggacttcccagcctccagaattataagcagtaaattcctgttaaaaaattacccagtttaaggtatgctgttacaacaccctgaatggactaagacacagtcccaggcaggagcgttagtttccacttctgcaaaattggggcagtattccctaacctgcagaattttgatgaagatgaaatggatgagtaacagtggggaaacttctgtctactcccagcagccttctacggaaggtggacttttcagcagaagactctgcccagctgagccctatgctggatttgggtggtcaaatttgagagcaggagcttggcaaagaggggctttggggaggcagtcagtttggcgggggcatattgtaagactgtgtgcttacaaaagcacaatatattcctaagatttctttggggtgactttatttgggacagttttgggggagttgacggaggtgggggcactctggcccctgatgccttcccccattcaaacagacttgggggttcctgtggcaatgcacaagatgggggtgcaaaaagggggcaagagaaggaaggtagcatgatggacagaggctggaccagtatagtgacccccagggaaggtcccctgggagggtgcaggcaagtaggagggtactctgagaatagagtcaggttctgaagctgttgccttcctatgatgcaagcctcagctcctcctccatcctcaaatcttcagtaaacgccctctgttgacaggacattcactactgcacagtgggcactcagctgctgctttgtg

SEQ ID NO: 27097 - DNA, 1025 bp, Homo sapiens
tttcacagagcagaagtttttaattttaataaagttcagtttaagaattttttgttccatgggttgtgcttttggtgttgaatttaaaaactcatcgccaaaccacaaaccacatagattggttcctatattagcttctgtaagttttgtagttttatgtttcacatttaagtctaagatccattttgatctaacttttataaaaggtggaaggactgtctggattttcccatttgttaaaaagattctcctcttccctcttcctgcactgaattgcctttgcttctttgacaaatataatttgactatatttatgtgggtgtatttctgggctctctattctgtgctgttgatcagtttgtctgttttttcaccaataccacacagtcttgcctaatgtagatttatagtaagtcataaagtcaggtagtgttaatcctctgactttgttccttttcaggattgtgttggtcattctaggtcatttgacttcccatattaactttagaatctgtcaatattcacaaaataacttattcgaattttattggaattgtgttgaatctatagatagggttggggagaattctcgtcttaaaattattgagttttgctattcatgtacatggaatatctctccatttatttatattttctttgatttttgtcatcagagttttctgtgtttccttatattgatcctgtacatattttgttggatttatgcctaggtatttcattatttttggtggtaatgtaaatggcattatgtttctaatttcagcttccaactgttcattgatggcataaaggaaagcactaaacttttaaatattaactttatattctgtgaacttcctataatcacttattagttccaggagtcttttgttgttgaatctttgggattttctatgttagacaatcatgccacactgtacacagaaataaagacagctttatttcttctttcccaattggcatgccttttattctcttttcttgtcttattgcactagcaagaa

SEQ ID NO: 27098 - DNA, 1085 bp, Homo sapiens
tttttccttcatgtttgaaggatattttcactggataaattccagtataaaaaggttagtttttctttagccctttaagtatgtcatgctagtttctctcctggcctgtaaggtttccactaagaagtctgttaccagatgtattggagctcctttgtatgttatttgtttctttggctgcttttaggatccttttttatctttgacttttgggagtctgattattaaatgtcttgaggtagtcttatttgggttaaatctgcttggtgttctatataaccttcttgtatttgaatattgatatatctctaggtttgagaagttctctgttattatccttttgaataaactttctaccctagtccctctctctactgcctctttatggccagtaactcttagatttgccctttggaggctattttctagatcttgtaagcatgcttcattctttcttattcttttttcttttgtctcctgactgtattttaaaatacactgtcttcaagctcattaattctttcttctgcttgacaaattctgctgttaggagactctgatgcattcttcagtatgtcagttgcatttttcagctccagagtttctgcttggttctgtttaattatttcaacttctttgttaaatttatctgataggattctgaatttcttctctgttatcaacatgattttgttgagtttcttcaaaatggctattttgaattatctatccaaatattcatcaatctctgtctgagattggccccaggtgggtccatagatgtcgtccagaaggcagggcctgtagttgggaaccttaggagtctacctgatgctctattctactgcggctgagcttgcatccaagccacaagacaaagtcctttccactattccctcccctttcctcaggcagaggagtctccccatggccaccactgtcctaggcccgtggtgagtactgcctggctaccacctatgttcattcaagacccaagggctcttcagtcagcttatggtgaatgcttgtagtcctgattctctcctttcagggcagtgggcttacctctggcccagtacaggtcc

SEQ ID NO: 27099 - DNA, 1050 bp, Homo sapiens
ccaggcagaggcaatggcgagtgcaaaggtcatgtggtgagtggagaatctggcacgattgggggaaagcaaggctgtaggcccctggggccactgtaaaaattctgggtttcactctgagtgcagtgggggctgtgggagggttttgcacaaaggaggaacgtcacctgacttaggttttagaggcttctctggctgctgggggaatgtggctggtagagaggtgaggcagaggcagggaggtcagcgtggaggttcagtcagggtggtaagaagaggtcagggtctggccatgtgttggaagttgagccagcaggatctactaacagatgggttgtggaacacggatgaaagggagtcaaggaaatgtctcattctgagtccagcacttctaaccacagagcctctgacctggggagggagggggctgcatttcctgtttacaggtgaggaaacaggcttagagaaaagcaactttgccaagcaccgtgctacagacaagacataaaggtcatctggccccagaacctgagctctggacagtcttagcaccttagaagtttacctactgcatggatggggccaccagagtctgccccttccctgcagggatgtggcacagcactgagttctcagagctacccagggcaagggtgaaggagtggggaccctgagcccctgggccagctgtcagcttatttaccaggccacacgcatccccatttttggtggcttcaatgcaggtagcagtttctatcacagcacctggtttgtccctgcccaatgggtgtatccagtggtgccggcagaatgttcccagtgctggcctgctcttcagatgggcaaccgaaaccatccttcagggcgctaggttagcccagtcccaggtcctccccatctcagcttccttacagccagtgagcatgttccaaggactctaccctgagtcctgtcacctctgcgtctttgctcatgtggttccctcctcttggaatgccttccttcatcccagcctctgtcagcctttaagacctagctcaggggccacca

SEQ ID NO: 27100 - DNA, 1034 bp, Homo sapiens
ttcttggagccatcgtgctccccctttgttatttttcttgctatcagagtagcaagaaacagcacccctgtaggtgacaggtgggcagcctggtaggggtcgccagcctccatgccccctcatcttccagttcttgcttagtggcacgacctctttccatagcataaatgcaggccagcgttttagccccaagtgcctgcccttgcttcttacccctcccctgctttctcaaacacttgcccacctcaggcactcagcgggctccgccgtggtgagagaactggccgtggctcagccccgggtagcacctgtagtttcagtgccactctccactgtccccttgtggaccagcttccactcactgtcacgtcccccctcctgcgtcttcactgggtctcaggctgccagcagctctctggtgcatcgtctcaacaccaccaagtttgtaggacctgcccaagttctagtagtattcaaaacttcaaacggcagtcatttgttctcctcggctctgtggcaaggatagccctttggagggggactcttgacctcggctgttagggatctgaacttggttttcccgtcagaagaatcagcaggacagatcgtagtgccttattccattgtcctcccctggccaggcctcctggctcagctggaagtgcatggcttctttctccctatctgtgtcctctgtcacttgctctttcactctctctctcattcccagagagccacgggggagggatcaccctcacccccaacaccctcttcctgagggctgtagccaggtccgcatctccccaccaccaccagggcactcactcgcagctatagcccaggacagaaaaactgtgctttggacaggtgcacactctctgcctcttacctctagccaggaggatgcctcagtctgttcattcgagactggccccgtctgaaccttctctgggcactggggactaaggttgcaggccttagcctcgtctcgtcccagaggcattggatcaggagaatgggaatttttttcctcc

SEQ ID NO: 27101 - DNA, 3013 bp, Homo sapiens
cccgcagaccctcatcgcgcgggtcccagcatgcacagcgcgctcccacgtggccggccgagcggttcggggcggggggacgggcctggaaagctctagatccgggggtctttaccttgacccatgggtagaatcgctctagcaattagaaataagcctcccggacgccgcccccgaacgattaaagcagaagctgggatgtggggcccaggtatcagcatattttaagagcttccaaggctgagaaccgctgcttgactgcgccgcagaggcaggagggagggaaggaaaccacttagcctctttctccccccaggtggaggagtctgtgctcaacctgggcaaattccacagcatcgttcgtctggtggccttttgtccctttgcctcatcccaggttgccttggaaaatgccaacgccgtgtctgaaggtaagtcggccaccgccaagtgtcacagagagatgtggttcctttcggtatcctctcgggcagcttgtgatagtatttgccgtccttggctggctctgagtctgataggcgtgaggcagtatttgagccatacaatgtgtaatttgaaataattgtcttcacagagctcaaggtctgggaactgtgctagaccaaactgtttaagcagacgatgtggaatgtgtgttaacgtttccttgtgggcactgtagtgacaaactattttttatttttattttttttgagatggagtctgtcccccaggctggagtgcagtggcaagatctgggctcactgcaacctctgcctccctggttcaggcgattctcctgcctcagcctcccgagtaactgggattacaggcctgtgccagccaccacacccggctaattttgtatttttggtagagacggggtttcaccatgttggccaggctagtctccatctcctgacctcgtgatccgcccgcctcgacctcccaaggtgctgaggttgcaggcgcgagcgacggtgcccggccgacaaaggggggtttcttaaagggggtcggcttaacacctacttgtgcctgaggttttgcctaaacacaatcaagtgtctggttctctgctttctgttcgattggaaagggcagttgggtaaacacaggctgagaaaaaaaggtttggttccagaaggcaaattctacgaaatactcgagggtgtgttacaagctattatttattgcccacttgtgctatcagacctgaatgcagttgttcccatggctgggccaggctttgcagtgatgacttgcgaatcaaatctgtcaatcccctgagtgcaatcactgatgtctccatgtctctgagcaatgcctgatggggagggatctaggtatgccatcccagcgtgctcggtgggaccagggtagtcagctgagggatgttagagttgatcgtccttcagcctgttagtgggaactgtgttctttcccctgaggggttgttcatgaggacctccgcctgctcttggagacccacctgccgtccaaaaagaagaaagtactcttgggagttggggatcccaagattggtgccgcaatacaggaggagttagggtacaactgccagactggaggagtcatagctgagatcctgcgaggtgagaccatcatctgttatattcctgttatcctggacattttgggggaggaggttctggaaacttggttgcttgttgtgatttctgggaaggccttcaggctgggctggtgcccgtgggtgcgggagctagctcagagccccttgttgctcaccgtcttgccctcttcttaggagttcgtctgcacttccacaatctggtgaagggtctgaccgatctgtcagcttgtaaagcacagctggggctgggacacagctattcccgtgccaaagttaagtttaatgtgaaccgggtggacaatatgatcatccagtccattagcctcctggaccagctggataaggacatcaataccttctctatgcgtgtcaggtaaagtgcaggggccacccataatactggagcctttggtctgtagttcagttaattttgagtcttgatgaggactgaccatcctgtgggtagaaccatgtgggctggggctgggtgtaggcctcctggtgcttaccacaggctgtgttcttacactgactgtatagaaagaggaggtagagtaaacctaccccatatacacctcagctcaggccctgtgcctggtctgtattgtgaatgggggaacatagaattgaggaagatttggatctttgtcccatttcctccaggcagagtaggtgtggagaaggcaaggctgtagctctatggtttttgatgaagcagctgggccagggagtgactgtggctctttgcagggagtggtacgggtatcactttccggagctggtgaagatcatcaacgacaatgccacatactgccgtcttgcccagtttattggaaaccgaagggaactgaatgaggacaagctggagaagctggaggagctgacaatggatggggccaaggctaaggctattctggatgcctcacggtcctccatgggtcagtgcagagcctggcaacctgcataaggtatggggctctaaatagctggcctcttgcattcacacttggtttttcctaggcatggacatatctgccattgacttgataaacatcgagagcttctccagtcgtgtggtgtctttatctgaataccgccagagcctacacacttacctgcgctccaagatgagccaagtagcccccagcctgtcagccctaattggggaagcggtgcgtcacaggggactcaaaaatgggagaataaggactgttgccatgtgcacctgcactgctgtatttcgtgacccaccatgtcttccctagttgtgcttgatggggaggtggggagcagggctgtcgtgcaactgggcaggtcagcagttcatttctctgactgcttccttgactctctctccaggtaggtgcacgtctcatcgcacatgctggcagcctcaccaac

SEQ ID NO: 27102 - DNA, 1710 bp, Homo sapiens
tacaggcctctgctatgggggtgatggccagtcctggtgtctgagtgattcccagggcccagcaaagggaccaagtttccaggtcagcgacattggatgccttccctctgcctctgggagctatgggttggcatgcattggggtagagatccaatctggcctgaggctcactcaggacttcggggtgagaggaggggaggagctgagctgccttggctaatggggttgaaatttctgatcttaaactctccactgaatattctctcagagccctgaagacaaggggtaacactccaaaatatggactcattttccactccaccttcattggccgagcagctgccaagaacaaaggccgcatctcccgatacctggcaaacaaatgcagtattgcctcacgaatcgattgcttctctggtatgggtgggggggcgttggcaggtgtgagaaggggctgggtggctgggtggggaggcttgcaaccatagcttccacaatgatggcaatatttttcgtcaacagcagttcacctagtgagtgttgagactctgggtctgagtgaagctgagggtagagggaacacagggttggggtagtttctctctttgggctgacaggctttgtcacccacacacatccagaggtgcccacgagtgtattcggggagaagcttcgagaacaagttgaagagcgactgtccttctatgagactggagagataccacgaaagaatctggatgtcatgaaggaagcaatggttcaggtcagttgggctttgctgggtgtggagtggcatagctagctgttggaggtgatgaactgtctgagcctgaccttgtagaatggaggcaaaaaaactgatttaatgagcctgatccaataaagccagaaaggagtcctcagagcaccagaagtcttcaggcccttttagcacttttctttgaccaggcagaggaagcggctgctgagattactaggaagctggagaaacaggagaagaaacgcttaaagaaggaaaagaaacggctggctgcacttgccctcgcgtcttcagaaaacagcagtagtactccagaggagtgtgaggtcagtaggcagcacggccctggcagagatcctaggttgtaggattttcaacagcagaacaaaggatatgctgcatcaagctgtggtcttgagtccaggcttttggactgaaacaaggacctgaaacatctaaaactacctcttgattctataggaaggagataggtgctgaacttgctcaagagcccagagagctggttgtagctcacacccgttccctgggcatgtgtgttctgtcctcggctgcctcccaggagtcctcaacctggggtagtgtaaattcctgctctgcttattatcagacgtgtgtccggaggtggtcgtgtttcacagtggggatgggggcagggaggtccccaatgtgctaagctacaatcattctccctgagattttcatttagcacccagtttcttaaacagtgtttcagggccctgtctggaacttggcatgatggttctgttgcgaccagcatggtgggtgttttttaggtttttttttttaatgggctgaggtaatttctcatgacatgttttccttctaatttgggacagcctttggggtggatttctaaagttatacccacacaattaaactatcccagaaacactgggcaatgttaacga

SEQ ID NO: 27103 - DNA, 1528 bp, Homo sapiens
ataataataataataataataataaaattaaattaaaattaaaatggtggcaggaagcagaactttcagcacctttctttttccttgaaaaatttagatctgggagtttacatcaggacacaagaagtctccttattcttttttgccactgcaaaatatttcattgtatgggtatgccataatttatttaaatagtcagatattgctggacattttggttgttttcatcccttttcagggatttaaaaatgctgcagtgaattactttgtccatgtgccatttcacacgtgtaaatttatatgaaggctattactaagtagaattgctgggacaaagaatatgtgcatttgtagttttgatagctactgccaattcgatctctgtaggggttataccaacagcattgaaaccagcaattttgagaatgcctattccttacactctggccaattaagtatttttgtttatttgttcaatcaacaattcttgagcatctactctgtgctaagaacttttctacatgctgtggattaagcaatgaccaaaatagacaaaaagccttgtgttcacgggcttacaatctggtaggggaaatagacattaacaaactaaatgaaaaaaatacatagcatgttagatggtgataacagctaagaaaaataaagccattgaggaagatctgggagtgcctaggaaggaaggtttgaagctttagggtatttaaggtctcactgaaaagatgacatttgagccaagacctcaaggaagtaagagagtgagcgatgtatttatgtatctgggggaagaatattctcggcaagagtgtgcctgctgtgtttaagggaaaacaaggaggcccaggtggctggagcaaggaaggtagtaggaggaaatgatgtcaggaataatgaatggggcagaggaaggcacgaccatgcagggtcttataggctgcatggaggccacacttgtgggtcattgtaagggctttggcaggacatggaagccattgaggggtgttgagaatgataagacctgccttatattttagcaagatcactctagctgccatattgacaatgacctgtacaaggcagggagatgagttaggaagccagtacaatagcccaggtgaaggatgatggaagctgagactagggatgctataggggaggttgtaagaagcggctgcattctgtgtacatttcatttcataggcaggactgacaggatttgttatggaaggagagagagagagtcaaagactcaaagatgtctccaaggtttctgacctatcaacttagaaggatggagtttcctgagaagggtgtgatttggggaagagcaggttttggaggagaaagatctggagtttggtttgagcatgttatgtttatgatgctcactaaacatccaagtgaggagctgaaaaagccacagaaaacatgaggatgggactcaagagaaaggttcaggctgcagatgtaaatttgaatgaatgaaatcatcgaggggatgagtgttgat

SEQ ID NO: 27104 - DNA, 1033 bp, Homo sapiens
gtgttcttgtttctttatggaagaatggattttcagaggtctttacttagcaattcccaaagtcctgtccctgtaattgttatttcttacctgggcacaagttaaaagtgccttgggggctttagtccagcattcatccagtcacagtaatttttgactcttgaattctatcatgaatcaatcagcacctgttgtggggctgggactatgatggatgcttgggagaagagaggcttaaacaatgatccctgccctctgagagcttacagagcagttgaggagacaaatataattatgtaaacaacaatttataattttgaaaaaaattcgtgtacttgaagaaaggtcagtagagattatctataattacataataataagaagaaatagaaaacaatgtaaggcttgaagaccacactatccaatagtactttctgcaatgatgaaaatattctgtaccaaccaatatggtagccaatagccacacatatttattgggcacttgaactgtagctaccgtgactgaggaattgaatatttaattgtgtttaatttaaatcaaatttaagaaataacacatggttactgtatctgacatcacagctctaagactttaaatatttgcttgattggccaggatgaccctgtggcaggggtagggaaacataccctcccatgggaggctcatagctcttctctggctcctagggatagatagaagctgggggctatggatactccctggcatttaattgtgcctgctgcctggtgggtgttgttcagtgacactattggaatagtttaggtccgagccacctggcaaaggtaagctctggtctactctattgggggcaaatttagaccctagatcaggcacattataagtgcaattagatgaaaggggctgtgggaactgcaaaagaatcagcccccttcctaatccactggtcaatgcaacattccctgttttcctctacagccacaaaactagcccaatgtcatccatctccttccacgctttccagcaggatct

SEQ ID NO: 27105 - DNA, 1033 bp, Homo sapiens
cccagctactcgggaggctgaggcatgagaatcacttgaacccaggaggcggaagttgcagtgagccaagatcttgccactgtactccagcctggcgacagagcgagactccgtctcaaaaaaaagaaaaaaaaaatcacagtatagtattccatgcatcgacagctgtagttttttttaaatttgtttttgtttttttgagacagggtctcactctgccaccctggctggagtgcagtggcatgatcacagctcactgcagccttgacctcctgggctaaatgatcttcccatctcagccacctgaatagctgggactgcacaggtctgtgccaccacgaccagctaatttttttattttttgtagagacatttttatgttgcccaggctagtcttgaactcctggactcaagtgatccacccgccttggcctcccaaagtgctgggattacaggtgtgagccaccactctcagccaacagctgtagttggtgcaatcctttttattcttttatttttttctacctttttgctattataaatggtacttttataccccttgttcaaatacttcttttggattatttccttggactcttactcccaacctgggctcaccaagtcagaggatacagtttcggtgcctaattgcaatctggaaaggttgaactagtttccagcactatcagcaatttatggggccatttcttgacaacccatctagtgctattacaaagaaatgtaatgataccttgaattaggtttaatttacattgctttggaaaaagagaccagtagctgatttagattttttgaaagaagtacagtgctgtgatatagattatctccaagatttatgtaactgaagccaacttgtggttgaagaaagatttggttgatgagattgaaatattgtggaagtttagaataggatcatagcagtataaaatataaggctagatgctgttcagttggaaataccaggcattgtgccggaagctggggacaccccagagtaacatagatgtgatgt

SEQ ID NO: 27106 - DNA, 1051 bp, Homo sapiens
ggctttcatcactgccagcgtctccacaggcattgtgaaagtattaaacttcctaccctcccccatgcttgtctcatggactctttcgtagagtgcacagtggactgtgtttagctcagcaggaactctttgcaaacactgaatacatgaacaacccccctggaaagataagagatttcagtattgcttggtgtcatagccgcagaagttagtgtctgccagtatctgatgaatatggtgacttgcagcctaatttttgtgaaattatgaggccaaagtttaagaagtgttcatgttaaagttacttatatataaaatttgcctatcgataatttctgtcaataggaggttgatgaatgcttcacataacctagatactcctaattaactgttttttatttctttttttctaggacacatgttcaaagagcataattaactttttaaaagaagctagtaagtactgaaatagttttttaagttttttctacaagaatagaggaagaaaggaaacatggaattctgaagggctacttagcaagctgcttatggcataatctggggtgggggtgcatagtaaaggatttgcattttactgagaccgatacatgtcaagggaatggtatttaaaattagtgatatgtgttgatttttcaaggactatagcccatcaactacaataggctccaaaaaattctggtgaaattagcttcttggagccttccagtttacctactatgttattcccactataaaatattctcaacttttggggttttagccacttaagttttttattttctctaatgtctctagtatctgctttagtttcctgtcaatgctagactctgtggttcagcagttcatccattctcttcccagtactcaacctcgttgcttatagtttcattacattcatctagcaaaaccttaattctgtatgtttgccataccattagtgcttagagcattttttcagaaaagaatcctggaaaaatggatcttatctcacctgggccctcaggactgctgggctgcctggtgtcagcac

SEQ ID NO: 27107 - DNA, 1014 bp, Homo sapiens
atcacggggtcaggagatcgagaccatcctggccaacacagtgaaaccctgtctctactaaaaatacaaaaaattatccaggcgtggtggcgggcacctgtagtcccagctactcggaaggctgaggcaggagaatggcatgaacctgggaggcggagcttgcactgagccgagatcgcgccacaacattcgagcctgggcgacagagcgagactccgtctcaaataataaaaaaaaaagatggtatctcagcattgatttctttgatcatcagtgaggttgagcatcttttcatagatttaagagaactgtatggttttttgtgagttatgtttcatatcgtttacccattttacttttaggctggaagcagctgttttagtggaatggtggaacaagaagccagattgccatggagagacaactctttctagagatttggctatgaagcagagtagagacaatgatagctgaaggattgatgtagatgcaaagaaatttttcatcttctttgaaaacttaattgtgttaaaaactggtatgaaagggaggggttaaagctagagatggtggtagaaaaaaatgcagggttcctaaaggactgagattcctggatggaatttcagggaaggggaaaatttctggatatagtgactggggagttaagggtgtctagtccaatggcttttattttcttggaagggtaggcaaggccaacagccacatgtgtgggaggagatggttagaggggagaggaggtttgaaggcaccgctatggagaattggagagagctaaggaaagacagaaagactgcagaaagtgcttagggttccactgaagcggaaatagtgatttgtagtgatacaacccttatgagttatttgatttttttttttttttaagcagcatctggcagtccaagtatagggctgacagtttgggatttttctttccatgttggtgtaaaagaagaacagtgtagtgaaggaagttaggacaaaagaatgattgaa

SEQ ID NO: 27108 - DNA, 1057 bp, Homo sapiens
tcacctcagcctcccaagtagctgggattacaggtgtgttccaccatgcccagctaattttttgtatttttttgtagagatggggtttcgccatgttgcccaggctggtcttgaactcctgggctcacatgattctcctgtcttagcctcccaaagtgctaggattacaggtgtgagccaccacatctggccatttcattcatgttttcaaatgtatttgaatgaggaaaagttctcccttgtgattatttattataatagcctacagagctattaatttttaaattttgtttactttatgtctcctttttttttttgtttaggctgaataaccatttatttcataggtttattgccttttttcttccaaagaacttgctattgtgcatttatagtccttttatgtttacgttttctatttcattgatttttactttctaccttctttagatttattttgttctttttctatcttcttgaattgagtgtgctttaattgcattctttccagttaattaacatatttagtgctgtgaattttgaacaagcacagctttagccacatcccataggtgtttctataggcagttgtattaggatgcgctataagctgctctgacaaagataccaaaattcagtgacttaaataagaccaaagtgtctttctctccccagttacattccagaggtagacagggccttcgtctcagtagggaccaaattcctttcctcttgtggccctgccatcctaacaatattgcccttatctgtttggttagagatagttctcaccattgggttctagttccaaccactgcgaaggacaaacaaagggaataggggccatttctcttccaaaagatgtgacctggaagttactcacattgctttagctcacatcccgttggctagaattcatcacatgaccacacctagcacaaaggagtctcaaatatagtctgccaggagagcttggtgctcagctaaaaaacaaaggttctgtatcaaggcaagaagagaaagagactgatctgaggggaggagagttggcaggttc

SEQ ID NO: 27109 - DNA, 1990 bp, Homo sapiens
gaattttaatggagcaaaagacataaagtcctctaataacatgcgttctgtttgcattctcatactttttatgaatattgatgctgcactatttgtgtacccagggagaaggccagaccactgtccaaagtttagtgaatctgggcagccttgtttcccagttgttggaggatgcctcatggaggaaagcattcctaatcctggagcttgttttgttgtactctaattgaattgtaatgtgtttctttaacctgaatgaatgtttctattttttacttattacacaggtaattctgactcgaaggacagaagaggtgagctgctcaccttatatctgttgttccttttacacagtgtacagtattcatttatttcctctgctcacagtctgtggtaaccgtgtgcatctgtggctgtgttgtttgtttactttcccttaagttatttccatgttaatctcatggagaagagcaatagaaacaagtactgtattcagtatgttttttaatatagactatggattctaacagctatgatgtattttaacaagtaacaaaatatatcttactttgacatgtcactttgttaacattactttttggtgatattaggtcataatttctataccattagttacttctgatttctaggccacagttccctttaaatattctttgtgttgtttttcccctagtgtataaaatgtcaaccctttgtggctttatatggattttatggattttcagcccttaaatgtaaagtctctatggcctgagatgttgtgtctgtggtttaagctggactgctgagtccctggtcactagagagtagggggacatgggtacttgtctgcagaagtgtggcacattttgcctagaatgacagtaaggctgctatcaaagagcatgagagaaagagaaagagatcatctaacattctaagaagtgattattacatttgagttttaaaaatgttactattcgaagcagtgtttttatcataattttctattttatcaaatcagacttgagttttttttctgattctgttatttaaccatacacaattttccctgtgtaattaagtaatggaacacttggaggcatatgaagtcccactaagtagggagcatttgagtcagaaaagtgggtactctcttcctttatgtgatgtccatctgccattgtatttggtaaggaatagtgaggtgttaccatactgtgtacagatttccctcacttttccacctctcactttcctaaacttgggaactaaacattggattaatacagtgtctttgctgttcagattcacttgccagattttatcaaatgtagacttaaataggttttattgtgatagatatttacttgctccctaaaactgctctcttaaccagccttacaataaagtcaaaagtcaaagtggtaggcttcaagatgaaacataagatctgttgactccttcctctatttagtatatattttcataatattcagccttttcttgccccagatatcatatctattttacctacccaatatttaagtagtttccatgttgtgattaagaaaacaaaattaccataattacctagattattgctaattgtgacatatgtaaagtctattaatgtaataaatctcctttcttaagtcaaaaaataattttgtgtaattccaaacaggaaactgaaaaggcataggtattctcagcagtctctaaagtcccaaaatctaatggcaattttaccagagcagatctttagaagtattgctataaatttggatatcccattctaattttaagccaaatgctttttgagaaataagccagctgtttggaaatgcttgtattataatcggtttgataagcagttatgtcttatgcagatgaattaggggctacctgtttttatgcactggtctttggggtgcttttgaacagtagtgtctgatgttttaattgtcaaagcaaaaagaaatgagag

SEQ ID NO: 27110 - DNA, 1023 bp, Homo sapiens
gcaaaatttggaaaccttaacatttcacttagcaaaatacatatatagtaatgtaaaggccctgagtcttgggttttcatttcaaggtgagcatttgatattggagctgggttatttcttgttttgttctctaatattgtcagaagtaatcctactccttggtttcaacatttcccctctccttttaattgggacacccctactcgtttaccaccagcttgaacacatcacaggtaattgcaagcaataactaaaatagtagttgtgcagctatgaactgtgagcagcttgctctttcccatcctggcaattggttgtcagtttctttccttccatctgaacccagtaacatcacccacgtttcccctagcagtctctcaactacaacccactctgatagtaattgctaaatcagttaaggtcctctagttaaaagcaagagaagtcacctcaactaaattaagcaaaaacaaacagaactattgatttgggaagacactggaggagctggcagaatcagaaggtaagttggagtaccaagtctcaggtagagccgaccttggtggctttggggcccttctagggaagcccctgcttcttcctagttttcaaaatcctgggagagaatctgattggctcagtatcagtcaggtatgactgtgtttggatcagtcagccctgggagagaagaggagaaataacacatagggcaaacaaaccaatttgtgtctactgtcatagaataatatttttagtaaccatcagatggggaaggcctttctaagctacttagaagatttagatgccagaatggaaaagtttgaaagatagcaaatatattaaaatgtgaaacatctttgtgacaaatgatgtcgtaaaaaagtggccaactgggagaatctatttgccataggtagacaaagaatgttccagaatatacaaacctgtgagtaaaaggtaaacaatccagtcaagaaactggcaatttacagaagaaatacagatggtctataaagatatgaa

SEQ ID NO: 27111 - DNA, 1030 bp, Homo sapiens
ttacaggcatgcactaccatgcccagctaatttccatagtagagacagggtttcgtcatgttggccatgctggtctcaaactcctgaccccaagtgatccgcccgccttagcctcccagagtgctaagattacaggcatgagccattgcgcctggcctccttctgctctattttaatcaaaagggtccaccaggatgcctgggttccctcagcagctgcagcttggaccatcatcagcctgggcagacagagcagtgccaggaactcccatgctgggtcaaccctaggcctagcccaaccctaggcctcatcctgcttctctaaagcatagtgaaacctgatagcattagtcttcacaaagctgtgtgtccccatcaccatgtccgccttagacctcataagagacataagacataagagacttcatgctatctggtggaaagacaaagtaggagaaaagacagaaaaccttccctgtttcacttctttaagatgctattatctagaggccgtaacgtgaacacacaaatctgagatgaaactccagtccccagcttttcttctactggtcttgaatccccattccccatcttctgtccctcacccactgatgactttaacacctggcttactgctccttttgagcccctgttcctgactctgcttttggaggcatcagtcaccatgtggatgatccatctatcctcaatctttctattcctcagcttcctcagccacctgatcccatggtcaagtcaccatctgccctgtatctgcactgcccttggaatctcaacaaggcatccgccctgtttactgcctccttcctcccacctcagtattctcttttattccagtcatttttgtcttcatcaagtccttagagttattgatgcctccactttctcaacatcagtcacaccgaacatgtcctcaccttcctccttactctgtgtgtttttgagttctgtttttgagcgtttgagttttctgatttgagtttttgtggtatgtcattattacctttcct

SEQ ID NO: 27112 - DNA, 1061 bp, Homo sapiens
ctagtttcaaacacctgacctcaggtggtcccacctcggcctcccaaagtgctgggattacgggcatgagccaccactcccagcctattttatttttttgagacagaacctcactccatcgcccaggctagagtgcagtggtgtgatcttggctcactgcaacctctgcctcctgagttcaagtgattctcctgcctcagcctcccaagtagctgggattacaggtgcccaccaccacgcctagctaatttttgtatttttagtagagacagggtttcaccacgttggccatgctgatctcgaattcctaacctcaggtgatccacccacctcggccttccaaaatgctgagattacaggcatgagttaccgcacccatccttatgtgcttttaaaaacactttacattatagagcatttcaaacctgcatagtagaatatcataataggataatgggcataaatatatacagttattatttgtcaattaaaaaaagcatagtagaataatgaacctcagttgccatcaaccagcttccagggttatcagcacgaggcctattttgtgacatctgtaaccccccttatttttcctcagtccagtattttaaggcaaatcacagacatcatatcatcagtaagttcttcagcttgtatttatttttatttttatttgttttaattttttttggagacaagggtctccctgtgttgcccaggctggagtgcagtggctcaatctcggctcactgcccaccatcagggctcaagccatcctcccaccttagcctcctgaggagctgggactacaggtgtaagccaccatgcctagctaatttttgtgttttttgtagaggtgaggtcttgctatgttgctggggctgatatcaaactcctgagctcaagcaacccacccgccttggcctcccaaagtgttgggattacaggtatgagccaccgagtgcagccactgtatttctaaaaggtgaaaaatttaaaaactgttaaacaagtaaactataatcattttaaaatactacataatcattttttggatttcc

SEQ ID NO: 27113 - DNA, 1033 bp, Homo sapiens
aaagtagaccaagatactcgtgctaaaactaaacagggtggctaactgttaaaagatttaatagaagcctatgttagagacttctaacataatagacaaaatgttcatgatataatagcaaatcacttgtcataccatcaacaaaggaaaccacaaattgaatcagaaaagacaatcaacagtcaccaatacaagatgaatcagatgttggaattttctgacaaggattttaaagcatccatcataaaaatgcttcaaaatcaattaaaattatcctgaaacaaaagatataaaaatctcagcaaagagccatataaaattaattaaaactaaataaatgaaataaaaaagcaccaaaatggaaattttagaactgaaaaacaacaggaaaaaaaatgcttactggaccggctcaatagagtggcagtgacagaatcagtaaacttgaggaaggaactatagaattcacttaatatattggaagaaagcaaactgcaaaaaaaatgacttgtggggcaataacaaaagacttaatattcacgtaattggatttccagaggaagggagagtaagtaggtctaaaagagtgtttgaaagaaataatagtggaaatcttaccacctttggcaaaagaaacaaacctaaggacccaagaagctatgcgaacttggtacaggataaacccagtgaaacaccaagatacattataattaaactcttgaaacctaaaggcgaagagaaagtcttgaaagcagccagagagaaatgatgcattacctatagggaacaccaattcaaatggcagtagatttctcatctgaaaacatggaggccatctgaaatgttacattacctatagggaacaccagttcaaatgacagtagattttctgtatgaaaacacgaagaaggacaagacatgatatttttcaagtgcggaaataaaaggactgtcaatcgtgaatttctgtatctggtgaaattgtgcctcaggaactagaggaaaatagaaacattctcagataatggatacc

SEQ ID NO: 27114 - DNA, 1083 bp, Homo sapiens
gatctcttgacctcgtgatccacccgtctcggcctcccaaagtgctaggattacagacatgagccaccgcgcctggtgaaagttaaaaatcttaaagcaaccagtggattgagacacattatctttacacaagcaagaaaaaggctgggcgtgatggctcatacctgtaatcccagtactttgggaggctgaggcgggatgattccttgagcccaggagttttgagaccagcctggtaacatagtgagaccttgtctcagttttaaaaatttattttcttattaaaaaaaaaaaagcaaggacaagactgaaaactaccttcttattataaacaatggaaacccaaacaatggaatgacagttttaaagtgcagaaaagaaaataaatgccagcatagaattgtataccaagagttgacaaactttctttttaaagggccaggtagtatatatcttagactcctgggccatgtaagatctctgccacagctattctgcattgttgcatgaaagcagtcataaacaatcataagcgaatgggcatggctgtgttccaataaaaccttacttacagaaacaggctactagtccacgggctgtagttccctacccttctatatccagtagaaaatatacttcaaaaatgaagaactaaagatattttcagatgaacaaatacagaggggattaatcaccggcagccttacagtaaagggagttccgtaagcagaggagaatgactgcagaaggaaatacagagattctaagaggaatgaggagcagtggaaagaataaagtgtgggtaaacttaactgaatgttaattgtatgcaataataatgtcctctgggatttagaatatagaattgaaatatacaccaacaaagcacaagcagctggtataggtggatggaagaagtgaagcttaaggtccttgaattgcccaggaaatggtataagtactaatttatattaggccttgataaatcagggatgcaagttataatttctagggtaatcactaatagtagtaaaagtaaaggtaatagcaaaataaaagtaaatagtaaaaggatgcataaca

SEQ ID NO: 27115 - DNA, 1022 bp, Homo sapiens
cagcaacatgaagcagtgtgtggactccaatgcctacgtggcctccttcccttttggccagtgtatggaatggtatacgatgagcacctgcccccgtaagtgaaaaagggagccctaggcacttatgcatgccctctgtataggcaacaactcagccatgaggctgtgctgtcagcctctgaacattttagaaacaagactggacatgacctctgctcaaacctgaccagagactgccatcgagaccttgctgcctattgagaaccttcatacagaatcaggcacattgacagtaaataaatgtaagatagatcacagagtacagaaataacttgtccaacttcagtgtcatattgctcaatccatgtaatatctccatatctgaatttcctaatttgtaaagtaaatgctttccaatagataatctctaaggtcccttttgccttcaacatcctgggattgagagaggagggaagggtcatctctgttatgtattgggcaaaatactgggctctttacattcattatctcttttaaataatcaagacagaataatatttttgactcaagccagttgaatagtctgttaaaaaaaaagtaaatacagtgaattcagatctacctgtgatagtcaattgcaactttttttttttaatagctgaaaattgttcaggctactgtacctgtagtcattgcttggagcaaccaggctgtggctggtgtactgatcccagcaatactggcaaagggaaatgcatagagggttcctataaaggaccagtgaagatgccttcgcaagcccctacaggaaatttctatccacagcccctgctcaattccagcatgtgtctagaggacagcagatacaactggtctttcattcactgtccaggtaagatgccttgcatatccaaattcaagtgtttcactactgatttatgaagaataaaaccttgaaagctacgttgtgtatatgtaactccctgccctcagcccctttccttcctcctaatggttggtac

SEQ ID NO: 27116 - DNA, 1043 bp, Homo sapiens
atctgggtttatacatagaagaactgaaagcagagtctcaaagacatatttgaacatcagtgttcttggcagcattattcacagtagccaaaaagtggaagcaggcccaagtgtccatggatggataaatggataagcacaacgtggtctatgcatccaatggaatgttatccagccttccaaaggaagcaaattctgacccatgctacaatgtgatgaaccttgaagacatactaagtgaaatactccagtaacaaaaaaataaacattgtatgattacacttttaagagatacacttgtggtagtcaagctcataaagacaggaagtagaacagtggttcacaggggctgggagaaggggaaaatggggagttagtgtttaatgggtacgaagtttgagttttacaagatgaaaagagttctggagatggatagtaatgatggttgcacaacaatgtgaatatacttaataccactgaactgtacatttttaaatggtcaagatggtaaatgttatgtgtattttatcacaatttttgttaaaaatgggaaaagaggccgggtgtggtggctaacacctgtaatccgagcactttgggaggccgaggcgggcggatcacttgaggtcaggagttcaagaccagcctggccaacatggtgaaaccccatctctactaaaaatacagaaattagccaggcatgatggcacacatctgtaatcccagctacttgggaggctgaggcatgagaatcatttgaacctagaaggcagagttcacagtgagctgagattgcaccactgtactccagcctgggcgacagaacaagactctgtcgcaaaaaaaaaaaaaaaaaaaaaaaaagggaaaagatcacctgcaaaggaatgacaagctgaccgctaacttctcagaagtcagaagagagtgagagaatgtctttgaagtactgaaagaaacctccccacctagaatagtgtgcccagtaagcaccttccgagaacaaggatgaaataaagatatcttcaaattagaataaaaat

SEQ ID NO: 27117 - DNA, 1049 bp, Homo sapiens
ccacctgcagcttcccttcagtcacctcctaacctatcctgggtcctatggcttaaggggcccagagtgcactttctcagggggtgctggctctaggatccctgcctgggccaccctaccctgttctcctttcttgtcaccaaagagcgtgttcaagccggctccagtcctgtgttgtgcatggccctggggagtggagatggaagccatcagcactattggtgagacctgattcacaggggtgcaaaggccgcagctgaatgccaacgggcagcctgagcaggaaggcttcctcccattttgtctgagtatatatctacaaggtcaattaaaaggacaggaaaggccaggcgtggagactcacgcctgtaatcctagcaatttgtgggggagaagcgggaggatcacttgagcccagagttcaagaccagcctgggcaatacagtgagacgctaactctacaaaaaaatttaaagtagctggatgtgttgcctgcctatagtcccagctacttggggggctgaggtaggagcattgctgatgggagcgggcagcgaggctgcaaaaaaaaaaaaaaaaaaaaaaaaagccgggaaagggaattctaggctgggggaacagtcagtgggggaggctccgaggcacatttgggggacaaggctgaagccattcacatgccaagaggtaaaggaggtgcagcttcatggtcgcggtgggggtggtagtggtggtggtggctggaggaacacatgcaagtcaggcagtgaggcccaggcaggccttgtggggcccccaaacaccaatgggccaagcctccaagttggggcttttacgtaaggctctataggggttagcgccagagtgcccctttcaggtttaaggtataaacctcttccctgttgttttgatggcctccagtcaagaagggggcttgctggtcagccctactaagcgttcgccctgggcgacactctacaaggttttactggggcccaatgaaattgacagatctgccagggacacacactgagagtccagaagcagcgttc

SEQ ID NO: 27118 - DNA, 1051 bp, Homo sapiens
aactctgatatctaactctcaaggcatgtccttgccaagcagcaatacaattaagtgtgcctaatcttatggctcccacactttcaattgttcttcctgaaacaattagatatgaagccgcaagagcccaggcagggctggattgattcttgaactaatcaacatttatgccctcttggctaaactaggcagagttggttttattacagttcagatgtgattaagcacactgtattgtgtcagcggcaggtgacgagccacacagtgtcctgaggcctgatgaaagggctatgccaaccacagtcccagaggaggagctggctgtagcagcgactgacccaggagctgaagtgagccaagccccctcctcctgagacccctgagaggtaaggcaggctcatgccagaccctattacgtcccacatcatggctagaaccagaaccatcttacatggctggtcaaggcaaggataaccccaggaagtcagaggacttggagactctgtattgtaggaaaaaaaaaaaatactagaaaagacactggagcgtcaccagcagtcacccctggatggtggcattattattattagtagtattttttttgagatggagtcactctgtcgcccaggctggagtgcagtggcatgatcttggctcactgtaacctccgtttcctgggttcaggcaattctcctgccttagtctcctgagtagctgggattacagatgtgtgccaccatgactggctaatttttgtagatggtggcattatgaatatggattttggttttcatcatcaaatatttctgttttccccacattagctgtaaacagtatatatttttggtaaattaagttgaaagaatgaaaaaattaaaatagtataaagaatatctgtttaagtgcagtggagtgtgcctgtggtcctagctacttcggaggcttagatggaaggattgcttgagcccaggagttcaagaccaaccagagcaatgtagcaagactgtgtctgttttattttaaaaataaataaataaaacataaagaataa

SEQ ID NO: 27119 - DNA, 1042 bp, Homo sapiens
taccctttgaattcatatgttgaatcctaacccccaaagcaatggcattaagaggtggggcctttggggctgggtatggtggctcatgactgtaatcccagcactttgggatgctggcagggggcagatcacttgaagccaggagtctgagatcagcctggccaacatggtgaaaccccatctgtactaaaaatacaaaaattagccaggtgtgatggcgtacatctgtaatttcagccactcgggaggctgagacaggagaatagcttgaacccagtaggtggagatttcagtgagccgagatcgtgccactgcactccagcctgggtgacagagcgagactccatctcaaaaaaataataaagatgtggggcctgtgggaggtggttaggtcatgagggtggagatcatgaatggggttagcaccttataaaacaggcttgagggagcccttctgtcccttctaccatgtgtggatgcagtgagaaggcaccgtatctctgaagcagagagcccgccctggacactggatctgctggcaccttgatcttggacttcccagcctctagaactgtgagaaataattttttgttgtttacaaattacccaggctaaggtgtttcattgtaacctgaatggaccaagctggtgtgaccctgttggaaaactggcagtatctaccaaaagccgaacatacgtataaactgatccagcagttccactcctgggtatgtacaccacagaaagctatgtccaccgagacattggcaagaatgtttctaaccacacgctgactgtagccccaaacctgaaacaacccaaatgtccatccaccaacccaaatgtccatccacagttgaagctacagtgaagtcacagggtcgaatactactgcacagcaacgaatatgaatgaaaatatcgctatgcacagcaacatggataaatttcacagacatgaggtcaagcaaaagaggtcagagtcctcatcatcaagagagaattcattgtatgattctcttcctacaaaaagtacagaaata

SEQ ID NO: 27120 - DNA, 1033 bp, Homo sapiens
gtgagaatccaggtcatctctcacccacatatcccctccgttttccttctgtctatttgcaggtactcacgattcagaactgtggcattctgggcattaaggctctttgttttgaggggaaacaacatctttctgaattttgccttgggagttgcatacgctcctcccagagaatccgtttccccattttattaggtttctttttctgtgttgtgtattttctcccctttacaagtcttcaattcaggaccgctgcctggcagccattgctgctgttgaaagtatcaattgtcctgatactgtaatatgagctttacagtgtgatgccattttacatatggttggactttttggtgggtgttgccagattcctatttcaggaaattgacttgtttaaatgcagattgtgagagggagggaaaatggcaagatgtgagatttttattgaatagtcttctaccttagcccagtcacccaactgcttttttgaatcttctctgatatggatgattaaatgtagttctattttgctgtgaaaagtttgggagttttcagttcttttgtctttttccatcttcttgcaacagatttggaaaacagattcttaacctgtgccattttcagagtcagtcacctagttttgttttatttgagaagcacctgagtttgaagcaatgcaaaatatgagatccttcatggttttgtattacatcgttggaaatggatgtaaattccaaagattcagcaaataagagtatagccattagccacaagggtttttttggtttgttttttgttttttactttgagacagcgtcttgttctgttgcccaggctgaagtgcagtggcatgatcatggctcattgtggccttaacctcctgggctcaagccatcctcctgcttcaacctcctgcattgctgggactaaaggcacgtgccactatgccaggctaatttttcaatttttatttttttaaatagagatgggatctcttatgttgcccaggctggtcttgaattcctcctggtct

SEQ ID NO: 27121 - DNA, 1057 bp, Homo sapiens
ttgctgtggtgtgagagcagaggaaaaactttgtttttccacactcttaaaggatttcagtcgttgagacctattatgggaccttgtgctttgcatacgttttgaaatgtggcctaagtcaagtataggttgtctagactgagtaccttggaggtcttaatatcaggaaatatgttaagggctgtgaatagactgaaatatctgaaaattaatggccaggactcactaactagaaggcaggggccttctcttatcagtgagctctaggctggatgtgttagctcacgtctgtaatctcagtactttgggaggctgaggcgggtggatcgcttgagcttaggagtttgagaccagtccgggcaacatggtgaaacctcgtctctacaaaaaattagctggttgtggtggcctgcacctgtagtccagctacttgggaggctgaggtgggaggatcacttgagccagggaggttgaggctgcagtgagcctgaacctggtgattgtaccactgtactctagcctggatgacagagtgagactgtgtctctcaaaaaaacaaaaacgaaaacaaaacctgggtgcagtggctcacgcctataatcctagcactttgggaggccgaggtgggcgaattagttgaggttacgagttcaagaccagcttggtcaacatggtgaaactgtctctactaaaaatatgaaaactagctgggcatggtggtacgagcctgtaatcccagctactcgggaggctgaggcaggagaatcgcttgaacaactgggaggcggaggttgcagtgagctgaggtctgtcgctgcactccatctgagcaacagagcgagactccatctcaaaaaaaaaaacctcttggttttaattggttatattggattttgttttttggaatctgttgagataatcatgatttttttcccttcatcttactaattggaatttctaatgtaaaagccattgctgcattactgagaagaatctcttttggctatggcctattaattttactgtacaactagattccattttttattttattatt

SEQ ID NO: 27122 - DNA, 1046 bp, Homo sapiens
actcttgggctcaagcgatcttcctgcctcagcccctggagtagctgggactacaggtgcacgtgatcatacctaaatttttttttagagatgtggtcttgctgtgttgtccaggctggtctcccaactcctggcctcaagtgatccacccaccttggcctctcaaagtgttggaattacaggcatgagccaccacacctggctgttttgtatttactgtacttttccccatttcttgtcaatcagcttttttgaactgattgctttattttttttctaatgtgaaagtcattttttttttctcctctggagttacctctaaattttgacacatttaaactatcacttctatattcttgtgtagaattaatcagaatctatcttttcttcccttttccaacaagacagaactgctgcttgctttcatttccttctcccttctcttccctcttcaacttcctatgtcgaaatcatgtaagtattttagtttcagattgcttatttttgtaaaagtcagtacttttgtttatttcttaaagctcttggattaaaaaaaagtttcttaaagctcttggatgttttaaaattatggcattcatctaccaattatgttagagaaggtctttgaaaagtaaagttgatcccttacatatgtgaaaattgtttttgcactcccgcttgaaagcttatttggttggctggatataagtttcaaaatcattttccttataactttgaagccagtgctccgttgtcttctggcatctgtgctgctgatgaaaagtctgatactgacttttatgtgatttatgtatctttataggaattcagttttttccttatgatatcttgaaatttcaataggatgtgtctaagttgtcttccccttctctgctgaccgataaacactgttcagcccttagagtaacctgatgattggtgtcttccctttccccaaggaaatttctggaactaacataagatgttggtccttctggttctatattctctccctctctcttttttttttttttttagttagagac

SEQ ID NO: 27123 - DNA, 1141 bp, Homo sapiens
gagccactgcgcccagccaatatgcctttcttttaaattgccaactagagtgtgacaagaaagcctttggcctctcgtttgatcaggtttcttgaagaagcttttcgtgaaagatagagtggtagttatttatgtttcagagacttttaaaaaatccatacacaagtctttcaggatcttctcattccttttttagttatttcttttaaaaagtagtctgatatcttaccttacaggttggagaccctgatggattctgcatcgttttaggatttgcctctgattcttgctagtgttctcttttctgtcattatggggtttgccccgttttctctaatgtgctattcctgtgttttggttttgagttcttggttgcatgtgacctgactgcttctggagacagtacagtgcttgtcgtctctcagctgctgcttctgtgtctcaggagggctgagggctgccctccctcgggagcctccgtgcttcctcaggctttgctctttgttctgtacctctcttcacgttacctttgggtggtggttttcattcctgtgccgcctgcttctgggccagtgatccaggtgtctggtgaccacccgggcacagctgcttggctgctgtgggcacctcagcttcccatgtcctgtagggaactcacccaccggccttgctctccacacctcttactcctgtgtcccctttctcggggatgctgccccctcctgctgtcctgtcctctgttaggggtgaatcttgaatccatcttatctcttactctccctccctctcccagctcagtcgggctctcaccctctgtgacccacctcacaacttcacctgtttcattgcactttgcatccgacctcgccttcattccttagttgtctggaaatgctccaggcctctgctgcttctcacctcattccccagaaacagtcaggttctgtctcttaccagaggtaactgagctgctgctggcctcatagctcctgtcgccctcactgcgggtttggttttcctcttatcacagtggtctgaagtgcttggatagtctaggacatccagccccctccccagacagggactccttagggcgtctctgctcccaggctggccttggcccttctggggtgctcaggaa

SEQ ID NO: 27124 - DNA, 1047 bp, Homo sapiens
tgaataagtctaaggaaaattgcacttatttttggtgtattttctttcagggttattttggagctgttggagcactccttgagctgttgaagatcccgtgatcattacctggggaggggttcctgaaaccttccacaatgggatctgtggactttcatttttttaagagacttactcaatttcatgactgtactacctgaaacaaagtgagaaaggacaggtgtatttttctaagtcatcaagataaatccttaagaattcagtctaaattagcaaccaggaaggaaaaatatattaaaaacaacaaaaaagtggcacatgtccaggcagtgtgaggatttgctgtatataagttgcctgctttgtatttttgaaatctctgcatcactcattggaagtgcttctgaagagagctgctctgtgttcagttgactggttttgtgtcctgtttgaacttgctgaatgtaaggcaggctactatgcgttataatctaatcacaatttgtcaatatggtcttggcaatcatctgtgcattactctggtttgcattaagcctgtgtgtgaacttactgtaaaacatgttttatttcaaggttctgcaaaattaattgggcaggttaattgtgtacctgaaacttaacaagcagtttttggaagggcagttccacgttactttacactaaatcctgggaatgaatgtctggagagacagggcttcttttcttggcagaatttccttgggtagtgggcggactgttctgatgcaagtgggtacactggcagaagcagcacaatctggaggactaacatgagtcagcagggccactagaattgacaccccctcaggggatcagggagaatctggtttttctttcaggctaagtagaaaaggaagaactgaagtgtctgtcaaagaactcatggggagtggggggtccttcagggcactgtggcacttgggaggtgagtctcagaagactgcctgaggagagtgccaggctgcaggtgctcttggtaggggctgaagcttttctttctgctttgca

SEQ ID NO: 27125 - DNA, 1050 bp, Homo sapiens
ggttcccaacgtgctgggattacaggcgtgaaccgctgcacccggccagcatcaattgaaatgatcatatggtttttgtcctttattctgttgatatagcatcatttttattgatgtgccattttcattttgtggctgtatctcaccttattgaaccaagcaggcatttaagttgttttaaggtttttgctattgtaagtaatgctgcagtatggtattcttagataagtgcctttgtttggaactgctgactcaaagggatgtactttgtttaggttttgatacaattaatatattcccttctgcagtaaatttgtagccactctgaatgcctgtctttgtgatctctcctccctgcagagtaatactgagtattcacttgtttcttgattttagcagaggcattttagtctactgattacaatcataaactcaggagttggactccttggtttatagcctagttcaatcattaagttgtgtctgttttctcacctgaacaatagggctgagaatactatcaaccttatagggttgttccgaggcattatcatttctttcctttacaaattgtgtcttagagctcaagtagttgattagggaaagtttctcttcatagaatagatgatgaagtgatataattaaaatacttaaaatttccaatccccaatgaattgatagaatgaggcagtaatcatcaatgctgctaccatcacagaaacaaccaaatactatgtacctcctgatggagaaatcttgtcataaaatcatatttgagcttgatcaagactctagttctaagtgctggtttataggaaattcaagagactgaagatcacatggacctggttgctttagtaaataagtgtgtgtgtgtaaatttctttttccatgtctgtgatttcctggcttataattctgaaagcccttattaaagtctcttgttataactttggggcacttggaaactcagaagcaggcctccaaaaataaaatctccctctctgaccatctcctcctcccctttctcctgctcctttctctccccaa

SEQ ID NO: 27126 - DNA, 1073 bp, Homo sapiens
ttctcccacgggttggccaaagagcccctaacacagggaagacttgcaagtttctcagggtcagccagcagggccatgaggagtggggcagcccttgccttactttgtacccagtctcggagagaaggggaggtgacaggggccactgggttccatggggcctgcaggccgaaagcaagggcaccctggagcagtgcaggcctgtgtggcacagtgccctcatcccgaggcccaactcagccccagccccagcctctgctgtggagcattcctgacgctcccaccccatttcctcatctctgtctcctctctaggcttctttggaaattgactgtccaaaccctcattaggtgctgtctcctcagcagatggtctctggagtcaggttctttgtcttcgatttctgtagctcccacgtgattcagtaaaggcatgctgattcatcatagggttcctggcagaagggcaaaactatcaggggaacaaagtagccagagatcacatgcggagccaccttctgacttggtcaagaactccttgctggtcagacctggctgttcctagcacgtatggttgtcaggaggttgagttggtactaaatcagctgtgaagattagcaactgcctgggcagtgagaaccaggcctctggtttcgggaggaatttgttgtgcagcaaaataaaatattgccatgttagtgtttatttttagtgttgaaatgccaccttaagttgacagtgttaatgctacattgacatatgatatacttagtatcagtcccaatatttcattaaaaagtacttagaatttataaaactgaaaaagtaaaactgatgcaagtgtaccaagtttggacacattagagaatatcaagtaaaaatcaaatttgatacaaattaaacgcacaacataaattaccattcctgtgtaagttagtagataaaaattaatgtttactaagatgtactaaattacatttacttcatttactacatttaattcaaagttaaaactaagatttaaaatgcagtgatcagtgggcaaggtggtatgtacctgtagtctcagctact

SEQ ID NO: 27127 - DNA, 1023 bp, Homo sapiens
agcaaggattggttggatgctactgagatggctgtgaggatgctggagaacagtgtgtggggcttgacagtcagcagttaatctttcaggaaacggttttctgacacagtgtaggctgaagccagactcgggaagtttggggacatatggtaggtgcagactttgtaaaatagtttggaagtaaagagggggagaagtggattggtggctccaggccaaatggagttgaaagaaaaatggttttaggacaaacatctgaagagtggaaaaaaatctgagagaaaggatcatgatggtagaggcagagaaaggaggagttgattggcataggagagcactggaagatgcgggacctggggcctgggcagggaaagagaggccatgtctcagtctgtttgggctactataatgaaacaccatgagctcagtggcttataaacaacagaagtttatttctcattgttttggggtctgggaagtccaagattatggcgccagcagattgagtgtctggtaaggagctgctttctggttcatccagggcttctcactgagtccttatgtggtggaagaaggatttctctgggacctcttttataagggtgctaatcccattaatgaggggttcagcctcatgacctaatcaccttccagtagctccatcttctaataccattgagatgggggttaggatttcagcgtatgaattttggggagacataaatatgcagaccaccgtaggccaagacttcagattggggtaggtggcaggcacttatttcacttctttctgaaggagcttgttactgacagattatcattttaggtcctttagttcaagcttgtctgacccacgacccaacacaaattcgtaaactttcttaaaacattatgagttttttgttttttgtttgtttgcttgttttagcttatcagctatcgttagtgttagtgtattttatatgtggcccaagacagttattcttcttccagtgtgggccagggaagccaaaagattggctc

SEQ ID NO: 27128 - DNA, 1033 bp, Homo sapiens
ttcctggccatggaggcatcatggatcgctttgactgccagtatctgatggccacctttgtcaatgtatacatcgccagttttatcaggtatagtacctttccatctgaaccaagttggtggatttttaagtacggtgcaattctagaattttagcggcatctaagttccagtgaaaagcatcccaaataatgcagttttcagttgtttctgcttacagattttctgaggcctcctgtcatctgttaatagataactctctgatccagagatcagagcagccactcagataatcaggccctggaagcttccgggccctagctcagtgctgtttcttcacattctgttccagaggccctaacccaagcaaactgattcagcagttcctgactttacggccagatcagcagctccacatcttcaacacgctgcggtctcatctgatcgacaaagggatgctgacatccaccacagaggacgagtaggggccacccagggccaggagaacaggaacagaactgagcaggggcaggtctccaaggcaagcccagctggtgtgacttagacaatgacgaggcttcaactcactgtcttttttttttttttttggagggtattttttatttgtgggttcaaaaaatctgtatatacagtctatgtgtttagaatttgtgttgtaagtaaactacagctttgagttggaaagaagtcacgggttgtaaaaccatttggatttttttaaaacaaaagtattaataatctggaagacagtgttgcccaggtcaggagtgttttcttggtggttccagcccccatcaattgaactgtttctgggctcagtcagacacagacattcatctgtgtctgaccaaatcaggggacttccccacctgtggtgggaggcacagcttagatgttttgtacacctggtcttttctagaaatccctgcttggagctgcagaagggttgccttctgtaggtcggaggaatggaggcttactaaccaggtaagccttctatgcatccacaccaa

SEQ ID NO: 27129 - DNA, 1032 bp, Homo sapiens
taccgaaagggctcctcatttgtctcttttgtcccattgtgggcatatggtgggctccttgagaggagggagtctcagctggggcctggctgcagagacctgctcttgaatagggctgcctttgggatcagggagccgagcatactgggcaaggctcatcatgttcctttgtggaagtggttacttggtgggggtggggtggggaaggggggtctaggaagccgaagctgagtgcgcactagagctgctagcaggcaggccagagggtcagcttgtgttttattttctgatttctcctgcatgctttctggagatgaggattttttgtcaggtagctaggagagcactgccaccttgtgtccatatagcacaatgtttctctttcctattcacagacaagattcaagaaaccatttttacgtgtgtacattcaaatcttcatgaatggcatcacttgctttagacccattttttttttattggtcagaaataaaatgtgactgcaactgtgtgccctcccttgtcgtgaattccctgtttatcacttccatgcatggttttatgcttctcatttgtttatgtattcatgaatactgcatagtcctgattcagagacttttgctttgctttccaacttgtatccctacattctcacaacagccttcttacctcgggtgagagtcatgagcaccttaccaggcagggagcttccccaggatagtgtggtggagtcaggactcactccatcctgcactttacccacaggacacctggagggtcccccagccctgcttgcttttgtgaacgtcgtgtgagtacaccgaggtgttgcagctttccttccctctagctcaggaggcctggcctgagccaggttggagcttaaattgctgttggctcctgcctggtggaacaagggggtcatagaaaccagggctgatgggcaccccccagcccctgggagctctgctcatgaccgctcacagggtaccgagtctttgccttttgtgtgtgcgcatgctgccctcttaa

SEQ ID NO: 27130 - DNA, 1026 bp, Homo sapiens
acattgaaggccatttaagaatgaaaacgctcattttataaaaatgaggaaatcagtaaaaaggacatgagttccttgccatctcattgatcatcacactgaaataaactcattgaaaattattcaaagacatcatgacagatacttcctaaataaggaagaaaatgttgatttcctaacctgcagatttttgtaaacattggttttggatgtgaacttatcaagaccctgctgtgtaagtttaataatccatgtatgggttgagtatccctaatctgaaaatctgaaatctgaaatgctccaaaattcaaaactttgagccctgacacgacactgaaaggaaatgttcattggagcacttcagatttttgaattagagatactcaactagtaatattgcaaatatttggaagtccaaaaattccaaaatacttctggtcccaggcattttggataagggatatactcagtctgtaatacactaagtgttctttgttaaattattaggtttttgttagatacaagggaataatgaaattattttgtttttcttgaattcatctttaagattttaaattcattagaagaattcattataaggtaatcatcagcattttgtttttcttttccagaatttatagaagaaaatttcctagcagttctttaaaaagaacttagaaacccaaaggtttttgaatctgtagattttccttttggcattatttttttccttaaatttcttttttcttttttccttgagaacagcctgtgagacaagaagaaaaaggaagatttagtgttgtttcttgttaagaatggtttggctgggcacggtggctcatgcctgtaatcccagcactgggagtccgaggcaggcggatcacgaggtcaagcgatcgagaccatcctggccaacatggtgaaaccctgtctctactaaaaatacaaaaattagctgggtgtggtggcacacacctgtagtcccagctactcgggagactgaggcaggagaatcacttgaacccg

SEQ ID NO: 27131 - DNA, 1050 bp, Homo sapiens
tgtaaaaggacttcaccaagttagggcctcctgggtttattgcagattaaagccatctcagtgaagatatgcgtgcacgcacagacagacagacacacacacacacacacacacacacacacacacacacacacacagtcaaatactgttctctgaaaaatgatgtcccaaaagtattataataggaaaaaagcattaaatataataaactaatttaagaagtgataaagtctccagatgcagtagctcacactgtaatcacagtgactcaggaggctgaggtgagaggattccttgaggccagggttcgagaccaaccttgggcaacatagcaagaccccatttcttaaaaaaaaaaaaaaaaaatttaaacttagctgggtatggtggcacatgcctatagtctcagctacttgtgaggctgaggcaggaggattctttgagcccaggagtttgaggttacagtgagccacaatcacaccaatcactgcactccagcctgggcaataaagtaactcttgactcaaaaaaataaaaaaaattgtagtggtagccatgtgttaattgttaaataaattctccaaagggctaaaagtaaattacttataaattttttatagttgtatttttgacctgccttttatatgtatgaatatttcatagttttgcatatcagatgtaggcatacagacaaatacataaaccaatgaatatattacatattctgtgttccaataaaactttatttatggacactaaaatttgaatttcataaaattttcccatgtcaagaatacaaaatacttgagttttgtttttagctatttaataataggtctcatttattccacaggctgtagtttgtagtcttgcttgaaacaatagaaacagactgattaagcaggagaagttttttgaaagaattttgtttggctcacggaattattagaaggcaggtgaaccaggagggtaagcttccagcagcaatttgtaaaaccatgccttagaattggactaaggaagaagctgctgacactccactgccacaca

SEQ ID NO: 27132 - DNA, 1035 bp, Homo sapiens
cagattttcaatggagacaaaacacccttctattggaagaagatgccctctaaagctttcataggtagagagaggtcagtgcatgggcttgaaagaacaggctgattctcttgctagaggccaatgaagccagtgagtttaagttgaagccagtgctaatttatcattctgaaaattgtagggcccttaagcattatgctaaatctactctgcctgtgctctagaaatggaatagcaaagcacgaatgacagcacatctgtttacaacatgatgtgctgaatattttaagcctacaattgagacctactgctcagaaaaaaaagattcctttaaaaatgttactgctcattgacaacacacctggtcacccaagagctctgatggagatatacaagaaaattaatgttgttttcatacctactaacacatccattcttcagtccttgtcattttgactttcaagtcttactatttaagaaatacattccccaaggctataggtgacgtagatagtgtgattcctctgatggatctgggcaaagtaaattgaaaaccttctagaaaggattcaccattctagatgccattaagaatattggtgattcatgggagaaagtcaaaatatcaccattaactggatttttggaagaagttgattccaacccacatggatgatttgaggggttcaagactagtggaggaagtcactgcagatgtggtagaaatagtaagatagctagaattagaagtggagcctgaggatgtgagtgaattgctgcaatctcttgataaaaattacctgagttgctttttaaagaggtttctagagatgaaatatactcctggtgaagatgtcgtgaacactattaaaatgacaacagaggatttaaaatataacacagacttagtggataaggccgctgcagggcttgaaagaattaacttcaattttgaaggaagttcttctgtgggtaaaatgctatcaaatagcattgcatggtacagcgaaatcttttatgaaaggcagagtcaat

SEQ ID NO: 27133 - DNA, 1073 bp, Homo sapiens
gtaagatcctctactagcaaaaagattatgactcattaaaggctcagatgattgttagcatgtggtgtgagtgtttgtgtgtgtgtgtgtgtgtgtgtgtgtgtatatatatatatttagacagtgctactaccgtacacaaaatggattatagtgtagacataactttcatatgcactgggaaactgaaaaattcgtgcaactcactttactgcagtattagctttgttgcggtggtctggaacagagccttcaatgtctctgaggcatgcttgtatttatttatttatttaaaaacctctatattggttgtgtttccttcagattctattttttgtttgtttcggcctctcttttgtgatggagactttattgaaatgtatggtgatccttggctgctaacttatatttgaatgaggcatgaaaagttcattgggagctccgtaggcactgggtgcagggcctgaattctcagtatctttaagtctattctgtagatcctagctctccatctgctgcttgggaagtataaatgccttcccaccagggttttgggagctaagctgtgggaggaggctgggatctcagtgttcggtatgtagaccttcgcttgatccctattgcactccagtgccccttggttcagagagtaacatgtggagttggggttggtaacttttcctgcaaagggccagatagtaactatttcctgctttgtgggtaatgtgatctctgtcacaaccactcagctttgctattgtagcgtgaaagcagccatagaaaatatacaggtgagtgtgaatgtattccaataaaattttacttatagacactggaaattgaatttttttttttttttttttgagaaggagtttcgctctgtcacctaggctggtgtgcaatggcgctatctcggctcactgcaacccccgcctcccgggttcaagtgattctcctgcttcagcctcccgagtagctgggattacagccacccaccaccatgcctggctaattttttgtatttttagtagagacagggttttaccatgttgaccaggctggtctcgaactcc

SEQ ID NO: 27134 - DNA, 1035 bp, Homo sapiens
gaagttagttgtagatgaagtaaagttataaaagagattaaaaatgcggtaactttttaagataataatcatacagaaggtatgaagttcattttcggtagtcttccaacctctcaggtgcctaataatttatgtttgaggataacaggtaacaaagatagtcgagataggagaacgtgtctattagtctttgcatctaaaaggcagtgagttacgttcctgccttccactgtgtttctgacatagcaatgtttgtttgatattggaacctggattcatattttatgtaaataatatcaagctgtatatttttcaaaggttttttaaactttggagactctttcttttgttaagcagttaaaggaataaaagagctggaaaaaaaattgtaccttcaactcaggttgttccatataacatacgtattctctgctgttacgtaagttttccgattcacagagtccattcatgtacatcacttacacttaaattgtaaaaataattagtctgaccatctgactttaaaagactgttgctacacgtacatcatgtttaggagaatgtgggatatggggaaggggagaagaagacagtccagtggtgactagttgctgctgcttaacctatggcctattgctgcccattgtccctggttttaatccaagcctattatggaatactgcagtgagattatccattctcagcctgttgagctgcattaaattagaatgggaggctgtaagtaaaactcatgcctcttggccaggcattctgcaccagcgtgtccctctgtggcttgctggtcctggttgttctcagactggcagctgagctgcgcttggcttgaagcatactgaagcctgcagccagggacaccgccattgaatcagatggagggggatgaaaaagcagagaagggggcatgtggctggctattcttgctctctggagaacagcttcattgttaggagtagttaggctgaaagtggacttcccactgctgagccacccaagaggcacactgagcattagtga

SEQ ID NO: 27135 - DNA, 1068 bp, Homo sapiens
tgaatagacttaaccttgacagtaagcttaaagcattagtgtcatttaattacatgtctgaggaatttatgctaactagattttgggcttttgcagcgaattttagtcggggcctcattcctgagcccaagtgaccctttcacctcagcttcccaagtagctgggattacaggtgcacaccaactgtgctttgcagttttgtttgtgtgtgtgtgtgtgtgtgtgtgtgtgtgtgtgtgtgtgtgtattttgttttttttacaagcccacaacatcatagctttgcagtttttaaccaggagctggtggagatctttgaaatcatttaggccaattcttttagttacatttatgatgaaactagggatctaccttaaagttttgggaagctctttcaaaacttcagacacctagaaatatatatagtgcagttcagttttagtttctgcagcatggtttggaaacaaaagatacataggatttaaactcgatttgttttcttcttacagtagaagtaaatgctcttgtggcttgaatcgcatctcccaagaaagatacgttcacgttcaaacccccagtactgtacatgtgaccttatttggaaatagggtctttttagatgcagtcaagatagaattagatcatactggattacagtgggccccaataactaggtttttttgttaaaaaaaaaaaaaaaggaaatgtgaacagagagagaatgccgtgagatgatggagggatagattggaatgatgtctgcgagctaaggaatactgaggattgctgccaaccatccgaagctgggagaggagatggaacaactccctcggagcctccaagaggaaccaaccccactgatgctttgatttgggatttccggcctgaactgtaggaaaataaatttctgttcttttaagccatttttaccagtttgtggtaacttgttacagcagctgcaggaaattaataaatgccaatgttgaaaattaaaatctagaaatatggctctaattataatttcatagaatcattttttcccctgagtttcccctgagtttgcataaa

SEQ ID NO: 27136 - DNA, 1034 bp, Homo sapiens
tgctccaatcccaattcttctctgtgatgtatggatctaaagtgtaggagccctgaggtccctctctgacttaaaaggctattattccaaagtgactttcaggtgtcattttgctaggtaagatttataaatatgagtccttggcaaaggattttcgtgtcgaattgggccattaatctagggaaaataagaatggtggactccaggacaccaggcagaatgacttcccttggttcccttggttgaatgaatgggattaacttcacccccagatcaaggcagtgagcattgactggtttagccaaccaatgtagtccacccttttctcaccgtagagctgtgctgtctcatacagtagcctctagactcatgtcactgtttacagttaagttttaattaattaaaattaaattaaaaattcagtttctcaatcccactacctacctttcaggtgctcactagccacctgtgtccaggtgccatttccatcattgcagaatatgttattggacatcactgcacagagcttggatcaggaatggctcttcagagccaatgcaaagtttcttgcaataagaagcttccttgaacttgtggggaaagaaactttccttctttttctggattatgtgctgcaaggatgtaatatctggactcacttttgttatcttgttcccatgaaagaagatattggagtagctcagatgccactttgggagctcaaaggggaagctagccctgcagaagacaagccagtgaagaaccaagtccttaatgatgtcatttgagataccagatcagtccatttcagttccatgaatgaatcaatccccttcataggctatgccagtttaagatagagtgtttgtccctttgcagttagaattactgactgacacattggacaatcatttatttgaaggaaggcagagactcaggtgttaaggatccagctaacatctggcccataaacttgaaagagaaataaaagcgggaatagaatgtgttaactctgtcagtggctatcattccct

SEQ ID NO: 27137 - DNA, 1077 bp, Homo sapiens
tctcttaagagggatttctcttttatctttttcttctttaatattctgatgtacttatttatagaacaaagacattagtcagcttttgtggtgtagcaaaccaccccaaaacttatgccttaaaacaacaaccatttttttgaggtcacccttctttgggttaacaatctggtgcaggctctgggggatcatttttctggtctcaggtgggctccttctggcttctgcagctactcatgggttggatgtgtggctctgctgatatggctggcctctcctgtctgaggcttcagctaggatggctaggctgacttgtatctgtcccatgtggtctctcatcttccaacaggctagtccagcttgctctggtagttcactggcagagttctgaaacagggtggaagctgcaaagccctagaagcagaattgccatactggcacttctgccacattttctatgccaaagcaaatcattcataggttggggaaatagatgccacctattgatgacaagatctgaaaagtcacactgcaaagaggcatggttacagtgagaagaataatttgtgactgtttttgaattacatacaaaaaagtaatttcttcttcaaattagtagaagattgtctctctgatgggatagaactgactgatagcttcctcatccttctgaaatattaaggcaatatgaagtaccccacctggacaattgtgttaattatatatgcccaatattagagcacttacgctgcagtgaggtgggtgtctctcaccataccctagacttggaggtccctgataggtgttctgaaagaagatccctgtaaggttatagggaagtaaagccgcatcccaacatggtgcacagacagcagcctcctagcaacatctcttaaagcagatggtgttttcagacatattgaggaatgaggtgggttgggagcagttgcaacaagatagggaaaccttaagtcatctttgaggatactagtttgttgtgctattttttttcttcctaaatgatttggaagtgatttttctgtgcctgatgtagtcttttttttttttccctttctt

SEQ ID NO: 27138 - DNA, 1131 bp, Homo sapiens
agacagaagtatgtttatgacattattatgtgctaattctttcttaagagtggccatcaatttataaacttccacagttcttttggaaacttcctgggaattgtctattttcgtccatgtttgtaatctctgagccatataaagagtgaagtgtattgcgacgttttcactttcaaaactattcttagccaattttgttagggtcttataaaatgtgctaaagagtcaaacgttaacatatcagctttgaatatatcaggatatagaatgtcagaagttaaacttagaattcttacagtattgtgtagcagactgctaaaattagtatatgattgatgacattgtgatttgataggtaattcaaatattttgtaagtgtttcagaggaaaatattgctataaagcaactgatttagaaattgaaatgagaaatgtcccaagaggtgaatagttgtaatatttattcaaaagtaatgttgcctatcctgctcctgataaccactatttcattctctatctctgtacatttgactgtttccttctaggattccgcatataagtgaatcatgcaatcttttttttctgtgtctgtgccagacacagaaaattatgcttatttcacttagcataatggcttccaagtattgtgttcgagatttttgctaagtgaatagctatagctgcttttgccattggagagttgggggatgggtaactatgtgagatagtggatatgataatttgtttgactatagtaactattttaatatatatatatatataaaacataatatcatgttatataccttaaatgtgcacaataaaatgtattttaaaatatggcctaaatgaacatgatgtagggtttcctttattagtattaggaaggattttaattgtgcatgtagatataagacatttccatatgaaatttatataataacaaagatattacacaaggaaaatgggtctctttcacttctacacctgaaatgtaggcggcgacacttttatctagtcatagaaaacacaatgaacttgtggttgaatgtactcaaattttctatcaaattacaaaatttgtcaaaactgtaacacatttatcatccaaattgtcttaagaaacgtgca

SEQ ID NO: 27139 - DNA, 1919 bp, Homo sapiens
gtcatttctcatagaaggagacagaattgtttactgaactcaggcatcttcataagcaccctaggtgatatagtttggatgtttgtcctgggctccaatctcgggttgaattgtaatccccagtgctggagatggggcctggtggaaagtgtttggctcatgggggcagatccctcatggcttggtgttgtctttgtggcacctccttccacccaaccttgctcccaccatgtgagatgctggcttccccttttgctttccaccatgattgaaagctccctgaggcttccccagaagccaagcagatgctggcacatgcttcgggtacggcctgcagaaccgtgagccaattaagcctcttttctttataaaatacccagtctcaggtatttctttatagcaatgcaagaacagcctaatacactgggatagtccattcattctaagtctgttgttattcaacaaatatttataaatcatatcctatgtgtcacacctatgattttctgccttaaataatagggttccctttcatcattttttttccttgccacttatttgacaatactggttgcttctgctttctgacattgaattcagttaatcttattctgcttttgccatctgtgataataagttattatcctagaaatatgttttgaatttaaactgaatatccatcttgaagttgccttaaattctttatgataaaatccatttagcataataatccgaaaagacagagtgaaaaaaacattatttaaaatagttgatttaatgttgttatgaaatataacaggactcttgaaaaggtgattaatattcttacacatgttgaaacagaacaatatgagttttttcttatctacttttcttatctggtcttctctggcttctaactttattagcattcgtatattttattaattaaaagtcttcttgatatacattctgtgaaatacttatacaaaaacaaatatcaaacctgaaattcttcaagcttctcgatccagctactgatttattgaaaacactgagaagagaaatgtatgattaaatgatgtaggatgaaatttgtccatactatactataggaagtaggaaaatcttcaggacaatcaatctggtttagtcaacaaataaattccaagaaaaaaataagacagaaggggaaacaatagtttagaacacatacagctcatcttaaacaattccaatgtatggctttcatttagattgggatttttaaaattatggcacttgtgagataatttgaatattgagtatttgatgatatttaggaattactattaatttgctttaggtattttagttatttgcaaaagagggaaactacaccgttagagatacattctgaattatttacaggtataattatatgatatctgggactggattaaagtagaataggggcatgggagaaggggttggggttggataggatgaccacgaatgaatggtttttgaggctggtttatggctttgagtgtgcattatactattaagtttacttttgtgtatattcaaaattatccatgataaaaatggaaaaaattaaattaatatataggtagatcatcctcagtgtatgaataaattatagtttattttttccaataaaaactttgttatgtaatagcatggtttcttaaattcacctgttcgatagaaataaggttaaacaagttcaagaatcaactaacatcctcctacagtaagcttcattgcaaatccagttttgacctttgctcaaagaagagaatgagaaaataacacatttgtgtgtgctcttttcctgacctatgacttgtatagatgttagcacagtggctttggttttaaggtaaacattctttcagcatttctcatccttctcccattttcctgcatttctcatc

SEQ ID NO: 27140 - DNA, 1080 bp, Homo sapiens
ttttccaaaatggtttaaaagtgttgagttttgaggagcatgcaggagttaaccagaaggttaaagtaataataataataacaacaacaataataaaagggagcagggtggagttacagaaatagtgttacagaaatatgcagtgtatgattgtcaaatttggttgttactggttagctgggtgcatgaatttgcaatcctgtcatgtgttcattttgcttattcttccctgaaatttccagccactaatggaatgtaacactttaccctttttgaacttcttccttctcaatgcagtaccacattaaaggtcaactgtgaaatttccacgtcctattaaatactattcctagagctggatataatatttcagaatgctacccctgttccaagacatacgcatactttagtgaacatgaaattctgtgtttgaatatccagatttctttttttgcctctattgtctttgctttgactttgtggatttggcaatggttgataaattgttttagagtagaagatcactagattagaaacagtatttaactaaaaatagacctcttggctgattatcagtgtctcaagagacagtgtgagtgaatttctgtttctttttgccatgatgctaactgtcacccggaatataatgcttactggcttaaccccttttgttttttatattatgtttagaatgtgtatgtctccttgtaagaatccaatttgaggggttcagaaacacatagtgaatatgcctgatgagtagtgatttttcaataatgatttttacatgttatgtctcctcaaagataacaacagagcaccatgttgcctaaattcatgtaacttccttctgggttaaactgtttattggacatttctgaatatatgcaccatatgtggctatctttcaaagtatgtgtctgagatattattcagagccttttccagccatttagagatatatgtggagcttagagagaataaaaatataatgtgcattatttactagtaattcacataaaatattccatttctaaagcatgttgcagaattattctactggtaaattaagattgaagt

SEQ ID NO: 27141 - DNA, 1039 bp, Homo sapiens
tagtttttcatttaccctgatgtagacacaaatagaatctgcaatataatcaggcaccaaccatgggattaattagctaactaattacgtaaatgggatcccagttttaacagtcatacctctgcaaaaattgtctttttctttgcaaaaacaatgaagtgtcaacttttaaaaaattaatcctgccaacttcttataaaaagattgtgtaatgtcttggggaaagatttaagatatacaagttaaagatggcctttgaaagacagacagatttgaatttaatatttgactcttttctaagaatttaaaattattctcaaagacgaaaatgaatggtctgaaactcaacgaaatcttttccatgtgagttatgcactcatggtgtccctgtaggagttagagaggtgaataaattgaacgagtaatgatttgtactcttaaacttcctggaaggagaagtggcttggagggtgttggtgggaatagccaaggtatgactgtgatttcaggtaagataatttgaggagctgacaatttacctgcgtggaagtatccagcaggcatttgggaatatgtaattggctcctgaatcagacatgtcagtgaggtgatactcatataggagtcagttacctaaaagtgacagctaaaccttatgaaggcaatgaattccaggttagtgcagagcctctgcacagttccaaacccaggggatgctcttctcattctcttatctgaagttaagctccagggcttatcattcacataaactacattatgaacaatgctgtttccatctctctatcatgccagatgtcatatactagatgaggtctctcagaagagctagacagaagtataaggactcacctttatatatacaaagtgaggaacaagacaatatgtacaaggactcatattaacatatgcaggatgaaaggggaaaaagaggtcagttaattggttttaaaaaaaagatgaaataagacaggctcaaggaaaacggaaagggggcaaaattgcgggaagtgtttggcct

SEQ ID NO: 27142 - DNA, 1035 bp, Homo sapiens
gtttttactaattaagatcagatttatactcttttgtatcagagaatgtcatggtgaaaattaatataacaaagtcatactgacatttactttagatcagtgtaaagatatactacatgtccactggaatggcaaaaattgaatgactggcagtaccacatttggcaaagatatagataacgagaactctagtgcattgctggtagcagtgtaaattggctactaccactttggaaaactatttattaatgtttgtctgtgccctacatatatctactgtatcagtctaagataaatgatcatatgtgtccactagaagatggttacaagaataatcatacagtcgtatttgtaatagccccaaactgtgaacaataaattatttatcaacaattggatagataaacaaattgtagtatattcacaaaatagaatactgttcagcaataaaaagaatgaactattaatccatgctacaatatggataaaatttcagaaatgtcatgttaagtggaagaaataggacacaaaagagaaatatgattccttgtatatgaaattcaagaaaggcaaaactaattgaagctggtagacatcagaagagtaacccactctcttcctggggagggtttttccaggaaaggggtgcctgataattttggagatggagatgtctaagtggtgctttcatgagtgtgtacatatgcaaacactcatcccactgtgcacgaaggttagatacttccccatgtatatgctataccgcagtaaaagtatgaaatatatgttttatacctcaaaatgtttcacaacacattattttctcctttccaattccacagagaagagagaggctaagtctagtacaaaaggttggttctgggccaaactggagaggagatgatgcaatggaagtatccaggcaaatacaaagggattttaacttgtctgtgtttattgcaaaaaaggaaatttgttatattgtgaaaatagtaaaatagtgtggcttaggagaggttctattttggagggggg

SEQ ID NO: 27143 - DNA, 1043 bp, Homo sapiens
tctcaaatcattctgaagcagtggatgaattcttcccttaattcaaagaaattattgtttcctattgtcctcagtgagaagcatctttgctattactcagactagggaaactaccaggacacccattcaacttgtttctttctcaatttgtggttatgaacaagaattctcagtaagtttggactcaaccattgacttggaggaggcatcagtgttaggagtcagtgacttgctctgccctagaaatttctgttattttcttagctgtcagagttactgcattaggtctagctttgtttcttgtatgttcttgttttattttgtttataactgttttgcccatgtttaaatgtattctgtgaagtagtttttatcttctgtcttaacctgaaaatcagtaaagggttttaacctaagcccggaaagttactgctatttcctttgcagatggtgcattgtccctgtgggggagctgtctagagggtataaccaactgtgtgaactaggcctatcagaaggacatttcactgaacacctgctggcttttatttttttactttatcttttgtcagtgtcaagggtattatattttttcctttttttttttcatcaccacttacaagccagataagacagaacattcacacctcactgactttctttttattgggaaatttttatttttcctcttgatttattttttcttgctctgagtaggtttataaaactaaagtgaggaacattcagataagatgcactgtcaagattattctaaaccccagcatctttactattttgaaagcaaaacttaaaacaaaaaagattaattaaaaatgttcttaaaatttgaaggtgttttcctttccaaaatgtatttctgcaggaattcccactgatttgaaagataaaattgtatcagatcaacatctccagttaaaaagctagttttccatgttttatttccaaatgctatcaaggggataaaatttaaactttttttgtgcacacatgttattcacatgtgagaataatgaaacataata

SEQ ID NO: 27144 - DNA, 1031 bp, Homo sapiens
tctattgactttacccaaggacttgggtgattgtatagaattcattaatcctgttttccttcaaaactctgtataccttttcctaccttctggtatgtgacataacgtgtaagagtggcctgagttttatttctttgtaagaaattattggccaagcacagtggctcatgcctgtgatcccagagccttgggaggctgaggtaggaggatctcttgagtgcagaagttccagaccagcctagacaacatagcaagactctgtctctgcaaaaagaaaagaaaagaaattattgctcttttggttttatcgtcctggcagttctaaggtactttttctctcctcttgaaattgccccccaaaattagctcaatataatatgagtgcacattgataacatttcataacttcccctgggaatatcaagaattatattaaatagacagatctggaaatgtttccttccactttgcccttaattcttatttctcttgggtctgcttggcctcttcctctggaacatcagtttatactacttgagtttgcttttcatatatgttgtcttctttcttagtctaagaatctgtttgtcttttgtgcctcttcattctgggagaatttaaagggtttgttcctgtaccagtggtttgctttttctgatctgacatttatgtgctcgttttctaataaagattttaatattgatatggtatttttatttctcagtgttatgttagcctaccctgttcttgttttgtttctgcatgtgtctagctcctgttttatctcattctctggcatttttgtctcattgtttatagagttattgtttcaaggaattttattgatcctataaaccagatgcttcacttgtgtttgctctagtaaatattttcccaaatgtatgctccttctcttcgttttgcttttatatatatatatttctatacatataaatataaaatatttctaaatatatatatttatatctatatacatatacatcacagtatcttcagggctcaatcttttg

SEQ ID NO: 27145 - DNA, 1049 bp, Homo sapiens
ttttgtataaggtaggaggaagggatcaagtttcagtttcctgcacatggctagccagttttcccagcaccatttatttaataggagatcctttccccattgtttgtttttgtcaggtttgttgaagatcagatggttgtaggtgtgtggtgttctattccattggttctgtatgtctgttttggtaccagtaccacctgtttcggttactgtagtattgtagtatagtttgaagtcagctagtgtgatgcctccagctttgttctttttgctcaggattgtcttggctatacaaggtcttctttgatcccatatgaaatttaaagtagttttttctaattctgtgaagaatgtcaatggtagtttcatgggtatagtattgaatctataaattattttgggcagtacggacattttcatgatattgattcttcctatccatgatgatggaatctttttccatttgtttgggtcttctcttatttccttgagcagtggtttgtagttcttgacaagatccttcacatccctcgttagctgtattcctaggtattttatgctctttgtagcagttgtgaatgggagttcattcatgatttggctctctgcttgtctattgttggtgtaaaggaatgcttgtgatatttgcacattggttttgtatcctgagacttggctaaagttgcttatcagcttaaggaatattggggttgagatgatgtggttttctaaatatagaatcatgttgctgcagacagagacaagttgacttctctcttcctatttgaataccctttatttctttctcttgcctgattgccctggtcagaacttccaatactaggttgaataggagtggtgagagaggccatccttgtcttgtattggttttcacagagaatgcttccagttttttcccattcaatataatattggctatggctttgtcataaatagctcttattattttgagatatgctctatcaatgcctagtttattgagagtttttagcatgaagtgatgttgaattttatcaaaggccttttct

SEQ ID NO: 27146 - DNA, 1053 bp, Homo sapiens
tctgctgtggggctccaacactgatattttctttaaagttcccaagagattccagtgttcaaccaagtttcaaaaccattcgtctaagtaaaaagagtaccagcttaaatggatgatttctcttttgaaaatagagattttacacagaaaagcattgagaattttcctacaaaatatgcttgtcaaaaggaccacttttcagtcaagttttccttaaacttgaccactatacttaatgtagagaagtacaccacggtacttgtatcagtcttctctggttaccacagcaaagtaccacaggctaagtggcttaaagcttaaacaacagaagtttattctctcacaattctgggagcgggaagtctgagacaaaagtgccagcagggttattttctttggaggcctttctcctcggcttacagatggctgccttccccgcatcttcacgtggtcctccctctgtttctattcctaatttcctcttctaataaggaacaagttgtattgcattagggcccaccctcatgaatgcatttaacttaattacctctttaaagcactattgctaaatactattaccttctaaattactgggggttaatacttcaacatataaatgttgaggggacacaagtcagcccttaacagtgttccctcattacattacaaagcctagcttaggatttgcttctttataaggagtagcagtgtatgattattttgctgttggtttaatatagaaaagtagatttttttctttataatcaatacaatggtcaatgtggataaaactgcatagtcagaatcatttcagaaatacacaattgcttttgcagagtggctttagtacagaatatgttgatttggcattatcagcactaatttctgcatgccccagggcacccagtatgtgtctttgtgtattgcaagtgcctataagagtatagttattaaggtcacaagctcttgggtcagaaagccaagccacaacaccaataacaagctgtataatcctgcaagttatatcatgtctctgagacttagtttcttcat

SEQ ID NO: 27147 - DNA, 1064 bp, Homo sapiens
gattgactgtgacaaatatatcatactaatgtaagatattaacaacagcagaaacagtttcccctgttgtagaaggtatagataggagtattctgtctattctctttgcaacttttctgtaaatctatttatagacatctaaaatagttgctgtagtagggcatggtggtgtgaacctatagtcccagctaatcatgaagctgaggtgggaagattaccgggggccaggagttcaaggctgcagtacatgaggatcacacctgtgaatagccactgcaccactccagcagcctgggcaagaccccttcttaaaaaaaggaaaaaagaaagaaaaggaaagaaagaaagaaaaaggaaaaatgaaataggtactgtaaaactgttctgaattggaagttttttttaaaaaaaaaaatcagattatggcgacataaatattagacatcccttagcaaattctctgatattttaaatcagatgcatgggacatactgtaaatttgtagatagctgaatgcaacacatatttaatacaatgattcttaactctggatagctttacacctttaagcatattagcatttttgtctgagtagctgaaatcacactgtaaaaaaagtcaactgtgttagggtctatttctagctgtgccactgcccagctgtggcatctgaaacaaattacttcatctcacattcggcagcctttctgcccacgccacaaatatagtgctgtgtgttcaggacacttaagaagtcatgtaacagtaataatttttttttattgctaatagctatgtaatcttatcaaggtctatttgaataaagggctctacaatccaaaatatagttgatttactatcaaataaatttaattttcagtattttacatggtattcaacattgtaatttaaacatttcgtttagaaacaagtagcatttctgtgggttagagactgatttggagagaccacatccacattcacttaccatgtgttcccaactaaattagctgaagatgcaaaaacccagtggacataaagtcagggctaagggagagaaagtg

SEQ ID NO: 27148 - DNA, 1042 bp, Homo sapiens
tcatggtttcttctccttatctacttctttgtgaatgtgataactcaactttggaattgtaactttgtttctggcatcgcatccttcctaacatgctcattccaaaaactactctttcactgcactacttaggcaagaggcccccggccatgagtctcagagttctcctcctcatatcaccaaagtgtcccatgggttccagtggaaggtgagcaataacagtatctcctgcagccacctcacagaactgttgtgaaggatagagatgataacagatggaccatgtattcactttggaggtaaatagacttggatttaaatcctgagtctgactgagtaagccaagtcaagttatttaacttctatggtcctcgatattctcagtttcctatgatggggctaatagtacctacttggtagaattattgtgagaattttcattcaatgaatgtggactgaacacttgctatatgtgggctactattctagggcctggggatgtaaaagagaaacaagtccttgcctccttgaattcagactgtaaataaacaattaactacataatataatatcagaaagagtttggtggctggaagaatagcaaagggtaaggggagagagagagaggaacagagtgagagtagtgatattgcagagggtgttcaaggaaagcatcttacctgcatgaaataaagggataaaccatgtagaaatctggaagaagagtatttcaggcagatggaagagcatatacaaaacctctgttatggactaagttgtatccctctaaaaggcatgtgctgaagccctcacccacagtgtaactgtatttgaaaataaggcctctaaagaagtaattaaggttaaatgaggtcataagggtgggctctgatcccatggactgatgtccttttaagaagaggaagacatcagagctcactcactctgtgcacacacagaggaaaggccatgtgaggagacaggggaaggtggccgtctacacgtcaggaagggaggcctcaccagtaaccacccctgaagg

SEQ ID NO: 27149 - DNA, 1045 bp, Homo sapiens
atttcctgcttttaataaacacaagttttatgagaaaaataaataaatttcaatataaaattaagatgtacagaatatagatttagcacatataaaaaaggaaacaaaaatcattttaccttcactttagcctgggctgatttaacaaaacaccataaactgggtagatttttaacatcagaaattaatttctcatagttctagaggctgagaagtccaagatcaaggtgctggcagatttggtgtctggtgagagcccactacctcacagatagccttcttctcactgtaactcacatgggagaagtggccagagagctccctgggacctcttttataagggcactaatgccattcaggagggagggcatcaccctcaggacctcatgacttccccaaggctccatgtctgaacatcatcaccttgggggttaggatttcaacatatgaattttggattgggacataaagagtctactgcaaatttcttcatgtcagtcacattttaaccaaaatcatcttacatggacttctctagaggtagttatattttttaaccaactgcacttttatatgataacatatttttatatgccacctgcaaaagggctacctaatgaggccacctattttttgtaagtgtaagagactcagctggaagcaagttcaagtgtgaagcactgtcccctctctacctgggacatggtgcatacaaatgggagtaacatgagctttgcaggggtcatcttggcctcctgtcccacctccaccacttaccagtcatcattcattattgttattccatgaacaatgccacccacaaacccagagtgactctcagttcattgcttgtcttcacccagcgtaatgccagttgtgtgtccttaacatctttctcatctccttattttgtcctcacttctctccccactgccaatgtttaggcctgcagcaacgatttcctaaattgcccaccttccatccagcttccatcacactgctagagtaacacttcagaaaatccaagttcaatcctattaaaatc

SEQ ID NO: 27150 - DNA, 1080 bp, Homo sapiens
tgttctcgaactcctgacctcaagtgatcctcccgaagtgctgggattacaggcatgagccaccggcctgctagcttcttctttcttgtcatgtgtctcttttgagatatcactcttccagagatgctctccttgaccaccttgtctgaactatccttatagtccccttgtgtcatctccttttgctttcttttcttcagatcatttatcaaaatcaagttgtttcttgttcacttccatgtgtaagtattgttgtctgtctaccccaattcaaatagaaactccaggagagtttgctcactgctatatcccccagttgtgcatgtgggtaccaggtgacactttctaagtagtttaaagtgagtacatgttcttaggaacttgctatgtggcctgaagctttctagaactcaaaatgaagagagagaaattagaaaggcagatgcttaccactgctccccagggaataataatttgaaaaccagcacttaattataatagacttgtattgccaggaaccccatccagtgggtactgagctggtacagtgagaaaactgtcaaacagaactttgtacaggagatactcttattgtggtccaaatctggagggttctattagatgaagttcatccaaacatagaacttagattaagggagtagatgtatactccacagccaatccttcacaaaactcatttgtctccattgggttttttataagctctggaaaacaaacaaacaaaagagatatttaataagttatctatttttttccagagtttcccttgttctcgtgctgatgattaactttaactcttcaaatcaattgtaagctgcctaaaggcagaaaagataatgtatttaaatatgtcttcttattcttaggacagaagaaggtccctatacatggcagatgttcattaaggatcagggtttagtgatgttaatgctattatataggttcattagtcatataaaagttcattatgtgccaggcactttcaaggcaagttctgagaaacaacattaatgactgggcacagaatctcagactagaggacctcatctggtgaacttg

SEQ ID NO: 27151 - DNA, 1050 bp, Homo sapiens
gggccaccacgcccagctaattttttttttgtatttttagtagaggcgaggtttcgccatgttggccaggctggtttccaacccctgaccacaggtgatccgcccgcctcggcctcccaaagtgctgggattacaggcgtgagccaccgtgcccggcaaccctgatctttttcaaactgcaatttaaaatttactgatcacacagaactgaattgatttttaattgtcattctgaagaagtaattaaactttaattactacttctgaaagagagggtttttactaggactttttctgacaggacaataatttcattttttgcaatttttatttataattggcaaataatgattacatatgtttatggggtacaatgtgatgctatgtgtatatattgttgaatgattagatcaaactagttatcatatccatcacctcacacactaatcattattttgtagtgagaacacttaaaatctgcactgttagcaattttgaaatatatattattattaattatggtcaccatgctgtgcaatagatctcaaaaattattcctcctgtctaactgaaactttgtaccttttgattaacatctctgtctcagcctctggtaaccaccattctactctctacttctgtaagtttgatttttttagattccacatataagtgaaatcataacagtatttacttatctttctctacctggctcatttcacttagcgtaacttcctccaagttcattcatgttgttgcaaatgacagaatttgcttcttttttttaaggctgaacagtgtatatatacatacaaaacatttctttatccattcattaactgatgaatggagataaatatatataaaacatttcttcatccattgattaactgatggacacttaggttggttccatatcttgcctgttgtgaataatacttcaagaacataggagagtggatatttctttaacagttgatttcaaatcctttggatatgaacatggaaatgagattggtgaattctagggtaattctattttcagttctt

SEQ ID NO: 27152 - DNA, 1047 bp, Homo sapiens
tatgtatgtatgcattccttgtgcctaaaacacttcctgctaggaaattaagccagccttctatatttgtactcacaatctatcctccaagatatgtagagttgataaaaattaatgcttgcctacaaaatttcagcaatgcttctcctatctctgtacctcccctctgtatacatttgaaaaattaatcctgaccatcccaggaggtagaaaggaaagggtggtaaaataaatagttccttgagattttataaattcatccagattaaaatatatatatatatgtatatgcacacttgtcttgaaaaagttgtgatgatgttatatatcagaaataaaaaattgtttccactcatccaaaagtttaggactcacaaatttttttcaagcagaaataattttgtttcataaatttggtttaatttcttttgattacataaaaaactagaaatggaaatttatgtatatagcaatgtaaaaatgatagtgagtttaatgctaaaatctgatctactgggctctgtttaacctaatacccaaagcttaagtaatggttaagttggggtttagaggggcctattaccttcttcagggcattggtattttgtttcctaccttaatctaaaattagtgtcttatttgccagtctaatatattttacaatcaatctacattgcctaccttttggagtatttctatttaaataaaacaaaatgagcgtttaaactgggaacgtattagattcttctgagctattgagcagtatcagatccttcagcaagaaagctgttttatcatttactaagtacctaggcacagcatcaccttgcccgttaaaagccctgtcaggtacacattttggttgctaggcagctgctggggaagcaatctcttccacacatatggtttatgccacctggcctgcatttcacaccaacctccccaaacttcccagggagttgcaagagaggtcctcatgttcctgtcttcactttccatttccctgtcataagcactccatttgttgtcagctttcattaaggacat

SEQ ID NO: 27153 - DNA, 1025 bp, Homo sapiens
tctgccaaaccactagctaaccacaagctaacaaaatagagacttcagagtccatacaacaaaatatatagcctttaaaaatagtccggaaaaatgagcaaagtgtttgaatagacatttatccaaagagatatttaaatggaaataaacacatgaaaagatgcataacatcagtaatccctcaggaaatgtgaatcaaaaccacaatgagataccacttgacaccatttggatagctattattgataataaataaataaaataaataaataaataaataaataaataaaataaataaaaaaaataataaaaatggaaataaaacaagtgttggtgaagatgagggaaactgtaacccatgtatgttcctagtgatgataggaaatggtgcagccactgtagaaaatggtattgtattttttcaaaaataaacatagagttaccatataattcagcaagttcacttccgggtatatatctcagacaattaaaatcagggactgaaacaggcatttgtacactcatattcatagcagcattattcacaatagacaaaaggtgaaaacaacccaaatatccatcagtggagaaatagataaacaaaatgtggtatatacttacaatggaatatgattcagccttcaaaaataaagaaattctgacacatgttagaacatggataaatcttgaagacatgctaagtgaaatatgccagaaacaaaaggacagatatttgtatgattccactcgtatgagataactagaggagtcaaatttatagaggcagagtggcagttgccaggggatcatcagagagaagtataagtagttattgtttagtgagtacagagtttcagctttggaagatattaaaaagttctgaagatggatggtggttggtgatgattgcacaacacaacattttgaatttagttaatgtcactcaactgtacacaaaatgactaaaacagtaaagttgggctatctatattttatcacaataaaaaatagtttagaaaagtcac

SEQ ID NO: 27154 - DNA, 1059 bp, Homo sapiens
tagaaaagaaagagggacaagtgaagggttctgctaaggccacctccgggccattcatcaaaaacttcaggaattttcttagagttgccctaaaataatagtattagctatttaaaagtgacctcaagagacatgaggttcttatatttatttttattctgggaacatatgcattgaggtaagaattttgaaacacttgcgtatattctgtacaaaatgtgtgctttatctcgtttctattttgaatttcaaacaaatttatgatgagtaagcagtagctgtaagtttgactttaaatgaaaaatgattaagaaaaaagaaaaggtggtgccataaattgtgttcagcaatttgttttgggacataatggaaaactgtgcatgacttccttgcaggtagaatacatgtgccaaaaagatcactgtttgcaaacatgaaaagttagatccatgttattgtgttttgtgagatcatcattacctgctattcctgaccttattatattaaaaaaaaatgcctgtgtcatcttaggctattcttccacccaatcataaaaaggaccaaattcttactgtgtcaatacattgcactatttgtcttggaattttatactggtaggtgtcctttgttggagaatgagatttactctacattctgcacattttggatatgtgtcaggcaaatgaaggatgcacaacttaaacttttatattgtgaaaacatcgtctatctggaacatttgtttaaaagctcataagtcaaaagaaagacattcgtattaaaaagatttttattaaaaaaggggcaacttggatttcagtctctcccttacacacacagaagcagcagcaattgctattctggtgactgtggaagaaagcacccctgccttctgtctcctgggtgtcttttctgcatttgctagacaagaacttttttggagccagagagtgctcaatggtgcccacataaaaacaattaatgtcaaactgaagggaaaatgtcaacgctgagacatagaaatgactgtgatttcagactgtgggttactgttagtac

SEQ ID NO: 27155 - DNA, 1026 bp, Homo sapiens
gtagagggtacaaagagaaaaaattgtgatagattactgtaaaaccccataatcctagaaaaactgattttgattctaatggaaattaagatgatgtctcctagcatttgcaaaattatttagtgccattttatgaatttcaaatcgaaagaggcacacaaaatatttaaaaatttaaatatttttaaaggcaactttatctgtttttctataccttaatatgacattgatcacaaaacctctgtgtcaaccttaatagcagtataaagaagcaacatagaataatggttccacttttgagtttcaaagctgagatccacctcactagtttcatagccttatgcttaacttctctatgccttaattatttcatcttcaaaattaaggacagaagaattcttgatacgcttttcatagatttgaattaaataatacctgcaaagcatttggaaagaagaatctgggcctgtgtaatgtgataaataagtgttaactcttctcaatgttttgaagtgtagtatgttggttttcattcctcaggtgtcgttgtccattttttctaggagatcccatgatttctgggccttaaactttcttctgttttccccagcacctagaagatgcacctgctcatgatgaaatccttaatgtagacttgtagttgtgatctaatcagtgacccaaagcatttgtgccccaacttatcacttaagaatattgcctagtggtctctgtacagaaaaattttggctaatgctgtctctacctaaagccttatctagcacgtgggaaggacagaggctttggagtccaacggctagaatatggctaaagggccagccacctgctaccgtataacgtgcatcctcagtcaccccaggggactccagcacccgttcagaagttctggctggctgtatttgtagctccttcttctctagaatccatatgaaagaaattcaactcttgaggagttaaaagtcaaattacaaagaccttagtagggtcacttcagctttaaggcat

SEQ ID NO: 27156 - DNA, 1047 bp, Homo sapiens
tctacagtccctcagtatttaagtcttattagcaaaagtaaatgtgaaaaaggtattgtgtgagattttacaacagcccaagatgaagagtatagatgtgtgtggtgtttgtcgatggcattatgcttctatccttgttctgacaggattctggccttttggaacattctgtctaaggattgaagctaatttagttgagaaacctaaatattacatttcgagaatgaatttaacacctagatttccaatcttgaaattacaatagtcactcacttatcaaagagtagagtagaaaatagttctttccttttaacatcttttctctcttaaaattggaggacagggatttataagtagtgttccatctatccatccatccatttatccatccatccatccattctttcatccacctatccacctatggtatgtacttgcatgtgtgtgtgtgtgtgtgtgtgtgtgtgtgtgtaaacatatttaaaaggcaggtttactcattgcttttggtacagttctctaaactaaagaagcttatgttggtacttttattgtccatgaaattatattatgaaacaataacaggtaggaaggatgggttcccataaatatcctcttactctctttgcattttgtatcatgtgcactactaatctcttacatttgttaatccattgctatggttttgacataagttggactgacaccttcatttagcagatgtagaaagaggcccagagaggtccacttacaggcaggagtagggccaggccagaaatctagtctcccgtctttttgcttttcttagcaaacagattccccaatgagcagacttgattgtgtcttgctgcacagcaatccacactaaccatacaggtgtaatgtccattatctaaaaaccccagtccgctttgatttcggatcatgtgcttcccttctctactgtgcagatgtcaggtaaacaggtcatcgctgcactgcttcattgtttgttccagtcttcttttctctgggttccttcctttattcattttcagctgttatgaa

SEQ ID NO: 27157 - DNA, 1043 bp, Homo sapiens
agactcacctacactatccccaggtcctcattgtactcattttattcattcacacgttttttgaatgtattcaatatgccagtgaccaagttctggagaaaccatactttgtaaaaagtagacattgtccctgctccagtgaaatttacccccccaaaaaaggagagaaggaaccaataaacaaatgatctcctgaactaattgtctagctacaaacccagacaagttatctgaaagaaaggagcatggtgccaggaaaacccagactggtctgagcaaggtaggtataggggatcgaagatcaggcagaacatcttggagcaagtgatatttgaactaagagccaaaggctgagtaggaattaactaggtaaatggtataaggtctggtagagtgagaaagagtgtgtggatgaagagaaaccctttcagatacggagaataatacacgcaaagtccctgtgataggagggaccatggtgtgtgcaaggaactgaagagtcatggtagatagaccacagagcatcaggaaaagaatatacaatggagccagaaaggtagacagaaatgaaacccataaagccttggctgctgcattaacaattttggcttttatcctaataagacttaaggctggctgaaggtagtgatatgatcagatttagactttgaaaatatttttattgattaatgtggggagcaaattaaagggtagaaggggcaagcgggttgcaaaagattagctagggatattatgttagtgcaggcaagagactctggcagtgtggagtcggtttatgacagtggtgatggacagaggtagaaggatgtgagaaacagggcctggagccggattggctgtaggatacagggaaagggaggagtcaaggaattgcctagacatgtggtttgtgcaactgagtggattttgactcccattcctgggctaggtgtcaaactgccaaactgggaatgagggggagggagccatgacagcaacgttggacatagtatgactgagatgttttcaggcatctagagaag

SEQ ID NO: 27158 - DNA, 1034 bp, Homo sapiens
tagtcctagctatttgggaggctgaggcaggagaatcgcttgaacccaagagatggaggttgcagtgagccaagatcgcgccactgcactccaacctgggtgacagagagaaactctgtctcagaaaaaaaaaaaaaagcttgtgtggtggactctaacctaatcagggctgatttatatgttgtttttttctcacatattttcctcaatgttctgttcatatcacatagaatcactgagaattcttctctgacattcacagggcccctaagtactgcttcacagactgaactgaagcaatattaatgggtctcttcctagataagcccaagcctcaagcatagccctgcgcctcagtcagccaatctagaaatagggcaagcttctaaagatgaaagggcacagtctctgcttttagtaatctcactagggcaatatagccaagtggaatgaagagatgagacaagggctagactgtgtgacatgggccataggttgacagaagctccaaaaatagagtgagtgctctgaggaagctacacagtagcaagaacatggtgagctgggtggaaaacaatgagttaggtcttgcaggatgcctggcaaaggtgggacgtctgtagagggactggcttgagcaaatggtctcagaacaagctgtggattccctcttttaaagttccagactttcataacttcactttggcctgcatgctttccttttggaggcaatatcttcataaatgccataagaggaaattcaacacagaaccctccactgatttcattttctatttgaatttggcagagacccctttaagaccgaatctcatcaagaaaaatataatctgagctacatattgtactaaatcacttcccccctttttaaatttgaaatcagcttttcttttatatatatttattttgagatggagttttgctcttgtcacccagctggagtgcagtggtgcgatctcagcacactgcaacctctgcctcctgggttcaagtgattctcctgcctcagcctccgg

SEQ ID NO: 27159 - DNA, 1048 bp, Homo sapiens
gcctcatcttctgggctcaagcgattttcctgcctcagactctcgagtagttgggaccagaggcgcacactagcacacctggctatttttttctgtttttgtagagacagggtctcgctatgttgtccaggctggtgttgaactcctaggctcaagcagtccccccacctcagccttccaaagtgttgggattacaggtgtgagccactgcgtctggcctggctatgtttttttgaaatgatatgttgataaaggactatataaattagaaactataccttcttttcttttcttctcttttcttttcttcttctcttcttttctttcttttctttctttttttgagatggaatgtcactctgttgcccaggctggagtgcagtggtgcgatctcggctcactgcaacctctgcctccctggttcaagcgattctgggttacaggtgtgtgccaccaagcccggctaatttttgtatttttagtagagatggggtttcaccatgttggccacactagtcttgaactcctgacctcaaatgatctgccctcctcagcctcccaaagtgctgggattacaggtgtgagccaccacgcctggctgctacaccatgttttcttttaaagagatattgggagaaatattgcaggaaatctaggtcactgattgattcctaactgtgttcagaagggactactttgataactgtaattgttattaatgatatgaagtaaattatttgtgaattttaccacattccttgaaagactgagactcagtcagggttagtgagtcttgattagataaatgacagcaaagtgaaatactgtttctgtttcccaaagatggatttagtcctttcatctgtttctccagatactcattttttaagaaaaattctggtttggttggcagtgacattcagattctgattgtatgccttctgcatgtttatttttacaacacactgtgaattgtagaaatatggtgggacagtcatatttccttggcattgaaaccttgcatattcaagaaagtctgtgctaggtt

SEQ ID NO: 27160 - DNA, 1048 bp, Homo sapiens
atattttgtttaaaatactattcagaacctgacatagctacagcatagaatggggtcacataataaaggttcttctcctttacatatgtgcgtgaactttcagtgagtcacatgaaatgaccactggtttggtcatttgagtttatttgaatacattagttatgagctatttagttctttcaagcagtcataattcattctcaaattttaaatcagacatgtactgtagctagcacgtagtaggcttttaaatgtgtcctaaaactaatatgtaagatgaggacatgggccacaaactgttattttgctttccttccttatttcatggttttgtatatcttattttggatttgtatgcattctgctgcttctaaaattagtatctaagcaatgcattttttaacattaattatcaagttttgtcttacttttaaattctgccttatataaggcagcataagtgggcattactgccttgctgacacctactttcctggggtgaaatatattgaccttgactgtaaccttgacatttaagatagttgactagactctgaaaagagaaagaccagcgtgattgtaaatcacacctatttgtataacatcctcaattacgtaataaaaataatccagaaaattgccaagatacttgaacatattatacggggattggtcttagaagcacagacttacccatgggaattagttcattttctgaagagtccttcaccaaactgaaagttgagtttacagtcctgagaatgtgatgcctctttggttattataaccacaaaacagtggaatggctgtttcttcctttaagcaaaatgatatgtttaaactctttttttgagggatgatttaaaatgtgttaattatgtggcttcatttggaatataagagatgatataaattaaattatcactgaaatttttaccctgcctgcctcactcactttgaccttaggaccttacaaagagtgagaaaaagccatcatgatgagaaaaagtgatcatctcaaactcgtgtatgtagatgaaaaaggata

SEQ ID NO: 27161 - DNA, 1033 bp, Homo sapiens
ttctattttttcttcacaggaaaagacaatttctctctgattcagaatcctgaaaatgtgatctcccttaaaaaggtaggtgtatgtgctttttaatttgtgactaaaaaaattttatcttgaataaattacaatccagatgatttaatcgagaagcaattttttatgccactaacacgtgccattgtgaattgaattaaaacctcagattcatctttctaaattcaatatttaactttgccagtctttttaaagaatgactattttgagacaaaagttgatgtctacagcagtcaatgtatgtgatgtataataagtgaatgcttctcagcagatccatttttttattgcaatacatttatttcagctcatcttgatgaaatgtgttcctgtctttttcagtgggtgacatctttctaggaaaccaagacagtgtggaaatgtaaaatggtctgtggccagtaaaaaatgtgatatctttcattttgtggtgtgagatttctttttcagtgtgtggattgtgatttgctgcatactttgtcagctgtaataaggttgggggcattcttgggtgtacggtatctttttgtaatccatacagagcctgcaagaggtttccaaatttcatggagtgaactcatactagcttaggagccactttggctttcttttttttttcttttctgaggcagagtctcgctctgtcacccaggctggaatgcagtggcgtgatcttggctcactgcaacctctgtctcctgtgttcaagggattctcttgccttagcctctgaagtaggtgggtctataggtgcccgccaccacacccagctaatttttgtatctctagtagtgatgggatttcaccatgttggccaggctgatctcgaactcctcatctcaagtgagctgcctaccccggcctccgaaagtgctgggattatgggtgtgagccacagcctggcctttttttttttttttttttttggtttttatctcatactttttattctgaaatatggactggctctcct

SEQ ID NO: 27162 - DNA, 1055 bp, Homo sapiens
ctaatttgtttgctttggaaagacctgacaaaaatagacttcttttaacacaaatggataattttctcccattgatgggcagttcatttaagaatattttatttattgtattataaaaatagcctctttgagacgaatggcctgctccaagtaactctcataaaacatagggattttcttccatacagaaataattactttgatttaaaatgggatattgccttctcaaagtattttttccactatgaagtatatagaagtatgtatttaatgtgtcttaaagtccactagtggaagtattactatcaccttttttcaaggctcattacctaaaatttttctaaaattaaaagcaaagacaaatatgccttacatttagaccaaattaaaaaaatggatctttattttggatagtccctttacctgtgctttactttcattatcacaaaaatatccttaactcttagcatttcataacaactgtgaccaatttttattatgtagttggaagtgttaagaatctgaagagaaggccttttacagtgattatctttgtgaacagtgtttagatacgttttggagacctgttgaaacaaataccctactctttttttttttttttttgagatagagtcttgctctgttgcccaggccgcagtacagtggatgatctcagctcactgcaacctctgcctcctgggttcaagtggttctcctgcctcagcctcccaagtagctgggattacaggcacgggccaccatgcctggctaatttttgtatttttgtagagatggggtttcaccatgttggccaggcaggtctcaaactcctgacctcaagtgatctgcccacttcgacctcccaaagtgctgggattacaggtatgagccactgtgcctggcccaaataccctactctttattgattgtctcacactgattgataatggtcagttcctcaggcataccatatgtctttaaaatattataaaaaactttgtaaagtcttttgttttataaacagcttatctgggctaggcctggagcatattcat

SEQ ID NO: 27163 - DNA, 1076 bp, Homo sapiens
aaagacaagtcttcagtggaaacagcactttaatatcaagttttgaatgaactgtattcatttcattcaaaactcagctctgacaaatatgggtaaaggacatcagtttcagaaatgcaatgcaatgcttgcaattatggaaattatttcatgttttccaattgcttatattaggttgattatatttaatgtttattcctgacaccaaatttatgtattttagttataaaatttgtgaattatagctgcaaaatattatagttttcaagtcgaattattaccagcggcattcctgtcaactttgctttcctcaggactttcaaatagaaatgttattaaatatttcctttttgtcagtgtttgcacttgaaggtaaatttaaacatgagtgtgttgtttggtttctctcattgtggatggactagctagtttaatatttaatggcaagttttgatgtatactgataagaagagagacaaagaaacattattgtatttaaatattatctttctgattgtaaaagtggtgcttgtcgtagataactctgtaaattcaggaaaacataaaaataaagatcactgttgttttaccacacacaaaaattactataactataactcgatgttatatacattacctattatatactgtattttaaaataaaattgggattatattggacatacaatcctgtttttttttctgttaacattatattgtgattacgtcctacgtgattttgttttaaacatggtttttaatggttgcatacctttaaaacaggaagaattataagttatcccaggaatcttctgttactggatacttaggtgttttgtttcattgctttaaaatcatttctactcctcttcacaatgtggatacttgggaattgtcacatcatagtcaatttcacaagacaatatagattaactagccatgcactcttaatgtacatatgcagtatttcagacattagaagtagggagatcagttttgcttgatgcaggcagttaaaaatcacgcgcatgtaaagaaaggaccaattttacttgcctcagtgttggcccaagttt

SEQ ID NO: 27164 - DNA, 1035 bp, Homo sapiens
catgaaaaggacttttattagtggcaggtcttcagatagtttgctagagaggagaagtgcttccaagttgagtgaaagcagaaagcgagccagagttgcattagcaagtgattcaaacaatgaaatctcaagcagcaaggcagctgacatctcagcacttactctgtgctgacagataaatataaattatttttgagacagtggttatttgagatatgtaaaagtttttagatagatatcattatcccaattttacaaatcaggaaacaagtttataaggtttgtaattagtccaatgccccataaacagctggtacataatggggctagggtttgaacgcagcttatttgatttgaaaacctaggttctttccacatgttaagtaatcccttgcctttttgagaactgcattttatagttagcatttatcctaagtggttcatggtttttactaattttaaagggaaagttctagttttatagggaagataacgttggcttgtgaactcagtgagaagatggacagtagagaggttaacttgtccaaaatcaaatcgctctgatgccaacccaggtttgttggagtgcaatccgctgctcttacctaccatgttgtgctgtctggctgattttaccacccaggagctgttgattaccagtgtttggttaatcataggaaagtctggcttgcagccattgccagtgcacaaatcatgttctgtgaaataaattttattttattgactcgaagagacaaaagtgaagctatgtcttctgaataatacccagcattgcttgtattggactttgtatattttttttcttggagtagaataaagtatgtagacaaaataacttatgaagcatttttattgttctgtggattctgttctaacttgaaaggtaactgctttttcactttttagattctacaaaaaagagtgtttgttacctggtgaatcaaaacagaggttccattctgtgatacgaaaagataattattaataaactaaaattaaataacactaatacta

SEQ ID NO: 27165 - DNA, 1069 bp, Homo sapiens
agatcaacacatttctttttgacaggaatcctttgtgtttgaacccaactgcctcttcaaagtggatgagtttggcttctttctgacatggagaagtgaaggcaaggtatggcccaagaagagcaagttgttctttctgctttgtggtttaagccattttgtttctcaacaagtagactgagtgctgttgatgaaccctacccttattcattcattcaagatttttaaaaatgtgcctacatgtgccaggcattgaagtatacagtgatgattaaggacattatcctcatagattccagtctaggagcaatgtcaggcattaaaaaataagttacaagtcattgaatgttgtgaaagagaacactggattgtcaaagagcttaatttaatcttgggagttagaaagaaatctgccagaagaagagatgctcaagctgaaatctaaaaggtacattaaaagtgtgttcatctcattataccctgggacttaattcgatgtatggtacagtgtccacatttaatgaacaattgagctgaatttaagaaaagaattaaagttatataaaaattagcatttttctcacatttcatgtacacacatgtatttaatgattattaacaatgttttatatataaaagtaacagattttagaaacatttttatattcagcattgcacatatatatgtctatatgtatgtatatatatatatgtgaaatggaatacttggggtcttgattatttctgattatttacaataattattgttacatggttttaattccctcttcaagctgactgtaatcagcactgccttcatcatcagaaatttttgccaagcagtttgcctgtatcataggtatggcataatttaagctcattgctgtgttgtattctctctcttcaggaaggacaggtgctagaatgctccctcatcaacagtattcggtcgggagccataccaaaggtacctgtgattggtatttgcttttctaaacacggatttacttatattggaaatggccatggcttctagagataaaaaactcactctttgtatccaggctac

SEQ ID NO: 27166 - DNA, 1124 bp, Homo sapiens
gtcaaacatagagaacattctgcctgttccttgcactccctcttttgagtcctaccctggcccctcttatctctccaaaatcaaaaacaccccttgggcagaacaacttcaatactcataacaaaaggagacagacagagctcactcaagaaagaatgggcattggaatgtaagggtcaattactccaagagtttaaacctaaacattttcaaaatgccttagccacatagtctcaacaagccagtattcaacactgcattggaagcccctgtgaaggttccttgtgaaggttcaatggcttcaaatttataaagcttgcactttagaaactctgttaactgaagtgtaaatgcactgatgcaagaaagagcaagtactaccccacatatcagacagatgcctctacttttaaataatcctttgagtatgatacgatgtttattttacttgaaaatatttcaagtttttccactccactggttcatataatgagacaaaaaaataaacaagtcccatgaacactggaaaggacaaggtcctagtctcatttgcagatgttgattgtctactctgatataaacaattccacggaaaaactgtttgaagtaattagagagttcagcaaggtaaccagagaaacaatgagcaaagcaaaaacctggagacacacatacactgccattaaccaggtagaatagatagtaggaaaacataaatcccatttatattagcaaaagacatgctggttcctaccaccttccagctggttaatcctttcactctttctatgaaagtttttattcatatactaatgtgtatcttcagggggctgcaaggagaggagagactatatatatagtccatttactgctttggtcaccctgtagggtgacctcctccctatccatgcaatcaacactgactagattttcagtagtagctttagacctgactcctcattggcttctcagtatttccttgttcgttgctccccaaagtgtgatccatggaccagcagcatcggcaccccttgggagcttattagaaatgctcagtcttgggtcccacccagacctgctgagtcagagtctgaatttaacaagatctccaggtgatttatctg

SEQ ID NO: 27167 - DNA, 1046 bp, Homo sapiens
ttaatttgtatgaacactatttcattgtaaagtttcaatattgtaacttcactatatccctagatgtgttgaacttgactgctgggatggaaaaggtgaagaccaagaaccaataataactcatggaaaagcaatgtgtacagatatcctttttaaggtaactttaaaaataattacacagacttttccaaactctgtgaaaatgcaggaaatagggagatggagaagagaaaacaaatgattcattttctcaagcattatgccttcatattcccttcttccagtcttgaggaaaaagtcaagacaaagatcttttccactgaacgtccccttcatgatactgttcttgctttcaaatggtgactgtgttacataacaaggtttctctggcagagtttacctagttttacttaccttagaaacagtgtctccttttgttatctacttatttgcttatttactttacattattcctaaaggacttcaaggtggcataaaaagataaatagaatacaggaataaaatagattgtaaatagggcctacaagaataagaaaggccgggcgtggtggctcacgcctgtaatcccagcactttgggaagccgaggcagggagatcacctgagatcaggagttggagaccagcctgaccaacatggggaaaccctgtctctaccaaaaatgcaaaattagctgggcatggtggcacatgcctgtaatctcagctactcaggaggctgaggcaggagaatggcttgaacccgagaggtggaggttgcagtgagccgagattacactgttgcattctagcctggacaacaagagtgaaactccatctcaataaataaataagtaaataataagataatgaggttagacaaatcaaaagaatgaaattctgtggtttgcaaatgtcagctgcagctgtctgtcggtttggtataactcaggatagatattacaacaccaggagcagcggttctcaactccacctacatgtgaaacatcaccatgggtattttcaaaaacataggtgctgctgggcg

SEQ ID NO: 27168 - DNA, 1050 bp, Homo sapiens
tgtctctctctggtattggtatcaggatgatactggcttcagaattatttgagaaatttttcttatgcttctgtttttttaaagagtttatgagggattggtttaaattattctgtacacatttgatagaatgtagcagggaagccatctgagcctgtgcttttctctcttttttttttttctttctgtagagatgaggtcttgctgtgttgcctagtttggtctcgaactcctgagctcaagtgagtctcccactttggcctcccaaagtgctgggattataggtgtgagccaccatgcctggccagggcctgtccttttatttgcaagcagtgcttaaattactaatttaatatagtattttggttaagggcaattataagtgaacattcatctcataaatacctattgatattttactattcagcccatctttttcctgtataatatccaaataaaaagaaattttaatatacctaattgtaacttttttttttcttaaaggtctgtagttactgtggaatcaataagccatggcatctaagaaatttgctgttaaagtaagtaatgtttaatagctttttaaaaagaggctaatcactttctaatataactgagctctgtgttaattgaaaatcgaggttcctaactttctgctttttacacttgggactctgcaaaatttttttttttccttcaacttttaagttctggggcatgtgtgcaggatgcgcaggtttgttacataggtaaacatgtgccacagtggtttgttgcacagatcatcccatgacttaggtattaagcccagtgtccattagctattcttcctgatgttctccctcccccttcccccacaacaggtcccagtgtgtgctgtttccccccatgtgtctatgtgttctcattcagctcccacttataagttagactatgcagtatttggttttctgttcttgcattagtttgttgaggataatgccttccagctccatccacgtccctgcaaaggacatgattttgttcctttttatggctgcttagtattcc

SEQ ID NO: 27169 - DNA, 1012 bp, Homo sapiens
gcctcagccttccaagtagctgggattacaggtgcgtgccaccatgcccagctaatttttgtatttttagtagagatggggtttcgccgtgttggccaggctgatctcgaactcctgagctcaggtgatccacctcctcggcctcccaaagtactgggattacaggcatgagctactgcgcccggcccaagaacatgtagttttgtctagggtaagagtcaaggtatgaacttaagaggtttcatccttagtctcatgaattcccaaaccaggagagaataatggaactacctgtgttgcatgcacattcatgctccatcctcaccccttcacccaggtgttcactactcacatatgcctgaattttattaactaaaaacaagttctttccttcactagagatgaatgtgtttaaaaagcaaatattgagtaaatttgcatagcagatcaaatgctttcaaaggggtaaggattttggagaatgctttgttttgagaaagcctgaagaccctgagctagagacacactgtttagaaagatgagcctggaaacactagtgagggagaaaagcagaaatgagcgccggagactccaccaagggagtccgaaaagtcagggcactgtgggtgaacttgaacctgaatgtagaatggctcttacggtatctataatttgcaaacttcttatatactatttacataatagttctccacttagagatctttaacacaccttcttgttttttggaatgtgacaagttttatagctagtatggacaggagagaggataactttaaaatgtggtgaatagggctgggcgctgatggcctatgcctgtaatggcagcattttgggaggctgaggcaggaggatcgcttgagcccaggaatttgaggacagcctgaacaacacagcaagaccttgtctctttaaaaaaaaaaaaaaggattaaataaatatggtgagttggttgcagtgagcagtgcttctgtatcatcaattagaaatattg

SEQ ID NO: 27170 - DNA, 1059 bp, Homo sapiens
tcagaagccagcagttctgcaggcagtttcctaaggtctggctcccttggcaaacgttaccttggctgcaggtaactttattctttgtgaataatgccagcctggccaccgttgccctcttctggtaaggggctaatgctacaaacgtactgagttttacaaggaaggaaaactcaagctcgattttcactttggtcaactgtgctatgccagctggcataaatccctacaatgaaatgaatgtttggtttaaaatgttgtaatgtatactcagaccatggaaccatgtgagggtctaatcttatttacagttttggctttgaggactaccttgggtatccatatcatttcccacagttgggccactttctgtttggcaaaaaagatttctttcagccttttctctgcctgtgaaaccctgtctggctgcttcattagctaacacatgtgtgaatttgcatcattgataatggcagcaaatgcaaggaatatggttttaatcaaattttagtatctaatatctctgaagcttagggcatagaacattagaggcctgggataaacaattcatattcaatagcagcattttagcatttcttggtgacatatttacacaatttataatttagagatgagtttatgttacatggtaaaacttgagaatatgctgaaataacgcactgtgttgggagggggcaatgaaaatatggggctactatggcagtttatgcaggaactactttaagggcagtccttgttgccctacccagtgcttaattttttgtgaccaatctttggttggcacctctctttccctccccaactgggaagaaggtaaatactccagtcaactaagtgggctttgtgtttaatggaacccgtaatgaatacttacaaaggaaacactgtttcgtgaggcatgtacttccttactataactctttttaaaatttagattcttaagtaatccattaggttgcagtttggcccgaagagtatcacagataaaagctagctaccatactcgtttggattattaggatctaaagacatgatgtt

SEQ ID NO: 27171 - DNA, 1028 bp, Homo sapiens
cagatctagattttttttttttttttttttttaatttgagactgagtttcactcttgtcgcccaggctggagtgcaatggcacgatctcagctcactgcaacctctgcctcccaggttcaagcgattctcctgcctcagcctcccaagtagctgggattacaggtgcgtgccaccacacccagctaatttttatatttttagtagagatggggtttcaccatgttggccaggctggtgatccacccccttcggcctcccaaagtgccgggattacaggcatgagccactgtgcccgacccagatctagattttttttttcctgttatacagtgtattggtttgctagggctgccataacataccacaggccgagtggcttaactaacagaaatttatttgttctcaaagtctaaagactagaagtgtaagatcaaggttagtttcttctgaggcctctctcctttgcttgttgatggctgtctcctccctcgtcttcacatgagttttcctctgtaaatgcctgtgtctcctcttatctagaagtctgagattaaagtattggcaagttagtctcttctgaggcctctctccttggcttgtcgatggccgtcctctccctttgtcttcacataattttccgctataaatgtctttgtctcttcttatgaggatgccagttacattggattaggccccatcctgatgacctcattttaatttaattacctccttaaagacctaatctccaaatatagtcacatcctgaggtactgggagttaggacttcaacatatgaatttgcagggagaggtgcacagctcaccccataacatacagtttaagtagagtctaagtatgttctccgtcttatttggaggtatggacataatcaattaactggtaagccagagacagctctggggtgcaccactctgaaagggttctgaccaaggtcaccactggatcatggccctccagtagaccaagtgacttgtccagccatgtgcttaaattgactacaaatttc

SEQ ID NO: 27172 - DNA, 1032 bp, Homo sapiens
tgttctattcagggtctgaacaaggttggtgtacacattcattgcactcggttgattatctttatcatagaagaacacctcctttaacctgtaggaaccctcatccccaattttttttctatctgtttatttaagaaagcgggtcaaatgtcctctggaatttcccacatttggatttggctggctgcatccggatggtggcattaacctgcctcttccagccccttgtattttctgtggattggtggtttgagccacaggcctgatgaggctggggtcccttgtgtgagaatactttgtggtatgtggggtgtgttttctgttgcatctcatctggcaacacatgatttctggttgtatcccttctaatttcacgctaacaatgtatatacaatgaaaatggagctttttatgattttaaaattaatcagtattttagatttgttcattaggtatttatattactagtaaatactgtttaagcaaaacaaaatttaaaagactcttttacgtaggcttctgaaactttgcttaattcaggcaattaagataaaaatatcaaggtaatgttttgcaataaaacctgggtgttagcatacatagttcctttttaaatctaagtctatgtaagatctaatttagcaccttaattaagatggtaagttattgcatacctatcatcataaggcttacatatcagcccaatatacatcttatgtgaactcttaaggacttgtataatagaagataaaaataaaaagcacatacatggtgggttttttttcccctataaaaacgcaaatcagcaggtagttaaaacaaaaagaaagaaagaaaagaaaacaaagaaggcatgagaccggttcatttaaattccctggaggagtgataataattgagctaatatgcattgccttctcataaattgcttcagtagtttaggccttgagtggcttagaaattagctgtctccccttgcctcttcactgttgctatagaatccagctaaaggcctgtttgtttgtgtttaaa

SEQ ID NO: 27173 - DNA, 1029 bp, Homo sapiens
atgtatgtttaagttttcccacagcaagatttctcagatttcactcagcatagcagacctcttaatgttagatcttgtattgtttgcccaaaataactatatttcattctggtcgcatacattgtaaaacaaaggatagcatttcattaaatagtaattaattgagaccttctggatatgtgtatagtgtttgtcaaaatgtgaaattgtaactggtcttttctatgtggttttgcaaaacaaaacaaaacaaaacaaaacaacaaaataaaaagctttttctggccttgcctttcccaacctgtcctgttcattttacagtgagcacaatttaaaatctaagataattgatataattcaggtgtttggtgttgatggcggggaggcagtaaattgaaggacaggagagcagtgtttatttctaagcactgagtgactaaaggtatagaacttagttgtggatgttggggaaatttggctgtgatacttggaacctcactaataatcaggactgatgtagaatatctggtgatttgggagttgtctggattctttcttcccgtcccatgtgttcttggaaaaggtgtttttcccaaatagaacaagatactctttggttaatatgtgagagaagcttttggactttgatgatctgatggaggagatgttcttggtgactatctttcgaatatcagaaaaaaaaacaaaaaaaactaatactagccaaagtaaaacatatctttggaaacactttcctttttctttgaccgaaacatattattttcttcttctgttatttaaagccaacaaatgacctggagaaagccacagcaatggttgggtgaggttgttccattccagcattcccagtaggattgattgaagtcctttgttggaacagccccattcaggcctttttgaaagggacctcctgagccttgattttacttttctttggatagactattttcaagtacctagtagaaagtcatatatatatattgggatcattgtattatgataatgttt

SEQ ID NO: 27174 - DNA, 1091 bp, Homo sapiens
ggggcatttgtttaggccatgacttctacaagcagatttcttttcttttagtttagaagacaaaaaatttcaatacagatacttcttttagaagtaaatttttagattttattgtcagtagaaaaaagttaaactcctactaatttaaactaagacagtttaaaaaggaagcctgaaaaagactcatactacaaataatttaattgatggcatataagaatatgcagtttgaaaaagccaaactcttctctccacttagcttttgatccccactgtttgcttatttgtataagtcatactgtgtagaatttctattttctttttccccattaaaagaggaccaaacaattctttatacaaatggagtagcaactagttttgtagcactacatttaatgtaatgagatacctttgttcatttttttaaatttgaaatatactttacctgatccactttgattgtatactatattctttgttaattttaattttgtcctgttcctagactgctagaatctggcccctggccatcttaaagtgccaacatatgcctgcagggtttataaaaaatggcctggagtgacacattttattatacctaatattcactgcatcagtatcacatctagctcccttacttgtccacagataatgtaaacaaaggagggaaaaacttattaaattctccttcgctgctggcttgtgctggtttagtgcctgtgtccctggcagtgtccagtgtgttcacttccagttgaagtatccatgtgtttctgggcagcttttctgctcagtgtgatcctgagatggcttccccgccgccacccagagtgtggtccttggccgcctcctgctcctgctctgcaagcctgaaactggcttgtctggagccaggagttagtcctggggtgtgtgtgtgcctgcgcacccatgcgcatgcaagtgtgtttgccagctcaggagctgtctcctctctacctggctagtaagaggtgggacagtaatggtcctcctgctggccccagcaaggcccatgagtgactgccctgacgtattcactgtgcctctgggccacttcttcccctgtagat

SEQ ID NO: 27175 - DNA, 1064 bp, Homo sapiens
tgtggaggacatcctggggctgcttccagaagcatatcctgcaatgaggattggagtgaaggtggtttatttaaactatgtggtttatttaaactttcaaggttaacctcgaaaccagtgaggttacagaaatagcagctcaaggaagaagaaggaccaaggaaggatatgatttcaggcaaaatttcagccttggcttgatcccatgagaatctcaggagtgcaagtggcactgcagagctctctccttctgggttcaaggagctgggttttcatatatcgttatcagtcagtcactgggtttggctccccttaggagatggaaacttctgactccgtgccccaagtggctccagcaacccaagagaagacctctgaaggaagctgcaggtgcatgtgtgcaggtgcacagctatcttcttcatccttcatgtctgaagacctcttcaaagaggccttccatggcccacctatctagtgcaggtctgtctccacccaccactctctattctattgccctactttattttctgtagtgcacttagttgctctctgaatgtatttatttatacgtttaaaagctctgggtcaatgaggcctgagatttcatatttcaccagtttaccttcaatcctgaaagaatgcttggcacatagtagttgtttaatgtatatttgttgaatagcaatgagtggatggattaaaaaaaatcatgaaggctctgtagagaaatgtggaactattagaaagttctggcagcatggactatggcacaccaaatttgttattccctccttaacattatgcaagggaacatatgtgaagaattgtattaaagtttaatctgagaaaggtgtgtagtctttcacatcattgtagataatgttagtcttaatgggtgtattttacagtggtgtaatgcttccagaatattttttgaagaaaattatggcattgaagggaggcttttagttctttgatacattatatctctcaatagaatataatagcttctttttcccccagaagatgtgtgcatttcattatatgtcattatctgatat

SEQ ID NO: 27176 - DNA, 1053 bp, Homo sapiens
gacattgtgttcgtattcataattaaatgtattctttttgatgtgtgtgtgaatgtgtgtgttctttactacagagagaatgaaaatgaaaaaatgtgactgactgcagactaataacagaaaccaatcttaactttaaatatagcatcttaaatatgtgggtcatgctttaatttaagttccaaggcactcaatctaagacatcaactctataattgtgacttcaggtataggctaataatagctagctaatgtcatccccaggagggctgcagtcatctttagatgtctttctcctgtgctaggcatgagagaagcagctatggctggcctcttcactgctgtgtctccagtatgtggacagtgtcggcacaaataggcacctaacaaatagttgttgaaattggaaatagaaataggtgtgattaagatgggggtggggagatgtgggagaagaaagaagggaggagaggggaagaggggaggagaaggagaaaaagagaacttctgaaacaaatacgccagaagctcagtcccatgagggcagtcctacactcactgcattgtaaagaagtgcctaaaacaagtgaagcaacttgaagatgtcaaagtcctgagatgttaattaggaagaaagcaaatcgactgttaattatactgcaatcctccatgtcttatattatctcgattcttcattcctccctgtatccattcctttgccagacaactttgcagtgttctctagaccatgaagtgagtgacttgttccactccttgatatgggctcaaccatgtgctttcctttggccaataaagtgatagttcagagacacagggaatgtgtgtgtgactctggcaattcttctgtggggggcctctgtttatattgataattagatttttaaaaatgtgttataaaatttatgagcccatgtgagaatacagtgatatattgatgaagatttagaataatggatgaagaggtgcttatgtatttgcttcctatccaatcagtgcttgagaggggtccgcataatccaactaccgtctctt

SEQ ID NO: 27177 - DNA, 1083 bp, Homo sapiens
cattcttcctccctggaaatctataccctaataaaataaaataaggtaagccctcaatttcaccctcagctttgtaatgaacccagggaagaccaattaaacttgtgaaaatggtaaaacgagaacaggttttgacttatttgcatatttttgaatattagcaaatagttgaagagatctagtgaccagttcctgacacaggactctaaagtaatagaaggaaaactactctatggctccgaattttgtgttgtttgaatatccatgtccagtcacgtatctgttatatgccttcctagttccattcaacttccttttttatatcctggagcaatttcctccatcacttactctctatacagagcttgttttggtttggatccctcagaaacagatcctgagataaggatgtatgtgcaagtagtttattctggaagtgatccaaggagatgcttggattcagtgatccaagttagaggagtggggaggtgagggggagagaaaagcagggaataaaatatatgtcaatgtggaacccaatcctgctggggaaacttcaggagacaatgtagaacacaatttggaattatcccactagaagggcaagggagctggagtatttacacaccaactcctatcagttgtattggttgagggctgctcctcgggacagatgggattaattctctgtcacctccagcctgccctgtatgtaggcagagaggtttgggaagccagaaagagtcctagggcatctggaaatcaagccattgttctctatgacagtaaagctgataggatattggtgggatacaagaatgctatcaagtttacctcccttaagtcaagagagcaaagaggagctctatgtctagtggtctctgggagttccagctttcagtaatcatcagttctggcttcagaataaaaccacctaggaaacttttaaaaaatgctatcacccagacacctcaccagaaaactaatacaagtgaaaaataagcgtataaaagagtactcaacatcatatgctatcaaggaattgcaaattaaaacaatagactatcactacattcctattag

SEQ ID NO: 27178 - DNA, 1062 bp, Homo sapiens
ctacacccaagggtagctgaagctagcttaggccagcctgtgagagccaattgttagcatctcttcccaacctctgttctgtgacatcatattgatagcttgacatcagccctggtgggaatatttataccatggaagttggcaaatgctacaaagcagtccccaaccaagagccagcacaccactgcctataccctgaagtctaaatgttcttccaactccagggacctctgctattatctcgaagtctcttagttcaaattttcaagtgagagacagggatagataatcctgtccatctaattcttcacccctcacaggagtgtgctggagctggctcatgagagctattgagcactcttcccagctccatatttagcaacatcatgttggtagcatgaaatctttccaagtttcagacagggaagtgggtgtgggtaaagtaaaaaaggattggcttctctaatagagaagggcagccagagtagaagcttctgaagaagcttctagtaggctgttgacaatgctgtgcttcaaagaggtcaggtgaagcaggactgagagcagtgagcacagactgcagatagtgttagcagagcagtgaaagcaaagagatacccagaatggggagaaagaatctaggaagaagtagagttgtggattataaaccaaacaaccagaaggtacctagagggaggagattttttgtaattggaaagcttgtgcctgttgtaaggtggaggaaggagacacagaagacacagactaaagattgatagagatggagatggagagagcaggatcccggagaaaagagggctgagggggaaagaaagtgtttttctggtgcagaaatagcacagtctcctttccttttggaagggagagagggtaggcgaaacagggaaaatggaaccctaagcctctacctgtaagtctttctttactctgtaaactctttggatgaacaactaaaaggcgggaaactcatagcaggtcctttgtgacacaggagtggggaaatagctcttagcatgttatgccatggaaaagttaacacgg

SEQ ID NO: 27179 - DNA, 1859 bp, Homo sapiens
gggaggctgaggctggtggatcacaaggttaggagatcgagaccagcctggctaacacggtgaaagcccgtctctactaaaaatacaaaaaaaaaaaattagctgggcacggtggcaggcgcctgtaatcccagctactcgggaggctgaggcacaagaatcgcttgagttcaggaggcagaggctgcaacgagcagagatcacaccactgcattccagcctgggcaacacagcaagaatccgtcttaaaaaaaaaaaaaattattttaggctagtttccaataagaataaacccctacttttagtgcctaacacaataaagttttatcacatcacagctgcgtgctggtgggacagcccatctccatcttgtagctgtgccatctggccctgtgttctataatctggccctgtgttctataagatcaccacagcaaaagagatggcctggaaaaggctctagctcttaactgtcttgcccctcctttctttggccaaaagaaatatgtgtttgagattgggaagtgtcaaggagcacctggatatttggggagcatcagtggtctctgccactgtaccaacagttaagtcctgtatcaggcttcaaaaagaagaggaagtcattacccaattgttcatttgagaaacaaactccacatgtatcagcaatgtgctcatttcctaaacaagcctattggctgcattactagatatagaatgaaatattttgattctaggtgccccattttaagaaagattgatattgacactgtccagggacatgtagtcagaacatgtaaggatctccagatttttgtgtcctgaaggttttcaaagacttggaggagagggcaatggtttgtagggtacagaatactcttattctgtgtggttcccaaagagagaactagaaccaatgatggagttttaggatgatttctctcacaatgcaggatatttaatcagcaattagagactttcataaatcaaacataagccagatgacatctatgaagaatattgtaaatattttttgcttagcatgggagattggtctgggtagtctctgcggcctcttttttaaatctggaattttgtatcatgaatgtcaaatgaatatttctttttctttttaaataggacactgatgaaattcaagttaactatcctggaatgtttgaattgatggaagatttacaaggtaaggcactttaaagaatttttagactccattgggaaaggtaggccaaaaaaaaagaatttttagactccatttgagagaaacattttgagagccagctctttggcaggcactgggcaaagcactagggatccattgttgaggagaaagcagactgtcttcatggagcttctgatataaaatggaggaggcaggcaccaggcagctgtcacagagataagtgttaaattagaattatggtcagtgctatgaagtagaggcatatagtgctacggctgtttgtaaaaagatggcgggacttttttttgaagggtgcacttgaggatgatggaacacattggtgacttccttcagccacacttggcagctgagatacaggaatgaaggtagttgagttggtttagaagtagggttttgtcagggggaaatgtcccagtctgggagactcaaaaagaagtgttatctgaggaagtagcaattgagctgtgctctaaaaaaaaatggagatgaattaactgggtagacagagtaggcaagtgaatctgaggcaaggagaacagcatatgcaaaggccctcctgtgagaatgaacatagcaagaactgaaagaagggcattttggctggtgttcagggagtaagaaggagagagttaagtga

SEQ ID NO: 27180 - DNA, 1086 bp, Homo sapiens
gatcattatactacatagatatgtattgaaatatcaaattttaacccataatcatgtacaatcataatgtaccaattaaaaaataataatttttaaaaatgaggaacatatctatgaatttatttggagtaatttctagaatattctgttatgaaaaaatagcaaagtgcaaaagaatgtctccagggcacttctttcatatgagaaagaaggagatattagaaagtacttttgtgttctgctcatttgtgagaaaaacatatacaggagttaataggtaagactctgaagaaattagttatgtacatggattgagtagaaatgggttggaataaaggagaataacagcagagtagtatggatgaggaaggcataccttttttgtacggctttgactcttagaatcatagtaatattttacacagaaaacaaagtaaataattgaaatcagccaagtcagctttttttttttttttttttttttgaccgtagtgaggagtcatctagaggtttgacttggatgtagagaaagtttggtctctcttccttgtcatgtagtctcacggccttttcagtaacttccccctttatctctgcagcaagatatcctgtacttcttacacgatggttccaaactccaagagtataagagcaaaagctaccaagcattcctaatgtctaggctcagaaatcccagaacatcatttcctccatattctattgtcaaagcagtcataggctagcaaaaaaccaaaggtgtggaggatgacttttacctctgggtgagagaatggtttgtgcatacaggagggaaggaattgatagtgactatctttggagtttagagatcattgactgatatcagactatgtctcatgatgtagcctgactgtagaagagggaagagccaaatgactcacaaaggagcatagtctcttgtgggatgtcatatttacttttttgaaaataactgagcagtcattagattatcaactgaaatctttctgattgtaagaagatatgttactatttctgagattttctttgtaactgaaagtagatagctagtattgcaactacatagtg

SEQ ID NO: 27181 - DNA, 1050 bp, Homo sapiens
tctctgaaacaatgccatcatgtggactccaggaagctccttatactagtctcagggcccatgagggccaataagggtctgcaatgggaatgtggactgcttgggaatctctcacataccctttcctcatagtggaaagctccttctggctctgaactgatcccggccaggccagctgtttcacatccctttcctaccatgtctcagaggtttcttgtcacttctgtgctgaattccagtgttctgtcttagaagctttattcaaaatggggttatctactcactgttttggtccttctttgtgtaggaggcaagtgcctggaacttctagtcagcctcttgaacccttacctcaattattattatcattttttaaagaactgtagagtctcataaggcgtagaagtgacacaggacctagtactctacataactatggattagagagaggaatttcttcaagaagtagaaatgatagagaaggctgtagagagaggaaatgctgtaactagctacatatatattctggacttaaaaaactgtttcagatttcaaaaatctcagggaaaagatagatttgatcaaatatctggaacaggaaccctgattggaacaggaatctgtattgtggcattatttatttctctggtgcccatagaagacattatttaagtgacctcaataatctctcatttttcctgaaaacatctctggaatccttcttaagataatactctaggtagttactactgatgcaggatgttttgctcctcagctcagctaggtttggtttcttgtctcatgaccaggaagaaataggcaagtggacattgaagaatgagtggagtagaatgtattaagcacaaaggaaacccctcagccgaaagaggagttctgaaagcaggttgccggttgccccccttcacagttgagtaccaatactttgttataaaagctgatggggctgggttccctatttgtataaggtgcaaattcctggtggctccaccccacccttccggtgcgcatgcgggcccttagtctgaccca

SEQ ID NO: 27182 - DNA, 1025 bp, Homo sapiens
gcagtggttatctgaatggtgcttacaatcccactgtccttacaatcaaacagttctgcattgagatccttaatagccatcccacgaaccttttctggggcttggcacatgagcccacgcacgttgaccttcacaggtagtgattgtaaccagtcacgtacccatttcatcttgcacccgcaataccagggattgttgcgaagaatcagttgtgttatattgtccaaatcatcaaagataccctgaggtaaattacttaggttattattggacatatccagtcgatagagctgccttagataagaaaaagcatttgggggcacccgattgatgtggttatcttgaagataaagcttcctcaggtttgtgcctggaaggtttactggtgcagcagtcagggaattccgcaccagggacagctctgtcaaattaactaggttgaagaaaactttgtcacctaaaccatgattgttcaacaggtttccatctagaaccaggcgttttagactagtgagaccttgaagagatggtgatgaaatagtggatatgcgattatcatccaagcgtagttcttctatagtcctgggcaaaccccagggaattgtgctaaggtgattacgggacaggaaaagcagtcggagatagttgctgtctcggaatgctccctcttctatgctaactgcagagacagagttgtcatctaaatgtaattcttccagatagggaatttttgaaagtgaatcataagtgatagtccttatgttattttcttgcaaatgtaactcttttacatactttgggaggttggtaggaaattcatctaaactgttgtggtataggtatattctttctactttcagcaagtttttcaaatctgaaggaatcccagcattatttatttggttgttctgaaggtagagagttgtagcatcctctggtattcctgttggaatggatgtcagaaagcgatcattacagtaaatgaaacccgcatcgcagcgacacacagatggacaggatttagc

SEQ ID NO: 27183 - DNA, 1045 bp, Homo sapiens
ttgaagggtgaggagggcagaatttattgagtgaaaggaaagctctcagcaaagagaggggttctgtaaagcaggtctgcccctcacaatgaagtaccagcacatgaaccgaagaggccaggctcctcccttgcatgaggcacaaattcctggtggctgcaccctatcctgaggtactgtttgcacatgcaggcccttagtctgagccacattgatttatttcccttactgcgcatgtgttaagggatggactttttcaccgtgggcatgtttagtcaaaccctctgtgcacaatgacccggtgggtcggaacctctggggactcttccctatctgcctaggtatttggccgtctccttgcctctatcagtagccactgctatgtcctcagtaactggcagaatacatgacatttagaaagtcagtcatgaaagttaggtgaattaaattgattctgtttggaacactgacattttattgccagccataggctaattcgtgtttgtaaatgtgctctgtaactaagatttcacctaaaactttatgtatctgaagtgaaaagttgtcatctatcctgcaatattatctcctctttataagttttctatactgttcagcattcttccctaccagcccaattatttcttaaaaattgaaaagttaaataaattagtttgtcaagacatcttccccttcttgctgaattaatttaattaacaaagggcctgtcaaaatagccaaggcctttgatgtctgcatgtatggattccagtattataaatgattctgtgtccctctgacctaatgggaatacagtgtaagggtaagaaatgagccttaattcctcagtaccaaagagagaccagcattacccaattacatctaggagacaacaaatatcaccactaggatttaagtatctagctttatggatggagcagaacacataataaattattaggaaattggttgctgattagtttgcaccatatagttggtttttttaagagactgtaaagtgttactttgtttttcatttattttt

SEQ ID NO: 27184 - DNA, 1032 bp, Homo sapiens
tttcaatatgccatcagtaatttactagacatgcaaagaaataagaaaatgtattccagagtcaaatgaaaaatgagtcaatacagacagacccatagctgacctagataatggaattggcacatagggacattaaaataactatgtcacatctgttaaggaatttacatgactagataaaatagaatggatgaggagatgggaaatttcaggagtcataggaaaacagtaagaagaagaaccaaatggaaatttcaagaatgaaaaaaatgaaatatttgaaactttaaaaagtgaaatggaattaataacagatttatcacaactcagtaataaaaagacaacaaaaattagcaaaagacatgagcagatacttccaaaaataagatatatgaatggccagtatacatttggcaagacatctagcattattaattatcagggaaatgtgcattgaatactcctttatagtcattagaattaccaacattaaaaaggctgacgacaacaagggactgccaaaatttgaactctcttacattgctggggttatgtgtaacatggtaatcactggggaaaactgttatgttagttctttataaaataaatatgtacttacctagtaatttcactcaatgatatttgtccaatggaaatgaaaacgtatagctacaagatggtttatacaagtatgcagattgattcataatagctaaaaactagaaacagtctaatgtctattcacagatgaatggataaagaaattacagcatattcaacaatggagtattacaaataaaaaggaagaagtctaaatatatacaacacaggtgaatctcagaaatatttaatatgtggagtaaaagaaggcagtctctctatctttatataaagtttgaagttatatagcaggtaaaacagttctggtgatcaaagtcagaacaggaactccctctgggtgaggggaggggaaattgaatggaaagggcacaaggtagctttttgggttcagggaaaggttttgtatcttta

SEQ ID NO: 27185 - DNA, 1050 bp, Homo sapiens
agacagaagagttctaattaatggaatggaatgatgtgattttctttttagaaaagtttctctctgtgactttgtggaaaataggtaagaggtcagggatgcatgtgaagggaccgtgatctaggtgaaaagtgatggaaatctgtatcaaggaggtggcaatatgactgacagtaaaagaagaagttcttgagatacttagaagatggaattaatagggcttagtcactgatgggatttaagagagaaggaaaaggatttaaagatttagacttatctggccagagtgattcaaattcatagaaaaagtaacctgtgagaaggagcaggttaaaaggaagaggaagggaaccacttctgttttgagcagcctgaatctgcactgcctatcggatagctgagagacggtgtctagtggcagctgtacatctaaaacccggacttgggggaaagatcacaatataacttagagatatagatttgaaagtcattaatagatttagactgtcttaccctggaatccatgaatagtcctaaggggttcacaaacctcagatatatgtatatactttccccttgggctaaggatctgcactgagtatttccagttgccttatcccacatgcatatatgtgcatgagatcacttatatcccttctctgtcctatgtctatctatgtccccaagaggctgatgtgtttgctggcattacccgactcccttgccatttcttatggtgaggcattggcaggagatgagagggaaggagaaggaaaaggttgggatattcttttcccgccttccccacattgggtcccatttctggcagaggctgtattcctccaggactatggtcctgtccagagtcccctccttcatggagccagcactcccaagcctgcagtaacacaaggccttcagtcccagcgggtcccactttttgctcttgccgtcctcttggtgatttgacatgcttttccagttgcctgaaacctgcccatacatcatgaggagtcccttcattatggtctttgtaccatctgaggtgga

SEQ ID NO: 27186 - DNA, 1018 bp, Homo sapiens
aagacaagaaacctggtcctttgtgctctgccccattgcaagctttctcctagcaaacctgaccagtgacaacagtgtccaaagtcttttctagaaaggtctccatattggtacctttttcctgaagtaagggcttataacaagggcattaaaatatgctaatttctaatgctttctattaggcgtatccacatatcaaagcttttactggaacacctttgtcaaaaaaaaatataggtcatgcacatggccatgaaattccattctttatattttaagcagcatcaagattgttcttttccttcgctgtttggcagattagaattcctctttaaagtgggagaagttagttacttatcaaaccatttgattaattagctagacctgtcaggccaaacaggactagccaagtcttttaaatctcttaatatgagccaattttcacaataacttgttttattcatggccttcacattttaaattcttgctcattagtgacctggtatttgggcttgtctgaaaggagagcatccgttgtgttaaacagggctcattatggattataggttttcgaatggggatgcctatgcacaaaagatcgccctcccattttcctctgaatagttaattggaccttcaccttgtttttacaagcaaaggctaagcttcaataaggagataggcttttataatgccacagtttgggttgtactgaagagctggtgacctatcattatcaatacagatgtggaactaaagtacagcatgtgtttggttttgctagagacaataaaagtaatggctgtttttaaaaccagtaaaacactgaacttgatagaaggagaaattcattgaatatatcactctgcaatagttcaattccttgagtaataaaatacaaccaccaaacactcagaaataaacactagttaaaaaaaaaaaatgaaacacaagcctgaacccacaatacccatgcattgactcccaagaaaacagatttttacattccctaataaat

SEQ ID NO: 27187 - DNA, 1049 bp, Homo sapiens
ttccccccatacaacattctgctgcttatcttttgccttattttcaagttttgggtaattttttaacaacaacaacaacaacaaaatttaggagcaatagcatatgagacagaggaaaaacagtgggattccaggcttcctcactgggctttgttaagcagaaagttaaggagagaagacacctgagataggccttctacaaatgagaaaatttccaataggacaaaatgtggggggagctggcataggtagaaggaaggcaaaaacaggtaaatcccaagaaccatttgacaggcaatgttgtatttacttttgtaacagatatagcactgtgactgggggccagtttatgagagacattactttatactttgctgcatttgttgtggtgatggtttttttaagttagaaaatcagatcatctgcatactgaagagcagttatgagtcagttgtttttaaagccatacatttatatgttagagaatttaaactctttcagaggaaaatgcaaaagcaatgaatgtagaaggcagtgaagacagagatgattttaatgcacccaggtattaaaactgagcagagcctctaattattcaacattattctgaaattctctttcatcacaccataggcttttttttccctcttcttttctatttcacctccatttcttttctctctggccccagatatgaaatgaaatctgggagcaaccacaatttctgtctcactggctgagcaggatgcttctgaaagaagcagcatctatatatagtttttcttcttaggctgcaggtgtgggatggaatagaatgaaatggaacagaatggagcaaaaaggaatggaatgttatctctcctgaaattttttttatttaaattatggatgcataatagttgtacatatgtatgtggtacatgttatattttcatataggcatacaatgtataatgatcaaataaaggtaattgggatatccaattaccttcagcaatagtttttttgtgtgttaggaacattccaatggcactcttttagttatttta

SEQ ID NO: 27188 - DNA, 1031 bp, Homo sapiens
cttggatgaggtttctcttcccgaacttgagcaaggttttcccttagtacttgaccttgtatcatcctctcttggccttcagtccacccattccttagctgtcccttcaccttgctgacccaccatctcgctatggctcccttgcagctgattatgtcttgtccctaactgaaaaatagaaactaaatacattttgaaggaaaatggctaactactgataaatactgctttgccattaggggaattcttgagtaagatgatagtcagcagtgaatagtcagtgaaaagattatcatctcttctgcaaattgtccctggtggagatttgattatatgcttaggggccaccttcctgtcttttagaattttctggagcagctgtcattataattactgaggacctttatgtgaccttgtcatcttgggcaggtagctcctaaagggatttctgaagaagacaattcatattttctgtgcacctgccttctcaatattttttgttttcacttagtgtccctgaaactctttctctcttcacatttcactctctgcatcactaatgaggcttccatttacctctttaattaattaattaattcaatatttatttggcacctattaggccccctgtaggataataacaccttaagctctggtctcatttaggagaatttgcatttatgacaagactctagaagacttaaacttttaaggccccaagaggtaaatttctaatggttggccacccctgagttgggaggcactaatgtggactatgaactggatcatcagcatgtagaaccccagaggcagatttctcctgaagttaataaagctccagcctcggggtctcacactgacacagccttttttttttttttttttggctgtacacaagtgttttcggtcgctttatttataattgccccaagctagaaaaaacccaaatggcttccaacagagcaatagttaaacatccatatgatggaatactacacaacaataaaaaagccaacttttgatacatgcaa

SEQ ID NO: 27189 - DNA, 1041 bp, Homo sapiens
aaaattaagtgcttctggtgtgaactgagtcttcaggaaaggctattaattcttactgccaaattcagctagctttcatggaacctagaagcagctgccggggaagttgtgactttggcttctctttccctcattttccctagagcagtagttttcaatctcagcttccctttggaatcacctggagagcttaagaaataccaatgcctgggtcttacccctcaaaattctgaggtacagtggaatggttccttgtcgtgacctagacataggatttgtattgtctcccggcatattctaatgtacagccagggctgcgatcttctgagctggtgaacgtgaagtttggctgtcccttcatgggctttatagttttatctgcaggcctcactttttatgggcagttgacctcacctcacttcattttgtgtgatcttggccagacaggctagcacctgcaaagactgaggtatgaaaagggaatgctattcatttttctttcctttcttcttttttttttttttttttttaaaaaaaaagcatttgacttttgaatatcccttgagctggatgtatgaattaactaaaattattatggttgtcttctatttactgtatatattctgaaattctagtgctcaaattgtttcttctgttaacttttgacagtattagaagatttagaatttgataaggatttcctgccttgactattctgtatcttagatgtttctattttgaggagctaaaatggtataatgatagatctggaagttataaaaccttttgctgttcaaattgaccgtaccaaattgaccatcatctccttgttctttctgagagttagatgcataatcaggcataatctcataatgttaccaatttatttcatgtgattgggtccaagagttacagagtaactgaaatatcccaggtggaaatataaggcaactggatttgcctgcccagagaatgaggagcctcattcacttgttggaaatgcagttttatctgagctttactccagtaccgtccatgatg

SEQ ID NO: 27190 - DNA, 1029 bp, Homo sapiens
ataactcactggacgttcctcattggaatgccaccaaggccagaaagagaaactcagttcctttaaaagccagttatcttcaatatattgcttggtcatagtaaatgttccacacctggattaactgctttgcaaaagtgtagcatgttgcatgagtgaaagttgataactgagcaagcgtatcagtgcatatccatcatttccactagaatagtaatccaaggatatgccccactggaggaagttttcatgcatcatcttgggatgtgatggacatatgcataaagtcatatcatcgaggatgtagtgatgaagaataaacatgttggtcacaggtacatctcatcaacaaattctactcattgattctctctagctaaattattcagaaagttattttccatagaaattttctaatctagtgttttctacttaattcacttgcctaccctatctttgagtccattcttttgctttcatatccttttatttttctgctaatttcttgggtccattgtagaaaatatagataatttggattgagaaactcagttattgctattgcaactgtaaacatatcctgtactgattcccttttaaaaaagacccctagtttcaatattctaatttaagcaagtcaatttgaacatatcaggtttttctaaataaatgaattataattggtaggtcttagataaaagctaaataaattgattagcagtattttgatttattttttcctctgttaaaacaaacaacagactaggttaaggacttataaaagagtattgcttctaattgttttctcttcattgcagtattattttgatgttctgattggttaagctacttattcattaattcactcatttgataaatatttattgactccccctaagcaacagatacttttttatattccagggacagagcactgaaaaacaaaatccttgctttgtcatattggtagtctagaaaaaaaaattatgtttgcttaacataaattaagcaaataaaaaataaagaaat

SEQ ID NO: 27191 - DNA, 1116 bp, Homo sapiens
gcatatgttgaatgattttttcctcacactaatatgtcgtttcagacccttaccaggtctcttaaatcttttcactttcttcttttttcatctacctacaaggcaacttatgtgtagtccatgacttgatctcttttatttcctttgtatgaggagaaattgtgcctggatggaaaatcatgagtcttcctctctctgagcactcttgactctcctgtcttggggcatcattctttgtaatatagatttttttttcataatttcccacagttgccatagacagatgcaaaatgaaaagagggtattgattctctttcttttgtggggcatagactctttcagataacttcagttagaaaaaacaggatgtaagcgtgtgtgtgtgtgtgtgtgtgtgtgtgtgtgtgtgtatcagtgttggttctcaaccctgatttttcttttggagtaaatcagtgttggacccaaaaagcaaaaccaaatagaataaacaaaatgaataaactaacaattacctaatagctaagaacatgaactctgtaatcacatgaggtcacataacatgtataagtttgaaaatacctatttggaaaaatctggtgaaaacttggttctaatttagaagcagtagttctaatgagttttgtgtataagaaataggtgtgtcttagtccatattttatgacatagccattgttgtctagagcctcgtgaaactcactttccatcatgtccgctaaaaccattccctacttcttacaccatgtcagaccttccttgtgttgttcaagggatcttatatttctatttctaagttacaggtaaatcacgatgcttgctggtatctcttcacagatgttccactgccacatcaattcagcatataacacagtgaactgattacatactcccttaattttacttcctagatacttgtcaacctgtctctccccttctctacttttaatgcctttgtttggatttttataatgtctcatttgctctattgcaaatgcttctggcttagtttttctgtctctagtctcttaccctccaaatctattctccgcctgtgtgagccatctgaaaaaggcaaattcactatgatactttttc

SEQ ID NO: 27192 - DNA, 1022 bp, Homo sapiens
ccccaggtgctctgggatggagcttattaattacactcccttcagactaccctgacttgaacagagggaaggaaagagagaaagtcgatagggaaggtgagagaaggaagaacttgggaatcttattaatggtatctttgttttctgaaatgagaattggagaaaacaaggcatacggtgcattcattgttttagaactgagaaacaagctcctattcgtcttgccaaaaattgcaaatgtgtgtgattcctctccattagctcacagcaatattggaaatgtatttgactaaactggaacacaccatcagcccaagatgcccagaggcagctcaatacagccatccatatgcttctctgagttaatttggaatacagagaattcagtttccaaactgtccccatgaacatttgtaaaatcctgcccatgtgagtggaaggtgatctgtaccaccacatgcaagctctcaataatgccggaggactgtgtcatgatagaatgcaaaggaacgacgggaggtattgagacctgcaactcttaactgctactgttttcattggtttaaacatattgctttatagaatttctgatttctcaatgctttattaaaggatcagcaggggttaggcagttgtagtgtaaattatataattgcagccaccacaaatgtatataatggccctcggtcgcttaccagccctctcaggggatacagattgaccatagttactcaactcacaggcaggaagtcccagaacatgctattacttccttctatagcatcatagtctgtgcattcttctacagattatcccaggcaatgaattgcatttaatattgctgtgggtaatatttcttcttctgtctcccttttgctagcactcctggaaatagctgaagcacagtacaaatacttacattgcaaaattatgttaagaatttcacttaacgtaaactgctccctagctcatatatcaaacatgaagtgggtagattgaacttccgtttgctgggcaacctc

SEQ ID NO: 27193 - DNA, 1057 bp, Homo sapiens
aaaacaacaacaacacaatatcttgaacttcagatgttttaatagagacagtgtgatacatgtgtacatagggaagaaactagcccacggagttcactattacataaaacagcatggtttacctaccattgcttttattaaaagtttttgtttttccatgttcatgttgtttttggaaatatattgtaaagtaatattgtcaagtaaataattttctcaagggaaaaataacaattagaaaagaggtaagacccctttgctctgatacccttaaccaagttaattgaggagagaagtagaaataggaagagaagaagagaggaaggacagaaaaaaagaaaatatatgagggtaaaataacatcactgcaggagatgttgcccgtgccctgttcacattggaccttaacactttactatgctccacacaatttttagcttccagtatctgcaactctgttgcaggggttcttttccattatagtggaaaccttcctggtcagcagaagactactctgcacatggcaggctgccagtgacaagaaattaacatcccttaaaacctttccctcaatcagtgattctctagtgtatcaataccccagctcccctcctcttggctgccataattctaagctttctcttatacaccacatctcagagcttctctgtagcagtaagctccagtgacccattgtagtagctggcttaataattcacccattattgattgctttgcctctctgtgttacttcaccactctttccatgctccctgggatcacctcctaaataaaccatttgaacttatatcctagtcttaacactatgcccctggtggaacacaaataagataactactatttctgttcataacagtttgtccttggactccattcattagaattgtaatggcttctattattaagacctgtacaaactttttcatgatactgcacttacctgggttatgcattctccctgctttcttcaatatccatcacaggtgtttcataaatattttctgagtgtagactaattccaccagtgcaaagcttt

SEQ ID NO: 27194 - DNA, 1045 bp, Homo sapiens
agttaagaaataagtaaacaaataagataattgcagattttatacgtattatgatgaaaataagggaatgagagagtgactatctggagactgccaatatagatttttctcacacacttgagttaatctataaaggataaaactgtatttcccatttcccagtgtgacgtgagtgccaggataattcagttggggggagaatagtgttttcaacaaatggtgctggcacaattggatatccgcatgcaaaagaacgtatttggatccctgcttcatactgtatgttgtatttaacttaaaatggatcataaatctaaatgtgagcactaaagctatgaacttctagaacacataggtataaatctctgtgaacttgtgttaggcaatttttgttggtagttttcctggcctttctaggcaatgacaccaagagcacaagtgacaaaaatagataaattggacttcattgtattcaaaaatgttcatcaaagaacaccatcaaggaaatgaaaacacaacccacagaataggaaaagatgtttgcaaatcatatacctgacaaggagcttgtgtgtagaatatattaaaggacttacaactcaacaatcaaaaacccacttgtttgggcaaaggatttgaatagctgtttctctaaagatgtgcaaatgactaataagccaatggaaaaaaatgcagaacatcattagccattagggaaatgcagatcaaaaccgcaaatactgctttgtacctgctaagacagctataatgaaaagattattgtagcaaatgttggccaggctatgaagttggagcacccatacattgctggtgagaatgtaaaatggcgcagtaattttggaaaatagtttggcagtgcctgaaaaaattaaacttgggagctaccgtatgactcagcagtttactcctacctacatatccaagcaaaatgaaaatgtatgtccacacaaaaacttgtacacaaatgtgcatagcattattattcatagttgccaaaagtgataataacccagtgttcatcagt

SEQ ID NO: 27195 - DNA, 1091 bp, Homo sapiens
caggtgtgagccaccgtgcccagccaaaaaaataatttttatagttccagtcaacttatctaaaagttgctttcaaataagcaattatccagggaaaatgaagaagaaaaaaaaagccttcaaagtagcccatgccatgaccgacagtcacaggacagcctctcattcacctatgatcctggtgtacttggtaagtcagttaccaagcagtcatagcctggcgagccctggattaaaggaggagaggcctggaacaagaaggaaaatgccagctgtcagtgaggggaggacagaaaactcaaaacacaaatgtggtcgggtcagcagggcgatgtttcagagcaaagcaatctagggctgcatggcagggacaagctggcccgtgggcctcagcagctctccaagctgtgccagcaaaccacctgacaacaggcgatatctgtaacaatccttacaacacttttcttttttttttttttttcaagaaacagggtctcatatgctgcccaggctagactcgaactccagggctcaagtgatcctacagcctcagcctcccaagtagctgggattacaggttagtgacaggtgcctggctaatttttttttttttttttaatttttattttttttattgatcattcttgggtgtttctcgcagagggggatttggcagggtcataggacaatagtggagggaaggtcagcagataaacaagtgaacaaaggtctctggttttcctaggcagaggaccctgcggccttcagcagtgtttgtgtccctgggtacttgagattagggagtggtgatgattcttaacgagcatgctgccttcaagcatctgtttaacaaagcacatcttgcaccgcccttaatccatttaaccctgagtggacacagcacatgtttcagagagcacagggttgggggtaaggtcaccgatcgacaggatcccaaggcagaagaatttatcttagtacagaacaaaatgaaaagtctcccatgtctatttctttctacacagacacggcaaccatccgatttctcaatcttttccccacctttcccccctttctattccacaaagccg

SEQ ID NO: 27196 - DNA, 1049 bp, Homo sapiens
ttgatttgcctacccagacctttggactgtgctatgtgcttgatatacagagatgaagtggatgaggtctttgttcttggtgttcacagactgtggaaattagaagagaggaagcatgtgatggtacaagaattttgacgaggggttgagatgacttaacaatgaaagggcacaggagagatcagagatttgggattaaaatgtgctcctaaggggctggcttttggaatagaggcagaagacttccgcctcttacaaggaaaagtaaaagatgttgatcctgggaaaacttgagatggagtaaaatttagtatgacagatgatctgacgtcagtgaagtgatgtttgaagggtttgggtagggatggattagagcttggctttggaccctaactgaacatcaaatgttcccggaaagtttttacaatgtgactaaggcttggtccccaccccagaccatttaaaccagaatctcctggggatggggacctggttcaacaatgttttaaaagtaacccagagaattttaacacaggactaagcaccattgtgttacagagtggaaaagtggttatttggaagttagagctgaagaaccaaaataacgtgtgtgtgtgtgtgtgtgtgtgtgtgtgtgtgtgtgtgtgtttattttttttccttttatgtccggttcttcattaggggcttacattgtattaatagcagtgggaaagactaggacaaatgattagcacagtggatgtgtcggaaggttcaaggaagcaagaaattaaataatgaatattgattcctgaccgtctaccacataccaggcagtgtattaagcactttatgtatatcatctgtaatcctcacagtaacctagcaaaaattaagcagtgctacatgaggagccagagttctaggtgttagggttggaagaataaagaggtctttagtgattagtaaggaaagttgttagaaaggtagttcagtgagggtcacaggaaggatgtgtgaggcaatcagcatagaccttgaaacctagaggaagatagcaaatgatg

SEQ ID NO: 27197 - DNA, 1032 bp, Homo sapiens
gatgcccccacaagccttgtttcatggtaagagtttgtttgctttgctcttttattttgggtatgggccatggtataaatgtacaagttttcaccccgtgggctgtgtgctctgcatttcttccttcctatgtcttgatgacactgttttgtactctgcacagatgacgatgagatggaaggcgatggagtcatagacccagggatggagtacgtcccaccccctgctgggtcagtagcttctgggccagtggttggggtcagaaagaaggtcagaggccctgaacagataaagcaggaggtagagagtgaggaggaaaaacccgacaggatggatattgacagtgaagacacagattcaaacacatctttgcaaacaagggctagagaaaagaggaagcctcagctggagaaggacacaaagccgaaagagcccaggtatactcccgtgagcatctacgaggaaaagctgctgctcaagaggctggaagcttgtcccggtgctgttgccatgactccggaagctcggagactgaaacgcaaactgattgtcagacaagcgaaaagggataggggattaccactttttgacttggatcaagttgttaatgctgctcttttgttagttgacgggatttatggagccaaagaaggaggaatttccagacttccagctggacaagccacgtacagaaccacctgtcaggacttcagaatccttgaccgataccaggtgaatgcaagcacttgctgtaaagcccttgggggcaggagtggaggtggggcaggcagcactaggcattggacatggttatgctgtgaccttttaaatcctgagtaatttgggaagagaaaagtaaagtgcaagggaaaaaaatacaaaaatcgctgggctttatttttcagaattgttcattgtaagtacacctgaatacatctgagtttttcttttcctttaggcattcaaacataacctataagttttcttcatctgtctctcttgtctctctctctctgaggatagatatgcatg

SEQ ID NO: 27198 - DNA, 1050 bp, Homo sapiens
agtccctgctgagtgtttgcgaggccactggaggagtggttcatctttgcaggtgggcaccttcccctccagccagaccatacccctgagggcccaaacataggtggcgcacagtcgctggcactcaatgatggccacggtgagatcacgtatatttgcaatctagcaaacaccaatatgaccccacaaaatttgctttaaaaactcacaaagtgctcttgtccctggcatactggtaagtgctctcttgtcctaaaaatgcctatggatacacatggaagttaagcagagaaagcaggtagctatcagatgactgtcaacagaggagttcttagaggcctgagagaaccatgggttataaatctcaaggactctatcaacttcagtatttcagtgccttctttattaaaaagtaagttcttaaatgatatgacttttgggacaccttactctgtgtagctgattaaagaatctaaggacttgccttgtgttgatagaatgattgttactcttttcccctaagattaggtcaaagctgaatgtagaaatctcagttctaagaagctaattctgtcagttttagagagacagaaggtggactttgggattcagaaggtctatacaagggcctcaggttttataattacattcttaatatttcatgtttgtgcatgtaatttagcaggcctagtaaaggaatttttacaggttttggggaggtacaagataacatctagttttaaaaagcaaaacttattttgttttgtatttattcaaggttatcatagtgttaggtattgaaatgtttgacatatttaaaggtaattgagttgtaaataataaagctgacaataacaatatccccattgaccctttgcttcaaagaaaaataaaaaacacccagaatactatcagtttccttggtcttgtgaatgttttgatcagcagcaaaatgtcattctgtttccagctgttgctaggtgttgcaatgtctcagcctcagtctctgatttctccggtttccataactaactgcctacacttaaaagc

SEQ ID NO: 27199 - DNA, 1056 bp, Homo sapiens
gccacttaccttttgcatttcgaaccatgagtgggtttcttttgctcagctttgacgtctgtgttctacaatgtcccatccagggatcagggccccagctggttccttcaggaaactaggcttgttttaagagtgatcattttcacagggaatatttttcagagctgatgctctcattcattacacctatattcttcccctacattccttctttcagtatttgttcagactgctcattcccagggcttgtcaggtcctgtgaagttgttaacattctgttcttctgtcttccaatactctcacttactcttttccctgctagagttttggcagcaaatcccagttatatcatttcacctgggaacacttcaggaggcatctctaacacataaggacttctttttttaacataaccacaatttcattgttatacagttacattgttacaattatattttgttatacccaacaaaattaataacttattaatatcatttaatatctagcccatattgttttcccccattgttaaaaaaaaaatcttttttttccaccagtcagaacagccctggtcagaggcaggagagggaaaagtatctggaaacagcatcccagttttccctatctctgcctcatttctcctcctatttcttctgatcttgctgatctgtgttgacagccttataacttgatataagctggacctctgagttttccttgcatccttgtttccaaacttacttcccattagaagttgtgtcctcctggccgggcacagtggctcacacctgtaatcagcactttggggggccagagcgggcagatcacctgaggtcaggagttcgagaccagcctggccaacatggtgaaaccccatctctactaaaaatacaaaaattagccaggcgtggtggcacacaccaataatcccagctattcaggaggctgaggcaggagaatctgtcgcctgggcaacagagcaagactccacctcaaaacaaaacaaaagttgtatcctcctattccacctgtgcattcttctcgattccttttctt

SEQ ID NO: 27200 - DNA, 1025 bp, Homo sapiens
ttgtcttcatttatcatataatattgtctttttctttgatttctttcaaaagtttgttgaaatctttttgtttctttactttttttgtccatttctattcttagtttttgaatttttaatttatgatctcatatttggggtatatctcatatcccaaaatgtttgtttgaagatatttaatgtagcttaatgttacggttttttaaattttttttctgtctcaccattttttttttggtggaattttctttagttgaattgtttggattctcattttcattttttttaatagactacaactgtttgcgtgtctgcatttctgtaaacagaactgtcagattctagtgtttttgagatttccctagttcaggaaaatgcttctggcagtgtagcaaagtacagtttctttactggattgcaggggaaggagaggtggtgcatcctttggggtttctttgttgttgttttttgtttttctcttttgttttggaagaccctggattactctctcttgcttgtttttccttttcctttgctgtttccaagcagtatcttttccttgctttatactttccccattatgccactgcgcccccagttgtggggttaaagagcaggccctgcttcactcatggggagagcatttctacctgacaccctcccatttctgttttccttacccagatctaccttctgagatatcatccttcttcagggagataaggaaaaaaagccacagggtcccggagagccaggggaatggtgagtgtttcctgtctccattactggctgtaacaggatggacacattcccttctcttaccctgactgccttattggtgcctagtagagttcagctccaattcctcttacttgctcccctgcctcagcatcactttctgcaaaacccatgacacagttattcacctagtaaactgaacaacacacaattctacagtatgagatagagtctgcatttctttgttcagcttcaaaagttctgctgcctgagagtaacgtcacagt

SEQ ID NO: 27201 - DNA, 2551 bp, Homo sapiens
ttgatatatttgaagtgctaaaagaaaacgaacaaacaaaaaagcctgccaatcaaaaattctgtatctggcaaaactgcccttcattactgaggcagaaattaagacattctcgataagttggtggagattacaaccactagacctaccctacaagaaatattaacaagagtctttcaggttgaaataaaaggactttagacagttacatgaagccatataaaaaaattaagttctccattaaaggttaatacacaggtagtaatataagctagtattactgtaactgtgctttgtaacttcactttttgttctctatatgagacttaggagactactgcatttaaaaaaaaatagtctatgtttttgaccacacagtgcataaagatgtaattttgtgacatcagtaatgagttggagatggagctgtataggaacacagtttttatatgctattgaagttaagctgatgagttcaaattcagtttttaaagtttaggacattaagtgtaatccccttggttaccacaaagaaaatatctgtaggatgtagagaaaagcaagtgagatgggaatttaaaagttgcattgaaaaaatcaaccaaagacaaaaaaaggacagtaatacaggaaattaagaataaaaatctgcaagacatgtagaaaacaaaaagcaaaatagcagaaatcagtccctccttatcagtaattattttatatgtaaatgctttaaactctaaaacaatttggcatagtggatttaaaaaaacatgatctaactatatgctgtctacaagaaactcactttatatccaaaggcacaaatagtttcagaagaatggaaaaagacgtttcatgcaaatagaaaccaaagaaagtaggagtggctacattaataccagaaaaaatagactttaaattgaaaaaggttacaagagataaggaagacattaatacaaaaggtttactacagcaagaagatatagaaattatacacatatacctcataacagaccctttaaatatataaagaaaaatgggcagcattatagggagtagagttttataataataattggagatttcagtaccccactctaaataatggatagaacaataagaaagacaataagtaaaaaaatagaagacttgaacaaggtgtaaatccaatagatataatagacatattccgaacattgtacccaacaaaaatagaatacacgttcttctcaagtacacatgggacattttgcaggatagactaaatgttaggccacaaattaagactgatatcataagaagtatcttctaccacaacaagatgaagattgaaaccaataactgaaagaaaatttaaaaattcacaaatacgtgaaaattaaagaacatactcttaaaccagtaggtagaggaataaactacaagggaaattagaccatactttgagtcaagtgagaaagaaacacaacataggaaaacttatgagatgaagtaaagtgctaggcaggaaatttttagctgaaatacattagaaagcaaaatctccaaggaacaacctaattttacaacttagggaaccagaaaaagaagaacaaactaaacctaaagctagcagaaggaaggaaataataaacactggagcagagtcaaataaaatagagaatagaaggataatagcagaaagcaacaaaacttaaagttggttctttgaaaggattaaataaattgacaaacctttagctttattgactaagaaaataagaaaactcaaattactaaaatcagaaatgaaagtgaggacattactattgtttctacagaagtaaaaaggattgtacaagagaactataaattgtatgccaacaaatcggatgccctagatgaagtgggcaaattcttagaatgcaaaacctatcaagactgaatcataagaaatcaaaattttgaataagtgtataactagtgaggagattgaatcagtaatcaaaaccatcctgataaacaatcaggccctcctggacctgatgactttgctggtgaattctgccaaacatttagagaagaactaacactagttcttctcaaacttctccaaaagtattgaagaggagggaatactgcctgactcattctgtgaggccagcattactctgataccaaaaccagacaaagacactacaagaaaattacatcatttataacattgatgcaaaaaatttcaacaaaatactagcaaactgaattcaacaagcgtttgaaaagaattatacaccatgaccaagtggaatttattcctgaaatgcaggattgttcaacatacaaaaataaatgggtatatggccgggcacggtggctcatgcctgtaatcccagcactttggggggccgaggttggtggatcacctgaggtcaggagttcgagaccagcctggccagcatggtgaaaccacatccctactgaaaatacaaaaaaattagccaggcatggtggcacgtgcctgtaatcccagctactctggaggctgaggcaggagaattgcttggacccagga

SEQ ID NO: 27202 - DNA, 1023 bp, Homo sapiens
ataactagaaatagaaggaaaccactctataataaggccatatgcaaaaatctcacagctaacatactccatggtgaaagactgaaagctccaacatcagcaataaggcagcaatgcccacttttgccacttatagccaacagagtattggaagtgttagccagagaaaataagcaagaaaaagaaacaaatgccatctgaatgggaaaaagcgaagttatctgagtttgcaggtggcgtgatcttaaatgtggaagaccctaaagactaaacacacacaaacctattagaactagtatatgaagtcaacacacagaaatcagttgcatatctatacacttaacagtgaacaatcctaatagaaaatgaggaaaacaatttcatttaaaatagcatcaaaaagaaaaaaatgcttaggaattaaccaaggagatgaaagacatacactgaaaactacaaaatactgctgaaagaaagatgtaaataaatggaaagacatcacatgtttgtagactggaaaactatttttttttttttttgaaacagagttttgctcttttgcccaggctggagtgcagtggcatgatcttggctcactgcaacctccaccccccaggttcaagcaattctcctgcctcagccttccaagtagctgggattataggtgctgccaccacacctggctaatttttgtattttttaatagaaacggggtttcgccatgttggccaggctggtcttgaactcctgacctcaggtgatccacctgcctcggcctcccaaagtgctagggttacagatgtgagccaccgcacctggccagaaaacttaatgttaaaataataatactactcaaaccaatctacagagtcaatgtaatccctataaaaataacaatttttttaataaatagaaaaattcatattaaacttgatatggaatctcaagggacactgaatacctaaaacaatcatgaaagagaaccaagttggaggacttacagttccttatttcagaatttac

SEQ ID NO: 27203 - DNA, 1028 bp, Homo sapiens
tgattcctcttaaagtaatttcccagaagaattcgaaagcttagaccgtcttctcatgcttcccgggtacagtgatgctatatggcaaggagaagtagcaggcagaagaaattttaactgttaacaatttgttaagtgtaattttttttttttttgtgcctgagatagtgacctatttcttttaaatgtgggcattatttgaaatgatttttaaacaggtagagagtgtcataaaatttttatatgagggaacattttttacttcattctcattgcttttatttaatgtgcccatatgtgaatgcatagccactggttattaattttctaaatgtagaaaataagggaaaagtaactgaagcattatcttgaaccaatttgaggaagtgaaatgtgcttgcccaacttttcttaaaatgggctaagtcaggttaaaaatctagaagcattttcctgtgtgtgaaatatgcttttaatgttggaatttagtagtttcacatagccggacaataaagatgttagaaaaaaatcatgaagagtatgttaagataaaaggcaagagagaaataatgtataatttatataaatcatgacatttaaaaaattaggaaattggaaaagagaaaaagatttagtatttcttcactgtggctgtttgatggaaattgtggtgtacttagccagaattctaactgcggtgaacgttttgcatactcatacttatgcatacacatagaaacacttacttgtgtgatttactgaacttgaaatttacaaatgaacgctttctaccttaaaaataaaaattttattttaaaaataaaagtggtacctacttataatatttatctttctcacagtcaggttgattatcgagcaaaactttgggcctgtaatttctgttttcaaagaaatcaggtatgtgaattatttttaaaaaatgttatatgttttattttagttgtattatgaaaaaaattaagttaggttgaatttgtgtttacactggcagtgagcagtttctgctg

SEQ ID NO: 27204 - DNA, 1013 bp, Homo sapiens
agaaaaggtgacattgtttcttttttttaaacatttttgggctcttttttttttctttttctttttttttttttcttctgagatggagtcttgctctgttgcccaggctggagtgcagtggcacgatctcggctcactgcaagctctgcctctcgggttcacgccattctcctacctcagcctcccgagtagctgggattacaggcgcctgccaccacgcccggctaatttttttaatatttttagtagagacggggtttcaccatgttagccaggatggtctcgttctcctgaccttgtgatccacccacctcggcttccgaaagtgctgggattacaggcgtgagccaccgcacccggccacatttttaggctctttattgtcctttgagattccgtataatttgttggttactttttctatttctaaaaaaaaaaaattgttaattgaaaagggattgcattgaatctgtagttcactaggcagcatgaacatcttcacaatattaagtcttacaacccttgaacatgagcatgctcaaaagtgagtttaatttccatatatatgttgatatttttgctttcttctgttattgatttctagttttattccatttttatcggaaataattatctcatgtgtccgtgtgaagagaccaccaaacaggctttgtgtgagcaacaaggctcttgatttcacctgggtgcaggcaggctgagtccgaaaaaggagtcagcaaagggtggtggattatcattagttcttataggttttgggataggcagtggagttacgagcaatgttttgtgggcaggaggtggatctcacaaagtacgttctcaagggtggggagaattacaaagacccttcttaagggtgggggagattacaaagtacattgatcagttagggtggggcagaaacaaatcacaggtggaatgtcatcagttaaggctattttcacttcttttgtgaattttcagttgcttcaggccatctggatgtatacgtg

SEQ ID NO: 27205 - DNA, 1048 bp, Homo sapiens
atttttagcagagacaaggttttgccacaatggccaggctggtcttgaactgacctcaagtgatctgcctgcctcagctcccaaagtgttggaattacaggtgtgagctaccacgccccacctgggaatttcttttttttttttttttttgagacggggtctcgctctgtaccccaggctggagtgcagtggcatgatcttggctcactgcaagcttcgcctcctgggttcacgccattctcctgcctcagcctcccgagtagctgggactacaggcacccgccaccacgcccagctaattttttttttgtatttttagtagagacggggtttcaccctgttagccaggatggtctcgatctcctgacctcgtgatccgcacgtctctgccttccaaagtgctgggattacaggcgtgagccaccatgcctggccggaatttcttgaaataaggcaacaatgaaatttgctgcatcagtcgactcttccttccaggaaagatttctctgtagcatgcagtgttgtttgatagctttttacccacagtagaacttctttaaaaaatggaatcaattctcttaaactttgctgctgctttatcaactaagtttatgtaatattgtaaatcttgtcatttcaacagtgtcacagcatctgcatgaggagtagattccatctcaacaaatgactttctttgcttatgcataagaagcaactccatatccattaaagttttatcatgaaattgtagcaattcagtcccatcttcaggatccgcttcttcatctttttaattaaaaaaaataggccgggtgtgatggctcccgcctgtaatcccagcattttgggagattgaggcaggtggatcacgaggtcaggagttcgagaccagcctgaacaacatggtgaaaccccgtctctactaaaaatacaaaaaaaaaaaaaattagccacgcatcgtggtgcacacctataatcccagctactcaggaggctgaggcaggagaattgcttaaaccaagtgatggaggttgcagtgagccgagat

SEQ ID NO: 27206 - DNA, 1062 bp, Homo sapiens
ggggttataggcccatgccaccacgcccagctaatttttgtatttttagtagagatggggtttcactacgttggcgaggctggtctcaaacacctgacctcaggtggtccacctgcctcggcccccacaaagtgagattgggattacaggcgtgagccaccgcacccagcttttcttttcccttccttttcattccttccttcattattggggttggagagagtggatgtaattcttaccttagttaatttctaagactttaatgactgctttctaagttaataattcaggtgttctttttttttttttctcttaatggtgataaagtagaccaaaaggatggctcagcaagtgaagtacccagtgaactctctgaacgcccaaaaggattttatgtggaaacagttgtcacatataaagaagattttgttccaaatacagaaaagatcctcaactattggaaatcatggactggtggccctggtacagaaccatgactggctgctgaattctgaaaaccaggacttggttcaacatttaaatttgatagttgccctgattcccattttgggtttgtgaaaagtgtatgtatttaaatttgctgtaaaacataatcactaataatatgcaataaatattttcttgaaggaaactatctgcgttttcttttttttttttttttttgagacggagtcttgctgtgtcacccaggctggagtgcagtggctcgatctcggctcactgcaagctccgcctcccaggttcatgccattctcctgcctcagcctcccgagtagctgggactaaaggcgcctgccaccatgtctggctaattttttgtgttttcagtggagacagggtttcaccgtgttagccaggatggtctccatctcctgaccttgtgatccgcctgcctcagcctcccaaagtgctgggattacaggtgtgagccacggtccccggcctactatctgcattttcaagaggtgttcctctgtatttgcatgagtgaaagattgctgtgaaatttcacatagagcttccataagcttgatttcctga

SEQ ID NO: 27207 - DNA, 1050 bp, Homo sapiens
tctgtatctataaaaaaaaaaaatatacaaagtttccatacaacaggttattaagtactttgatctatgttcttaccaaaatgtatggctcatttaatttaatagatcaaattacagtcacatgccacataatgatgtttggttaacaatgggatccatatatctatgcagtggttcatctatatatccacatgatgctggtcccataagattataatattgtttcttttctatgtttagatacacaaatacttaccattgtgttacagttgcctacagtattcagtagagtaacatgctgtattagttagttctcatgccactacgaagaaatacccaagactggttaatttataaaggaaagagatttaattgactcacagttatgcatggctacggaggcctcatgaaacttataattgtagaaaaggcacctcttcacagggcagcaggagagagaatgagtgccagcgggggaactgctagacatttataaaaccatcagatatcatgagaactcactcactatcatgagaacagcgtgggggaaagtgcccccatgattcagttacctcccactgggtccctcccatgacatgtagggattctggagattacaattcaagatgagattcgggtggggacacaaagccaaaccatatcacctactgtacaggtttgtagcctaggagcaataggctacaccacatagcttaggtgtgtagtgggctttatcatctaggtttgtgtaagtcacttggtgatgttcacaagacgatgaaatcacctaaccatgcatttcttggaatgtgtcccacagttaagtgatggatgactgtatttattttttcaacaatccttcagaacagaattgtttctgtgaacagagttcatgttgtgtatgtccttttcactctttttttccaaaaatttttactgtgcattcttatttaagacctataagaaggaataatacaatgaatgcctggtgtattcacctctgagcatgagaaagtgttcttcccactcatagagtcttctaggatgttc

SEQ ID NO: 27208 - DNA, 1021 bp, Homo sapiens
tctggtgtttcacacttgtgcatgcgctggagtaattctcgttcgcccttgagtaattccatatcaagccccccaaaagggcaggaaagggaaggagaaaggaactcacatttaccagctcctagctcctacttgccgtgcgtttctcttgtttttattcttactgcctcccaccccctaaaaagaaaagaaacaggtatttcctatacattattcaggtgacaaagtaattaatcatttataaataacatacagctgaataccttctcttgtgaactttatgagcaagtaaatattttcttatttgacgcttttgtttcctctgcttgaatgcaagagctttacaacccttaacagcccaagtgcatttgaaatggtttgagttttcactgtgttgtttctacagaccgaaagaaaacatgcacaagtttttccattgagtagataacatgtcacttttttttttttaatggactggagctgtgactgttcaacttgttgctgaagaatccgtgttctcttgtgcagctctgagttatgtagggaacagttcgttgatgagatgctcctagtttatgttgctgaatttttttcttcctcccagagctgttttctcttatttaagaacacttgacacagagaactggggaggggtgatcaaaactggctaacatgcctctaatgcccatcctgtgctgagcagaacgctttgctctgatgttggacgtggtggaaatctgctcccagggaatgcttttcataagccatgggtgttcaacaaacactgattaatgcagatgtttactttccagagtgtctagaaccttccaccgatacagttttattaaattccccccacacctgaaaggagaactgtttcagtttactgatgcagaggacacaggacagagaggccgggtcagataagaactaggtcccgaattccctcttatttttctctctttacaaacttctatccaaatacaactgcaaagacaaagttcgggactatctacacaat

SEQ ID NO: 27209 - DNA, 1057 bp, Homo sapiens
cagcaattataaaatcaattatatgtttatattctaaaaaatgttttgagtaatgctgacatcattggaaaagtgcatcacttagaaaatgtatctgtgtgtcaattttgtttgttcaaaatcagtttcattaatttgtgggaagatacaccttgtacattttacctaattaaaaaaaatattgccagttgagtatacttgtgatatattcaaagataaataaactttttcaattttagatattcatatgtctttgggcctttgtttagttttgtcctaaaataggaatgcttttatatgggccagattcctgcagtgatgatatctgggaaggaagggagggcatgatctttgttctatgtgtttaaaagtctcaaatgagttactgggatgtaaaaaatatattcgcacatgagtttggtacagttcggtgatttttttttttttttttgaaagaaagaaaggtttccaaggcttgacactgtcctgtgggtgtggtcaattaattgcattattggtcccgactctttacacctaccctttgccatgtagcctggtagtggcctctcactatgacactaggatttcccatgtgatgttctttggccaataggtgcaagcaaaggtttgaagagcactggggagttgggattgtttgctcatatctctgctttcatgatgacagtgtgccttggttagcctggggagaatgagtgtcacatggtccaagcaccactattgccacagctgatgataagtcagataactgccagatttaagtgggcccagaggagaccagaagaatcacccagctgaacccagcctaaattgctgacacattaactcatgagctaaataaatgcttattgctttaagccactaagttccggggaggtttgttgtgtagcattattgtggcaattcataaccaagacatctttaaagcattagggacattttgggaagggctgtaagagttaaatatgttggctttataggcagttgtaccttacacagtttaactcagaagttactcagtaatcacccatttatgcat

SEQ ID NO: 27210 - DNA, 1058 bp, Homo sapiens
ttgcctccattgctgccacactacagtagctgtttggttttcttacctctaaaagtccaccaaagacttgtgccacctggataaagatatgattaattaaacaatgccatcccaggcctctttccacagcagcaaatgccacttgactataggaacccattaacgcagagcatctgagcagggtaggtcctgagtgaaataattagagtctgcataatggtgataacagtaccaataaccatttgttgatcacttgctctgtacaaagcattgtataagtatgtcctatgcaatatttgtaattaatatttaatcttcatgataactgtgaatgcagaactattttcatcattttaagctaaggaagctaagacttggcaagggcatgtaacttgtttataatctcacaactatttaataggaaatagatgagctaaaacatgaactcctatttgtccaaccccacagctggtgctctaaaccataatggctattgatttcttttgggaagaaagttctgtgagaaccagtgccagggtagaaaacctgaactgtaactgatgaactgatgggagctcagtgtggataagtctgagaactaaaaactccagggggatccagatatgagaggccttcatacttttgtaaattttacttcctggaactctactagattcttacagtgaagattagagaaaaaaaaatcttgagtttctggcatgggtagtcagaatgccagagcattcacttctcaacaaggcctgccctcaagaggaactgttttgccagagcctaacctattggtgtttcatgagagatgaattgacctaggggaagacaaatgccccaccccagctttctttagccatcctgtaccaccctgggggtgaaaaaaacctgagaagcacttgtaaagtgtacagtcaatgattatagtttatatataagtgaaataaatgagagcaatggtataaaggacaggagggagggattaagaatattttattattatgaagtactcacactacttgtgaagcagcatagagttatttgaaaac

SEQ ID NO: 27211 - DNA, 1081 bp, Homo sapiens
ttattaatggcattatgttgaaaaaaagtatttggcattattgtatagtgaacagggagttagaaagtgggttgttcaatgagaacacatggacacagggaggggaacatcacacaccagggcctgtcgggggtgggggtctaagggagggatagaattaggataaatacctaatgtagatgacgagttgatgggtgcagcaaaccaccatggcacgcgtatacctatgtaacaaacctgcacgttctgcacatgtatcccagaacttaaagtataataataataaaaaaaagcaggtcgtaactagctatgaccttgcacatataatttagggtatttgtatgatagattctccctctgagtagaagaccactaagctctcttcccttccagtttctaagccttcattattttagactagttgctaagatttaagtaatcttcatttgtaggcatatatatacatatacacatacatgatacatatacatatgcttatatacactatatacatgtatacatagtgcatacaatgtatacattaaaaatagaaaccaaacaagtagaggagaagaaaaattgaatgatagaagtcaactccaaagaagagaaaaaggaaattaaaccagcaaaacaaaatgcatgaaataaaatggtagcccagaatccaaatattgtcagtaattacaacagtaaacgttaatggacttaggactttatttatttattattagttttggagatggggtcttgctctgttgctcaggctggagtgcagtggcgtgatctcagctcactgcaacgtctgcctcccaggctcaaatgattttcctctctcaccctctgagtagctgggattacaggcgcccaccaccatgcacggccagctatgatgactctatttaaaagacaaaggctgtctgtattgtttacaggaaatatgtgtaaaatatattaaaatatttttaatacagaaagattgaaagtaaatttttaaattaccttgcaaattctaaccaaaagaaagttagaatacttattaataatagttatagttgaataattattaccagcataaaaa

SEQ ID NO: 27212 - DNA, 1738 bp, Homo sapiens
tattaaagtagccctgataagtggagcgataaactatcactggattagaggatacagtaaacaggtaatcgaccgcagttccaatgtaattgcagtcaaaatcccaagcattttttatagtacttgttaagctgactctgaaacatacagaggaacagaaagagcaaaaaagagacaagatattcttgaacaacaacaaaaatgggtgatgtgcccctccaggtatcagactgtaaagagtgagactatatcttagtgctgtagttatctagaccagtgttacagaatttgagaaacagacccaagaatatatggactttaacataccacagaagaggcattgcacatcaatagtatgaagatagacttttcagtaaaggtggttggacaattggatgtccctatgggaaaaaaaaatttcccagattaccattattccatacacaaatcaactccagatttattaaaaacctagatgtgaaaccaaaactaagaagtcttttgaatataatatggcagagtgtctctgtggcctcagtgtagaactttttaaaaaggccataaaaaggctaaggaaaggattcatatattcagcttcactgaagtgaagtaactttttatcaaaagataacataaggataatgacaagacaaaccacaaattggaaaaagatacttgcagacattacacagtattgaatattcacaatacatagagaactgtagcgggggaaaaattgtatgaaagatttaagtactatacagaaggagaaatctaaatggccaaccaacagaaatatattcagcattgttagtaattggaaatacaaattaaaatctgagatatagttacactgtaagattggcaaaaataaaaacatgtgatgcaccaagccttgttgctgtggaatggaggcttactcacttctgtgcaagagtaagttggtacaagccagttggaaaaacagtttggtattaactaatgaagatgtgccctgtgacacaacagtgagactcctagctatagaccttacgtgagacactcaacagaagtattcacaggagcatcgtttgtatagtaaaagccagaaacgtatcaacaggaccgtgaatgacttgtgcacaagcccagccactcttgaagctgactcttacaatgttagtcgactgagagaagcaaaagacaaaagaatatatgattccatgtatataaacttcataaacaggagaaactgtaataggtggtgaatttgtagaacaaatgccttgagtttatcttttaagaaaacgtgttgcttttgaaatactagcatgcaaacataaagtcatgttcttacactgcaaagtaattgtcataaatcctaagtaatacaaatttctattaccatgtaatcagctacaaggtcctattactaccattctgagtagtagtcaaagcaaggtaaaaacacgttttaaaaaaaatatgtatctattactttctagggtttctcacattctaacattttccttttttgtttttcttttaaagaaagggtggattttttgtggatctctttgtaagagtatctaaccaagttgcagttaacatgtacaagcagttgggctacagtgtatataggacggtcatagagtactattcggccagcaacggggagcctgatgaggacgcttatggtaagctcccttccatggcagtatccccaagaagtcgaaacagttacattctttctacagat

SEQ ID NO: 27213 - DNA, 1048 bp, Homo sapiens
tagttgatccaaagataaatgtagcgcttccagtgcctcttctcctgaatgggtgggacattggcaatggccctttcatagacttctctcacggcttcagcttctgcgtcactttctaccaagcgcaagtaatcaaaccatgcatcataattgtgtggattcgcctagaaagacaaccagtttaataaataaaaaacaaaaccaagagctgcacttgccaggttaagcaagctgaaaaaaggcatcaggctgactttctatattttagcaccttttcttctaaatgttacatgttctttcattttaaaaacaccatccctgagactgcataaatagaaaagaaacaggaatacagaggatagattactggccaggtgtcccacagcaaggactccttcatctatagccatcactctcacgacagtcaataattagatgcctattcttgccaatgcatttgcttaaatatgtgactatgtatcattatgtctgtaacaacagaatcgtatcatgctcacaattgttaaacttgcctttccaattaatagcaattcatctttaacatatcttgctaacctaccaccacatttaataacagacttagtcctttgcttggaggtatcttaattaacttgactaaggaagagtatttttaaatacacaacagaatactgaaggaaaatgacactctctttgaattgaaatcaaaatagtacattacagaaaaagagatgccgatggaaccctgtctagcatacatcttttgttcaggcagttaagctcaaaggtgatgtgcaaaacaggtttttggaccaatctctgactcttccaccttcttccaacaatgagctcgaatggattccacatttcttttgctccagttctacatacagtcaacaatcaacaaaacgacttacaacatgtaagtggcagagcaaatccaagtgttgtttgcttgccttttctatcagccttgtttattcctacttgtctgaaatagctgccaattggatcacgggcacatcatcacgagagtaatcactagtag

SEQ ID NO: 27214 - DNA, 1035 bp, Homo sapiens
tgttatgaagcttttcccctatgttttcttctaggagttttaaaacttcaggtcttatatttaaatccttaattcattttgagttgatttttctgtgtggtatgagagtccagtttcattcttttgcatatggatttccagtttctcccaataccgtatgttaaaagactgtcctttcctcatcatatattcttgatacccttgtcaaagatcagttgactgcatatgcatggattgatttatgggctctctattctgaatgttccattggtctatatgtctgtctttatgccaataccatactgttttgattatggtagctttgtaatatattttgaaatcaggacgtgtgatgcctccagctttttcttctttctcaagattgtcttggctgttcagggtcttttgtgattccacatgaattttagtcttgtttttttatttctgaaaaaaaatgccattgaaattttgatagcaatttcatagaatctggagattgctttggtagtatggacactttaacaatattaaatcttataatccatgaacatggaattctttccatttgcttgtatcttctttaatttctgtcatcaatgttttgtagtttttagcatggaagtcttgtacctccttaattaagtttatttctaagtattttattcttattggtgctattgtaaatggaaatatttttctaatttcatattcagacagtttgttgttagtgtatagaaacacaactgatttttgtatgttgattttgtatcctacaactttactgaattcatttattaattctaacagtatgcatctgtgtgtgtatgtgatctttagagttttctatatatcatgtcatctgcaacagggacaattttacttggatttgaatagcttttatttcttttccttgcctaattattctggctagggctttcagtactgtattaaacagaagtggcaagagtgggcatccttgtcttgttcgtgatctcaaaggaaaagctttcagctttcaccattgagtatgatatt

SEQ ID NO: 27215 - DNA, 1064 bp, Homo sapiens
ctgctataaacttctctcttatactggtcttgctgcatcttctaagtttcggtatgttgtatttttgttttcatttgtctcagatgttttctaatgtccctgttgatttattttgtgatccattagttgttagtgtgttgtttaatttccacatgtttgtgaattttacaattttgcttctgctattgatttctgatttcattccatttcatcagagaaaatacttggtatgattcagtctttttaaatttgtaagacttgttttgtaagctaacacgtgatctgttctagagaatgttttgccagcacttgagaagaatgctattgcgtttgggtggagtgttctgtatatgtttgttaggtccatttgaccagtactgttattcaagtttgttgtttctttgttgattttgtctggttgttctatttattattgaaaatggaatactgaagtctcccaccagtattatattgctatgtatttctcctcattttcaaactcaaaaatctgtgagtttttggtttgctctttgctcctttttttttttttttaataaggaaattcaggcagttttttaaaaagatgatgacgatgacaactcttttcctagaatttttttcaccattttatatttaagtaaattatgacattttggggcagtctcccaagtaagtgttaaggtgccctacccccactctcttggagccaaataagtggtagggggtggggcgagggacgggtgcaaggggaggaaaagtcaggaaggctactgagagcatagagccgacttcagcctctgttgggaagggaaccagcagtcaagccaaatcctactacgggtgtagcaaaactcaacttctttcaatacgaatttgagatctaagagtagtttattctggtggagcaggcttacccatggtttcagaagttagagaggagactctgagagtcaagccctggttgttcaagacccaaataaggcaggagaaagcaggacataggcaggtttccaagaaaatgagcccaatagcattcaagcctcagtgacaggccaggtataggt

SEQ ID NO: 27216 - DNA, 1033 bp, Homo sapiens
ctccccccacttcacccaccttctctctcttctgctctttctctcttttccctcttctcctcaaacttccttccctcccccctttcccttagagggaagaaataaattattacaaacatagatacagccccccgtatgcctttcacagatttcatgccccttttcaaagataacctagatctattccttctttgctgatgaatgtagatcttttttgtttgttttttcgagacggagtcttgttctgttgctcaggctggagtgcagtggtgcaatctcggctcgctgccaccagggctcactgcctcctgggttcaagcaattctcctgcctcagcctcccaagtagctgggactacaggcatgtgccaccatgcccggctgatttttttgtatttttagtagagacagggtttcaccgtgttggccaggctgatctcaaactcctgacctcgggtgatccgcgcccccatcagcctcccaaagttctgggattgcagatatgagccaccacgcccagccgatgaacgtagatcttaagaaagatactgtttgggttttattgtccctttgagttagcactgtcttgtaacaacattatttcccatgcttgttcactgcaagtacatcacattcaggcattttaagggtgaaataagtgttgatcgactgtcctttgctatctaatatttttttaaatgatattgtttatattagaaaacatggtccaagtcccaaacaaccaatctactcaatttttccaataatgggagggggtgctgtccagctaatatctaatgaatcaaattatattctgtttcccctaatagatctttgttcctttttaaatcattctgatctcattttagtgacaatcataaaaagtaccaatagattaatgacaaaatctatccttaaaaatggaaataggctggacgcggtggcttacgcctgtaatcccagcactttgggaggccgaggtgggcggatcacaaggtcaggagatcgagaccatcttggctaacacggtgaaa

SEQ ID NO: 27217 - DNA, 1044 bp, Homo sapiens
tgtaagtttctctcaccttggattaggcaacagtttcttagatatgaccgcaaagccttagatgtggttgcaaaagataccaccaggaaagttaaggccaggtgcagtggctcatgcctgtaatcccagcactttgggtggtcaaggtgggtggatcatttgagatcaggagttcgagaccagcttggccaacatggtgaaaccccatctgtactaaaaatatataaagccaggcgtggtggcacgcacctgtagtcccagcaactcaggagtctgaggcaggagaatcacttgaacccaggaggcggaggttgcagtgagccaagagagcaccactgcactccagcctgggtgacagagtgagactcccatttcaaaaaaaaaaaaaaagagtgaaaagacaatctatagaatgaggaaagtatttgcaaattatacatctaaaaatggacttgtatccagaaatacataaataactcttatgactcaataatttaaaaaaccccgattttgaaaatgggcaaaggatctgaatagatatttctccaaagaagatatacaaatggccaataagatgcatggcatcattggtcttcaaggaaatgcaaatcaaaaccacagtgaggtaccccttcatgccctctagcatgactggaatcaaaaagtcaggtaacagaagtagtgaggaggtggagaaatcgctggcagggatgtgaaatggtgcagcagctttgataaacactctagtagttcctgaaaaggttaaacatagagggattatgacctaatgattctactccaagagaaacaaaaacatatccacacaaaaacttgtacaggaatatttatagaagaattattcataagagccaaagagtagaaacaacccaaatgtccatcacttataaatggataaacagaatatccatacagtagaatatcattcctcaataaaaaggcatggagtactaatccatgctacaacatgggtgaaccttgaaaacattattctaagtgaaagaagtcactcacaaaagaccacat

SEQ ID NO: 27218 - DNA, 1016 bp, Homo sapiens
tgtacaatgttacatgaagagggtttattatttacaaatagacagtaaaggacaacagaagcctaggattcattctgaatgggtcccccatggctcaggaaacatgcccggggcagatagagtcttgactgcaggggccacacttacatggcgggagaggaaccctgaaaggcagcccactctgggttatacacctcagggtttatgtgacacactgagctaatgctttaaaaaatgtcctgcttccaggggtgaaaggaacaaagcccaccttgtcccgggcagttgcgccctcactcaagatgttaaattcctgggagggacaggagcaaggctggacattttcaggcagttcttccctatttcaggatattgcattaccatcacattctacagtcacttttgagaactatgagcaagaaaaggaactgagttagtccaaggccagccaaagaactatgccacacttgccaacacttgttatctgacttggctttagccattctagtgggtgtgtgacgtggtatctcctgtggttttgatttgcattttctgatgactagtcgtgttgagcatcttttcatgtgcttactggccatctgtgtatcttttggagaaatgtctatttaggttctttgtctcctcttcccccttttttttgagacagggtttcactcttgttacccgggctggagggcagtggcacaatctcagctcactgcaacctccatctcccagggtcacgttatcctcccacctcagcctcctgagtagctgggactacaggcaggcaccaccatgcctggctaactttttgtattttgggttgagacagggttttgccatattgcccaggctggtctcgaatcaactcctgagctcagatgatccacctccctcagcctcccaaagtgttgggattacaggcgtgagccatcatacccggcctctttgcccttttaaaattgggttgtcctattgaagtgtaagagttttaaagaatgtattctgaatat

SEQ ID NO: 27219 - DNA, 1026 bp, Homo sapiens
gaggatattttctaatatagcattcaaatttttttcttttcttattcagtggccagttactagaaggattctaaattcattagtaattttttccactatatattttttcaaagtcattgttctagagcttaccctatgtatcttgctagaatcaaattcagatttatacttgcttagtttcagtaatacatgctaaaatttattgaactttactgctatatagttcagttcccatcccccctttgtatattattgttatatatattacatatattgacataatccaacaatacatttttttaagagttactttaccgtctgtagccatttccttagcccactgcaactttgtttccatccacccctttttgctattagggcaaatatattacacatatattacattctgccttataagctcaacattatactatgtaatatttatacaattgctttttaattcaattaagagaagaaaggagggaaaatatacttgtgcttattgtttgcatggacttgaattaccatctagagtcacttgctttagtaactttagtaaactttttgtaactttatagcttgaagaacttcgtttagtagtttttgacagtgtggtctgttagcaataattctctcagctttttattgatctgagtctttatgtcaccccagttttgcactatagcttttctggactgagaattcttggttgacagggttcttttgttgttgtttgtttgtttccacttctttactgctttttatgttatcccactacctattggcatcatttatttatttatgtatttatttatttatgtatttatttatttatttattttgagacggagtcttgctgtgtcacccaggctggagtgcagtggcacgatctcggcttactgcaagctccacctcccgggttcacgccattctcctgcctcagcctcctgagtagctggcactacgggcgcctgccaccacatccggctaattttttgtatttttagtagagacagggtttcagcg

SEQ ID NO: 27220 - DNA, 1050 bp, Homo sapiens
ttcatttttgcagttccccaaagccttaaaattcctggtggctacatgggtaggaactgactaagcctcagagaaaaggaagatcagggagtgttgatgccagttgggactggttctctcctaccacacctgtgtgtgaggtagggtatggttgtagcaggtttgtttggtgttctgctacttaagggggtataatagaccagaaaagccacagtgtcttggctccggataattgcactctgcagttgaaaaaggatgccatagtatagccagctcaggcctgcaattacaataaattttatattacttgaattttgctggaagtgtacaagtatatagttcctttagctgcaacttgtaattaagactctaaaacctgtttgtatttataacaatgtttctgattttaagaatgtcttttttttgaagatgtgatgaaatatacttgtttcttgagaagcagctaatagtgatagagaggaaaaaataggatttttatattcctctacctgataattgtatttcttatcctgtaaagctgtgatgaactcggcattttaaatttcatttttcttaggcacctttattttaggaactgttatcaaaaaatatggcctctaactggtgtgtgtgtgtgtgtgtgtgtgtgtgtgtgtgtgtgtgtgtattctcttacagagtgaagaacttcataatttttatgtaacaatataatatcttttgtgtaccatatattgttttacagtcttattaaaacataatttaaaaggctgagcacgatggctcacccctgtaatcccagcattttgggaggccgaggacggcagatgactggaggtcaggagttcaagaccagcctggccaacacaatgaaactgcgtctctactaaaaatacaaaaattagccaggcgtggtggcaggcgcctgtaatcccagcttctcaggaggctgagacaggagaatcgcttgaaccccggaaggcggaggttgcagtgagccgagattgcaccactgcactccagcctgggtgacagaatgagactctgtct

SEQ ID NO: 27221 - DNA, 1030 bp, Homo sapiens
accatggctacaatttggaaatgagtagggggaaagaatcaacgtgggctggaccctctcctgtgaattaaattggcccagagtagtaagccgtgcatacacctcaatttccttcctttttttccatcggattgatatttttggaatctggccagggtgagggataatgtttgcgtagagtcccacttctctcttttctccattgtgccatgcatgctatagaataagagccctttttagataacagagtctaattaaattgtcttgctgatttttttaaaaatggataccttagttattaactaccttcaactaaaccttaagaattgttgagttgtttattttattttattttattttttaacttacttgtatcttctccatattgacagcctgtttgctccaggataaaaccaagggtctttgtaatggctttgcattttcctaaaatgattcaaaagctttctgaacagaattaccaagatcaattgaattgtatctaaattcagtcttccattgttaagttctgataagcagcattttgaacatatagtcttattgcctggtttaatcatgtacctagatttctggggtcgtcctttaaaacttaagttgtctcccaaatcattcctggtaatgcttaactctgacatttttgtgtaattatttgacagaatatgtggattttatacttttaggacagttttagaagacgacagaaagaaaaaagaaagagaatgaaggtgagttttaattaatttcatgagattggcaatagcgtaattttacaatttatgaggaagatgttcattacagtagctttattccttgtccagtaggacttagtcagggacgtaagtgtccacccagttacctttttacctgtagaaagaacactggtgtcgatttaaagaaggtcctctaggctctgatgtctgaagggatacacttgggaggtgagaggtgggtggcagttagctatttgaatggtttacagcaatcaagtattgttttttaagtaaaaatggtc

SEQ ID NO: 27222 - DNA, 1962 bp, Homo sapiens
tggttctgcacatttttctaacattctttgatttcagatccatgtctacttgtgattgaacatttactctgtatatctttagtttctatcctctactttctgtactttgggttttcctcttacagcatgtctttggttttgtttactatgtagccatcatgatcaatactagtttaataggtaacttgatttgtttagtattttattgtttaatcctagaggaaattgtttaatcctagaggaaatcattgtttaatcctagaggaaatgcctctaccaagaaatgcttggggcttttagcattttttcattaaccttttctgtaaaatagtgataatccaccttatgaatgggggatatttctaattgttattctgtgactcctttgtgttgtgggaggggcagattaaaattgatatggtatattctgaaacatgactgcaattaatatgtgaaatctggcacatggaaaagaggcctaaatggagaatcatcttgatgttcttgatctgttctgatgtttgtaaagtgttatttggcttctttatgttccttaaatgttaaatcttagagaataagaaatggattcttaaaaaaaataatacattggatgaaaatgtggttggtcacattgtattttcagtgatgaatgataatttagtggattcattgacctgcttctagattttaccataacatacatatgtttgtgtgtgtgtatgtatacatagatatatagagatatagaatgtgtatgtctctctatatatatctctatctcctttccttaagccatcaacaactcttagctgaaagagggataaggcccaagcaaggatagagagagtaggtatacacataatttctgcctaatgtctagattattcttttataaactatttttttacatttaaaaaagttacctgtgtgcgtcttaagtaatttagttgactttctttgtatggtttaaatatattttaacaaactaaggaacttgaactatttaaaatatcttcaatatttgaatcttaaaatgtagctttagaattgtacaaagaaacatataaagtagtattaaaatttgagcaaatgtgttctgtatctttttcaataacatttttgaaaatgtggttttataatggtcttaccagaatcagtgattggggtgtgtttaactgtctttaagttgataataaatcctatgaaattagactttttagaaatagttaaatgaatctgtgttagcatgactgtttaactctttcacatttcccctgggtattaaatataaattgatttggggtataaattagtagacagcctgttactgaaggtgtgttaattcagcataaatgagctgtgcctggttttaggttatgggaagctggctggaagcagcggtactacaagaacaaatttgatgtggatgcagctgatgagaaattccgtcggaaagttgtgcagtcgtacgttgaaggactttgctgggttcttagatattattaccaggtacaaaaagaatattttcctctgaatttgtagttaatcatttaagaaaaatagtaatttctttttttttgtttgttttttgtttttgagacggagtcttgccctgtcacctgggcgggagggcaatggcgtgatctcaactcactgcgacctctgcctcccaggttcaagcgattctcctgcctcagcctcctgagtagctaggattacagagcgcaccaccacacccggctaatttttgtatttttagtagagacggggtttcaccatgttggtcaggctggtctcaaactcctgacctcgtgatccgcctgcctcagcctcctaaagtagtgggattacaggcatgaaccactgcgtccagcccagtaatttctgtaataatagtattattgagctggatcttgaaaacaaacccaggctcattttttaaagctccctattcagaagtcc

SEQ ID NO: 27223 - DNA, 1005 bp, Homo sapiens
agccttaccatttcatttactttcccaacgttcccatccaagatgtgtgtcgaagactgttgcttaggctctgttggtgacctctttatgggtgtccctctgctctctcgcacactgctgctgggttgttctttctgaaattatctttgatcactttcacgtcctcattgactacttgcaaaggcatcacattatactcacacaaaccctccatgaccataacccacttctgttacctttcttcctgccccacttctgctcaaatgcgtttttactctaatttagcccttctcaactggagttccatgggagaattctgccttgagatcttaaagcatctgttgtatgtatcagattgtaggtagcagtttgtgtcctgtatctctagaatgatactagctatgttttttccttgggagaattgagaatgtactcactcatcattttttgtagggcttaattccctcccacatccccattgagaagggctgctccagtaaaactgtactgttccttggtcctgggaccctttccatatctttgttccatttgtttcctctgccaccctgtgaccaatcctgtctcatcttaaaccgcagcctcttggatgatgttttccttggtcctcaggtgaaataattccctccccgcagtacacacatagctttagcccacactgacaaagatgtttatatggaaggtgtatacacacacatgctttgactcagcatcttttctgtgcctgttgttgcattttccactttcttccttatttcccttattagaaggggaggcaggcttgatgcctggcggtgtgcataacctccctcccaccgtgaaccgtgcatgcgataggtattctaatagtttggcaaagtgctaaaaacgccctgctgaaacacagatacctgcttcaaaacactttatttgcaagtcttgctttgttacttgactttttatctgcaaagccctaatgagcacaaatacttaactaccattttctct

SEQ ID NO: 27224 - DNA, 1102 bp, Homo sapiens
tacactgattgattttgaaatattaaaccaacatggcatttctggagtaaacctaatttctggaatatatcatctttttatatgtcactacattctatgtgtcagtgtatggtgggatttttaaaatctatgtattatgagagagattagttttatttcccttttttggacgttctggggtagggtttttctggccttataaaacaaattagaaaatattttctacatttttgttctctgtatgggttatcgttagattgtcgtcatttcttaatttttagaagaattcagtggccaagccagttgggcttagagattcctttatgaaaaggttttcaattatagattcaaattttttagttctggcttttcagatttttcggtaattcttatgttggttttggtaagttctttttttttttttttttttttttttggtgggaatgtgcccattctaaaatttcaaatttattgccagaaatttttcataagatttttaatgactgtaagacttcaaaattaagtgctgatactggtaatatatagtcactcttcttttcttgattagtgttgctagaatctatttaattttttttttttgagaacctatttaattttattgtttttttttcctcccattgaactaacctttagctttgttgatatatagatatttgttcttttccctccatgtacatttgttttctattgatttctgcttttgtcttcattattctcttctacttttttgggggattaaattggcattctttttccaagtttttgagatggagacttaggtaatttatttttggtcttttccaatatatgcacttcagtgttacagatttctctctaatcactttagccttatcccacaaagtttggtctcacatatttattatcatttagttcatggtattttctgatttttattttttattatgtacccatggattatttagaagtatattgcttaattttttttttaatttatagggcttttccaataatcttttaaaaatatatttatttcttaactgcaggctaaatttctagaaatggtattgctggatcagaaggtatggtgaatttctagact

SEQ ID NO: 27225 - DNA, 1038 bp, Homo sapiens
aagtgatatattagaaatgtttgctgttttttaagacatttctagttgtataggttagacaactagttgtataggttagacaattatttcctcctccaaaaaaagcatttacacttagtaaactttacattccagttctacttagaaatactgctgtgcttaatctaagaatagcatgtttgagtctaatgaatatatattatgggtggtgatggcttcatctccattagcacagtttctaggacaaaatatacaagtttttttcccatctttatttttcttaaaacattagattgtttctgaaggtttctcttaatgtagctgtatctttgtattgtcttcattcgattttaaatttattagggagccactgtggaagctttcgtaagtaccatggagaatgtgtatcctgcgattataccatacataaaaagacaccaggcaagcacaatatggaattaagtcctaatggtaaaaaggggtatgtttccagggtaaccgcagtgattccaggggatgtgaagtagaggggtccggatgaatatttgctgtatttcttttgacttctgttacatttgcaaattttgtatatataagggcactaaaatgaaatacttctgggaacattttaactgattctcactaaactaattttgtacatgagctgaaaaagtggctcaaacattgattttactttcagtagattactttctcacaaatggtaactcattgaaattcatatatgtaaatgtatcttaagttttcccatagaaataaaccatacaaatgaaatgattgctattattgtaagaacttcttacttttatctcttcagaaaattgattttctgatagtgtatagtctgtagtaatgactcagaacttactctgggcgtagggtggggaactgtcttcctctgttttctgtggagtgtgtagtagtcagcatcctccacattgttactcggtttgactgctagtagtttggtttttaagaaataaaaaaggaacttaattccaattgactaaagataccacc

SEQ ID NO: 27226 - DNA, 1069 bp, Homo sapiens
ttcaggacaagaatccttgagtgagttttttgaaatgttgccttccagcgagttccaaatcagcgtggtagactgccagcctgttcatgatgaagccacaccaagccagaccacggtccttgttgtcatctgtggatcagtgaagtttgaggggaacaaacaacgggacttcaaccagaacttcatcctgaccgcccaggcctcacccagcaacacagtgtggaagatcgcaagtgactgcttccgcttccaggactgggccagctagtgggggtggcagaggtctctttgcttcattcagccctagctctgtagagaaatgcaaacctcgactctcaaggatgtgaggaacacaagttcatttctgttgttgcggagacactgcagactccactgtgccgaggttgaactcttttttgttgctcaagttctaggagtccctttcctgaatatatacttgtttgtcatagtttccttttcaaagtagtaaacttttctatttttctacttgcccagtagagactctgattctggaaattctgacaaataatttaataatacacatgttgcttctttccctgtctgatgtgtttgaccaggttgtgagggaggaggagggctaaaggcagaaagcataataggaagcacccgcacaggggtgaggatcagggcttagtacctaccccaggcaccagtgtgcacatagttggcccacctggagctgtgattcacagccccatgcacactagaatcccttgggacactgaaaattacctatgccaaggccatactccagacccaaccatgcttgagtgtgtgtgtgtgtgtgtgtgtgtgtgtgtgtgtgtgtgtgtgtgtgtggtggtgggtaggggggttggttttgttccaggctggagtgcagtggcataatcttggctcactgcaacctccatctcccgggttctaacaattctcgtgcctaagcctcctgagtagctgggattgcaggcacatgccaccacacccggctaattgtttgcctgaatctttgaggatacggctgggcatgggcagtttctaaaagcac

SEQ ID NO: 27227 - DNA, 1074 bp, Homo sapiens
ttcattcagccgactgtgatataggaaaatggaaacatgacaaagcaattgtttgagacacagcagatgacaccagtgctgcacccgtattcccttggcactcatggctctaactgcaaatacctgccctgactctgttggaggctttctccactcacagcggggtgcccagccatgtgcaggggagggccagaaatgtggggaggtgaacacacgggagcagccctcaagcagtggtggaggagactggggctacataatccagactccttgctcctggaggggagcccctgggaatactcttccagatgtctgcagtggggctgacacagccaccccctgctcattaacccgccctgcaacagctcctctgcctccctatctcacctctctaccttcttaatggcacttctgggatcacctccaaggaagctgcttgtctccctacccttgtctcagagtcacctctggaccccgcctaagctggaaagacattaagtaaaaagggatcagtttctagtggcacttgaacatgtgtgttatgtcacctccttcataaaatctttatttaagttatggtaaaagaataagatgtgaaaccatgaaggaaaagagaatggacgtggagcaacaagaaacagagatgtcagcacgttttggaagatgaaagcgcacggaggagtggtgatcatgcagtgtggctgagtctgcaagcccccatgacaacagcagcaggaatcagccagtccactccaccaccaccgtgaggaggcagggctgggagctccaggtgtgaggcaagacatggcgaagacatccacctgaaagcagtgcatttctaagttgtaatcggtaaagcacccagtcctgtgtcccatcttcagggcttagtggcagacgtttcttaatcccagcaggagaccagtcagaatgcctccagccttggtgactcagggcacagtgaggagtgagagcagaccaaagtccacagcatggtgagcagcagggcccggcccctctaatgcccaggccccagtgctccttagcccccctggctcttaccccaaggcagga

SEQ ID NO: 27228 - DNA, 1051 bp, Homo sapiens
ctgtgaatctgatcatgtagaatatggttcttagactaacataggacatgataagatttgattatgggccaggtgcggtgtctcacacctgtaatttcagcactttgggaggccgaggtgggcagatcatttgaggtcaggagttcgagaccagcctggccaacatggtgaaataccgtctgtactaaaaatacaaaaattagctgggcgtggtggtgcatgcctgtaatctcaggtacttgggaggctgaggcaggagaattgcttaacctgggaggcagaggttgcagtaagctgagattgtgctacttcactccagcctaggtgataggtgagagagtgagactctgtctcaaaaaaaaaaaagtcttgattacataaagaggattttattaaacgtattcacagttgtagggtgttactattgctttttgtcctcattattcatccctggagtgtttcagaactttctctagaaatattgtaatttaattaaacatttgatgattacttagaaacctgaaactttgggttatagtctgctaaggaagggagggctgttgtggtatgggaggtgctactttggaacggacattcctagtgccacgtctcttctcccagtctcagctgacgttgccttaatgtgcatcattcccagccccaagcctgtcacctctcatagggtccgtcctatttctggaccagccccaaacctgtcacctctcatagggcctgtcctgtttcccactgatgtcccgctggcatatcaaactcagcatgtcaaaaacctgatcactgctgcctcctgccaaatggccccttcccagatgacctgtttcagttcatggccatcacccagtcctgtggcatctatgatgcctgcatcttcctcctactgcccgttttccccctcagtacactgctgagccatcagcagacccccttcaacaggtgctggctgagcagctgctgggatctggttttgtgttgggtgctggaggttctgggatgggggctggtccctactcctggagtaggcgtcatctaacca

SEQ ID NO: 27229 - DNA, 1059 bp, Homo sapiens
tgtccttggttccacagagatgtcacctcctgctgcccttctgtaaagcccgcatgtggcacgtgctttccctgcagcctgttctgagcacattgaatccccacagtcacgaggggctctccaatgagcagccccaccttgcagatgaaactggcccccttgaggggcatgttgcccactgtcacacgtagctgcgggcagagccggtgccacttccagcccggcatcctcctgatccctgctcccctaggagtggccactcaccaggaccgactgagagagtgagggagggacaggctgatggacgttccccaaggttgggggccctagagtcggcccacacttcttgtcctttgaagcctcaggttcccacatgctgcctcgcactggagcagccaatgaaacttgaacaaatgctttcattttgggtatatcgaaccaaaaacaatggcacccagtgaatttattttgctactctagtagaatttttgtaggctttggaagtacacagacattattttctccttggcaggaatgggctatgtgaatgaaaaaaggtatccgttatgaaacttccagaaaaacgagctacatttttcaggtttgtctggggctctcagtagttgcccaagggacggagtttaaacctttcgaaaagtaaattgcctgaatagaagtataactgaggattgaaagactgaatcagatacgcgcttctgttcccatgaacagtttgggaacaccatttacatgtggcttcttttacataaatcgccatgtgtcccaagctggtgggaccctcccttagaggagccagccactgtggtctgtgcaccaggtcagcagctgcaatgtgtgcgaccttgagcaggctgtcctgcctttataaacctcagttcctcttctgtaggatggggatcacaccttctggaataattatgaggctcaaatgaagcttctgattcctggggggaacacggagcagtttcaggttgaacattttgtccctgggcctggggacgtctgactctccttggatcctagcaccctaacgtgctt

SEQ ID NO: 27230 - DNA, 1030 bp, Homo sapiens
ggactggaaccaggcctgggcagccttgtgggttggaatggggtgagctcggtaatctgcagggaattgtgagacttttttttgtgtacgctgcttagaagaaaatcactgaagatgcctgcttcacgcagggaggggtacgaagctcagagatggagatggagccctcgaagaaggctctgtcttagaggttcccacacctcccttggagaaatttgcttgggttgaagttgacagagatcatcttactaattgttactttttatatcttgcaaaaatttgtttgagtagtgaaacaaagtcactgattgtccccgttactcttaaccatgtttactatgggcctgtgttcttgctgtgtttttggtattcctaaatatacatacacatttttaaaaagtataatgcacatacagttttttagattttctgtttcattcgtaaacatttgtaactttttcactgataaacagctttgcaggtcaatggataggatggtagttttcagtttgataggtacatggtagtcttgcacagccccctgttgccagttttttgttgttgtcgtttgcttttaaactcttgaccatggagaattgtctttctactacactaacgtagagggagaactggtgaggaaaagacacacttccagacctgaagccacttggcaaagattttacttgcagtgtacatctaggcagtgagcacttgctttatggatggtattttagaatatttttgtagggcattaagatatgtttaatacggtaattgctaagagattgactgcttttccaaacttattctgggacattcttttttctaaaatggagatggtaaaagggacagatttgttagaataccaactggggctcttcatatttggtatgcaaaacatagaagtggcaacgaatggccaaaacaggttataacaagggcttgggatgactttgccaggaaaagcagccaagaagcagtggctcccccagaattccctgctgttgggagagttctgatgcacagcacc

SEQ ID NO: 27231 - DNA, 1056 bp, Homo sapiens
atttcttcaaaaattctctctgcccctttgtctttctcttcttggtttgcttgatggtgcccttcaggtctctcaggctctgtccttttcttcggtctttttttatttttgttcttcagacttagtcatttctgttatcctgtctttaggtttgcttgttcttctgcctgctccaatctgtctttgaatccctcaagtgaatttttcatttcggtttttatagttctcagctccggaatatctttttggtctttttaggttttctatttctctactatttccattttgttcatacattgtttccataactttctccccatcttcctgtagttcttagagcatctttaaaactcttgttgtaaagtctttgtgtaatagatctaccatcaagtctttttcagggaccatttcttatttttctttttcctttgaatggaccatacttttatgtttctttgtatgtcttgtgatttgattgtttttgctgaaaaccagacatttcagtctaataatgttataactctataaatcagattctcccctttcccccagggtttgctggttttgttactgtttttgtttttttggttgttgtaagctgtcgctgtgcttagaatcaacctgaggtataaccttaaggttttctcaaatctttattgaacctgtgcctttccttggtcactttctaatttttcctgtatacacagttgcttttcactgccctagtctttaatgtctggctcctgaaagggggaaaaaagaaaaatgaatagaggtgggaaaacggtgctagccctttaaatcccctggaattcacttcagtggaatgcgggaggggcttgcagcctttgagaaggtgtgacaaaaatgtctgccagcctcatcatttgcacctctgtgatcagaaacagcaatcagcagtgaggagcagggtgctttttgcacactctgcaccagcaacctgtgtacaagctactccaagaacacatgcactgtggcctgccacaaagctaggaacaggggatggttagctgctgctatgctaagaggcaaaat

SEQ ID NO: 27232 - DNA, 1121 bp, Homo sapiens
ttttgcagtcttactcaagaaatctttgtccacaccaatgtcctggagtgtttccccaatgtttttttctagtagttttatagtttcaggtcttagatttacctttaatccattttgatttgatttttatatgtggtgaggggattgctttagatttcattcttctgcaaatggatatccagtttttgcagtgccatttattgaaatgactgtctttccccaatgtaagttctttgcacctttgtgggatataagttgaactataaatgtgtggatttatttctgggctctccactctgttccattggtctgtgtgcctgtttttatgccagcattttgctgtgtggattactatagtttgcataatttgaagtcaggtaatgtgattcctccagctttattacttttgttcaggatggctttggctattttggatctttcatggtcccatataaattttaggattaatttatctatttctgtgaagaatgtcattgatattttgattgggattgcattgaatctgtagacaaggtggaatggacattttaataagattaattcttctagtccaaaaacacggactatctttccattttttgtatccttttcaatttctctcatcaatgttttatagtttttgttgtagagatcgttcacatctttggttgattttattcctagctattttattttatttgtaacttttataaacaggttactttcttgatttctttttcagattgtttgttgttggcatatagaaatgccacccatttttgtatgttgattttgtatcctgaaactttactgaatttcttaatcaattctaatgttttttggctgaagtctttaggtttaactaaatataggatcatatcatctgcaaacaaggataacttcacttcttcctttctaatttgaataccttttatttctttgtcttcagtaattgctctagctaagatttcctagtactacgttgaataaaagtgtggaatgtgggaatctttgtcttcttccagatcttacaggaaaggctttcaatttttcagtatgatactagctgtgggtttgtcacatatggtttttataatattgaggtatattccttttacacc

SEQ ID NO: 27233 - DNA, 1040 bp, Homo sapiens
agatgtcttgtaactagcatgcttgcggcctgggtggccactctgtaggggatccctggatgattaaacagggagaaggaaatgtggaagagcgagttctgaggttccaacagctctcctggggctctatactgaagactcccttatcccttcagaacccctgtgcagcactttgagcacaaacataattgcctccctccagataatggagccactaaatgtaaacttacaaacccctttgcgaggtacagctgggggcttgaggtttctcacctttcccccacagctgcagaaactagaatgccactagtattgtctgagactcttcctgactgtcccccgactcaagaagggtgagaccaacctccagaagagacgcagggactctggtttcctcacagccactggcaaccctaacttcctgtttctctttgtatttctgcctcagatattctcccaggagtacatcaacctcctgctgtccatgtatttcttcgtgctgggaatcctggccctgtcccacaccatcaggtcagaaggcatctctctgcaacatttgaagcagctttctcgggaaccagtacagggtcttggatgagaacatgacttttggcatcattcagagccaggtttgaatcctggctataaaactcaagggactctttcccctgcacactgtagatgactaggacaagaacaatgacctctctgggccacagtttccttatagacatgatgaggatctggtgggtgtttccaccaccacagctgttgggaaagtgatttgtgagcagtaatgtcatgttagttgtgacagtactcaggtgagtaacaccagtaccacctgccgggtgttgtggcctagctgtgtgctaagtgccatgttgggctcctcacacatgatcgtgtttcgtaaggagccagaggcagcatagtgaaaagttaggagcgtgggctctggcatttgactaccttactttgagtccagactctgccacttaatagctctgtgatcttgggcaagttacttaatctctctg

SEQ ID NO: 27234 - DNA, 1484 bp, Homo sapiens
gccgggccatgcccccacagcccgtttcagtcagtgcatctccctatctcttccccatgtacctcttcctcctgtggctccccagcctggtttccttatcctcaattgattcatctggctgtgttcatcctgcccaggtcccggcccctggccacttggtcgtggtgcagcatggcgtgaaatgagccaaaatgggagcgagcatggaggggaagtgtttaacccagcccggggggcacgcgcaggggctttccaggagagaaaacctctaagccgagacccctcactggggtccccttggcacctgagtgtcgggtgctgtctatcccgtgcctctcaaactgccttggttttgttcttcagtgtatccactgtttataagtaatagaaaatccacctacaggttgagcatctctaatccgaaaatctgaaatccagaatgttccaagacccaaaagtttttgagcactgacatgacaccacaagtggaaaattccacacataaggacttaacacatgtgaactgtgtttcatgcaggaaatagcattttaagattgtataaaactctttaggaggctgaggcgggaggatcacttgaggccagcagttcaagaccagcctgggtaacagcaagaccctatctctacaaaaaattaaaatattagctaggagtggtaacacacatctgtagtcctagctacttgggaggatctgaagcaggaggatcacttgagcctgggagttccaggctgaagtgagctatgatcatgtccctgcattccagcctggatgacagaatgaggccctgtctttaaaatttatatatgtataaatatatatgtgtgtgtacatatataaaactaccttcaagctattatgtataatgtgaatttcatatttaaacttaggttttatccccaaaacatttcattatgtatatgcaaatattccagaattcaaacaaagtttgaaacatttctggttgaaccatttcagatatgggatactcaacctgtataactgtctttaaacaagggggaaattttgtcatctcacactacagcaagcccaggggtagaaggctcagagtgagttaatgaccctctcttcaccaagagccaaggttacttcaggactcccaccccagcattctcagcatgtccacctgccccttaggtcatcccttcatggtcccaagatggctgccacagctcccagcactgactcctcacatagctgtgtccagaaaaagaaaggggaaattatgtctcagggagggatggtttttcccaagtctcctgtgcagtctccctcatactttattggccaaaactgtgtcacaggcccaagtctaaaccattcaccagtgagggggataggaaacatgattggcttagagtttaagctttagactagtggagaatcacctgctggtattacaaggctcagagaggggaacagaatccgtcaggcatgctagcaa

SEQ ID NO: 27235 - DNA, 1057 bp, Homo sapiens
gcacaagcttattcagaatccctgtgcacgcacctctgtgtacctgttgttggccagatgaaggttgcagtgagccaagatcacaccactgcactccagcctgggtgacagagtaagactccgtctcaaatatatatgtatatatgtataaagaaataaaaattaaatggccaggcgtggtggcttacgcctgtaatcccagcactttgggaagctgaggtgggcagatcacaaggtcaggaattcgagaccagcctgaccaacatggtgaaaccctgtctctactaaaaatacaaaaattagccaggcatggtggcgcatgcctgtaatttcagctactcagggggctgaggcaggagaatcacttgaacccgggaggcagaggttgcagtgagccgatattgcgccactggactccagcctgggcaacagagcgagactccatctcaaaaaaaaaaaaaaaaaaatgttggccagagctgaccccctacctgcaagtaaggaattcaaggaacaggattttcctgattggcttagtcttgcaccacacttatcacctgggaaggctgcctaacacaaaaccaggactggattagtaaagaaggcatgaggtagcagttaactgtgtacaaatcatctaatcttcactatcaccctgaggggtcagttctgttgtctacccgtttcacaggtgacaaaactaaggcaggtaagtaacctgtgcagagcacagaactaggattcagacctacagacccacaagtcagcctctaaggcccacttataactgctcttctgcttgcaaggccctatggatgaaatccagttataacctccttttgctataactagacacagagggaggcgtttctccctaatctgtatttatccagacaagctgtccagcaagatttctgagtgaggggctttaaggaagcaatctgcgggtgtgtagccttttctccctcagcaaatacagaaggagcttatagcccgggctcaccctgcttcagaacaagggccaacatctgtccatacccctgttatagtgagatgg

SEQ ID NO: 27236 - DNA, 1051 bp, Homo sapiens
tccttctctgcacttccagagcgctctctgttaatgccctcttgcagcaaggatagccctatattgtaattgtttgcattcccccattcaattgtgcgttcttggagggaagagatttttttttgttgttgttgtttgagaaggagtctcgctctgtcccaggctggagtgcagcggtgcaatctcggctcactgcagcctccacctcctgggttcaagctattttcctgcctcagcctcccgagtagctgggattaaaggcacgtacccaccacgcccgctaatttttgtatttttagtagagacgggtttcaccatgttggcctggctgatctcgaactcctgacttcgtgatccgcctgccttggcctcccaaagtactgggattacaggcataagtcactgtgcccggccgagattttatatctctatctctgtctgtctgtctgtctgtctgtctatctatctatctatctatcgttttagtcttcgctttttggaaacaaaaatgggctataagacacgatggatggcattgaataggcagtttttagaggaacctaattggttcatagcatacaggataggctttttccttgggtctttgtaggaatattggtcattaatagctatttttccatgcagaatatttctagttttgcaagaatctgaagctgtggtagattcagataattttgaaatgtgaagctgattctcttgcttggcaacttgatttgtttgggggaatgtggttgacgcatgtgccttttttttttttttttttttggtgagacctgttgacagaaattcaatcttgattaagggacgcaggaaggcatccagttcccaccatgcctggggctctctcatttaaacagctgcctttggctctggcctgttccatttcccactaggccctgtggactttaattttggaagatttcacatcctcatatttattatttctgggggaggtagtgtcgtgaaaccgaaattacccagtagttagcttttcgttttcttgatgtacttgtcctatcagccttaattg

SEQ ID NO: 27237 - DNA, 1030 bp, Homo sapiens
cgcggtggctcacacttgggaggccgaggtgggtggatcacttgaggtcaggagtttgagaccagcctggccaacatggtgaaatcccgtctctactgaaaacaaaaaattagcaaggtgtggctgtgggcgcctgtaattccagctactagagactgaggcaggagaattgcttgaacccggaaggcagaggttgtggtgagctgggatcatgccactgcactccagcctgggggacagagtgagactccgtctcaaaaaaaaaaaaaagacaaatggctcattgggtttcattggcaaattattggccactgagtgtggcctttaggctatttatcagattactttcagctattttattaactagattaggcttgagtaggagctgactttaaaccttcacaggtttccacaagatagagtgcaaaacttcgtacgcaggagtagggaggggcctatttaacttgttcccttatccttgcttctgttcctatgctgcatgttgtgactcttacgtgtatttcaaagttgtcgtctttatactcagaaatagtattttttgagaatatttctaagaaaagacaacttatatttgacaaaactgtgttgaactcttactatgtataatgcactgtgttaagcaccttgatggttggatggatggatggatggatgaggtatacacaagtgagtaaaatctatctttgtttttaggaacttcgagtctactgggagagacatttacatagttaatataaaattggatgataagtgttacagtggagatataaacaaagcacaattggctttggagaggcaacaattttgtatgataggtggaaattgggaaagagttcatagagatttgacctggactttgaatgatggataagattttggttggtaggcataaaaattagtggtgtattttagaaattgggttattcagggcagagagagaataaattgggctagaggaggctagaaatgagaaaatggtaaattgagggaaaataatgacatggtgaat

SEQ ID NO: 27238 - DNA, 1013 bp, Homo sapiens
gatggagtcttgctctgtcgccaggctgtagtgcagtggtgcggtctcagcttactgcaaattccaccttccaggttcaagcgattcccctgcctcagcttctcaagtagctgggattaaaggcatgtgccaccacgcctggctaattttttgtattttagtagagacggggtttcaccatgttggccaagacagtctcgatctcctgacctcatgacccacccgcctcggcctcccaaagtgctgggattacaggtgtgagccatcgctcccggctggttacagttttctttaagaggaacatgatatatttagggagtagataaagccagttcatatttgtatgaccctaaatgtgtaccaaacaaagataaggagttattcacaatgcagaatctgtacttttccttttttataatacattgttcaatgttgccagtttttagtgattgttcttatagtctatctcggatgtgtaatgtgtactttttcttttgattgctagaactttgcttgtacttgccacatgagttggaagtgtactggtagggagctttagtttgcattttaaatgcgtgatagtgatttgttttgcttccttgctgatcagacaatgatgatcttcccttttcacagaggagaaggccaatttggagaataagttactggggaagaatggaactggagggctttttcagggcaaaactcctttgagaaaggctaatcttcagcaagctattgtcacacctttgaaaccaggtaagaaaacatcttagaaaaaagctccttgatagaatggtgggacagtgttttagaagcctgaggttctgggaaaattacctaaatgctctatctctttgtttattattggtgaaatgggctaattcatttcatgataaatgtaaaactaatgatgtgctacacttaaaaaaaaatctcttggagcttaagctaacatagaatttttttttttttttctttaagatggggtctggttctgtcacccaggctgg

SEQ ID NO: 27239 - DNA, 1079 bp, Homo sapiens
cattttgcagttaggattaattgccagatttgtgatagaatataaactctgtgtgaatcaaaaaatgctgtggaacaactctctaaaatgtgttagttttaaattatgtgcacaatatgatacatgtcatttattccacaacgatttgaaatgttagcagtgttttaaaatcattaaggaaaaatcttcagggtagttgaatgtgttggaattatgagatataaggctgggtacagtggttcacgtccgtaatcctcacactttgggaggccaaggcaggagattgcttgaggccaggaatttgagacccatctctacaaaaaatgattagctgggcaaagtggtgcgcgcttgtagtcccagctactcaggaggctgaggtgggaggatcacttgagcccaggaggcagaggttacagtgagccgagattgccccattgcactccagcctgggcaacagggtgagactctgtctcaaaacaaacaaacaaataaaaggattatgagatgtagaaaattaaatttctctcttaattcaccctcaaagagatatgagagttgacaatttggtgttctttcccttttatgttcttttattttctgtgcttagattaattatattttaaaaactcaaaaatatcattctaggccatgtgcagtggctcacacctgtaatcccagcactttgcgaggccaaggcaggaagattgcctgagcccaggagtttgagaccagctgggcaacatagtgagaccctgtctctacccaaaggggaaaaaaggatttaatcttctcatacagcttagtggagatcattttgtgatatctaattgagttgcttactcctttcagggtgttcctgaaaagaaggtacttccaatcaccgtccccaagtcaccagcctttgcattgaagaacagaattcgaatgcccaccaaagaagatgaggtgattccctgggagtaggggggttctttttccttctatatagtcagtcaatctaagccttatcatttattaatcttaatggagttcaaaggcaaccactcttttttggacttgtctttaagaatgggtat

SEQ ID NO: 27240 - DNA, 1066 bp, Homo sapiens
tatcattcattgcgtgtgctaggagatacaaaagcatctggattctgcccaggctagtcctaggtaccatatatgacctgaaacttattttatattcatttttttattcagtgagcatatatgaatctcttatgtacaagtcattgtagtcccagcattaattgacaaagcaagatggtgtttctcacagtatgatttgcagatcctggtcctcctgaacccccataaactgatgcgtgaagagtggagaatgaaggggtgtcctggaaccaattctccacggatactgagggatgactgtgtataccttagcactgttctagtctctgggaatacgtcaatgaacaaaaaaaaagaccttgccttcatggagctaacattttagtaggagagagagacagtaagcaaataatttaagctcttgtgtaaggtgacagacgtgctgactgctatgtgaatagatgggttgggagtcgggggcatgtgaaattgtaattgggaaggcgaggaggttctcggctgttgtgcaggtgagagctgacagtgacttgggttagggtggtagcagtggcagagaggagaagtggttgggttctgaatgtgttttaaagttgtaactaacaagacttcctaacagattggatttggagagtgaaagaaaggtgggcacctttctttcttatagagggcacccaggtgtcagccccaaacagagacagggtccatcccttgtactgtgagaaatccagttctaccctagtccttttatttcttgtgggttcacagcagcattcattttttttctgatttcctcttgtttttttccacttctgcttatctcttgatctctgtgtctgttctttgtagattttctctctactggtatcagcatttctcctctatcactatcattcatgtatttccatctggaatcattttttcatataccttgtctggttttgttcgttgttgtttcaggcaggggaataaatccggccctcagattgagggttttgggagtgttactgagaattatggatgtgagggatccttctgccccatttgc

SEQ ID NO: 27241 - DNA, 1052 bp, Homo sapiens
agacctggacacgaataatcgtaacacaagatgggatgtgattcagtaatgtgagacagagtgctgtgggagtttagggattgtttttgaaagtgaggttgcagtttgtaaaggtttttttttttttttttaaagtaaaatttgcaaaagtagtactgccttttggaaacaagtaaaatgctactaactgtatgaaataaaacacgaaagtctccttccttcccctactcccacgtcccagtgtaacccatggttcgcaataggattcttccagaatgttttctctgagcacacacatagagcattttttttaaaagaaataagatagtagtagcattatgcatttttaaaaattttaatttgttctttaaaaggttatacattcacatagttctgaattgaaaagatacaaacgtagagtcttcctcctgccttttcttcccaactgctcagctcccctccccagagatagtgctgccagtttcttaagttcccttgcagagactgtttcttcctatacatactcctacctaccctccttctcttatttttttacacaaatagcatcatactttacactctgtaccttggttttttcatacatgttgtgcattttaaagatgtagttcaggtgccacctcaggcatgtcctggcttccttcctgacaagtatgaagcctcttatgacaatctagtgacatggaggcagacctgcatgatgtcctgggtttgtgacctgaggtcccaaggactagagggcaaggtagcagcacctggtcctcatctcctcctggcttaattgagctttgggggcttgcgtattgtcttgagtgtttggttgaacctgtatatcctgttggatcaatcttgatattgcttccttttcatttctctcgatgaaggccgtcttactgaatcttgtctgctggggaagttcctcattgctgagagcagcagttaaaaaagctgttagccacgtggctgggctcctatttctgcagaggcaggctgagttacagcttggtggtgtggatccaggtaggaattggtca

SEQ ID NO: 27242 - DNA, 1026 bp, Homo sapiens
attccaggtcacctgtatctttgccagtgatggcgtgttagattacagcacaaaaggcttctagattgccatcaccttgttccttgatatgctgcctttgaggtctcttttgctacttggaaaccaagtagcaaaagcaaaatgacgttgaatgggctggttcacatctcttaggactctttgcatggctctgaacatgcagaagatgattactaaatatttaattgacttttcagactgaacctctcatgggagttaatgaggcaatcaattaaaaattaaaagaaaatttaaaggaatttcctaagaagcaggtactttgctttttccttacagaaaagaactgcaggccaaacatcctctatcaggctatcaggaatatagaaggtgatgaagtcatagaatcataaaaagttggaacagtgtccaggggttttaccagaaacccatgaacttctagtccttgattctctgtgtattggaatattttttccgagatcagtatctgtagctttgataagtttctcagagggatttgtgacaccctccccaagattaaaaattgctgatctgtctgcttacccacatacctggtgccagaatccgctctgcataattcttaccttagcccactttctgcacatcttctgtggaactcatcccagtattttcagaggcaacccatttccttcacttcttaaaatataaatgaatatatgtctttaattttttaatttttttagagacagggtctcaccctgtcacccaggttggagtgcagtggtggaatcatagctcactctaactgcagccgtcggactcctgggctcaggtgatcctcccacgtaattataggtattagctactatgcccagcctaaatgtatttattttgttgtatttatttatttatttatttatttatttatttatttatttatttttattttgagacaaggtctcactctgttgcccaagctggagtgcagtggcgtgatttctgctcactgcaacctccacctcccag

SEQ ID NO: 27243 - DNA, 1114 bp, Homo sapiens
tctgtcatctgtgctagagtgcagtggcacaatcatagctcgctgcaacctcaaactcctgaactcaagtgatcctcctgcctcagcctcccaagtagctaggtctgcaagcccacttcaccatacccaactaatttttaaataattttgtagagacaaggtctcactattttgtccaggctgttctcaaactcccatctgtcctcaagtgattctcctgccgaagtgctgggattgcaggtgtgagcctccatgcctggcctgggtaggtctacattttaatgtttagtaaaactagcctgccttcattatttctcttttcaaaatcatcccgaagtaacggacaaataccaaattgactacaatggtttgttaaaagaaaggctttgaattgggggagagacaagtgagacaaacaatcagaggaaaataattggaaagggatggtcaaaggagaaaaataagcagttcatctgtggcagtacagttcttcttgaacacctctaatcgtgacctcaaactgtccctaagcatggttcccagcctggtgatagacctctgttcacttggctgtgccagtctgggtggaactggacttacttcactttgcagataacttgctgtgtgaccgtgggtctttcagtttccctctctgaccccctggattatatgacctctgaagttcttttaaaaactttttttttttttttagatgaagtctcattccatcacccaaactggagtgcaatggcacaatcttggctcactgcaacctctgcctcccaggttcaagcaattctcctgcctcagcctcccaagtagctgggattacaggcgtgtgccaccacgcctggctaatttttgtatttttagtagagacagggtttcaccatcttggtcaggctggtctcaaactcctgacctcaggtgatccaccctccttggcttctcaaagtgcttggattacgggtgtgagccaccgcacccagccctacaaattgtctttttaaccccatcaaacccaacttggaatggaactttgccttgttttgttttgttttacttttacgttactttggttgataaaatgtcaaatattctcaagggaattatg

SEQ ID NO: 27244 - DNA, 1042 bp, Homo sapiens
cttttcttttttaaaataaaatttaggaggtaccaagtgcagctttgttacatgggtagattgggtagtggggaagtctgggcttttaatgtaaccatcccccgaataatgtacattgtatgcagtaagtaatttctcatccgtcaccacccctacccttcagagcctccaatgttattattccacactgtgtgtccatgtgtacacattatttagctcccacttataagcaaggacatgcagtatttgacgttgtttctgagttgtttcacgtaagataatagtctccagtttcatccatgttgctgcaaaagacatgattttattcttttttatggctgaagagtattccattctgtgtgtgtgtgtgtgtgtgtgtgtgtgtgtgtgtgtatacatttatacagtgtcccaagtcctaggtctccctgaaggcttagaaagaaaaggtgggaggtgctgctggaaaggcactggggccggtgggtggaagttcctccataccaagctaggattactctaacctcagtgttcagaacagtgatgttttcttttgcctcatttattatttaagtggcatacatactatataatcatctaagaaaattagaaaatatagatacacaaaaaaggaaaaaagctcatcactaagacattttgcctcctaaatatttttccaaagataaaaaaaaaaaggaatcctgccacacagtgttctagctcctgcttttactatgtaaatctaaagcttgaacattcctactcaagaaatgtatcggccaggtgcagtgactcacacttatatctcagcactttgggaggctgaggcgggaggattgcttgagcccagaagtttgggaccagcctgggtaatatagggagacactatatttacaaaaaatcaaaaaaattgcggtgcatggtggcgtgtgcctgtggtcccagctacttggcaagttgaggtgggaggatctcttgagcccaagaggttgaggctgcaatgaactgtgattgcaccactgcactccaccctggacaacag

SEQ ID NO: 27245 - DNA, 1024 bp, Homo sapiens
tacttacatttggattaaaattttattttttgtaacatttcgatgggttctattttgtctgtggtttccagagctatattctgtgtgcttgtagcatttcctaaacattcttcttcattgtcttaaaccttatttttttatggctttaccatatttaattgaaagaatatatcatagtttattgataaatttcccattgcaggagctttgagttgaagttatttttcatttttcctctcttctctcattcagcaaacatttaatgagtacctactttgtgcctagctctaaagcactggagttacagaggtgaccaaggcacacgtggtccttgtccttatagagcttaaatcttagatgctaatgggagaaactgattttttaaaaaacagggaaactaattaacattttatcagatatgctatgaagtaaacagttgaagactgacagtccagtggataccggggagttcctttagataccctggtgaggtaaggacacaggcaaggggagagctgagacctgaatatgaggagaagccaggcgagcacacaatagggcagaaaggagcagtaggtcaaagcctgaggcaggagagagcttgactgactcgaggagctgaaggaagaagatcactatggttatgaataaggagtgaacttcgttgctcctaaaatgctttttttccttatttggagttatttccttaggaaagatgcccaaaagtgaaattgctgtgtcaagggatagtagcatgttcaagactctcacaatgtattgaatttggttgtgattctcaactatatctgtagtgtagtctaaaatgaatgaaatgtgaaataattcagaattgtgggcagtacattatatagtgtactgctgtcatttctgctaattcgtttgcctattagttaatattaccaagtgtactaaagatgtgtgggtaccagggaggattattggtcatcttggtttctgctggattcccatcaggctgtgaagctcaccagctctcgaacccagc

SEQ ID NO: 27246 - DNA, 1022 bp, Homo sapiens
cgcctcagatcttgatatctaagtgcccacttgatatatccaaactgaaaatgccttcgatgtaaatttgctgttcttcctattttcccacctagaacctggttgtagaaacctcagagtcttcctaatatgcaccatccctcactcatgccttgtttacagtcagcactgcttcccctggatttcacctccttggagctcctgaatctgtgtactcttctctaccctcaccagcacctgttccagtcaccggtgtcactcatgcatgactgactgccatcactgccccccaccaccaccactgctcaccgccagttccttgcatcctctgttttcttcacaaaacagccagaatgatctttctggaaccagactcagataacgtctttctctacccctgttagaaaccttcattggattttgttgctttctaggtcaaactggtcaagatcaaactgtgtgtcccacaggccccctgagtactggcccatctctgcagctcatctgagccttctgcactgtagccacacaggcctttcaggttcagtgcctcccccaccccaaaggggcctttgcacatgctgtcctgtctggaatattctcctatttctttgctcagttaacatctctcttcctttcaagtaccccttcctcagggaagctgtcctagacccactcccctgtgtctgcagcaagttatatattctcattttgctgattattcagcaaagtctatcttcctgctaggccatgcactctatgagtacatctattcaactttgcatctttagggcttggcatgtagccagtacccagtacatgttcacggatgaatgaatgaatgactagatgactagggagagtgccctgtcgagcagatccacactggaggaaaagtgcgagaccaagtgcatgtggaggtgttaattagtcttcatcttgtccatcaattgttgaacagctcagaatgaaagcaccatggggtttgcttgatagtccctaactgctcagtgcctgttagg

SEQ ID NO: 27247 - DNA, 1024 bp, Homo sapiens
agaaagggaaccaagctcctggcaccaagtgggcatgtcagtatctctgggccagacaggccgtctatctcagcaacagccccagccccagcccaggactggtgattcacctcacagccatttacagagcccaccatgtctcctccatcaatgaggcaacacatcattgctgtgagcttggcctccttttgtagtcagaggccaagtgacctgcccaaagtcagtaccaggattaggattgaaatcaaatatttttttctttaacaaaaaccccactaatatatagtaattttagacagctttggagtcagtctgcctagatttacatctcagcctcatgcctccaagctttgtgaccttggacaggccacttgacctctgtgagcctccgtttccttatctgaaaaatagggaaagtaatcaccctgcagagttggtaaggtggattcagagacctggcatttgtggtgccctcagcccagcacctgactcactgcaagtgctctgtggaccgaaagctgcggttgagatttggccagccaaggcccagcagctgctgcacccctccgaaccccaactaagacccagtcttcccctgtagagggtaggggactatgctgttgagaagacaagggagggggagcctcatctgcccagagtcctcctgtcagcctgtccaaggtgggcctggggctggggctggggctagaggcctggtgatcagccaccctgcctttctctgcccttcctccctccctccctccacagttgtagccatgcttgggatgctgtcgccctccagccggggagctctcatgaccacagcctgcttcctcttcatgttcatggggtaggtgtgtctgagtgggctcccgggggcggcacaggcctcctccacaccagctaatgggtccccttggtgtggatccctgccattttcccacagggtgtttggcggattttctgctggccgtctgtaccgcactttaaaaggccatcggtggaagaaaggagccttctgtgt

SEQ ID NO: 27248 - DNA, 1033 bp, Homo sapiens
cacaacccaggtagtctggcttcagtgctgcctctcaccccatcaaggggctcccttgtcatgcgatgctcaccggcccccagttccttgcttattctttgtgtcttccagtgaccttgtgtcgttgttcatattgtatctcccggagcctggcagtaggaacttaattagtatttgatgaattgacttaataattttccaatagacatcagaaataatacttagtgtgaacaaaacacttaatttcattcttacaaccttttctctgcatagattttactttttcctttgcatgccagtatttacagaggttttgagcagcagtcaaaagccagagtaccagagatcatagtctgacttgggttcttactagttgcatggcctggacagggtactttacctctttgtgcctcagtgtcctcattttaaaaataagctggtaatgattcttgttaccctcttgtggtaaggactgaatgtgtcagtggcagtaacacgccttcagtgttgtcatatgccgcctccctcttagaatcaactgagcttatcaacgtacagatcctagagtcctcagttaatggaaaccattgatgttctgataatttcgcactcactatttttttttttttgagatggagtcttgctctcttgccaggctggagtgcagtggcacgatctcagctcactgcaacttctgcctcccgggttcaagcgattctcctgcctcagcctcctgattaactgggactacaggcgcaccaccacgcccagctaatttttgtatttttagtagagacagggtttcaccatgttggccaggatggtgtcaatctcttgacctcatgatgtgcctgccttggcctcccaaagtgctgggattataggcataagccactgcgcctggcctcgcactcactattacagtgtagacattgcccatccatctccctctggcttgcttgcctctgtctccttgccttctcagccagttgtctttccaagtccccacttccttgctttctgtggcttacta

SEQ ID NO: 27249 - DNA, 1103 bp, Homo sapiens
cttaccatcaccagtgtctagtacagtgcctgacacttagtaggcagtcagtttgttgaatgaggatgtagagagtgggctctggggagagatccagtatagtggaggagttaatagcagagactctggagtcagagaacttgaatttacccactctgcagccttgaaaaagttatttgacctctctgtgcttctgtttcctcatctataaaatgggactgaatagtacctatctcatagggcagttgtgaaggtcagatgtaaagaaattgaaacagttcctgctacaaaataagtgctcaataaagttagctatcatcagtagtagaaattggtggctgatgaatgaaggaaaggatctttgtgcttagcaaactgttgaagaagccgtgaatagtgagtattcagtacatgagtaaatactagaatgttcttggtcagtgcttactatatcagtgaagagtaatactcaggcaatgagtgagtacgtattgataaaatgactgaattagtattaagcattccataggactttgtaggatgagtgaaaaccgtaaatgctgtgcaggccttaagaggcagacactgggtaccgctggctttatatcaagggcctccccttctctttcaccccagacacaggaagctccagtgcagagaggaagtgctaagtcagcacattctaatctcctccccacctactgaacagaaaatcagagctggggctgggcacagtggctcatgcctgtaatcccaggccaaggcaggagaattgcttgaggccagaagttcgagaccagcctggcctaacatagcgagacccccatctctatttaaaaaaaagaaagaaagaaagaaagaaaagcagaagaaaaatataattaagagaaaatcagagctgagagatctcaggggttgtctaacccaacccctctattttatagctgaggaaaccaaaattccaagaaaggatagagtttacccaagcagtcccagagctaattataatgggcatgacacagagtgggtaagtttcagaatgtgagtggaattgtttgggggattttggccatgattaaactggtattatttctttgctacaa

SEQ ID NO: 27250 - DNA, 1030 bp, Homo sapiens
tttattggcaactgtgtctcctccttcactgcctttgtgaagcgggagcgggacctccaggggaggccgtcttctttcttcggcatggacaggccccctaagctgcgggacgagttctgattctggccggagcaccagaccctctgatcctggagggaccagagtctgagctggtccttccagccaggcctggcagccagaggtgctccgggattgcaaactcctcttctcacctgccaaagatggagaagagtgccagggacccctcaaggagggagacgctccatatcccagggcataggacttgcaggttcctaggagcaggagcatctcccatcgcacgtgctttctgctcttctgggaatttctcacactggcaaagcagtccagcctccgtcttctggtccactctgctctgagcagcctgggatgctgaactcttcagagagatttttttatagagagatttctataattttgatacaaggtcatgactatcctagaactctctgtggtttttgaaaatcattgaattctattaatgtaggtacctaaagtgaccttaactgaatgtggatgaggctggggctggtgtgggtcttttggctgcttttcaaggtgtcccccaatgtggccctcaagagccatccccactgcctggccagagccattgttgtcccctacttcctaggccatttctggggcttgggggatgaatgctgtcctgtgctgtaaacactatgcaaatggaagttatcggttgtggtgctgtgcagcgctctgtgggcgactaagtgccactcacgcagcatgttcctggcaaggagcacataccatcaagccacactatcatggtattgttctcacagtcttttggtggttgatggccactgcaaacctggcaccatcagatctcttctgatctcttgccccagtggggcctggttggtagaatgttggcattcggttgatatccaaagcctgttctcccagccgtcctcctgcagctggagccttcaggccgtattct

SEQ ID NO: 27251 - DNA, 1049 bp, Homo sapiens
atttttagtagagacagggtttcaccatgttagctaggctggtcttgaactcctgacctcgagtgatgcaccctcctcggcctcccaaagtgctgggattacaggtgtgagccaccgcgcctcgcctcattttttttttcttgagacagggtctcactgtatcacccaggcttgagtgcagtggtgtagtcagagctcactgctgcctcaaactcttaggcggctcaagcaaactcctgggctcaagtgatcctcccaacttagcctcctgagtagctggggccacaggcatataccaccgcacctggctaatttttaaaaatttttttgtagagacaggatcttgccatcttgtccaagctggtcttgaactcctaggctcaagtgatcctcccacctcagcctcccaaagtgctgggattatgggtggtgaaccacctagcttggtccttgtacatttcttaacagttggtttgtttgaatcaagatcaaaaaaggagctggacgtagtggctcaccatggtggctggtattacatgatggacctgtaataccagcagtttgggaggcctaagtgggagaatcacatgaagccaagagtttgagaccagcctgtgcaacaaagcaagaccccccccaacttctacaaacaattttaaaaattagtccaggcatggtggctcatgcctgtaatcctagcactttgggaggctgaggtgggtggatcacttgaggtcaggtgtttgagaccagcctggccaacacggtgaaacctcgtctctactaaaaatagaaaaaaaaaaaaaaaaaaaaaaagaaaagtcgggtccagtggcgcacgcctgtagtcccagctactctggaggctgaggtgggacgattgcttgagcgaggagttcgaggctgcagtaagctgagattctgccactgcactccagcctgggcaacagagcaagaccttggctcttgaaaaacaacagaatgtgaagaccttgactcttaaaaaacaatagaatgtgtacaacagtcctacctctgggagtggatcc

SEQ ID NO: 27252 - DNA, 1063 bp, Homo sapiens
acgcctgtaatcccagtgttttgggaagcggaggcgggcagatcacctgatgtcaggagttcgagaccagcctgaccaacatggtgaaaccccgtctctactaagaaatacaaaaattagctgggcgtggtggtgcatgcctgtagtcctagctacttgggaggctgagataggagaatcgcttgaacccgggaagtggagattgcggtgagttgatatcgtgccactgcactccagcctgggcgacggagtgagaaaaaaacacaaaaaaagaaatagccctgaggacaggtccttctccagctcatctcctgccaccccatgttctgttcattcctgaaaaagtcactttccatctctggatcccatctgttaactgaatgacttcatcaggtgatctccaagttcccttctaaccctaccttctcgaagcttttaaagattctggtcttacatctgtctgatgataagagggaatattttattaacttgactttttattgtgacaattttctgaatggtataataaatacccaagtacccatcacccagattcaaggattaacaagcttttgccatctatctttcacaaaaatattttaaagcaaatcttaacctcatgttatctcactcctacatacttatatatatatatatatgatcacagtggttttttttttttttgagacagagttttgctctatcacccaggctggagtgcagtggcacaatcacagttcacagcagcctgtaacttgtgggctcaaacagtcctcccaccttagcctcccgggtagctggaactacaggtgtgtgccactatgcccagctaatttttaaaaaaaattttatagagatagagtctctctatgttacctaagctgatctcaaactcctaggctcaagcaatcctcctgtttcagcctcccaaagtgctgggattataggtgtgagccaccacacccagcccacaatactgtttttaaaaaagcttaattgagacatacttcacataccatacaattcacatatttaaagtgtacaaatcagtccgggcatggtg

SEQ ID NO: 27253 - DNA, 1041 bp, Homo sapiens
ctgaagcaggagggtagcttggagatggaggctgcagtgagctgtgatcacaccactgctctccagcctgggccacatagcaagaccctgtctcaaaacaaaaacttagctttgtaacctgggagggatttaacccttctttttggtggaatatgcatccctggcattgagtcagtccttaataaatgatagcctttatgatgatctgaggtttatcattcttaattgcctgttaatggcatttttctattaatattatctattttttgagatagggtcttgttctgtcacctgggctggagtgcagtatcatagtcacagctcactgcagccttgacctactaggctcaagtgatcctcccacctcagccttctgagtagctaggacttcaggcgcataccactatgcctggctaattttttgtattttttgtggagaaggagttttgccatgttgcccaggctggtctcgagctcctggggtcaagcgatccactggctttggcctcccaaactgccaggattacagacgtgggccactgcacctggcctattattttttaatttaatattaatttatatttttagaaacagggtctcacactgttgtccacagctggagtgcagtagtataatcatagctcaccgtagccttgaactcctgggctcaagcagtagtcccacctcagcctcccgagtagcgtacaccatcaccccagctaatttttaaattttttcctagagatgaagtcttgctatgttggttaaactggtctcaaactcctggcctcaagtgatcttcccaccacagcttcacaaagcactgggatggattacaggtgtgagcaaccatacctggccctctattatctcatatatagcttattgttacatatgctgtaattatatatagttataattatttaatacatatatgtttattacaaatatgcctgttaatggtatattctgtttttaaaaggaaggataattacttttttctatgagtaccttaagggcaggaactgagttttatttgtg

SEQ ID NO: 27254 - DNA, 1050 bp, Homo sapiens
tatataatatataattatatgttatatattttatatttataaaataaaaataaaaaattgcaattattttcaaatagtaaaaccacgtagataaaatataattctggccaggcacgtggctcatgcctgtaatcccagcactttgggaggctaaggtgggtggatcacctgaggtcaggtgatataatatacaacagatataatatgtctattatatattatatataatgttatatagatatctatattatatataatatattaatagatatattaatataatatatattatatattatacagatatctataaatatattatatataatatattatagatatatctatgtatattatatcacctgacgtcaggtgatccacccaccttagcctcgcaaagtgctgggattacaggcgtgagccacgtgcctggccagaattatattttatctacgtggttttactatttgaaaataattgcaattttttattttattttttggttctggaaacatttgtgtggacttacctatgattgtcaggtttactgatttgctggagattttttgggcatgacaaagggtttcttctttgataaaagtttttctgggtaatgtgatggtacaggttgagtatcctttatctgaaatgcttgagacatgaagtgttttggatttgagaatttttagcatcttggaatatttaccacatacatagtaaggtaccttgaggatggggcccaagtctaaacacagaattcatttgtgtttcatatttatcttatatgcatgaaacaaagttgtttgttttcttttttttttgagacggagtctcactctgtcgcccaggctggagtgcaatggcatggtcttggctcactgcaacctccgcctcccaggtccaagcgattctcttacctcagcctcctgcgtagctgggattacagacatgaggcaccatgcccggcaaatttttgtatttttagtagagatggggtttcaccatgttggccaggctggtctcaaacccctgacctgaagtgatctgcct

SEQ ID NO: 27255 - DNA, 1047 bp, Homo sapiens
cgcgcctggccgcctcttatcaaaatcttaaacttgttaattcttgtatctcaccttgcttttatatcagtttttgttatagaatgtgctttctttttaggttatttttcttctgctcagcaagttaactttgaagaatcttttttttcttgccttttttttttttttttgagacagaattttggttttgttgcccaggctggagtgcaatggcgcgatctcagctaacggcaacctccacttcccgggttcaagtgattctcctgccccagcctcccgagtagctgggattacaggcatgaggccaccaggcctggctatttttattttttattttttatttttattttttactagagacagtgtttttccatgttggtcaggctggtcttgaattctcgtcctcaggtgatccacccgccttgacctcccgaagtcctgggattacaggtgtgagccagcgcacccggcctcttgccctctttagagcagttctacataaatctgtggaataatctgctgacgttagaaataaacctttctcagggtgtggccataatctggttcgttgtaattgctgaaggaaaaaactgaacccttaggaacagtttaaacattctaggtggtttttagatatattattcctgttagagttttgaactttgatcatcttgttagaaaaaagaggccaggcactgtgcctcatacctgtaatcccagcattttggaggctgagtcgtcaggaagtcacttgagcccaggagtttggtaccagcctgggcaacatatggagacctcgtctctacaaaaaaaaaaaaaaaaaaacaaaacctgttagccaggcgtggtggctcatgcctgtgttcccagctactcaggaggctgagatggaaggattgcttgagcctgggaagttgcgactgcagtgagctgtgattgtgccactgcactccagcctgggcaacagagtaagaccctgtctcaaaaaaaatgaatttttgcattcatttaaaaatgaatggtagcaacattttagataataactta

SEQ ID NO: 27256 - DNA, 1025 bp, Homo sapiens
gttggttttcttttttttttttcttttgagacggagtctgtctctgtcgcccaggctagagtgcagtggcgcgatctcggctcactgcaagctctgcctcccgggttcacgccattctcctgcctcagcctcctgagtagctgggactataggcgcccgccaccatgcccggctaatttttttgtatttttaatagagacggggtttcactgtgtttgccaggatggtctccatctcctgaccttgtgatcctcccgcctcggcctcccacaagtgctgggattacaggcgtgagccactgcacccggccagttgttggttttcttttctgtgccagattgagtgatatatggtggtactaagagcactggaataggagtcaaggactgaggtacagcatagcacctcatgtattacttggtatctccacttgtctctaacactgaagaggtataattggttgtttaaaaactgtgggtgtaaaacgctagtatcccatgaaatggaactgcagaatataagtggatgactctgaaactgcttttgaaacaagcatgagggctcagtttctccatctctcgtgggctccaccatcactgtctgacatcctgatctcctaaggcatctttcctccatcccagagctctgttgaaaatctcttgggctaaaaaccagtacagaccttctgatactcacgttctagcctttttagattgttgtgtgtgaagagtaagtcagctgtggatatttttctttcctattttgtgaggcatttggtatttactggaggctgcctgttttgttgcaaaccttgttccactgtgtactataggaggtctgctcagaaagcctagttagtagagcagtaccatttgctttggtcaattgtagcagcagtctgttttttttttttttttttttttttttgagacagagtcttgctgtgttgctcaggctggagtgcagtggtgtgatctttgctcactgcaacctccgcctcctgggttcaagcgattctcctgcct

SEQ ID NO: 27257 - DNA, 1036 bp, Homo sapiens
agtatctcattgtatagatgtaccacattttgcgtattcattcttcagttgatagacatttggactacttcctccttttggctgctgtgagtaatgctgctgtgaataaatatttgtgtgtaagtttctatgtggacatacagtttcattattcttgggtagataaaccttggagtaattgctgggttgggtggtaatttctgtttaacttttaaagaaatagctaagctgttttccaaagtggcttcaccatcttaaattcaagtttttgttttcgttgtatttgaggcagagctttactctcttgcccaggctggagtgcaatggcaagattatattatagctcactgcagcctcgatcttccaggctcaagcgatcctctcacctcagcctcccaggtagctgagagtacaggtgtgtgtcaccatgcctggctaagttttgatttttagtagagataaggtctggctatgtttcccaggctggtcttgaacttctgagctcaagcagtcctcctgccttggcctcccaaagtgctgggattgcaggtgtgagccaccaagcccagccaaggtttttgtgttttagtaaaatttctgctcttcctggcaatacttttttctgaaatttactttgatattgatatagtcactccagttcttttcagtgcttagtttttgcatggtatattttttccatccttttgtgttatactgtctgtttcattatatttgtagttggaccttgattttttttttttccctaattcttttacttgggatgcttggacctaatgtgtgtctagtttttcctaatgtgtcttttacttgggatgcttggaccatgtgtatttaattattgatatggttgggttaagtccaccatctagctatttgttatttatttatttttagagccaaggtcttgctgtgccacccaggctggggtgctagtggcatgatcatggctcactgaagcctctaacttctgggctcaagcagtcatctcactgcagtctcccgagaagctgggatt

SEQ ID NO: 27258 - DNA, 1811 bp, Homo sapiens
atctatatggggaaaaaaaaaaaagttagccaggtgtggtggcacatgcctgtagtcccagctactcaggaggctgaggtgggaggatcacttgagcccaggaggtcaaggctacagcgagccgagattgcaccactgcactccagccagagctactgagtgagaccctgtctcaaatctattccctaatatatttacctaattatttaatcacccactcttcactgttgcagccctttcttcatgcagatgtcctctttactttgcttggactccaacaccctgtgttgggttggctccactctcatcccatggatgagttcactcaagctctgaccagtcacatcagggtgttctcccatatacatgcccttctcaacccgcgtgggcttcaatactctgtcctttgtcattccctgtttgggcatttcactcatcttgatctccaactctcacgtcataccacactcagatacacacagataccttctgtgctccactcaggctctgactctctactcttgtctacctagcctcaggcctccacttttgtatggatgcctaccttgctgtgtaccatgtaatggaagggaagactagtttgggggaagagaagggcagctcttcccatttaaaaagattggtttgtctttttgttttaggtttatagaattgaaatatataggtgggcttggtggctcacgcatgtaatcccagcactttgggaggctgaggcaggtggatcactttggtttaggagtttgagattagcctggtcaacatggtgaaaccccatctctactaaaaatacagaaaaattagctgggtgtggtggagggtacctgtaattccagctactcagaaggctgaggcacaagaattgcttgaacctgggaggtggaggttgcagtgagctgagatcgtgccactgctctccaacctgggcaacagagctagactccgtctcggggggaaaaaaaagaattgaaatatatgtatacacacacatatacacactctggatacatactgtatcccgagtatgtgttttgcaaatattttctcccagtctgtggcctgccttttatttcttttcttttttttgagacagggtcttcctctgtcacccacgctagagtgcggtagcacagtcacaactcaccgcagcctcaacttcctgggctcaaagtgatcctcccacctcagtctcttgagtagctgggactacagacacgtgccaccactcctggcccattatgtctgttttttgtagagatgacgtctcactatgttgcctagggtggtctcaaactcctaggctcaagtgatcatcccacctcagcctcccaaagtgctggtgagccaccatgcctggcctggcctggcctgcctttgcatttttattaaagtgtcttttgattagaagtttttttgttttgaggaagtctgttttatccacattaaaacaatatgtttttaggaacttttgcctatctattaatagtgcacaaaaatattttttggctttatatttttggctcttaggtgtgcgatttatgtcaaattaatttttatttttgagagggagtctagctttgtcacccaggctggagtgcagtggcacaatcttggctcactgcaatctccacctcccaggttcaagcaattctcctacctcagcctcctgagtagctgggattataagcacttgccaccatgcctatttttctatttttagtagagatggggttttaccatgtttgccagcctggtcttgaactcctgacctcaggtgacctgcccgcttcagc

SEQ ID NO: 27259 - DNA, 1164 bp, Homo sapiens
acctcgtgatctacctgccttggccttccaaagtgctgggattataggcgtgagccaccatgcccagcctcagctatttttattttcgatgctattatacatggaatttgttttaaaaatttgtttcccagttttttgccctagcaggtatatagctgatttttcaataacttgtaattttgacataatttcagacacgattgtatttgctttataattctagctacatgttatttttttcatgtactaaagtgcagacataatgccccctaacctctaaatagttattaacaacaagtacattctctttcataaccacattgcaattatcaatgtcagaaaattaatgttgatatggtactgcttgctgtctaatgtgcatactttgagctgggcttggtggtatacacctatagtcttagctactcaggaggctgaggtgggaggatcgcttgagcctaggagttgaaggctgcagtatgccatgatcaaccctgtgaatagccactgtactccagcctgggcaacaatagtgagatccctatctttaaaaaaaaaactgcatattttactgaaattttacctattcttttctaatgccaattataaagcaaaattctggttgaggatctcatccttgatcacatggtacatttgtttgtcaaatctcattttctttaatctgaaaaagttctcacaaacattgtcttttatgacttaattttttttaaagtacagaccatttattttgtattaatagtaagttctccaatatggatttgtcttgatgcttttcattattaaagtaatgtttttgacaggaatacctcagcatgtcctcctcagtacattttatcaggagacacgatacctgtttgtctgatttctgataacgataacttcaaacacttggttaaggtggtgtctgccttatttctctcctataaatagtaccttgtagagagatacagtagtcccctttatctgctggggatgtttcaagaccagtgggtgcctgaaattacagatagtcccaagccctatatatactgtgttttttcctatgcatatgtacttttgataaattttattttattattcctttatttagtttttagaaatacggtcttacaccgttgcccagcctggtcctgaatgaacttc

SEQ ID NO: 27260 - DNA, 1048 bp, Homo sapiens
gatgtgttcaacgtatttcattcttctttctgaatgtttgttcctggagccatcttttttcctgctctccgcatggacagtttgtggtgtaaggtggccagccatcctggtttgcccacgattgaggggtttcccggggtgtaggactttcagtgctaaaactggaaactcccaggcaaactggggcctgttggctactcttttcacgtgcatgtggctgttttcctcggactttccttatatgtaccttgggaattctcttcactttctcctggtatgtcctgcctttcctagatctcacacaaatctcatttattgttactcctttagttgtgtgcgcattctctacacaatacatttatgtagagcagattgacgtagagttgcttctagagaacaggtgcctaggaggtaaattgaggccttacatgtctttattctgtgttccacactagattgttggttgggctcagaattccagaagatgttactcttactactacattcttcagagctgcttttgagaaacatgccattgtgatttctggatatcgtgtgttttttttgaccggaagattttaggatctgtttctctcctgtgttttgagatttcatgataatgctgtggaatgggtctttttcattcattatgctgagtgttttgccttattaaactcggaaactggagtcttctcatttggggaaaatttcttgtattatttctgtcttttggctttcttcctctggaccttctatttgttggatgtgggactctcttaatggagcttctttttcttttttttttttaatcagttctctaggagataatctgttgtttttggcctctcatttttaatttctagcagattgttcatgttctttaatgttgctttatttttttaaaaaaatattctggctgagctgtagtacgtgtctgtggtcccgactactggggaggccaaggtgggagaattgcttacgaccaggagtttgagtccagcctgggcaacatagcaacaccccatatcttattttaaaaaaagcactc

SEQ ID NO: 27261 - DNA, 1028 bp, Homo sapiens
agttcatgccctttgcagggacgtggatgaagctggaaaccatcatcctcagcaaactaacacaggaacagaaaaccaaacaccccatgttctcactcataaatgggagtgaacagtgagaacccatggacacagggagggaaacatcacacaccggggcctgttggggggtggggggaaaggggagggagagcattaggaaaaatacctaatgcatgcggggcttaaaacctagatgatgggttaataggtgcagcaaaccaccatggcacatgtatgcttatgtaacaaacctgcacattctgcacatgtatcccagaacttaaagtaaaatttaaaaaaaaaaaaacttcaaaaaaaaaaaagtgctcaacatctttagacattaggcaaattaaaatgaaaatcattgaaatctagcactctgaattaaaattaaaaccacaatgaggtaccattatactcccactagaatggctaaaataaaactgccagcttcaaataatggtgaggatttggatcaactggaactctcctcaagtgctgttgggagtataattttttttttaataaagttagctttcatccatcttatgactcggcatttctactcctagatagttattcaggagaaatgaaaacgtctccaaaaatttacaagaatgttcataatagctttattcataatagctagaacctggaaataacccaaatgtccatcaagagagaatatacaaatggttgtatatgagaatattagtctgtaataacaaataatgaactactgatgcatgcaacaatgtagatgaatagcataaacaggctgagtgaaagaagccagatacaaaagaatatatatgtatgagtccatttacatgaagaccaagaacaggcaaaagtacgttatggagatagaagtcagaacaatgattgccttcgtggggtgagaggggtggtttcttttcttttttttttttttttttttgagacggagtctggctctgtcacccaggctggagtgcagtggc

SEQ ID NO: 27262 - DNA, 1028 bp, Homo sapiens
cctgttgcccaggctggagtgcaatggcatgatcttggctcactgcagcctgcatgtcccgggttcaagcgatcctcctgccacaacctcccgagtagctgggaatacaggcatgtacaccacacccaactaatttttgtatttaagtagagtcagggtttcattatgttggtcaggctggtctcgaactctggacctcaagtgatctgcctggcttggcctcccaaaatgctggaattacaggcttgagccactgcacctggccaagcccaggactttgagaccagcctgggcaacagaccaagaccctgtctgtacaataaaaattatgcagtattagaatagcaaatcttactcttaaaagttttgttttccttgtctttttactgaaaatgcatggctttagaaacttctgggtagtttgaattgcagacaaccaggccctattcctgtttgtttaactaatgagatttgtaaacagtacttggtttccccagactctaggacctagaggaaggaaattttgatttagctcttggtaaagcatttaacacctaatttttctttttcattgttattttcttgatcacagaaaacaatacatgttaatagtagaaaatacccacaattgaaaagaatataaagcacttactaaaactctaccacctaggctaggtacggtggctcacacctgtaatcccagtactttgggaggctgaggtgggtggatcacctgaggtcaggatttcaagaccatcctggccaacatggtgaaaccccatatctactaaaactacaaaaattagctgggcgtggtggcagccacctgtaatcccagctgctcgggaggctgaggcaggaaaatcgcttgaacccaggaggaggaggttgcagtgagccgagatcatgccgctgcactccatcctgggtgacagagcgagactcttgtctcaaaaaacaaacaaaaaaactgccacctagagatggtggtggccaacagcttagtaagaatttctcttgcatttttc

SEQ ID NO: 27263 - DNA, 1047 bp, Homo sapiens
cctaccccccactgccccttcccagtcacagccccattcttccagctgaaggtaacttctgtcttgactttatgaaagttattttcttgctttcctttagattacctacccgtctttgcattcctaatgctgtagtttagttgagcttattttgaacttttcacaaacggaatcatcaactatgcattattttgtatctggctttcattcactattttgtttttaatattcatctatgtcgttagtagctatagttcattcattttttgttgctgtataatcatccatttattgaatgtactacaatttgattctgcctttggcagccactttgattgtttataatccagatttcaaatgctgcatcatgaacatgtgggttgtgatttgtgtagatgtgcatgtacttctctaaggaatccaagcctaggagggacgttgctgggtcagaggatgtttgtatcttcaactgtaccagataaggccaaattgtattctcaaatgcttggatctgttttcagtgtacttgttctactcctaattaacactacttgatattgtcaaactttaattgtagccattctgatggatgtggtagtatctcattgcggttttaatttgcattattttgcattttccttattgttagtgagattaaatacccttttatatgttttggctacttcagtatcctcttgtgcagtgcctaattcacatcttttatttttcttctgagttgccttttgcccattgatttatatttgttccccctctctccccgcccccaagaaggagtctggctctgtcacccaggctggagtacagtggcacaatcttggctcactaacctctgcctccttcgttcaagtgattctcctgcctcagcctcccaagtagctgggactgcaggtgtgcgccaccacgcccagctaatttttgtatttttagtagagacagggtttcaccatgttgaccaggcttgtcttgaacccctgacctcaagtgatccatccgccttggcctcccaaagtactgggattacaggtg

SEQ ID NO: 27264 - DNA, 1051 bp, Homo sapiens
tgggagaaatgagcttgtctgagagccatgggcgcggcttggtgatacttttgaccagtggaatgctgtgccttcagggttctcgggctgccacgccgatggcgagagcggcagcccgtccagcagcagcagcggctctctggccctgggcagcgctgctattcgtggccaggccgaggtcacccaggaccctgccccgctcctgagaggcttccggaagccagccacaggtgagtggcgtggcacttatttctctgcctgtaaagggggcccctgcaggcctagtgagaagatgatgtcttctattccaattcctttaccagtttatttttacttcttgggtggccctctattttttgtttatttttactttgtaatttgcttatttcatttgtagctctctgctaaactgtgagaactcctttcaggcagagatgatgccatactgtttctcgtatgtccctgtaggcctagtctatgcctgccttgtactgcatagtaagtgtttgagtgagtgaaaactgcttctgagcttctcagtgaagaattccaacaccccttttctctcttcggtagcatgttgccacatttgttcccaacatctgtagtctgtatcagacgctcccttttttacaacctagtcagtatgttgagtggaagcatgtgttgaattttggggatgcaaacaaattcagtagtgctattatctatacctcccacccctcaccccaccccacccccattagggttatttgcaatattagtatgctctttgctatttcaggatttaattcttaatgacccacatgctggttttttttgtagatgaaaccattaagaagacaagcttttgcttctgagaattagagtaaacctttgcccatgtgagaactaggtttgctgtcttgctgcttttccagctcatcagcagtgctcaatctaaggtctcacaggtctctagtcctagtgagtttttcagataaaagtaacatttgctgaggcttctgtgagaggtattagcatctcagttggctttgaacagtccttagta

SEQ ID NO: 27265 - DNA, 1989 bp, Homo sapiens
agcctctggagccttcttctctcccctcccaactcagcatcaagcaggcattttatgggaagctttctaaactccaactgagttccaccagctttaattattcctctagctctcccacctttcccaaaggccttgctggaagtgtggtgcagctgagccacaaagcaaactttggtgcgagccacagtgcatcactttccttgcaaatgttcactgacagcagcacggtggaaagcatctcgctccagtgtgcgtgcagcctgaaagccatgatcatgtgccaaggctgcggtgcgttctgtcacgatgactgtattggaccctcaaagctctgtgtattgtgccttgtggtgagataataaattatggccatgggaaacattgtatatttagtgtgtgtattttgataatgattgatcttaaatctgtatacagaatatcattgatataatactctttaggcaggagcactcttgccttcccccaaaatttacactgctaaagccctctgtcacttggcgacccttctggtcttgctggaggggtttcctgggtataacccattgggctgcccaaggccagccagcctgagctctcctgcaagacagagcctgatgtggcacggagtggggttgcggggggtggggggactgcctgactcccagagggacttgaaactgaagcaagaaggttgcattctccaccaagggagttaacctacctgaactaagtagaaatgccagtcttccactaccccctccctgccatcttttcttctgctactttggggagttgatggccaggaaagaagccagcacagggttaaagtaactcctggcattgcccaccagggggctggtgcacctgctgacctcagggtcacagttgagtcatttgccagttgacggagcaagtttgaccttggttctgttgctgaagcaaatttggaacttttctgtctcagtgtgatccactaacccacaggatcatttggaaccttgaatagctctgcttggacaatggggttggggaatagggttgtctttcctatgaaaatgccatctgtagaccttgtgagtcagccgtccagatgtttgcaggtgaattcctctgcttgacatcctccctgtcactttggaccctatgggagtgggcatctccacgcacctgtgtatgtgaaagtcattttacatttcaaagcagtgtgtgtttcttatttttatatttttaactctttattcttggatgtataaagtgaactttttggcttctgtaagtatgctctatgcacctctaatgttttatcatgtatttatatgttgtacacagtactggctgattctgtaaatggatgtattgtacagagaacatgaacgtctcttcctaattttacatcttcagcatcattgcattaaagtggtgtaatctccttctctacatctgttgtcagagccactgagtgctgtgctgctcgacgtgagggtgaaatgattgacttgtgacctgccaggttgcccgatgccctgttgggtcaccggctggacctgctgcagcctgcagagccacagtcagcctgcccacatgccaccgagcaaacgcatcttgcttttcacatctctcctcctacagccttaatggctgcttgctgccatatgtgacaaatcaccaccaccagtgttaagtgcttctggattcatgggtgagttccctgggcagcccccaggaaggccttccagatctggctccagggtcaccacctgtcacagcaatacctgggaccatgctctcctgggactgtgaggctccttttgacgtacttttgacatcaggcaggtttgggaagaaacaaagccatgcctgctcctgcctctctcccaacatgtttccagcaagtagatgcccctgtgtgtgttttcccttgccttgtttcctgccttatatcttgtatttcgacttattacagagttgagggttcttgcttaatttaga

SEQ ID NO: 27266 - DNA, 1064 bp, Homo sapiens
ctcaaaaaaaataaataaataaaaaattaatagaggaacacaaaaatgtcttctattcaactttgttaattaaatgacgggttggctgggtgctctacaaaaagaataaaaaactagttgggcgttggtggcacgtgcctatagtcccgctactccagaggctgaggtgggaggatcacttgagcctgggaggcagaagttgcagtgagctgagattgtgccactgcactccagcctgggcgacagtgagaccctgtttcgaaaagaaaagaaaagaaatgataggttaaatgtatttagagatgtaaaaagcccagggagacagacgtcttagggaaaaaaatgttttttaatctagatcaaggatggatcttggaaattgcctcctgaagaggagggtatatctttgtgaaaaatcagaaaatgtcacttttgttattttcttttctgtattttaggcattcatttttgtttctagtggtcattttattgtcatgatgattaccaataaagaacaggagttttaaaattttgtagaaacactccttttctccttgttataggcttctgggttgcaagtatgttgtagaatatatggggtgaaaaccacagtcttgttacaggttttagaaattgacttcacatgaagttagtgaagcttttggtttttgtaggtctacttcacaattttaaaaattgtatttggtttaagtgggtctgggaagaagttcaccctgcttctttaattgtatttttctgttgccgttgttctttcaggggctgcgtattgtcagtttatggacatgctgttccctggctccattgccttgaagaaagtgaaattccaagctaagctagaacacgagtacatccagaacttcaaaatactacaagcaggttttaagagaatgggtgttgacaaagtaagtaaacgttatcttttattgtggttaatgttccttaatgatcgttactaaggaggtagatgctagcttatgactttggacattttcttttttttcttaatttatctagttaacttttctcagttaacacagaattta

SEQ ID NO: 27267 - DNA, 1052 bp, Homo sapiens
ctggagtgcagtggcgcgatctttgctcactgcaagctccgcctcctgggttcacgccattctcctgcttcggcctccccagtagctgggactacaggcacccgccaccacgcctggctaagtttttgtatttttagtagagacgaggtttcaccgtgttagccaggatggtctcgatcttctggccttgtgatccatctgcctcagcctcctaaagtgctagcattacaggcgtgagccacagtgcccagccatagctaacattttaaaagtgcttatgtcatgcacagtgtaagcacttaatttcactttcgcagcaaccctgtgaggttttacacataaggataataaggcttggagaggttaaataacttgagctaggatttgaacccaggtatacctgtctccagaacctagatcagtcagtccctgctgaatggggaattgaggaagaggttatttgatttatctaaggtatacagatgtttcttttccttgcacccacctttggaaactgtaagtactcaccagataatgactctgggcaaattgctgctaagcgttgatgagagtaccaaggcatgggagatctgtcctagacctagacaggtttgatacacttggagaagatggacttggtgcctgcctgtgttcaagtcccagatgagggttacggaaggcaagaaccacaactcttatgggggagagtgtgattggggtctgaggaggcttccttccctgagagggtgaccagaattagctgctttggatggtcggtgttgtagaacttcaacagtcgaggttgggagggattgtggtcttgaagaggcttataactctgttgcatgtccatcggtgctggggaacattgagaggctaagtttgcagaggctgaaggtcactaaccaggtgctttgttgatcctggaaggctgggatcaaatgctcatacccagctggttcaaccctgacatagaagtactgtgtttggcctgcacagagttttatttatttatttatttatttattaaatataaaggatttgtctccagg

SEQ ID NO: 27268 - DNA, 1438 bp, Homo sapiens
aataagtttgagttaggagcttttaccttgtagcagagcagtattaacacctagttggttcacctggaaaacagagaggctgaccgtggggctcaccatgcggatgcgggtcacactgaatgctggagagatgttatgtaatatgctgaggtggcgacctcagtggagaaatgtaaagactgaattgaattttaagctaatgtgaaatcagagaatgttgtaataagtaaatgccttaagagtatttaaaatatgcttccacatttcaaaatataaaatgtaacatgacaagagattttgcgtttgacattgtgtctgggaaggaagggccagaccttggaacctttggaacctgctgtcaacaggtcttacagggctgcttgaaccctcataggcctaggctttggtctaaaaggaacatttaaaaagttgccctgtaaagttatttggtgtcattgaccaattgcatcccagctaaaaagcaagaggcatcgttgcctggataatagaggatgtgtttcagccctgagatgttacagttgaagagcttggttttcattgagcatttctctatttttccagttatccccgaaatttctatgtattatattttttggggaagtgaggtgtgcccagttttttaatctaacaactacttttggggacttgcccacatctctgggatttgaatggggattgtatcccattttactgtcttttaggtttacatttaccacgtttctcttctctgctccccttgcccactggggactcctctttggctccttgaagtttgctgcttagagttggaagtgcagcaggcaggtgatcatgctgcaagttctttctggacctctggcaaagggagtggtcagtgaaggccatcgttaccttgggatctgccaggctggggtgttttcggtatctgctgttcacagctctccactgtaatccgaatactttgccagtgcactaatctctttggagataaaattcattagtgtgttactaaatgttaattttcttttgcggaaaatacagtaccgtgtctgaattaattattaatatttaaaatacttcattccttaactctccctcatttgctttgcccacagcctattcagttcctttgtttggcaggattctgcaaaatgtgtctcacccactactgagattgttcagcccctgatgtatttgtattgatttgtttctggtggtagcttgtcctgaaatgtgtgtagaaagcaagtattttatgataaaaatgttgtgtagtgcatgctctgtgtggaattcagaggaaaacccagattcagtgattaacaatgccaaaaaatgcaagtaactagccattgttcaaatgacagtggtgctatttctcttttgtggccttttagacttttgttgccctaaaattccattttattgggaacccatt

SEQ ID NO: 27269 - DNA, 2099 bp, Homo sapiens
ctaattgttattcttacttccatttagccattccagtatttatctagtgttcctccttgatgtgtgagatccttgggggaggggtggcttctctgaataagaacaataaaattttaattgtttttcattattgtaattataatagccaacatttttttgagcaccagacattttgcattctattcacttaatatttattaaatcatatagtaagtttaaaaataccattccaggccctgggaatacaataaacaagatagaccgaactggggttttgagtttagttaggagagggagagacatagtaaatgaggaaacagataaacatgttttgcatgtttttttaattgtttaatcttgatgacatcctaagtaagacattatttgaggatgcccattttgcagaggatgaaactgagtaacagaaggtactctgagtactagtctcagagctgatgtccttaaacacgtgaaagggaggctttacgcttctttttttttgcacccattaaatgttggattgaagatagaaaaagtagatacacccagcttgcagttactgcttttgatggtttgatccattcctcatgaaatttccaactaaagaggcggatagtgattactcttttaggcttgcaaaggtacagcatctctgtaaaatgaaaggcttttttttttttgagacggaatcttgctctgtcgcccagactggagtgcaggggtgtgatcttggctcactgcaacctccgtctcctgggttcaagctattctcctgtctcagcctccggagtagctgggactacaggcatatgccaccacgctcggccaattattttattttattttattattttttttgagacggagttttgttcttgttgcccaggctggagtgcagtagtacaatatcggctcactgcaacctccccccgccccaggttcaagcgattctcctgcatcagcctccagagtagctgcgattacaggcgcctgccaccacacctgactaattttttgcatttttagtagagacggttttaccatgttggccaggctggtcgtgaactcctgaactcaggggatccatctgcctcagcctctcaaagtgctgggattagaggcatgagccactgcgcccggccttaatttttatatttttagtagagacagggtttcaccatattggtcaggctggtctcgaacccctgacctcaggtaattcacccacctcagcctcccaaagtgctgggattacgagcgtgagtcaccaagcctgaccagaaaggactttttatttgaaaaaattggggggctcttctgcctatgaagtagtcttcctttgtttctttacttccataataaacttgctttcacttaaaaaaaaaagattgtgtccaaatttcttttgtgtagtatttagtttaaaatatgcccaaaagcacaacttttgcttctgttacgtaactacatttttgttttcttttttcctttttttgagacagtctctctctgtcacccagactggagtgcagtggcgtcatcatggcccacagcagcctcaacctcctgggttcaagtgattctcctgcctcagccacttgagtagctgggactccaggcgccaccacacccagctaatttttttattttttgtagagatggggtcttgctttgttgcccatgctagtccggaagtcctgggcttgagtaatcctccttcctcagccatccaaattgctgggattaaagtcatgagccactttgcctggccttttttagtgtttctaagagaattctgtattacattcctagacagtacacttggtgtagtactcagcctcctgaggagctgggattacaggtgctcaccaccatgcctggctaatttttttttgtattttttgtagagacggggtttaaccatgttttggctgggctcctgacctcaagtgatctgcccgcctcagcctcccaaagttctgggattacaagtgtgagcctctgcacccgcccttgattgaagttttggttttttttttttttttttttttttgagacggagtttcactcttgttgctcaggctggcgtgcaatggcat

SEQ ID NO: 27270 - DNA, 1010 bp, Homo sapiens
tacaggcatgcaccaccacacccagctaattttgtatttttagtggagatggggtttcaccatgttggtcaggctggtctcaaactcctgacctcaggtgatccgcccgtctcagcctcccaaagtgttgggattacaggcatgagccaccacgcctgtcctaggtatgttttataacatacaaaaatagacattttacagaaggataaggtaaaataaatggaagtagcagttccaacgttgtctttctacacccagtggtgaattttaacaatacctcctggggtggagatcattgatcttgtagtagtaccttctcaatccattaggtctattgctctgatgaaatctagtttattcggtagaagtaaaatgtaatggctgggtatggtggctcgcgcctgtaatcccaccatttggaaggtcgaggtgggcggatcatctgaggtcaggagttttgagaccagcatggccaacatggtgaaaccccatctctactaaaaatacaaaaagaagctggctgtggtagcgggggcctgtagtaccagctgaggcaggagaattgcttgaagccaggaggcagaggtggccgtgagctgagatcccaccattgcactccagcctgggcaacaagagggaaactctatctcaaaaaaaaaaaaaaaaaaaggccgggcacgatggctcatccctgtaatcccagcactttgggaggctgaggtgggcggatcacgaggtcaggagttcaagaccagcctggccaacattgtgaaaccccgtccctaccaaaaaacgtacaaaaaaaatcagctgggcgtggtggcgggttcctgtagtcccagctacttgggaggctgaggcaggagaattgcttgaaagaaactgcggaggttgcagtgtgctgagatcgtgccactgcactccagcctgggcaacacagcaagactctgtctcaaaaaaagaaaaaaatgtaatggttaagatttaaattctaaagttttgaaatttaa

SEQ ID NO: 27271 - DNA, 1878 bp, Homo sapiens
tgtatatcctcttcatctgtgtttaggattttgaaatgcatttttgttggattattgccccactagaaaaaacagttcagatctgttgcagtttcacatttgaaactactttcattctggaatccttatccttagaccttcctaataatttctgtggtcacactggacctgatctcttcctgtgctaaacaaaagcacacaatcacaaaactgtgtaggcataaatgagaggcatatgggagtggtgtaaaaggaactggaagagtcttaatatgcctgggtgggcgagctaaactaatagctcccagcagtttttctgaatcagacattgtggagccaggagtctagcatttggaattccactgcctgtgcaaagggtctgtcttttatcctccaaaccaccatttgttaactggttaatgacccagtggacccgttgacaacaaaggagggaaagctggtaaagatcaagttaaaaggaaaaagaaaagttcaaaggtaggaaagtaagaacaagaagggtttaatcatatcttcacctactctttattttttaacaatttattgtggggaattttgaacatacacaaagtagatggagtaatgtagtgacctcccatgaacctatcccctcagccccaataagctgcagttaccagacttaatgaaaggaaaccagaactctggtgaggcttaggtttggtttccagacctctctaggccttgtcacctttggccttatcccatcaaacacctcttttccccatttttagctcctggtgtgcacagaacactgcgtttaggctagtgatgagtatgacagtacttaacctctaatagattaaggaaataactgttattgttcaagtatggttttgagagcagaaaagtgtaattctgtcaaaggtacacaacgaagagggaacttaggaaggcattattgagaagttgacatttgagtttacagcagaaacgttgggcaaggggtagggaatgatctctgagatagcagcatacccgatctactagctctttttcaccaggctatttagagtttgacatttatgttacatttataacaaggtacatttcaagtgtagctttcctttttgctttaagcaactgagacatgtaagtcaatttcagttattttctgctaaactgtgtgtctctttgaatgttcactatcaaggtgaattatacaaggtgtgttagatccttttaacatttcagagcaaccaaaaccaagtttgaatgtctcatttaacactgtgagaggatgtatcttgtctgcatcttgtgtttcagttgtatttatcggtaaaataagccaggggagtattctgacttgcagtttaaaagctgacaggcctaggggaatgttccacaaaatagtatattttgtatatggcatggtattatagataaatgagctattgtgctgcctggcactgtcttctcccttgtgctgtcttctgctgtttctcaaggagtgattcctctctgtgttttggaaccgtgtttctcactgcctacagatgatgtccatttggcttatttcactgtcatctcatacacagctgtttcaaactgcatggaatcctcagagaactacacgccccttcctgaacaaacagtgcttcttcctgcattttcttcttaaacttttatcacttttccccccttacatatacttttgttttattctttcactaaaaaaaaaatgaggtttaattgacttacaataaactacacatatgtaaagtgtacagtttgctcaggtttggcaggtatacctgtgaaatgatcactgcaatcaagatagtcaacatatcattcactccataaagtatccttgtgcccattggtaatctctcc

SEQ ID NO: 27272 - DNA, 1047 bp, Homo sapiens
cttcctgtcaataattggcatttctgtttaccattgcaacttattctagcctaggtcccacttaaaattatagttggggagagagcatcagagttgaggttcggaaatttggtttgaattcccattttgctgcttagtgtctgtataatcttgggcaagttttttaactgttaggcctgtttgcttatctgtaggaagagagtaacacaagaactttacaatatgtcatgtgaattgaaagagagaacatagaaatcatagccatgtgcctgcaacacagtgtgggtagtctgtaaatatttagtctggcactagtgtgagcaccaagtgaaggaatgaatgcttgtttgcatatcctatttctgcactgttgcttatgctgttctccaatctcttttcaggccctctgcatcttcctcatgtttcgaggtcaatgaagcccatctttattactcatttcctatcattgtttacatccctgttgagttgatatcttactaaacttagggactgggagtatatctttggaaaatatttgttttcctcaaaatgcctaccataaatgtattataggtccctaaaataattggttgattgtatagttaatttggaagcagtgcatcaaaatactttgtagggtgacagcgaagtaaggttttttttgttttttgtgttttttttttttttggtagaagacagtctttgtctgtcactcaggctggagtgcaatggcatgatcacagcttacttcagcctcaaactcctaggctcaagcaatcctcccacctcagcatcctgagtagctgggactataggtgcgtaccaccatgcctggataatttttttttttaatttttatttattgtagagatgcagtcttgctatattggctgggctggtttcccaaaggcctcctcaagtgctgggattattggtgtgagccaccatgtctggcctgtttgttttttggtcagatttaggttttaggagtgaagtaagttgaattttacatgctacagtggaagtggcagaaatgtttttgtttga

SEQ ID NO: 27273 - DNA, 1050 bp, Homo sapiens
aggtgtgagtcacttctcctggcctgttccatcaacttttaaaaatcttctatcactattaagtttaattcttgatttttttttcctttttctcttcttgccctccctgccctttttttttctgcttacgtaaaattcttgattttaaatgatggtccacagctgctgtagtctgacttgtgtcccataagggctgatgactcaaacatcagaattgttgttcagttttaattttcaagatcacttttgagtttgattgcttccctggtttttttttttttttaagttgacaaaattttttccaagctttgtaatgctcagtgtgtgaagcaaatacacaaccatttatgaagtctttaataactaataaaactggaatctacacattgtcatataaattggaaaattagaatatcttgtttgtggagagcattttcaggttatttgacttaacaatgatgttatgagactacatggaagaataattggatcttgagctgtttaaacatgtgctaaatagaaagaaacaaagcttcagaggacctcaggtgacacctggtcctgtcttctgatttttgacagatgagagttttagggatttagataattggcttagtaattgaatcagtgaaacagctactccaggctctttctgctgaattgtaaggggaaatcagtgtctcttgaaatgtttgctgtaaaaaaaaggaagacactattttctgatcagttgtacatttcaaattctaaacatttttttgagcattgttaaacactgtcaagccgtgtggatgtgaaggtgaataagacagaatagtgaataagatagcctttgttgtcacaggagtttgcaagattatctaacatttaggaagtgagacaaatgggcttatgctgtcccctgcaccccagcaaatgtgtgaaatgtccccttgcttgtcactccacttcatcgtccttctgcacgtttaatgctgtccatacatgctgacttcctcctgcttctttctgctagtcataccttttaccatctcagggttcctatattat

SEQ ID NO: 27274 - DNA, 1046 bp, Homo sapiens
cctcataaattttagaataatatctgtaaagatggtggtagggtattaatgttaataattttggtaattatactgggcttataagtaaacatcctaactcttagcatttacacactgaaatatttaagcataagggagtgtaatgtttccagcttgctctcaagtggtttagataaaaatataggtagatagagaaaaagaaagtgatttttataaatggatgaattaattggtgaatttagctaaatgatattaacagaattatttgaatagtcttgcaaataaaaatgtttctaaatttgaataaaagaaagtactgagcccattaacaaaaaaatatgtatatgaaattaagtgttaatttaggactctctgaagaagtaaattgagctgtgtgctgaataacaataatgaaatagtcggtggatgtcagtgataagaatattccagtgcaaaggctcaatgatgggaatgaactcagtatgttcaaagaatagaaaaatggccgatgtagatataatgtagtggacgaagagaagagggtagagagacaggagacagaagttcatgtagagcttttaaagccagcataaagctttgtaatccaatgaatttggatttcattctgagtgatgggtaaccattgaatagttggggcagtaatgtgatctgatttatattgtataaagatcattcttcctgtcatatagagaaagaattttatagggcatggctggaagcagcaagaccagaagtgaaaagtgacaagtttggcccagctttatggcagtgaatatagtagaggacagatgatttgttatattttagaggaagttaagttttctgaacttgttgatagattgaatgttgagagggagaggggtgttttcaaataattgtcaaatctgtcttccttattattcatccattcatttgaatatttaggtgcctactgtgtgctaggcattattctaggtattggagttacatcaatgagtaaagcaaagcccctgccctcatggagattaaattctagtagaagagac

SEQ ID NO: 27275 - DNA, 1032 bp, Homo sapiens
agagtctacgggaaacccaaaataaatgtcagcctttagagcccaccaatctgtcacagaaggcgttttctacttgactttaaagaaaggtggtactcaattgtggatttagggaaactcaggtgattatgaaaagtaaatgagaaaatatatgaagcccctggcatgttttggtgggtggcgcaggaagggggtttttttgttttggatagacaggatctcactgtgttgcccaggctggccttggactcctggcctcaagcaatcctcctgcctcaccctcccaaagcaccaggattacaggcctgagccactgtgcccagcctcgtacttggcgtgttcaaaaaatgttaattcttcgtggagaatgagaatatttgtgattttgttctgtctttaactctttacatatatgtgtgctaggtgttggtcagagtgtttggttgtcaaattcagcctggctggatgtatgtactaggcactcttgtgtcatcactttcatttctcacagtagccctgaaagtgtttaccttaccttccctcctcctgtccccagcccaccattcaggaaaataccactcaatccaccatggcctggtggcctcctacaaaaggttttaccataccacgctgggttgtttccccttgcctttcagagtctgaagcagcagcaatccagagtacatccagcaaacctcagttattcccctcaaaatgttccagcacattcacccagtaactgagaaagtgccctatccaaaggcatagctgagtgacaggccatctgtgataagactcttcccacgcactctgagttcccaaatgttcaccacgaagaacaagtctcttacgacagacctagtatgttccattgaaggcagctattagtctctaaaagactgtaaggaaaacttgaggcaaagccagaattaatacagtatgtacagacagtgggagttaaaggctcacctttccccaccccacccacagcagcagctctggagccaaccatggaattacaaccattaggtg

SEQ ID NO: 27276 - DNA, 1049 bp, Homo sapiens
gatatatcttcattaagttctgctcattgctggagtgagggtggttttctcatgtttaataaagtctctctcaaacatgagcatatgtgaagacactgtaataagtttatagtcttatgagacaaagaacgtggctctttggttctctggaatcaagatctcaggttgaaaagcacagtgtcttaatggcgcatgtgccagcagtatctcttatcccagaggcccagggatagaaaactcgaaatccacccagggaagtgagcagtgggaatttccctcagtgacgcttaagtttcttgtttggaaaaatggttggctagattgagtttggtttacttcctaagacagatggagtaccagaggccctatgtgttggctatccaaacacactggttcctttaattcaaatgacaaatccttattttgccccatttggcagggagattagatatttttaattgcctgccagagtaggtttataatgtgatttgtaactcaagatagattttgtttggaagtttaactaaacgtgaagacctgtgagcaggactgttttgcttggagaaaccttgagttgtccagagttgggtttgagtgtggagcgaggtcttggagagcatcctatgaagatgtgtgcgagccagccatctccgaggcgtaaagccaggacctaatttgtttacagtggtccagagccttgacatgaagccagagcccaccaggaggaggggcagagctcttggggccttgaggaatttcttatgaaaacttagtcttcttgctcagaattattttgggttgtgccactgtctttaagagtgtgagagagaggatattagaaaacaactttagttggtcattttgcagatggatgattatatttagaaggggaaaatctgagcatagcaatgggaaactacagatctagctgtttgtagtactggcctgtttttaagctgtttggctcaagtcagcaatcatttattacgtttcttctaggtggaaggtgtggtgatgtgggcaaaagattcccagtttgaatgcagctt

SEQ ID NO: 27277 - DNA, 1156 bp, Homo sapiens
gattatggtttttagccccattttttccctttttttagaggaagaaactaaggctcaaaacaattaaattgtgaacctagaggcagagtcaaggctagagcccttcttgaggctccaagtctagtgcgtttctgccactctgtgcatccaccctggctccttcctgttaatgctgcatttcagattccccccagcttcagcaaggctgtgtcagtagtgggtgtggtcaggttgaggagcacaaggttggggttggggtgtgggggtcccaagagtgactggaccgtgttatacacagtgggactagtgccaaggagacgaccaagaggagactgttattacattctggaatggcttgacagcctttattcacttgtcttcattcattcaattcgctacatcaacattgtgcatttccctgccaggtttctatcttttcccgcaataagctcattttctctgtgacctctagagtagggtttctcaaccttgactgctgacattttggactggataatttttttgttgtgtgggactgtcttgtgtattgtaggatgttcagcagaagctttggcctctaccttctagatgttcttaatacctccccatccagttgtgacaacaaaaatgtctccagatattgctgaatgtccccaaaagggtggggggagggtggcagaagctcctaggttgagagccatggctctagggcttgtcaagccactgcaaatagagctctagagtgttagaggctggtctaaggataagggggtcataaagagcagggctgggtggagcctgctaggtacttttcattctacccttttgttgttctgctggggaaaccaaggtctagagacttagcccaaggccacctggctctgctttctagaggtctggctagggctgggaacttgacctgaatccctcccactcaggactctgatcaacccatagtccctagtcttttcaggttgaagaaaccttttctaatttcaaaaaatatcaagaatgggtgtatgataatagttgtacttttaatacccgttaattgagaagatcagatattaattcccttcaaccgatattcactatatacccaccgtctttcttccctaggattgtgtctgcgtaaatggtagatggtcacatggta

SEQ ID NO: 27278 - DNA, 1057 bp, Homo sapiens
catcaggaatctggaaaagttaaggcaaaacattaagaaccagtatatatttaatatttatgaaaacattgggttggttacagatagaagcaaatttctgtggtcagaaataaggttggcatggaggaagttttactaagtgtaatagtattcaagaagaatggcgttttacttgtggaagcactctaatacctctgagcctttagtttgccctgttacacctcaccaccggagccatgcatttgtaagatataggaggtggttcaagtgctgtgaatatttgtctacatctgtttctgcagcccagatgctgaccccatgtctattttcaaggtaactttactcatgaagcatgtttaggtgtttctgtgggggaaaattaatcatgtagcctttctctttggagttctaaactagttgagaaacacagacagcagatggatctagataagaaaaatcaacatcctggagagttcactgcgaagaggggaagaggctgtgtgaaccctgcaggcaggaaggggagtcctggggggataccccgggactgtccctcatactgtttgctcaggtcctatccccagtatgagagagcacaccttacagccaggtgcttgcgggaagtccctgttttatgggccaggaggaatgcagtggaaagatgctgccaaatgattgttctagcctgtgtttcagtaagacgtcaattctgtgggtcagaggtgcacgggagataaaatatgggtggatcccccatgaagaaccctggatagaatacatgaaaaccttgtaagacaaatgaaattgcaggttcaatttagtagatactaagcacttactgtgtatcagtcattgtgctggattgctgatctgcaaagatgaataatatcagcattatttcattcggggtggggatgggctcttggtttcctccctggtatatttgcgtatttgcttccagatcatttatttgggggattttagaagtgggaggtggaggtcagaggaagttagggttggcatacaaggagtcactgccagtggaaaatatattgga

SEQ ID NO: 27279 - DNA, 1062 bp, Homo sapiens
tagatttgtgtctcctgaaggttaggtcctttctgctggacctttgtgctttctgacccctgctgtataaccgagaaaacagcgtgcagctcttacctttggctctcaacaccagggttttcatgttttcacactggagttcgatggatgaatcgagttcatttcaaatcagcaaacatttctgagcattcactcgtgtgcccagctctgagccaaataaataggaaggcaaagatatgatcccctctcccagatgctcacagtctagtgcaggacaccagaggtctacatcagtgatgtgcagcagtgatacgttccccagtagaagctgctttaggatatttgaatcacagggtctggaacctggaattcacctccccgcagaccttctcagaggggtgtgtgtctccatgagcattaattaggtaggaggcatgaccgcgggggctgggattcccagggagggcgctcactttgtgtttccttttactaggatgagctcatggcggaattagaagaactagaacaggaggaactagacaagaatttgctggaaatcagtggacccgaaacagtccctctaccaaatgttccctctatagccctaccatcaaaacccggtgagtgcttctagagtcatggcacaccgtgaggtcatgtggcaggtgatcttgtggtcggttggctttggtttgtggtcggttggctttggtttgtggtcggttggctttggtctgtgtcctgagcttgcccaagattgagaaccagacaggatccattgtagtggccacagaggccatgtcacctggctttttctggtttctctctggaacagtgtttcttaatcttgacgctgtggacatggccagatacctctctgggccgagagatggagggtgggggcggggttgtccggtgcactgtggatgttcagcaccatccctggcctctgctagatgccagtagcaaccgccatgagttatgtcaaccaaaaatgtcttcagacatggccaaatgtcccttggtaggggttgggaggatcacccccagttgagagcctct

SEQ ID NO: 27280 - DNA, 1098 bp, Homo sapiens
tgtgaccctttgtagaggcccctccctgaccattttatctaaaatagacttcacccttaccttttgtcattctttatttccttaccttgctttgcttcccttccctccctctccctttccctccccttccctccccttcctccccccctttttttgagatggattctcactcttgtcacccaggctgtagtgcagtggcacgatctcgctcactggaacctccgcctcccaggttcaagcgattctcctgcttcagcctcccaagtagctggggttacaggcgcccaccaccatgcctggctaatttttttttttttttttttttgtatttttagtagagacagggtttcaccatgttggccgggctcgtcttgaactcctgacttcaggtgatccatccccctcggcctcccaaagtgctgagattacaggcatgagccaccgcgccaggcgtgccttatttttctttatggcacttagcactacttgaaattatatactgtaaataattgacctgtcttttgctaggatgcaaaatgtgtgagggcaggaattttgaatgcctgctgcctgttctgagcagcacccctaatggacttctctctctattgtaggtgagccctattcccagaggcaggtggtgctgaccctgtaacccaaaggaggaaacagctggctaagctcatcattgttactggtgagtgaggttgcctgggaaagctctgggcaagcttgggccaacatggagggtaactcgtttggggattgtttttacctttagtacagataacttacaagtgattatcttcctactccatgtctaaaagattggatgttgcacaggtaaccttctgaactgggagggttgagactgctctcctagaattgccacaagaatgtctgagatcatttgccatgaataaggcagagcaggtctgcttccttcttgcttctgctagctgctttctgctgggatgtggcaggtggggggctatcctgggacctggcggctatacctgtcctctcacaagctctttaacatgacctcacagcccttagagacttgttttttgagatggagtttcgctcttgttgccc

SEQ ID NO: 27281 - DNA, 1084 bp, Homo sapiens
ttttttcactctgttggccaggctgatctcgaactcctgacctcaggtgatccgcctgcctcggcctcccaaagtgctgggattacaggtgtgagccaccacatccagcccaaaaatatcacctttaaatttgcaagtttatatggtagattgttcaaagcacatctgatcacaacacaatcccgtgacatagaggttcttttccatgtatcatatgaggacgttaaggttcagaaaagagatggtgacttgtccagggtttgacggcaaattagtgatagacccttttcacaagtgcctagtgcaaggccaacatttagtagatgttcaataattttttttttttttttttttttttttttttttgagacaaggcctcgctgtgtcacccaggctatagtgcaatggcacagtcatggctcactgcaggtccaaccttctgggctcaagcagtcctcccacctcagcctcccaagtaactgggactataaacatgtaccaccatgcccggctaatttttaattgtttttagagacaggctcccactatattgcccagactggtcttgaactcctgagctcaagcagtcctcctgctttggcctcccaaagtattaggattacaggcgtgagccaccatgcctagccaagaaatatttattaattgaaaattttagtacattctcagggattaacttatggtctcctaactctttgcccagtattctttccattaagatagcttggtggggccagtggttgggcttcatctcagggtgaccagataataaagagagggagggctgaatctctgtcactattgatattgctgacaaggatggcattttctggcctttgctgctgtccttatacatactacccactacagaaagcccagattcagtagtctctgggctgcagactcaagcttttgttgcctttgctccctgtagtatactgaacaatgatgccagtgacccccagcttctcactctgccttctcctttattttctttctcatcagtgtcttacatctccttctattctgctgatggatgaggaatttgagctcatctcacaaacat

SEQ ID NO: 27282 - DNA, 1050 bp, Homo sapiens
gtgacagactgacctgtgttcgaatgctcattactagtaagttaatgaacttgtcaatcagtttctggtaaaatatgagtaatcatgacattaacttgtgggatcttgggattattcagtattgtataccacccttagccacagcgagtgcctggtgaggctttgtgttagtccattcttgcactgttataaagaaatacctgagactgggtaatttataatgaaaagtttaattggttcacagttctgcaggccgtacaggcttctgcttcttgggaggcctcaggaaatttacaatcatagtggaaggcgacggggaagtagacacgtcttcatatggccagggcaggaggaaaagagacagtgggaggtgctacacacgtctaaacaccagatctcacgagcagtcactcactatcatgagagcagcaccaagggggaaatgcatgatttcagtcaccatgatccagtcacctcccaccaggccccacctccagcactggggattacaattagacatgagatttgggcggggacacaaattcaaaccattatcgggcttagctagcatacccttttcaaaatggttggtagcaattcagacaggtctgtgtctggatcagactaagcagttttcttttcttttcttttttttttttagacagagtctggctctgtcgcccaggctggagtgcagtggcttactgcaacctccacctcctgggttcaagcaattttcctgcctcagcctcccgagtagctgggattacaggtacccgccaccacgcctggctaattttttgtatttttagtagagacggggtttcgccatgttggccaggctggtttcgaactcctgaccttaggtgatgcacccgtctcggcctccaaagtgctgggattacagttgtgagccaccatgcccggcccctgcaattttcatcatatggtggtggtctagagtaaacatcacttgcaaataccatgtgaccatggttctacattgaagatcttcaaatttagatcctgaatgggataacatttgagatg

SEQ ID NO: 27283 - DNA, 1027 bp, Homo sapiens
agggccgggcgcggtggctcatgcctgtaatcccagcattttgggaggctgaagcgggcagatcacgaggtcaggagatcgagatcatcctggccaacgtggtgaaacccccatctctactaaaatacaaaaaattagctgggtgtggtggcatgcacctgtagtaccagctacttgggaggctgaggcaggagaaccacttgaacctgggaggcggaggttgcagtgagctgagattgtgccactgcactccagcctggcaacaagaatgagactctgtctcaaaagaaaaaaaaaaaaaaattcgtgttagtactgataggaaatagtcatctgttttgttgttttgccactttctttcttgttgcctaagtctctgttttgggttttggacattggtttcctttataagaattaagacaaaagtatgtaaggtttttttttttgtatttatagtacttagccaaattctgggctcataataagcactcagtaaaggcatgttgacttttatggctgtaaatgatactggctttgagtcaatataaattagttagggggttcacagaattgaattgcagcattctctggttgggaggttggctttcagctaaaaacgttaagttggaaactatcctcacaactagaagcagttaaccagaagctgttcctgcctctatcctcctccagtctagcagtgtactgtccttgaaaaactgctgccagctcagcttttttgcttcttttcagaactgactatatccagatccttggtgtgcgttttcttttcctgtccctaggagtctccaagttgcagggactatcattatggtgacccttataggctggtgtatttatatggccatcctcattttgccagatagccgtcatactcagattggtgtcttcccataatacgtatgaatcattttccctcagttctttcttttgtcctgtctgctccattaaaaattgtctatcccatgaaatttttaaaagagactttgtgcttttagagtcgcaaggt

SEQ ID NO: 27284 - DNA, 1010 bp, Homo sapiens
gtgttctaattttttagtatatgtgctgctgaagcaaacacacagattatttttttctgttcttaagttttttggaggaaagctatttactataggtcttaattaaaaactatattctgtatatattgaaatgtgcagaaccctgctgctgctgtttttcgttacccagaatgttgcttacatctctctactatcatcttctctccctttgttttagcccttggggtttatgtttttttattcctttatttcatttttttctgaggttttggaagggaatggagaatggggtgtgttcattctgcctggctggttgattttatatagaaattgatgttttcatctctaagggacaaagaaaattaggaaaatatcctagttttatttttattgtggtaaaatacacattacatacagtttaccattttaaatattgttaagtcttcagttcagtgacattaagtacatttaccttgttatgtgaccattaccactatcggtctctagaactttttcatcatccagaactgaaacttgtacctattaaacaataattatccatttcacctcctccctgctctggtaactactattctgttttctgtctctgtgaatttagctattctaggcacctcatcgtaaaagtggagtcatacaatatttgtcctttttttttttttttttttagacggagtctcgctctgtcacccaggctggagtgcagtagtgcgatcttgactcactgcaacctccgcctcctgggttcaccccattctcctgcctcagcctcccaagtagctgggagtacaggcacccgccaccactcccggctaatttctttttgtgtttttagtagagacagggtttcactgtgttagccaggatggtctcaatctcctgacctcgtgatctgcctgccttggcctcccaaagtgctgggattacaggcgtgaaccactgcacccggcccccccccccctttttttttgagacagagtctcgctctgtca

SEQ ID NO: 27285 - DNA, 1080 bp, Homo sapiens
gctggtcttgaactcctgaccacaagtgatccacctgccttggcctcccaaagtgctgggattataggtgtgagccaccacgctcagccaataattctttttattattactattattattattattattattattattattttgagacagagtcttgccttgtagctcaggctggagtgcactggcatgatctctgttcactgaaacctctgcctcctggcttcaagcaattctcctgccttagcctcctgagtagctgggattacaggcacgcaccgccacgcctggctaatttttgtatttttagtagaaacggagtttcaccatgttggtcaggctggtctcaaactcctgaccttgtgatccgcctgcctcggcctcccaaaatgctgatattacagccatgagccaccgcgcccagtccttttttaaattttttttcagacagggtcctactttgttgctcagccgggaatgcagtggcatgatcatggctcactatagtcttgacctctcgggctctggcgatgctcctgtgtcagtctcctgagtagctgggaccacaggtgcataccaccatgcctgggtagtttatttttattttttgtagagatagtgtcttgctatgttgcccaggctggtgttgaactcctggtctcaagcgaccctcctaccttgacctcccaaggtattgggggtgggattacaggcgtgagccaccatgccagtcttgggcttgatagatttttttttttttttttttttgagacagagttttgctcttgttgctcaggctggagtgcaatggtgcaatcttggctcactgcaacctccgcctccttggttcaagcaattctcctgcctcagcctctcgagtagctgggattacaggtatgcgccaccacgcccagctaattttgtattatcagtagagacagggtttctccatgttagtcaggctggtctcgaactcctgacctcaggtgatctgcctgcctcggcttcccaaagtgctgggattacaggcatgagccactgtcactgtgcctggctgatatatatatgtgtgtatttattatt

SEQ ID NO: 27286 - DNA, 1112 bp, Homo sapiens
tgcagtggtgtgatctcagctcatggcagtctctgcctcctgggatcaagcaattctcagcttccaagtagctgggatcacaggtgcctgccaccacacctggctaaggtcctttgtgattattagcagagaatgggatctaaaaatgttcctgtgttccttctagctagtctttgctactgtgcccctagataatgggatctagtttttcacttgagtagtgtttttgggaacatgacagagtagccctgtccaagggagacatactactcggtatgtatttctaatttaccacacatgcttctgtattttatagtaagattgtttgagagtttgacttcattagggtttagttctctgaataccactatatactttagctctttgaactctggactttctgtcacaagcagtttttctccttagtttttttgtgtcttctgaaatgtcattttggtggattcttttaagaaaatatagggctatattaaattacttaaaggttttctaagtcacaatagatgtggcctgtaaaaatatctgattatgttgggtgtgttatttctgaaaataaaccaagcaaatttcacaatatcctgtttaataatttctctataaataagatacatatttaaaataaggctataaatgtttgttgcttaagagacaagatattactgaaattatcttctgaagtatgtctatccctttccacatttttgtttccactgccttttcagtaagatgttaaggttaattttacctctggcagtgttttagcaccttctttctatattgggcattctatctgtcacatttttctagtgtagtagtaaacattactcaaaataaatgatttataggccgggtgtgatggctcatgcctgtaatctcagcactttgggaggccgaggcgggcagatcacctgaggtcaggcattcgagaccagcctggccaacatggcaaaaccccatctctactaaagatacaaaaaaaattagccagatgtcatgcatgcctgtaatcccagctactagggaggctgaggcaggagaattgcttgaacccaggaagcagaggttgcagcgaggggagattgcgcccctgcact

SEQ ID NO: 27287 - DNA, 1050 bp, Homo sapiens
cgctccagaacaccccagcttgggtgacagagtgagaatctttctcaaaaaataaataagtaaataaagttgcttgggacatgttatatagatgctatttaaagctatctggataggtaatatcctccagtttataatcatctgtaccccattgcgtgatggggtgatcattttgtgatccaccccaccccaactcatgcatgctaacagttatgtatgccttttctccaatttatctgcctgcgttttgtcagacgattttcagcgaaccttcactgggcaaaggggaagtcttcttttggcccctgtattactaacaagcattgacttctaaatgggtaatttggtcaggtgtggtggctcacgctgtaatccagcactttgggaagtcagggtgggaggatcacttgagcccaggagtttgaaaccagcctgggcaatatagtgagatcctgtctctaccaaaaattaaaaaaattaggcgagcatggtggcacccacttatagtcttacctactggggactgggtaatatcctcaagggaatgagtgtagatagaatagggaaccaagaactaagatctaggatatgttagcgttaagataatggagaaaaggaatcatcagaggatactgagaaggaacaatctgtgtggtaggacacaaacctggagaatatatcttgggaactgaagggaagaaagtaaaacatggaggaggggatgaacagccatgtcagattttgccaataagttaggtaggataaagactagaattgaaaattgtgtttagtaatgtaaaggcctttgttacatggtcttcagtaataaatagccaggttagcactatttatatatgtttttaatgggaatttttgatgtttacagtgtctcctttgccatgttcaggttttccaacctattggtggtatgtctgacagtggatcacaacttggttcaatgggtagcctcaccatgaaatcacagcttcagatcactggtaagttttagaaacatcggctgctttactttatttttccccgtatgattaa

SEQ ID NO: 27288 - DNA, 1038 bp, Homo sapiens
ttttgaatcagctcttcgtttcttcttatcatttagccagggtctttaccttggatgtaagtctgttttcttatgtccttccctgtctttatttacctgtttcccatttaattatgcctatatataacctcagctattatactgaactcatctgtgtcttctttttttcttttttttgaccgggaaatttttttttaaattacaagctcaacccatttgttctgtttcaaaggtgcagtacttttcttcatttattagtgaaagaagttaagaaattaactttccaaaaaaatcagcaaatggcaagcaaatgtccttgaaagtcacagtcacatatagtgtctcctagaaaagaggaggggtaagacagcttccacctactttcacaagtttcatcaaatactggatctactcaagggtggagtaaaaaggcaactaactttctaaaaggagtatgttattaaatgaggcatttactatactccttcctaaaagccccagatggggaacatgttttctcaactagacctaggaagtagactgtggaatcaatcggtcctcctcaccttaagggccatccactggttaatgaattaaaaaaaaaaaaaagactgaaaaacaaacctcccccctaaaaaagaggagggggaaaaaaaaccactaagatgtcccagagtggaatcagggagcagcttcaacaattccaattagtctgttacagagtcatccacaagcatgccttgctttaaaaatacatatatatatcttgaaataacaaaactgaaactagtactaatcacttttctgacaatatacaattactcaaaattaactagtactgggctagggatacgggggggcggcgcatagctatgggccttgtctcacatgagtacatgtgggtaggtgcagtgcgtttgtcattatggcaaaaacgaattttaatttttaagctttagtttgacttaaacattgcttttagtatgatgccaacaccagctatgcagaaagggctctggagagatgttcctagcagca

SEQ ID NO: 27289 - DNA, 1051 bp, Homo sapiens
tagaggaattggagggaagaaggaattctaaatggaaagaagaaaaacaaaggtggtgagaaacacaggttgttttgtaggaaatctttaatcataatatttggctaaaggtgcagtaatttcaagggagaaatggcatttggtgattagaaagtagaatcagtcaatatatatttatttgcctttatatgatagacactatgctcaacatgtctattcttccttcagttagtccttaaacgtttatgagttaggtactattgtctcatttttataggtgatgagaaaacaagcttagaaagggaaaggaacttgcttgagttaatagcgttaagtgggacagttgaacctggaacagccttaccttcagagcctgagctcgtaactatcatgctttactgccacctgaagttgggatgatatacaagtaagtgcttagccattaataaatgttatttttattgttagataggttgggaccagatggaggtttgcaagtaaagacttacggaattttttttttttaaaggaaaggaatgtcttttaaaataatttgattttgttctgttttgttttgttttaagactgagttttgctctgtcgcccagatgggaatgcagtgacgcgatctcggctcactgcaacctctgcctcctgggttcaagcagttttcctgcctcagcctccgagtagctgggattacatgcgtgcaccactagacttggctaattttttgtatttttagtagagatggggtttcaccatgttggccaggcttgtgtcgaactcctgacctcaggtgatcttcttggccttcttggcctcccaaagtgctgggattacaggcgtgagtcaccacgcccagcctaaaatatttgaacaggagattgtatgatcagaactctgtaggaaaaaatattttgacagtggtatatagtttggattatgtggtggtgagtgaaggttgaaagtcctatatggaaatttgttacaataatctattgagaggtaacgaaggctagaactgaggcaatgatggtggaagagtaga

SEQ ID NO: 27290 - DNA, 1048 bp, Homo sapiens
gctctgatatagtaggtctagaatagttttgaagattgtgcatttctgacaagctcctgtatagtgctcgtccgtttggtttaaagaccacactttgaatagaaaggccctaaaggatttctgtggtacacagtttgaaaatgtcttttaaaatatgaggactggtacgcagtggctcgtgcctgtaattgtagcactttgggaggccaaggagggaggattgcttgaggtcaggagttcaagaccagcctgggcaacatggcgaaaccctgtctctacgaaatacacaaaagaattagctgcgcgtggtggcaggtgcctgtagtcctacctactcgggaggctgaggcatgagaactgctagaacctggtaggtgaaggttgcagtgagccgagatcacaccactgcactccagcctgggcgatggaatgagacgctgtctcaaaaaaaaaaggaaaaagaaaaaaactatgtgaggagagagagatgttaattagcttgactgtagtactttttttcactatgtatatcaaaacatcatgttatactgtttttattaaaaataaatcattgcaatacatgttttacagaaaaaaaatttaatacatggtactgcctctctgtttctttgtttgtttgagacagggtctcactctgtctcccaggttggagtgcagtggcgcaagctcagctcactgcaacctccacttcccagactcaaacaatcctcccacctcagcctcctgagtagcttcgactacaggcgtgccctgccatgcccagctactttttaaatttttttgtacagacagggccttgtcatgttgcccaggctgatctgtcactcctgcgcttaagtgatcctttcacctcagcttcccaaagtgctgcaattacaagcgtgagccacagcacccggcctctgttagttgaatctattagattttattttgttcaggcttattctgaaattcctaggagtatgggttagtactgtgtagtggtttggaggtagtacataccagagccttggctgagacatctgca

SEQ ID NO: 27291 - DNA, 1050 bp, Homo sapiens
gaccagcctgggcagcatagtgagaccccatcactatagaaagaaaaagaaattagctgggcatggtggcatgtacctgtagtcctagttaatcaggagtctgaagtgggaggatctgttgagcccaggagttcaagattacagtgagctgtgatcatgccactgtactcctgggcaacagagccagcccctgtcatcctccctgcatctgcccaccataattatgtattaatacatacccttcataatcctctctgtgaaatttatcctaaagaaacaattcaaaggaagaaacagtttgctacattaagaatattcattattttattatttatataacatcagaatattggaaaccaccctaaataaccaagcaggtagaaatcgtgaagtcattcgattcatttatgaattatgttcataatcaacacaatcaattctttcaaatgttttatttagaacatttgtatcaatgtttacttacatattttgtacccatttaaaatgataggaagtgggctgggcgtggtggttcacgcctgtaatcccagcactttgggaggccgaggtgggcggatcacctgaggtcgggagttcgagggccgcctgaccaacatggagaaaccctgtctctactaaaaatacaaaattagccaagtgtgatgacgcatgcctgtaatcacagctactcaggaggctgaggcaggagaatcgcttgaacctgagaggcagaggttgcggtgagccaagatcgcgccattgcactccatccagtctgggcaacaagagggaaactctgtctccaaaaaaaaaagataggaagttagttgtgttcttgcgaaaaattgtgtgtgtgtgttttgttttgttttttcgagatggagactcactctgttgcccaggctggagtgtattggcatgatctcggctcactgcagcccccacctcataggttcaagcagttctcctgctcagcgtcccgcgtagctgggactacagatctgcgccaccacacctggctaattttttgtatttttagtagagatgggg

SEQ ID NO: 27292 - DNA, 1029 bp, Homo sapiens
acccaaaagttagggttagggttagggttaggatgacttttgtatctattgctggattaaatattaattctgtatttaattttttgaagaaccaccatactgtttttcagtgtctgtgccagtttacatttccaccctagtgcagaagaattccaatttctgtacgttctcatcaactcttctgttttttttttcttcatcatcatcatatttttttttaaatagtcatccttaatgtcgtatttcattgtggtttttctttgtatttttctaatggtttgtgatgttgagtatcttttcatatgcttcttggctatttgtgtatcttctttggaaaaatgtctcttcaagtcctttgcccatttgttgttgttttttttttcttttgcgattgagttttaggtgttctctatatattctgggtgttaatcccttatcaaatacatgatttgcaattattttctcccattctgtggtttcctttttactgtagatagtgccctttgatgtataaaacattttagattttgatgtctgatttgtcaattttttcttttcttttcttttttgagacagtctctctctctgtcacccaggctggagtgcagtggcacaatctcggctcactgcaagctatgcctcccgggttcacgccattctcctgcctcagcctccgaagtagctgggcctacaggcgcccgccaccatgcccagctaatttttttttttttttttgtattttgtttaatagagacggggtttcaccacattagccaggatggtcttgatctcctgacctcgtgatccacccacctcagtctcccaaagtgctgggattacaggcgtgagccaccgtgcccggcctgttttttctttttttttttttctttctttctttcttttttttttttgagacggagcttcactctttttgcccactctttttgcccaggagtgcaatggtgcgatctcggctcaccacaacttctgcctcctgggttcaagctattctcctgcttcagcctcccg

SEQ ID NO: 27293 - DNA, 1047 bp, Homo sapiens
aggcatgagccaccgcgcctggcctgagagttctttaattttagctcttacatttagatcttttatccattttaagttaaattttgtatatggtgttgggtaagggtccaacttcatctttttgaatgtgaatgtccaattttcccaagcaccatttgttgaaaagactgtcctttccccattgcatgactgtggcaccattgtcaatagcattttaccatatatgcaagggattatttctgggctgtttattctgttggtctgtatgtctgatttgccaataccacgctatagctttgtagcaagttttcaaatcaggaaggtatgtgtcctccaactttgttctttttttcaagctgcttttgactattcagggtcctttgagattccatatgaattttaggatggatttttttatttctgaaaaaaagaagtcatttggattttgataggggattttattgaatgtacagaatcaataaaatccatattgatcaatacagattcaatatctgtatcaatctggggtagtgtggtcatcttaacaatattaagtcttccaatccatgaatgtggatatctttgtgttttctttgatttctttcagcagtgttttgtggttttcagtgtacgagtcttttgccttcttgattaattcctaagtattttttattctttgtgatgctattgtaaatggaattgttatcttaattttctttttatattgtttattcttagtatatagaaatggaactattttgtgttgactttgtatgctgctactttcctgaattcacttactctggcagggtttttcgttgtggaatatttagtgttttcttcgtaaaagatcttagcttctgaaaacagataagttttcttcttcccaatttgggtatcttttatttatttatttatttttcttgcttaattcctctggctagagcttctggatactatgttgactacaagtggtgaaaataggcattcttatattgttcctcatcttaaagaaaaaacttctaaccattgaatgtgatgtttgct

SEQ ID NO: 27294 - DNA, 1042 bp, Homo sapiens
tccaaagtgctgggattacaggtataagtcaccgtgcccagccagggaagtgtttttttgagacaaagtttcacttttgttgcccaggctagagtgcaatggcgtgatctcggcccaccacaacctctgcctcccaggttcgagcaattctcctgcctcagcctcccgagtagctgggattacaaacaagcatgtgccaccatgtccggctaatttttgtgtttttagtagagatggggtttctccatgttggtcagtctggtctcgaactcctgacctcaggtgatccacccacctcggcctcccagattgctgggattacaggcgtgagccaccatgcctgacccagggaagtgtttttaaatgaagagtacatctaatatattgaaataaaatgattattgtacagttattttaagcggtcttgtttccttttttcataggctctgttccatgggaaattcatagacacgggtttttctttaccattctataagcgtatcttgaacaaaccagttggactcaaggatttagaatctattgatccagaattttacaattctctcatctgggttaagtaagtttctttttccatgtaatttattaaaatatagttatatgcattccgtgtagtattgataacttatccaaactgtaggcacataattggtttattgtatttaaatgatctatatatcaaacctgtctttttattcaatatgataaattttacaaaaatacacccaagatcttcggcaataatatgaccttagaacagaatcttatttcttcttattttgatgttatagcttaatattaattatttaagaacatgggcctttcgttaaaaacttataaattatgattgaattggtggatataacaaatagtgctaatttcatttgtgcagggaaaacaatattgaggaatgtgatttggaaatgtacttctccgttgacaaagaaattctaggtgaaattaagagtcatgatctgaaacctaatggtggcaatattcttgtaacagaagaaaataaagagga

SEQ ID NO: 27295 - DNA, 1035 bp, Homo sapiens
agaagggacccaggtggtgggtcctagggcaaggaagttataatttggtcctgtgtatagactggtaagccttctgaggctaaatatgtctcagaagattaatgatatctgggcttccatttctgttgcagaattctggggagacattgccaaggaattttactggaagactccatgccctggcccattccttcggtacaactttgatgtgactaaagggaaaatcttcattgagtggatgaaaggagcaactaccaacatctgctacaatgtactggatcgaaatgtccatgagaaaaagcttggagataaagttgctttttactggtaaaaatatctatcttatacttggtggcagataaaaacactcatttgatacttacaacaacccagtagagtaagcaaagtgtcatcaacttaatgcctcaggtgaggaaaaatacctcaaggaagctacatgacttccttcagatcacataactagtatgtgacagagctgacattcaaagccaagtgtcctgacttctagtctagtgttcttggctttgtagttgaagagggagaaagggcattggcaaatggaagagaacaagactgagtagctttcttcctcattcttgctttggaagacaaatagtattgggtttttcaccaccactactaccactaccattatcattatcttttacagagctgtgtgccagaaactatgcttaagtgcttaacaaatactatctcctttgatgcttataataattatgaaagcactatttgttttcctcattttacataggtgaaaactgaaattctgagaagtcaagtgacatatctgaagtgaaacaactagctagaagcaaggctgagattcaaacctaggcagtataattacagagcttacacacaaccatgacactctattattcctctaattccttaccttggcctctcaacaggtttgtaaaataggaattcttagtttcattttataggtgaacaaatgaagcattgaagggttatgtagtgaataaggtcata

SEQ ID NO: 27296 - DNA, 1053 bp, Homo sapiens
agctgtctgatcttgggcaagttacttaacctctttgagcctcagttttctcaactgttaaacgtggataaaaatagcttttatctcatggagttgtcagttttgtaagattgaataggataaaaaaaaacatgtcaaattcctggcacattgaatgcacttaaatattagccaccacaattatttatattggaacagtgagaagaccaagcatgtttagagtaaaaggtttatgcagggaacaatttattcattcaataaatgcttactaagaacttattaagtgccaggcactattctaaacaaagttcttgccctcatggaggttatagtccagcttgaggagacagacaataaacatagaaaccagtaagtatatgacaggtagtgatgagtactatagaaaaatatagagcagagtcaggggaaagggaagtgacagtgcagagtgggagctgataaggaaagaaccttttgataaatatgacatttgagcagagatctgaaggaaagtatggagtgtgccacgcagatagttggggtagggaggggaaatgttccaggtaggtggagaacaaatgtgctgctgcctggtgtgtttgaagactagctaggaagttagtgtagctaaaatgtgtgagctagggaagagagagtagtattgacaccagcaggatattagatcatgtcacatcttgaaagccaatgtagactctggccttttattcatggtaaaatgggaaaccactagacaatcttttttttttttttttgagacagagtctcgctctgttgcccaggctggaatgcagtggtacgatctcggctcactgcacccgccatcatgcctggctaatttttatatttttgtattttattttatttttttttgagatggagtctcgctctgttgcccaggctggagtgcagtggcacaatcttcgctcactgcaagctctgcctcctgggttcacaccattctcctgcctcagcttcccgagcagctggtactacaggcgcccgccaccatgcccggctaattttttgtatttt

SEQ ID NO: 27297 - DNA, 1077 bp, Homo sapiens
aggctgaggcaggagaatggcatgaatccgggaggcagagcttgcagtgagccgagatcacgccactgcactccagccttggcgacagagtgagactccatctcaaaaaaaaaaaaaaaaaaaaaaatgccaaacgcaatgactggctcacacctgtaatcccaacactttgggaggcagaggcaggaggattgcttgagctcaggggtttgagaccagcctagacaacatagtgagaccctgtctctacaaaaaaaaatagaaaaaattagctgggcatggtggtgtgggcctgtagttccagttactcaagaggctgaggtaagaggattgcttgagcccagaaggttgaggctgcactgagccatgatcgtgccaccacactgcagcctggcaacagaccaagaaaaaaaaaaaaagatagtgtatgtatagtcagtaaatacagcagtggcttctgatctccagacctctcatttgcattgattctttaaaatcatctctaccttaatgttctgtagacatttcaaaatcaacatgttcaaaatcaaatttattatctatctccccaaatctgctctctctacttctgatgtttactgttcattaatggataacagaataaccatcaaatcatgtaagtggagagaactcagtgttaacctttatttactccctcttatttatccccatctaccaactacagtatctataaaacacattcactcctttctaccccattgcttttgttcaagatatcataattcctctctttctttgtggtaaacatgaaggtgtaccatccagttctacctccaaagaaagacttcctgttggccgggcatgatggttcacgcttgtaatcgcagcactttgggaggccgaggtggggggatcacctgaggtcaggagttggagaccagcctggccaacatggcgaaaccctgtctctactaaaaatacaaaaattagccgggcgcggtgatgcacgcttgtaatcccagctactagcaggggctgaggcaggagaatctcttgaacccaagaggcagaggttgcaatgagctgagatctcgc

SEQ ID NO: 27298 - DNA, 1045 bp, Homo sapiens
cgcagggaccaatcccccagaggtgggaaaatgtggaggagccaaacctggatgagctgctggtccgattggaggaggagcaacagaggtgatggaccccaaactttctgacctgggtgattggccagttggtggagaaggctgatgggaaacttctgccctgagggctaatgtggacttcagccatagccctctaattcctgcaatggaaaatttcagtggttgccatcttactcccaggaggtccaagggttggactagacctttattttgcacccacttttacccctccccagtgcaggtgtgagagtctagcagaggtgaacacccagcttcgactgcacatggaaaaagctgacgtggtgaataaagcccttagggaagatgtggaaaaactgacagtggactggagccgggcccgggatgagctaatgaggaaggagagccagtggcagatggagcaggaggtaggaagaacggggactggaactgtgagaggaagcctgtgtattctggatgctgccctggtcagtactggaaggagttaacttcaggacttggatgaaaactgagctgttgctgttaaagtccctgaccatccttacctgcgcatgctggcagcctcagccttcttgggccttcagcttagacctgccactacccgcctagtctaggttctgctgggaggtagcatgacactcagagcaactctgttcctgcagcagtgacgagcttaggtttttgatggatctgaaagcttactgattcctggtctggaggtcttgcatatctagatgctaaggaggtagatatgaaactgaatgggaaagaaagagctgttatgggccctggggaattttcaggtcccagctgaaggaaacaaatgtttcctgcatttttgctttgtgctcagtggtttatgtatatcattgactcctccttagaaaagtctgtggtaatagatcccatttgttaagcagctaccgtgtatccttttctaatctggcccagaggaaggcgatataccatcctaggccctctgacc

SEQ ID NO: 27299 - DNA, 1049 bp, Homo sapiens
ctgcctagatttccagtctctgaggttcgggtgcttaaagtcttgtggggatgagttttgtgtgtttgaagaccagaaccctaagagatagctaagcattcacgtttagcactacctgatgggacaggccctctttcctgtttctagctgcagttctcaggctggaggctagattctggtattcaatatctcaatcgtttcttctttcatttcctcatttattgttacctcagacagtgttctagccttgttgttagtcctagacttgggtgaccaaaggtggagagttgaaggaaccagacttttatgctcagatactcccctccttcccccaggggagaggacctgagaaggaaaacatcaggtttgtccaggctatagggttaagtccctctatagactctaggctttggtcagtagggtggtgaccttgctgtattgggtttcaggtcatggtggaagaaggggacaatatagcccaaggctctggtcatgagaactctttggaattggactctagtatcttctcccagtttgattaccaggatgcagacaaggctcttactctggtgcgttcagtgctgactcggagacgccaggctgtgcaggtaggaaccctcagcattccacctcagtcacaggggtttgtgtctaaactggtttgtgcctcaggtacctccctagcctggactatccctttcacttttttgaccagtcatgaggtgttctgtcaatatcccagagtaaatctgcctatgtctgctgaattgtgcttgtgagtagcaggcacatcctccacgccaatggcatgcttcactttgtgtacaatctttgcataacagtatgcaaagattgggaaccagagccctgggagattattgggtcaacgttctccaactctgagagtcttaggcacacttaccactcccccatgccactgtacatttggagatgacgaactctaagaatctagagccacagaagcccaatgacctctgatggcctgtcttcttgaatagttgcatctcccttctcagctttcttttgtt

SEQ ID NO: 27300 - DNA, 1023 bp, Homo sapiens
aagtggcttttcatcttgtcttctagggtgagcgagagttacttcaggcagccaaggagaacctgacagcccaggtggaacacctgcaagcagctgtcgtagaagccagggctcaggcaagtgctgctggcatcctggaagaagacctgagaacggctcgctcagcactgaagctgaaaaatgaggaagtagagagtgagcgtgagagagcccaggctctgcaagagcagggcgaactgaaggtggcccaagggaaggctctgcaagagaatttggccctcctgacccagaccctagctgaaagagaagaggaggtggagactctgcggggacaaatccaggaactggagaagcaacgggaaatgcagaaggctgctttggaattgctgtctctggacctgaagaagaggaaccaagaggtagatctgcagcaagaacagattcaggagctagagaagtgtaggtctgttttagagcatctgcccatggccgtccaggagcgagagcagaagctgactgtgcagagggagcagatcagagagctcgagaaggatcgggagactcagaggaacgtcttggagcatcagcttctagaacttgagaagaaagaccaaatgattgagtcccagagaggacaggttcaggacctgaaaaagcagttggttactctggaatgcctggccctggaactggaggaaaaccatcacaagatggagtgccagcaaaaactgatcaaggagctggagggccagagggaaacccagagagtggctttgacccaccttacgctggacctagaagaaaggagccaggagctgcaggcacaaagcagccagatccatgacctggagagccacagcaccgttctggcaagagagctgcaggagagggaccaggaggtgaagtctcagcgagaacagatcgaggagctgcagaggcagaaagagcatctgactcaggatctcgagaggagagaccaggagctgatgctgcagaaggagaggattcaggttctcgaggatc

SEQ ID NO: 27301 - DNA, 1031 bp, Homo sapiens
cctgagcccttgggcccacttcccagcctaccgcttccgtccccgcccgactcttgggccagcgcctgggcccacactttcctatcccccgcagatgccggtggccgtgggtccctacggacagtcccagccaagctgcttcgaccgtgtcaaaatgggcttcgtgatgggttgcgccgtgggcatggcggccggggcgctcttcggcaccttttcctgtctcaggtgaggggcgcgggcggtgatctctgggcaggacaaccagaccttccggccctgccccattcggcctggagcctgaacacagcctccttctttcgacttccctctctgtcccctcgcgagccagactcattccaaaccaccttcaatctgtaaagtcaggttggaagcgtcagtgcttaagaatttgagctttagagtcaaaatgctttctggcccttttcttactggttcggtgactttaggcaagttggagactgggtttccttaagtgtagaatgaagacagtagcatctaacttatagagttgtaaaaattcgatcagcacactttgcacagcatctggcacatattaagtgctcagtaactagttactactgttgcttttatttttttttccaattgcgcataaggaaagaaactcgttcagcggttttactattctggatacaggatacagagataaagcagttaaactttacactctaaaggtcattttcacatttagaggctgttattgccatatccctagattgtaaattatcatttacagagcacttactctatgttaagcactgtgctaaatactgtagttttcaaaatcctgtaaataatgttgagatgcccattttacacttgacactatgtgtaaattgtagagctgactcttgaacccccaccttactccaaaatcattaacaccaagaaactaaaagacagatgtctttattgggtcttaaactgcaggcaacaccagtcaaaaaagctggtttctctatgtattttacactgcatctgctgcctcccac

SEQ ID NO: 27302 - DNA, 1055 bp, Homo sapiens
ttttcttttttttttcttctctttttgagacattctcactctgttctccaggctggaatgcagtgacatcatctcagagctgactgcaacctctgcctcctggattcaagcaattctcctgcctcagcctcccgagtagctaggattacaggcggatgccaccatgcccggctaatttttgtatttttggaagagatgggttttcaccatattcgccaagctagtcttgaactcctgacctcaagtgatccactctcctcggcctcccaaagtgctaggattacaggccactgtgcctggccaagaggtcacttttcatgtccaggctgcatggtatgtggtggtgaggatgtaggatttggaggtggaatgcctgagtttgagtgcctgtatttgccactctcttggggccaaatgtaatttgggcatatggcttaaacctcttgaacctttcattgtgttatgcacattggaggcagaactttccagcctagcaagttacttaacctatatgagcctgtttcctcacccaagtattatcataactgtctgacatcagtcattggaaatatcagtaaatgttaccctttccctccatttcctaatctgtaaaggaaattaaagaaacctggtttggctgggcacagtggctcatgcctgtaatcccagcactctgggaggccaaggcaggaggactgcttgaagccaggagtttgagaccagtcctggccacagagtgaaacctcatctctataacacagaaaaaaaaaaaattagtttggcatggtggtgcacgccttgtagtcccagctccttgggaagctgaggtggaaggattgcttgaacccaggagttcaaggctgcagtgagctatgatcctgccactgtactccagtgtgggtgacagtgagagcctgtgtttaaaaataaaaaaaagaaaagaaaaagaaaacatagtttatagagttttcctggcttgaagatttatgaggagttgagtatatgttaccattattacttttgttttattcctctcagaaaatgtgtgtaaaatt

SEQ ID NO: 27303 - DNA, 1087 bp, Homo sapiens
gggtgtggtggcatgcgcctgtagtcccagctactcaggaggcctaggctccagaattgcttgaacctgggaggtggaggatacggtgagctgagatggcaccactgcactcagcctgggtaaaagagtatgactctgtctcaaaaaataaataaataaacagacctcgtacagccttccaaaagtagcaccaagtattaatatctcaacttttgtttgcttcgtttttaattttttttgtttttaagagacgagcgtttgctatgtttctcaggctggtcttgaactcctgggctcaaagaaacaacttggctctgccttccaagtagctggggctataggcatacattactgtgcctggcatttgtttgcttcctttgtaactctttaaatttcattgcaattacagtttgcagttatttatcagtttgctggctaaatttttgtgtttccccggtagactgaagggttcttgagggcaggagctgtgtctcttttggtcttgattgtttccttaaatagtcgctgagcaaatatttgttgaataatgcatcagcagatgactgaatttaactgtgaaagcagttgtttttttgtagttctgaggggtggcccttggcccttgtaggtgagtggtaagcagtgttgagggagggtcttcttagttccagaaaccacaggaagctgcacgatggaggaataggaaccagtggaagacacacctgtgttagaatgaggacaccaacagggtttcatggagctttgtgttttgaataatgcctgtttttttatgtgtagtgaatgatgctacactctgggtggactttgcctaagtttcataaatatttaattggctttttcaggagaataaaggcagccccgttgatgactgaaaatgacaaagcatccacctaacagacgaggaatcagctttgaagtgggagcccagttggaagcccgggaccgtttaaaaaactggtacttttacatttttctgttaattaaagcccttcagtaaaggatttttgccagcactgatagagtggtagcttaggctttttttgtggtgtttttctacttcctgact

SEQ ID NO: 27304 - DNA, 1060 bp, Homo sapiens
tactgttctctccattttggggggtgactctgccaacaggggatgggttccattctattccaatttgtgttgttatatatgtccacatagcaatacagaaagtgggtccactagctaatacagtattaccatatttgttatgaaaatcaggtgtatgtttctggtggctctgccttgccattgtttgctgaatgcttcgaacttggagatgactgagtttgtttttgaccaagggaaacatcgtgaaggtgaagatagaactgcagcaatgaagctgctgctttaatttttgcatttgtaggagagacagagtttcactgtattggccaggctggtctggaactcctgacctcaaatgatccacccgcctcagcctcccgaatctcccctttttttcacacaaggattagcagagtcagttgtctgtcagggctttttgcccccagtagtgtacaactctgctctgtaagtgattttctttaaggaaactactgtgtaggttagcatttatgacaaaatggggaattggtcctttctgttgatctgtggttctttaacttgaatgagcaggtaaatcagctccttcttcctaaaaaatatgcatatttttgggtcatgtcccctacctaccctgccagttcagtctctggggcagtgactgaagtctgcatttataacaggagatgctatggaaatgatcttgtttctagagtctctggctgaagcagctcttattttttgttttcttcatgctgtaactgattctacatttgaaatgtggggaggctgatactgtgtgaacagctttgtagaaagagaaaaggaagatttaggcccacacgtgcaggtgctagcttggctgttttcttctattgggggaagagggattgtgcttcccccccaacccccaccccgcccctttttttttgcctagatagcctttaacgatgtcaatgtctggccaggcgcagtggcttatgcctgtaatcccagcactttgaggggccggggcagcggattacctgaggtcaggagttcaagaccagcctggccagcatgg

SEQ ID NO: 27305 - DNA, 1011 bp, Homo sapiens
aaccctccctctactctctatctccgtaagttcaattgttttaatttttagctcctacaaataggtgagaacatcaaagtttgtctatgtcttgctagctagtttcgtcatgtattggtgacacctgtgacaaataatcacctttattttgtaattaccaggaataaaggtcagtaggtaattactaattgtctatggcagtggttcttggactttggtgtacatcagaatcacctggaggagttgttaaaaatgcacattcctgtgccctgttcccagttgctgtttcagtgtatctgaggtgggactggtaacttgcatttctaatgagttcccaggagttgctcatgctgctgctgtgggaccacactttgagaagcactggtttactctgaggcaggtactgtgtgtggaagaaagtggtataagttatggtctctggccttgaagagcctgcttttgagttgtgatctgtacttatatgaaggtagacctaagtttgaagctctgtaggctggtgccaaatgagcctaagaagttcagatcgggggtaatcattagtagctgaaaagcccggaagcttttacagaactgttgtgggtatttgagccaggcacttaaagatcagtgagtggcacattcccagaaggaaaacacttttaatacagatgtggagttagaagtgtcgctggcagtttcagtgggtagcttgtcactttgagttggtgggtattggatggtggtaatgggaaataaggtttggaaaattattggggtcagattgtgttggaggttgaatacttttggacttcatttggtacccgtgattagccattgactaggccctgttgaggactggcggtggaggggtgtgggaagagaatgtatcagaaggagaaaaccaggtcttaactttgttgttgcattcttcggctcccaggcctcagggttttttgcagggggtgggggaattggttctaaaaagagaaaaacctgtttactagtggaaac

SEQ ID NO: 27306 - DNA, 1034 bp, Homo sapiens
ctgttcgaagagccctgcttctctctctctgctgccatctcattcgtgcctttgtgtttatacttccagctatttttcctttcactttaacctctttctttgagaagctcacaagccagcctgtatgtatgggaacctgtgaatgtatgcttttatgttttagattaattccttcctctaaaaagtccctggctttcttagactgttgtaggacttttgatttcagaattacatacatgtatatttcccccaaactttctttttttcttctaggtcagttgaagtctgctttggaagctggccaggtctcatctgcactgacttgccactcctttggggatggatccggggctgcaggcttggagttgaactgcccatcaatgggagaaaacacgatgaaaacagaaccgacttctccccttgtggaattacaagagatttcgactgtggaaggttcatatttagagttaaattaatcctctttttatatacacttttgcttatgctttgtgaactaaaaaaaaaaaaatgacttttctgttgttgtttttcaccttttattaatattcccttatcattttaatgttatgctcctttcatttctgattttgataatttgtgttccctctcttagtatgactagggctttatctattttgttttcaaagaactaactttttacttcaattttctctattgtttatttttaaaaatataattgatttctgttttgatcttgctttcttccttcaattttttctagaactttacctaattgattttagatctttcttccttttttttttcattacctggtgaaaagatctttcttcctaatatgagtatttaaagttataaatttctggctgggcgcgatggctcatgcctgtaatcccagcactttgggaggccgaggtgggtggattgcctgaggtggagagttcgagaccagcctggccagcatggtgaaaccccgactctactaaaaatacaaaaattagctgggcatggtggcaggcacctgtagtcccagc

SEQ ID NO: 27307 - DNA, 1079 bp, Homo sapiens
ctggtagaagtgggacactttgccacaggatccagatcagtgattctaacccatgaaatcttgctgtgtttgttgttagttataaaacgaatgaattgtcactgaagtatcaaaaattaacagatgatttacttataaattaactagttaagatttagcatgatgactataatagtttttgcaaattatttacttttaaattaaccagttaagatttagtgtaatgcctatagtattttagctttaatgaatttgtgttctctatggtttcttgagcaggagagtcatagatctacagccattttagtttgggaaattgtgtgtgtctatggtttttcatatcatcaagtatgtattgtgatggaaactgatagagaattcattattctgggggttagagagatgaatgcgacatctgttctaggcccttccaggtctttctgtccagacgaatggatgagacttcagatacctatgatacaagaaagtaagatgatgtcatgacaaacttagaatgaaactatgagaatagagagaagaatgacagtgaaaatgtgtgcctgctacatagaaatggacctcttcaggttggcgtgtgcgagattttcttgctctagggagattgtttaagcaatcactatgtcgacaaacacagatgtttccctttctgaattcatatgatgaagatcagggatccaaacttattcaaaaagctaaagaggcaccattcgtacttgttggaatagaaggttttgcagcaattgttgcatatggattatacaaattgaagagcaggggaaatactaaaatgtcccttcatctgatccacatgggtgtggcagcccaaggctttgttgtaggagcaatgactgttgttatatcatgtatcgagaattctgggcaaaacctaagccttagaagaagagacgctgtcttgctcttgtaggaggagcttgttttagttagacgtctcattattgaagttacgtattattgttgaaaataaactaatttgtatgggtttagatggtaacacggcattttgaatattggcttcctttcttgcaggcttgatttgc

SEQ ID NO: 27308 - DNA, 1032 bp, Homo sapiens
cattgtggcacacgcctgtagtcccagctactcgggaggctgacatgggaggatctctctaagcccaggcattcggtgttgcagtgagctatgatcctaccactgcactccagccttgacaacagagtgagaccctgtctctggaaaaacaaaaacaaaaacaattacgtataatttatttcattgtatggatgttccataatttatttacctagcccctgctgaaagatatttaagttctttctaacttttccctattaattctccctgttttacagacaaagagcctaatatttggcatgaaggagtgagttagctagagtggcacacttcctaatggtcagtattgtagaggttggtaaaattaaattaaatttttgtttgagacagggtctcactctgtcatccaggctggaatgcagtggcgctgtcacggctcactgcagtgttgacttccagagcttcagtgatcctccccactgttcagcctcctaaatcattgggaccacaggcactcgccgtcactcctggctaatttttgtattttttgtagagacagggttttgccattttgcccaggctggtctcaaactcctgagctcaaccgatccacttgcctcggcttcccaaagtgctggaattacaggtgtgagccagtgtgtctggcccagagtctgtaactgttgttttcctgctgagtgcctaattccatctgataagatgctgggtgctatataaatcaagtgaaatgaacagagtccctgcctttaggggcattgcacagtatgtgatgcaaacttctgctctcggggcactcattaaagcagtgtgtacactcagagtaagaggcttagtagggtggctagatttggagggtggtgtgtggtacaagtgatgtcagtactccaggactgggtggtgccttttgaattctttgagttgtggaaaatgtcttgatctggaaactgaatggtgtttctggtgtttctttggaaacataggtttagtggtgtgagtacaggacgatccaga

SEQ ID NO: 27309 - DNA, 1087 bp, Homo sapiens
taattttgaagtgtagagtataatttagatcaaatttaagagttttaaaattacctctgattatgggatgacacttgaaaaagtaatcataatacttaccaaaggtttaacaggctacctgcttccagtggagattgtgtgattgtgtttacgaaaaatctgattaactcaagaaagggccattcattgcataccgaattcctaattttttaaaaaaagatccatttaatataatatattcttgggtgaccaaatctgtagcataggaatgacttaatgtgattttttgttggtgggaagacattctaaagggagtcctcaataaactgcatttctaacacacaagaggttcttgtggcctgggggcggtggctcacacctgtaattccagcactctgggaggctgaggcaggcggatcacttgaagtcaggagttcgagaccaggctggaccagtctctactaaagctatgaaaaaaaaaaaactggacgtggtggtgggcatctgtaatcccagctactcaggaggctgaggctggagaatcgcttgaactggggaggtggaggttgcagtgagccgagatctcaccattgcactccagcctggacaaagagcaagactccgtctcaaaaaaaaaaaaaaaaaaaagtccttgtgatgggtttactttttgtcattggtgcctgaccgactattgccttctgcttatttgtcttttagggtcatgcttttattgtctctttgaaattgatcattgagtcctatgagtcctccttatgccttccacctccatttagttagctggtttttcttgcagtctctgggtcctttttgttgttgtttgttttgcatttattattattgttattcatacatttttgagacagggtcttactttgttgcccaggctggagtgcagtggtacagtcatggctcactgcagcctcaacctgctgggctcaagggatcctcccacctgagctttctgggtagctgggactataggcacatgccatcatgcctggctaattaacaaaatttttttttttgtagagatggggtcttgctgagttgtctacactggtct

SEQ ID NO: 27310 - DNA, 1022 bp, Homo sapiens
aggaactgaatttttagcttaccttgttaatttcaatgtagagccacatgtggctagtggctaccatactggacagtgcagttccagatgtgtggcagcagctcagttccacgttagtcaggagggagtgctccttcctcccctctccttctatcctcccatgcccctcccctcagcaggtgggtcttacttttggatggagaacaccttctgagtttaatttttgttgcttctttaattctaacagtgtgaagagtgccagtgctggcagcatggggtctgcatgggattactggaagaaaatgtgcccgagaaatacacctgttatgtttgccaagaccctccaggtagagatttctggagtcagggatataacagtatgtagccttttccttggcacagctggctgtgacacattctaaatgtctgcggtcttgagactcatttcttcagcatcggctagactccagctcctcctcgcctctgttgctatcctgccttgtggccagctatcctgaacgtagcaataagagcacacgtgtgaaggggcccacctagtggaaggcctggccttgagctagaacttttccttttctttaattatggtttaaaaaaaatgcatgaggccgggcgcagtggctcacgcctgtaatcccagcactttgggaggccaaggcgggtgaatcaactgagatcaggagttcgagaccagcctggccaatgtggtgaaactccatctctactaaaaatacaaaaattagctgggcatggtgacaggcgcctgtaaccccagctacttgggaggctgaggcaggagaatcacttgaacccaggtggcggaggttgcagtgagccgagatcatgccagtgcactccagccagggcaacaagagcgaaacttcgtctcaaaaaaaaaaaaaaaaaaaaaaaagcatgagatctaccctcaacaatacagtattgttgttaataactataagcacaatgtcgtacagcagatctccagaactttcatcctgcct

SEQ ID NO: 27311 - DNA, 1050 bp, Homo sapiens
aaacgcgttggtgtgactcccgtgtactaacccttgtctgcactagccctgctctaatcacctctcagggctctggaagccattctgtgaggcttactttaggctaggacattggcccagtcagtaggaagcagctgtgggtcccctgagctagagtgctaccctgaggtagttggaattggtacagtgggcaagctcctgcccagttcctaagtgggaaataggaaagggaggtagggatttggagtattgaaactgcagctagtatttcaggtggctggaaatgctggctggttgaaaaatgggccaggggctatctccattcagtaatttccatgccattgcatccccaggtgaaggaatatgtctccaaaaaggccctaccagaagaagcccctgctcggaagctgctggacagaggtggagaggggctgctgagctcccagcaccagtggcagtttaacctgctgacccatgtggaatctcttcaggatgaagttacgcacaggatggactccattgagaaggagttggatggtagggctccttcattggccccctgtgcattggcatgcagtcgagcacccccagacgagctgctttctgaaccccccagtctgagtttacagggaccgctgtactctttgcttctcttcttttcagcctctccccacctccattctcccctcaggatggatgagccttacttttagtatttatcaggtgcaagatctgcatgatgttgggtcctgcctcacttgtctgatcccttctgtaaagttgagtatgcagagagagggcaactggcagtcctgcttgcaggaaatatgtgatctaagccaatctttacaaacaagttctgtgagaaattaaaattttgacttgagttttaggatatctgaggatttaatctgaaaaacctcttattccaatctttgataaaatctaaaatgaagctttctcctcgtaagccagtagagatttgagaatttgcctgagtcatttgtatagccctgagtattccttccagatattggtggttacggacag

SEQ ID NO: 27312 - DNA, 1033 bp, Homo sapiens
atcctggggcacctgcaggaggagcttcgcatatttaaataaataaacctagcatgctgaatgcacgtgacaccgactgacttcagggatctgggccaggagtgtggtggacattggacaaagaggccattttggctgcgggaggacactctgatctcgaagcctgccataaaggtagcaaatagactcttgggattcccctcttctgtgcacatcgttgaatgaagagagtctttttgcacaaacttcacttgaaattgtgccactgatgataaacggaatgagagccaaaaaagtttagttggagacagttgtaaattcaatttggagtttatttaattgacttttctatcacgttggggcacatgccaactccctggtttcttcctggcatggtgtttgggcagcaggcatcattttccttttctagcttcataggaatattgtgagctcaccatgctgtggaggttgggaaagagcagagtcttggctgccctgctttctccttaggactcttcacttttctcaccacatctcttgcatgacttcatggtactggggacaagtttgtatgccttcaccccagagctggctgggttatggcttttgtagcagagcccatacagcctatggaagaactagaatctcactcacagtaataagaatctaggaggaattccaaaccgaagcaggcagggtctggaacccaaaggacagcattttctacccacttcttaatattgacagcttccccgttctatttaatgtccaaaaatgtttcccaaaatttcaaactctttcactgtaaagatttgttacaaagaatgtggtttggggaattaccttattttatattgttgtaaacaaacttcaaattctacatgtgcgacttttctccttcctgaagggtgtttagtagtcagcgttttcagaattgttttgttactatactttaacattttacatttcctgtttgtattattttgtgagagcaaggtgatcatgctgcttaaggtccaggtacaacctattt

SEQ ID NO: 27313 - DNA, 1027 bp, Homo sapiens
cgtgccactgcactccagcctggagacagagcgagactccctctcaaagaaaaaaaaagggcggggaggatgatcatctctgcctggagataaataccaatgattacacaatcaaagtgatagtatttattgaaacttactgtatgccatgtactgcaagaagtgctttgagtcatttcacagtaaccctgtcagatagatgtgattaattatccactttttacagaggagaaactgaggctcagagaggttatgtcactggactaaagttacgcagctggaaagtgcgaggcggtctgagtccagagcccttctttctaccatgacatttactgggggcaatatctggaagtaccaggttggtgtccagtggagccaggcaattcattggtaggccagggccagtccaggtggagaggtgtgtgaggggtgtgtgtgtgtgtgcctggtgaggcaagggtggctttgtggactgaatattactatagtgctgaggggtaggggtagataagtactgactaggagctctcagagaaggattagccttggccttctccttcctggccagggtcccccagaagtggggaaacaccagactccctgctcccattggcttttagggaagatgggctggctctggacacatcccgaggccacagtggggactgggctaaggaggccctgtgggcagggagctgagccttggtggatgggtgggggtggagcaggctggcactgcttcctttgtgggctagaggcttgtggatcagaatagtaacagctaacatttattgagcatttattatgtgccaggcccagttttaagggcttccatgtacaactcatacgttcttcacaaagccctgtgaggtgtagatgaggtataggagttattcttcccgttttacagattgatggagctgtggcttagatagttgttcaaggtcaaatagctaggctgtgggggagtcaggattcaaacctaggcagtgtgggtcagagccatgttcctgaaggccatgccagg

SEQ ID NO: 27314 - DNA, 1061 bp, Homo sapiens
ccactcactatcttcgaggggaataggacagagaggttcccagtgaggacctggcacttgcatagaacagggtttaagtcttctttctgtttttactagctgtgaggcaattggcaagttaattaatctttcaaagccccagtttgcccagctgtaatgtggatagtccaagtacctggttttagggttgtcatcaagattgaataagttaaggcatgtaaacatcttggcatggtaactagtacatagtgaagtatccatgaacattagtggagatgatgatgatgtcatgatgtgatgtcattaatggtctgatacaattaatgttaaatgggaaagaagacccataagattatcagtattcatattacaatggtataaaattaggtatgaacatagatacagattggaagaaaacaggtagaaaatggagttccagcaagcatatgggaagtgaataaaacagaaaaacaaatatttctttactgttatatttacttttctttagttttaattacaaaaaaaatttgtggaaaatctaataattcagaagtgtaggccaggcacggtggctcatgcctataatcccagcactctgggaggctgaggcgggtagatcacctgaggtcaggagttcaagaccagcctggccaacatggtgaaaccccatttctactaaaaatacaaaaagttagccgggcatggtggctggcgcctgtaatcccagctactcaggaggctgaggcaagagaatctcttgcacccggaaggcagaggttgtggggcagtgagccgagattgcgccattgcactccagcctgggtgacagagcgagactccgtcacaaaaaaaaaaaagaaagaaagaaagaaaaaaagtgtattctccccttagatccccaaacaaatcctactctccagtcgtagctaataacagcatgttgtgtatccttccaggatattttctataccaacataaacatacaaaccagaatgggatcatacattgcattattgttttacaacttgcatttttcatgtaactacacattgacatctttt

SEQ ID NO: 27315 - DNA, 1049 bp, Homo sapiens
tctgccgcccgggttcaagcaattctcctgcctcagcctccttagtaactgggattacaggcatgcaccaccacgcctagctaatttatatatttttagtaaagacagagtctcaccatattggccaggctggtctcaaactcctgagctcaggtgatccacctgccttggactcccaaagtgctgggattacaggtgtgagccaccatgcctggccttttttttttttttttaactttcagtagagatgaggtcttgctatgctgcctagactggtctcaaactcctgggctcgagtgatcctcccaccttggcctcccaaagtgctgggattacaggtgtgagccaccatgcttggcccattgtggtcattttaaaattttattctctcagactaaagagggtagctactaactcccccattttacacctggggaaactgagcaccagcaggataaaatgagttatccaaagtcacattgccataaagtaacagaggtgaagacaaatctagatctgattttgaaggctgagttctttccatttattttcctacccctgaacctgtctgttctagcttggccagccccatgtaaccccagagcaaaacccattgccctaaagctacaacagactcacctcctcatctaattaacaccttccttaattcacgacaggcctggagggggcagggacttggccaagatcactgagggcatcagcagtggagttaggacccggggcgggcggcggtggggcaggtctctggcctttctcctctcctttaactcagtccacagctcccagactcctgctagatccagtgacagacaaaaagaaggagaccagatggatgctgtgatgagtcatgtgctgctctggggagacagggcagctctggccactggctttggtttcatgggatgctcctgcctcagaggatgcctatggcagcagtagcctgcagggaagatggggacccctcacacaaggccacccattatgcatggaagccctggctctcctcctgtacacaccagccatggacc

SEQ ID NO: 27316 - DNA, 1014 bp, Homo sapiens
ccctgtgcaagcaccatcaggtttgacttctcagacagccatggtccagagggcagctcagcttgggaagggatgcccgaggaacagacagatgtctggagggaaagcaggagcctcactgggattggtttccttcctgaggtagcttaggagtcagccatagtggatccttgggtaccagagatgagcccaggggaagattctagctttgtccaagggtaagcttaccttccagtggttcttccagaattacctgatctgactttaataagctgagattgtccatttcttgtcctgaattgagttaacatgaatttttaagcagccttgcagataagcgtccttgggctgccagccaccactttgccccagaagtagccagataaacagcttttggcaggtccctgccagctcctgcacaaagctcgtcctcccttgacctaaggagatgactctgtcatgctgcactggctgggaacactacccatataggtagaatcctacaactctggctatacctggctcaattcttgtgcccagctgtgggacttactgctcttcttcctggtctctaattctcctaatcttcctgaacactccacagcattctagtttctctatctggctgtatctcaccctgtctgctattggtgagtcagtacctgaaaggtatctggaaggtccagggtggttggggaaggtagtgtcccatcacagaggagactagatgcaattttttcctgcccctggtccctagtgtgggagcttggccattcttctggatgtccctggcttgaggaggatctgtactgtgggcctccccagggcctgagcagttgtgcatgttgggctaggaggggcccagactggacatcctgttaagtacagtggcccaagtctcagccagaaagtggacactgggatccaggagggatctaggaggcacctgaatgagtcagagcagcccagtgaataggattagtgagttattatagctctctggcagttgctgcc

SEQ ID NO: 27317 - DNA, 1033 bp, Homo sapiens
gctcctccgcagcccctccctcgctccccatctcgggtccccttctcagagcgctcttcagccctcagagccgccctttctgggcgaccccactcttcgggactccccctcagagcgcccccagatcttttggggttccccttgagaacaccttccactctccccaagggctccccgtgagtttcttgcacatcctttgggggttctgcaccccaagtcgctggggtctcgcctcctctgaacccccattgcccctgggctttccctcttctgggtgttccccatatccactgggagctcctaggtcccaagttggggtctttctccttgggaccccccaatatgtcctcagctccctgacttcaggagctcctctctgctttcccctggtttgtcccctgtcgctgtctctccttgttctctctcaggtctccgagcacccccacttctcgggatcggggtcccctgctttgctctccctgcccctctgtgcccccacatctgtctcggtggtctcgccactctgtgcctcttgcgctgaaggcccccctttgagcctgcttctttgcctggggcccttggcccccccttgctttttcagccctagccccctgtctccccttctctctgctccttgtctccctctccctttttctgtctttgccgggtctctgggtctctgacccccatccggccctcatggctttgtgtctggagctcttgaagcaatgtgagtggtggggtgtccgggtcgggccggagttggcccgcaggctggccgcggccgaggctccatggggttggcgctggggcaagggctggcgctagggcaagggggctctgaggcctcccacaaagggggaaaggagggaggggccaggctgtctggcggaggagggagtggggggccttcctgctctgaggcttctgctttagttgcttgagtgtgtggagggcaccacgggctgggcatccctgcccacttggccccgcatggcctggcactttgtgatcgcttgtgggcaggccgggc

SEQ ID NO: 27318 - DNA, 1044 bp, Homo sapiens
ttccctttaactttcctttactatacttaattctagttatttctagagcaagaagatgtttgcctgcaaaggaaattatgtcataccaaacgatattggtattaccttcctgtctacctgggagggaagaggtcttttatgatgtttctggataaccacaccagaactcctgcagttgaacatgaactctagagggggcccttttcatagccctgtatcagttactgtaacttacagacagatggagtcacatagctcatgtcccttatccaaaatacataggtcagggaactcagcagtgcccacccacccaggtggctgcctgtattgactgaattttgcattgccctcttgtctaaacctgaagaactttaaacttgacaatgttcttttcagataatttatttttctgaattgtggttaaatatatataacatgaaaattaccatttcaaccaagtttacagtctgtggcattaaattcacactgttgtataaccatcaccaccgtccatctctagaacttgttttgtcttccccagctgaaattctgtacccattaaacactaactccccattccctcctacccccagccactggcagccaccactctactttgtctctatgagtttgactattctagctacttcatgtaagtggaaccatgcagcatttgttcttctgtgactggcgtatttcactttgcataatgtcttcaaggttcatccatagcatgtgtcacaattccctcccttgttaaggctgagtaatattctattgtatgtagagactacattttatgtatctattcatttgccaatggataggtggattgcatctaccttttggccgttgtgaataatgtttcctgtctcttaagaatgatactcttcattgaaattgcaaggctctctgattaaattctgtacatccactcaaggccctgacttgtgggcacaaaagttgttttttttttgttttgttttgttttgtttttgtgagacagagtcgcactctgttgcccaggctggagtgcagtggtac

SEQ ID NO: 27319 - DNA, 1028 bp, Homo sapiens
tgccccgggacagacacgtgagttttctttcttccagagcccccgtcccaccgggatggcgggcccgcgcgggagctggtgcgcggagtcggcccggggtgtggggactgtggggtgcaagcgccccgagcgccggacgattcctcgccgacccaggagccatgtgctccgactcggtctgggccgcgggggaggttgcgcgctttgtctgaactgctgggaatgcgggcgtgagtgcgcggcccgggggagtgtcgggaccagctaggggagttgtcagaaagttcgtgcgggagtggctgcaggtggcgtcgtgggagtctgtaggagggtgtacgggatgttgtgtcgaggggttgctgccacaggtcactgagggtagaactgattgttagtgtgatgacgcctggagttttccctgtcggagagatcgggggtggccgggtcggttggagttcgtgggtgggcgggtacagaagttgggctagttgtgtgggtcacagttgttcgtgctaggcctggggtctgtaagctgtgcgtgtgcgtgctgtatgcgtcggtgaaaaccctagggtttgtaaggcttgagcgatgggtccgggccagttatcctagcgctgttggttaattgcctggcgtgagtgtgtctgggtgcggtgtggggtgcatatgtgggaagcctcccagactacagatggccctgtgtggcggaacaccgaggtggagaagtttgtgtagactgaggggtcattccccagggcccacccggggaaccctgcagacagacttggctggcagccagggtggaatttgtacagataaccttgagtacttctcacagccggccagggctgcatcactgagcccagatcccagctgccctggccacctagaaatggctgtctgacctcagaaagcagcctgcagtggtgctctctgaggagtggcacgtctaaccagtgcctgtctcacctccaggtggcctgactgaaagggtagacccttccctcgaaagcctggcctagcca

SEQ ID NO: 27320 - DNA, 1063 bp, Homo sapiens
tgggtgggtgggggaagtaaactagactgaagcgatggattttttttttcttttttttctttagtgtttttccctttgttcttgaacacttttgccctgcagcctcagttttgaattcttttagcaacttggattagaggggcccatatgtcagaagctcccagcacctcctacttgggagaaaagtgagccatctgctggtcaggaagtcctccagagaggcagcttttcccacaatggtggcaggaaactttggggaaagcaggaatggtgtccactgctgcggaggaactgccttcagagaaggtggggctggaaaagggttagaagcctcctagctgggattgtctttgtttcacctttctttaaattagaattacagaagcccctgcccagtgaacagataacgattggtcttatgctcctccctttcccccattttttcttttgctgttttgttttttgttttttgtttgtttgtttgtttttttgagacagagtcatgctctgtcacccgggctggagtgcagtggtgcgatctcagctcactgtaacctccgcctcccgggttcaagcaattatttgcctcagcctcccgagtagctgggattataggcacccgccaccatgtctggcttttagtagagacggggtttcaccatcttggccaggctggtcttggaactcctgacctcgtgagccaccacgcccagcctcttttgctgtttcattgctgacagtgttcaacaatatgccccatctttatatatcctaagaaacactaatcctaggttattgctagccaaaatatttttgtcctgagtagtgtcactgggccaaaagatagatcaggacgacagcctttagttttcctgaaatcaccaggtcaggcacaaggagaaaaggttcctggatactgactaacttgggtgggtggatctagccaggagaaagacagtaacatgtgttctgtactttctgggaagatccctgaagccatcacagaggctccccaacttctgagtcgcccatctgttgctgtgggagtgtgaacggatcgctg

SEQ ID NO: 27321 - DNA, 1035 bp, Homo sapiens
gactcggggaacggaagactggcgcgggcctgccctcgtcctcgttccggcacaatcgagtagggcagtggggcgggtggcccaagggtgtcagagcaaacttggcgggcactgggcggacagctgggcttggagctccccgaagggtggcctaaggatgaagccccctagttatgcggaattggcgaggagcggggagaggcgttgtcattcgcgggcagggtttgtgcctgaactgggaaagggagctgaattcgattcggcctccgccttttatgtgcagtagggttttgagtaggttacttgtttctttcgaattaagtagcacaaacattaacagtaacagacttctgctgagaatgctttctacgtgccaggtgctctgcaagcggaatctcgtttaactcagaataactctgaagtggggtactgtggtacattaaagccttttgcacatagtgaggctcgctaatcttgagctgctgttgcttgttgaatgtaaaggaccgaatactttgataagcatgagtcaagaggggagactgagaccacccgctgggtgagtgtgaggtgtgggggtggagaaacgccaccagatatgtgcgagaattggttgggacttcagaacgttcttactcgtcccattcggaggatgcttcgtaactctgctccatgatctggaaggggccatcacaaacagcttgattccaggtagcttgaaaagcgtattatatttgcagtcatttcttggttttctgggctgccgaagtggattttccttcctgaagttcctgtaaagggggatgggaggcacttcctgaaggtgcccttgttctgcccccagccctgcccagctcttgcaaaacctgcagtctctaatctgctgtgtcatttctttcttttcttgtataaggactggtttctggaatctagggcagatcagaaacctgagtcgtctgtgttcttccattaaacttaaatatagtggcacctgcctccagcatttatggttctaatccgtatgtgcggccagta

SEQ ID NO: 27322 - DNA, 1044 bp, Homo sapiens
gtccaataacacatgtacttactaagtgcccccctatgtgtgtggctaataataagggaattcaaggtggaaggcactcacatgtattaaataatggtagtcactacatcaggcaattttgatacatgtttttggacttctggtgaggaaaatgcattatgattaaaacctttcctggattcgggacagtctttttttttttttttttgagacagagtctggctcacccaggctagagtgcagtggcatgatcatggctcactgcagtctctgtctcctgggctcaagccatccacctcagcttccctagtagctgggactacaggtgtgcaccaccatgcctggcaatttttgtattttttcgttagagatggggttttgccatgttgcccaggctggtcttaaactcctgggctcaagtgatccacctgcctcagcctcccaaagtgttgagattacaggtgtgagccaccacctgaccaggaacagtcttaaagtgaatttacattttattcattatagtagtatggacaactagactaaacaattttcctttgccaagtttctcatatctgccttagttttctttgactgaagaacaaattaccataaatgtaggggcttaaaacaccaccgacttattggcttatatggcttatagttctttattttattttatttaagagagggtctcactgtgttgcccaggctggagtgcagtggctattcacaggcatgattatagcacactataacctcgaactcctgggctcaagtgatcctcctgtctcagcttcctgagtacctgggactatgggtgcatcccaccgcaccccgctgttagctgataatcctgcaggtcagaagtctagacaggcttgcctgggccctctgcttagtgtctcctgaggtcaaagtgaaggcattggccaaactgggctcctcccggaagcactggagaagaatctgcctccaggcccattcatgttgtcgtattgtcagcaaaatccagttcctgtggttgtgggcctgaggtctccattt

SEQ ID NO: 27323 - DNA, 1026 bp, Homo sapiens
gtgacctctgcctcccgggttcaagtgatcctcccatctcagcctcctaagtagctgggattacagacgcgcaccaccatgcctggctaattttttgtattttttggtagagatggggtttcaccatgttggccaggctggtcttgaactcctgacctcaagtgatttgccctcctcggcctcccaaaatgctgggattacacgcgtgagccactgcgcccagccccttgattatttttaaatattctgttttatatcttctattgactgttcagatctaatttttttttagtgtttgtctagttttgtttagagattttaatatgcatccttaatttctcacggtatatcttgaattattattttgccatgtcacaaatagtaaaagaaccctataactgtatttgcatttaaactctcatcatttctgctatcattgtcatactttttgtttgtttgtttttgtttttgagatgaaggcttactctgttgccaagctggagtgcagtggcgcgatcttggcccactgcaacctccgcctgctgggttcaagcgattcccctgcctcagcctcctataggtgcacgccaccacacccagctgattttttgtattttggtagagacgaggtttcactatgttggccaggatagtctccatctcctgaccttgtgatctgcccgtcttggcctcccaaagtgctgggattacaggtgtgagccaccgcgcccggcccattgtcgtactttttaaccttctttcaaggatcccagcctttgctgtctgttgttcagtgtctcaatttcatatatttcatacagttttatagttatttttggtaggaagggaagttcaatatatttaattctgtcaagggcagaattgatagtcccaattggtgtctttttttttttttctgagacaaggcctcgctctgttgcccaggttggagtgcagtggtgcgatcatggttcactgcagcctcaaacttctggactcaggtgatccttcacctctgcccctcga

SEQ ID NO: 27324 - DNA, 1092 bp, Homo sapiens
gatcttgggccactagtcactgggggaactagtaagtgcagtgtggtacgtgctttgggggagcacttgagagggtggatacctggcctctcctgggaggactgtcaggaagaggtgaacatctgagcagagttgaagataggacctggtttggcaggcaggaaggacaaggaaaaggtgctcccggcagggtgggtagcagggtcaaacacgtcaaatggcgagagcgtggtatagctgcaggaggctagagggtaagattttggagttggagttagggctatggtgatgcaggcagcatggagagggagggtcagtcttgagggcatttcatgctgtgtcagaagttggatcttgtctgagaaaaacagggaaccactgaagggttttaaaggtaaagcaacacggttacacttgtattttgtgaagatcagtcttgaagcagtgtgcagaatggattgcatggctttagaccgcttaggagatgactgactgggacaatgtaggtgagaaatggcaagggcctgctgtaaggcagtgacagaaaccagaggcgggactgggcctgagaaatgaaaaagaggtagacttgataggcttggagggtggggaaaagtcaaggatggttcccatgtttctggtttgggttgctggatgcatggtattacctgtgcatgagctgggaagtcctggtgaagaaatagaaggttttaagctcattttcttttttatttttatttttttgggggactgggtctcgctctgtctcccagactggagtgtagtggcatgaacatggctcactgcagcctcaacttcaagcagtcctcctacctcagcctcccaggtagctgggaccacaggcatgcgccacctgctctgctactttttgaattttttgtggagatggggtcttaccatgttacccaggctggtctcaactcctgagctcaagcagtcctgcctcagcctcccaaaggcctgggattacagatgtgagccactgcacccagcgttaagctcattttagatttgttgagcctgacttggccttggtgacatctaagtggagatgccagtaaagttggaatc

SEQ ID NO: 27325 - DNA, 1035 bp, Homo sapiens
aagtatgaagtgactgagatggtcttcagatttagagtgagagatgtcacgaagctgtctgcagtggggttgacagtggttcgtgcatctcatttctgctgttacttgacatccagcatatttctgttttgttatggcaggaccttgttgctcgcctggatgaactcgggggcgtgtatctccagtttgaagaaggactggaaacaacagcgttatttgtggctgccacctacaagctcatggatcatgtggggactgagccatccattaaggaggtacctatctaacaattttcaggcatgaaacccaaaggggtcatcagctgtatctgctaaggatggcttttatcagagaggaatgttcagacagtaccttgggatgctgtcactcagtgtcctgggttagggattaagaatgagaaatagaaagatgtaatgcctgtcttcaggaaatgggttgctagtgaggtagacgtgtaaacaaaccatgcttgctttaaatggggtatgtacatgtcacgaggtagtatcaaggaagccacgtgtattactcctgtttcatctccctttcttcccagtacccttttctgcttgtcgcctgaatgctttccactctggtggctcattcagatccttctctgggctcacaattgcttctcctcccttcccccttatgctcagcaacggctaaatcttagctaatctttgctgatggacatagttcactgagaggcatgtgtgtctatcacacatccgccaagagttcattctttttctcaagaggaggttgttaacctgaaagaatctttagttggaatgcatgtgggaagcctttttgagtaggaccgtctttgtaccccttgtttgtgagaagttaccagcccttaatctaaagtacttaaaatacaagctgcttttatttaaattttaggaggagagatttgggttttaagtgagaattttcatttctttatgcattatgagttttgtgccaagtttctttaagtaaatagttatctgtcttggataattggaa

SEQ ID NO: 27326 - DNA, 1114 bp, Homo sapiens
ctaaatctttagctggaggcacaaggaaattgaaaatgggcctcttacagttccacctcatttcctttcttttcaccctctggtgaagcagttaattgggcagcaaagtgaccaaaaggctggcgggaaaaagaaattgcagcaatagcaaagggcttaaatcatctgcaaactgggcagtcagcctccaactagtcgagaattggctggacccgtaagttaaatttccttccttgtaccagcaaaaagttatctctgagctgggaactagggtggcatggccactccttctactctctggggcaggtctggcagatcccagagctctcactgtgacaaagcgctaataaccgtctgctgcccggtggattcaatgttaggcccagggagaatcttgaaattatcagatgaaagattgtattattcttccatctagacatttgtccgactccataaccagaagactggccaggaagtggtgtttgttgccgagccagacaacaagaacgtgtacaagtttgaactggatacctctgaaagaaagattgaatttgactctgcctctggcacctacactctctacttaatcattggagatgccactttgaagaacccaatcctctggaatgtggtatgtgcctgaatgtaccccgacccaggtgagagtggctgtgccccaggcactggtggctctttttcaggggcatggggctcttcaccttcgccttgcctgtgcctcctataaataagcttgggaggtgaggcactgtgtgcagtctccataaatagtcctggggtcatgcacggggcttggcaacatggtacgtgcttaataaatattaagtgagtgaaggaagtataaactttgtgagtgctagtatctgtgaatttctataaacattatacaggaaggccgttttcatattatagcaggcactattggggttacgtagatgtgaaagttaaggccctggcctttgagatatggcatagctcatgggagggatgagatctgaattctgataacaattcaggatgatgtagaaaagtgaattgtacaatgtgcaaaatgctaattaactaataaccaacatttgtgtagcatgttgttgtt

SEQ ID NO: 27327 - DNA, 1009 bp, Homo sapiens
ccttgctgctacatgttgagttctttaattctttaaataagtcgatttcttttcttgattaaaaagaactttttttatagagatggggtctcattatgttgcccaagctggtctcaagctcctgggctcaagcaatcctcctgctttggcccctaaaagtgctgggattatagacgtgagccaccttactcagtctcttgagttttaaagtccgttcccaccctgctatccccaaatcattgcttgaggaagaggaaagtcacttgatcatttggacatttggcatttcctagcatttgaaaggaaaccccctggtagcaaagtgttcttgatctgagggcagacattgatttgagcagacataatgtgggacgtaagttctagccgcagtcaagagttgtgggccactacccttcggctgttcttatttcatactcatgccatcctttctgcatgaacatttctgaatgcccacatattagtgtacctaagaacctctgaatactggcaaggaattaggggtgcacaccccagccctcaagattaattccatgcctgtgcatgtcttttggaactgctttattaatgggtttggagtctgccattctgcaagactggatcattatcaccttagtcctcacccctgggaagagctgccactgaaggatggtgtgtgtgtgtcagcaaccctgcctctgcttgctggagcctgctgggatcagttactcactgcagtcacctcctcagcttcacagtctgtctagattgtcattttcattcattgtgcttccccatccctccttagagtctagggaaaggcagcggaggggaaacaaagagtacaggagataggttcttatcccctttaacactttctgtgagctgagtcccatttttgagaatctttctgtgttaggttagatgctgagtgtgacttggcaagaacacggccacacggcaggaatgtgcaggtttctgtaatgaatggtcaggatgtcatgttctaagc

SEQ ID NO: 27328 - DNA, 1031 bp, Homo sapiens
cctggaattacctcatctccttatgttgtcacataccactttcttagttattattgagtttgttttgttatttgtatttaagttgtcatcagcttaattatgaactagctgtctcacattcttttgtaaaatgagatggggcatacataaatagacttgggagataaatgattattcccttataaatgggatcttagagcgggagagtaccttagtctctctgttgtcaccagttaggaactgtaactgtgaactgaaaccttcagtaattctgtgtttgtctccattttctttcagaacagcacattagttccagaagaaagatggaaattctgaaaactgaatgtcaagaaaaggagtcaagaacaattcacagtatgagaagaaaaatggaaaaaaaaaactttatttaaaaaagaaaaaagtccagattgtagttatacttttgcttgtttttcagtttccccaacacacagcagatacctggtgagctcagatagtctctttctctgacactgtgtaagaagctgtgaatattcctaacttacccagatgttgcttttgaaaagttgaaatgtgtaattgttttggaataaagagggtaacaataggaacaaaggcctgattgagagcttattctcatacttttgggtggtggggtccttgggtatatgacatgaggacttagttggaaatgctgttgatgccagcatatttctccaggcctttcttggtccttcttgccccttgctcctaacagaactgagaactgcctggaaaggccagcttccttttttcttctccagcagtgagcaccagctgtctgcataggagccctgttggtatctgaaggccccatttggacctctaggggtccaaggggataggtttttatcccctttaacattttctgtgagctgagtcccatttttgagaatctttctgtgttaggttagatactgagtgtgacttggcaagaacacagctaaacaacaggaatgtgcaggtggactgcagctaggacctctgct

SEQ ID NO: 27329 - DNA, 1021 bp, Homo sapiens
aagcccttgcctgggtgatctcatggagtctgaaggtgccggttggggcagggctggctcgggagaggatgttggcagccaaggccgccaatgtgcagggtgactttgagtcctgccctgccctctctttgccttctctgtgtatgaagaggctaaactggggagaatgccatgcgtctagccccagccccgcttcttcgaagcctgccttcggtgtgattggtcccattttccggttgtaagtactaagacccaggaagggaaagccacttgcctagggtctcccagttgccaagtgacagggccaggccttggctgtaggctctggactcctagtccagcagagccactgaaaaaggccaccacttccctgctctgggccttttgccggagcttcatttcctgcctcggtgtgtgtccccacatctctatctcccttcggattcccacaaccctttccttcccctccatggcccccaccccttatctccgtgggaaacccctctggcttccccttgagctcctgggggccacttcctctggggagcctcagtttcttcatgcctgaagtaggatagtgagtcatggttcccaggatgtcccaagaggacagaaataaagtgcttagcacacattagggactcaatcagtggaggcgggggagggccaggcacctgctcaagtcctgcctcctctggcagctgatgccctgtcctgtgattcagtttctgaagctgtgaaatgggcctagggcttgtacctggtaaggctaacaagaggatggtatgaggctgtaccttaggtccccacctggtggctggctccgtgtcgctgttcctgggggagggagacccagtagaggcctcccctgtgttcaaggcctcattccctgctgtttgtccaaagccaagtcacttagtctctctaaacctcagcctctgcacacctcccttgtgaggattaaatcagctaatgtattccccgtggctcaaatctactgggtgcttagaaaattttatat

SEQ ID NO: 27330 - DNA, 1050 bp, Homo sapiens
cagtgctgtgatggggatagcctgggtggagaaggccttggccacgtccccctggagccagcatgtggccagggagacagcacatggccccagcccaggccaagagtcaggcagtgggcgagcccagagtcggctcctggagcccctgctgtggacctgcctccggtgatgaccacagggactgagagggtcaagggcctcgaaggaaagccagtgaagttatctggcaggtggaggtggtggaagggcagcttgcgggagggtgccggactggagggggctgacgccttcacgggtgtggaaggcaggaaggttctagaaggcagaggagaatcgatccctgggtgtcctcgaaggcctggctaaggaagttgggggtttccactgccccgagcgtgtctggcttgctcatgccccacttgccttgcgcatgctcttccctttgcctgaaatgccctttctccagtgtctgcctggggaactcctgttcatcgctcaagatcagtgcaggactgccttctcagaggggcaaaggggaacagaggtgccagttgccatgccagtcgtctccacctgtgtccttgtattgactcctctctgcagtctagccagggctgaagtgatcggggagggggctgtctccattttgcagatgaggaaactgaggctcagcgatgtgaaggcccttgtccaaggtcacacagctgccaagtagcaaagccaggattggaaccgaagcagcaactttctgccctcctcaacctgctcttggcgggggggtgggagggggggctctcccggctccgcctccccccttgcatggccgagtcctggtgcgaagctacagtttccttattgtcaccagctgtttgtgtctgcttcccccctaaactgggagctgctggagggtggctctctggtgcacctcacttctgggtccccatagcacctgtaactcagcacagtggcgggtgcccagcaggtgatggtgaacaggatgaatgaacagcagtgacaatgtcaccatttcttgtgctctctgtgtgagct

SEQ ID NO: 27331 - DNA, 1048 bp, Homo sapiens
gagactggtggctggcccactcgctcagcacaggacagacaggctacatccccagcaactacgtggcgccctccgactccatccaggctgaggagtgagtaccgtctctggctgcctctacccgtcgtccctggacactgccggtgcagagtgcctctcctgggctggggtgggaggtctggctgtccagcgccccagccatatccagggagaagcactgtgagtgggcagaagcctggacagtcagcaccatcctccgtcctcccacccccaggtggtattttggcaagatcaccagacgggagtcagagcggttactgctcaatgcagagaacccgagagggaccttcctcgtgcgagaaagtgagaccacgaaaggtacgagcgctcttgctggccaacggatactgagtcttctgtgagtggtttgagctgggtgttgtggaatgagcaggagtttggtttgtggagtagggagggaagaaccttccgggtggaggtaatggcaggatcaaagtcagggaggtgcatttgaggaacactgagtaatccgcggtggccagatgtccagagaaagatgaggcttagtctctctggcctcagttttctcagataaaagatgaacataggttgtctggaggtctgagtgtcacacagtaacaggctcgttcccagggtaggtgctgctacaatgagccccgcttcttcctcttccccaggggtccctgggctgcactggatgctggaggctggttttgccctcccccaactgcagtcctggtccctgcccctctcctgtccctcccctgagccagagaatgaagaccatcccctttctctccagcccctctgaaagtgggttgcaggcgcccgtcaccatggcagccaagctgagctgcttcctgtgggcctggggctcagcgggagatgggaagcagagcatccatgtcgagccgtgcatttacgagcagtcgtgcagccatgtgcgggtgtgcatgctgtgtgtacatctgggcgtgtgtgtgtgtgcatgtggggtggaattgtc

SEQ ID NO: 27332 - DNA, 1049 bp, Homo sapiens
gtccccctctctccctgctccacgcagtgtcccactgcccgcctttctctgcagctggctggtatggagggggctgccctgaggagccccagagtaagctggaagggaggggacagaggctggtgtcatttgtctctgtagccctaggaccggtctgaaccggttgctgggagaggaggagggggcggccagatcgattgcagcaaagagggaagagagcggcagagggagctcgcggggcttgcgtgctgggtgagggctcgggcgtgggcgcagtgctgtagcccacccacctgggcatccgaagctgactgcagtgtcgggcctgtgggtgcctgtgtgcccgtgtgtctgtggcacacatggcctctgtgcacaggtgttggtccactccccaccccgagcctcctcctcctctcagcttggcctcctgacttcctctgggatcacccgccactctctgtctcttcggccaccgctgtgtagctcattctgaacccctttccctcagatcagaactctccaggggctgtcttggaatcttgggataaagacccccaccggcccctgagtggtctaatcctaactgcctccccacctccgcctggtgccacccttccccacctgctccctgcgcccctttgtcctccgcttctccagccctgcagctgttctttcctcagagcctttgctctggctgtgcccctgcctggagggctcttccctacttaacccctcaccgtcctgcacatccaagctcagttgctgcttcctccaggaagccttccaggccactcctgctgttgcgcgaacagctctccagtcacattcacatctgtggtcctgggaggtgattagggaagtggggctcctccctggactctgagttcctgagggcaggttccctggacatgttccctccccgcagggttcctggcaccccctactgtctgctgaatgactgactgaatgactgactcagcagatgcataaagcactgtgggcctgtgtgggggtggggctgtgtgcacacagatgtagatgcctgg

SEQ ID NO: 27333 - DNA, 1028 bp, Homo sapiens
gaagccctcgctgccctccccatcagcttcccccaccccactttcctcaccggagccgggctccccatgcctcgctctgcccacagggatggtgaaccgcgaggtgctggaccaggtggagcggggctaccggatgccctgcccgccggagtgtcccgagtccctgcacgacctcatgtgccagtgctggcggaaggagcctgaggagcggcccaccttcgagtacctgcaggccttcctggaggactacttcacgtccaccgagccccagtaccagcccggggagaacctctaggcacaggcgggcccagaccggcttctcggcttggatcctgggctgggtggcccctgtctcggggcttgccccactctgcctgcctgctgttggtcctctctctgtggggctgaattgccaggggcgaggcccttcctctttggtggcatggaaggggcttctggacctagggtggcctgagagggcggtgggtatgcgagaccagcacggtgactctgtccagctcccgctgtggccgcacgcctctccctgcactccctcctggagctctgtgggtctctggaagaggaaccaggagaagggctggggccggggctgagggtgcccttttccagcctcagcctactccgctcactgaactccttccccacttctgtgccacccccggtctatgtcgagagctggccaaagagcctttccaaagaggagcgatgggcccctggccccgcctgcctgccaccctgccccttgccatccattctggaaacacctgtaggcagaggctgccgagacagaccctctgccgctgcttccaggctgggcagcacaaggccttgcctggcctgatgatggtgggtgggtgggatgagtaccccctcaaaccctgccctccttagacctgagggacccttcgagatcatcacttccttgcccccatttcacccatggggagacagttgagagcggggatgtgacatgcccaaggccacggagcagttcagagtggaggcgg

SEQ ID NO: 27334 - DNA, 1056 bp, Homo sapiens
atgaggtaaaaatgtaaggtgaatgaactgacagctcagctagggagacagacacagaaacctgcatttatgttacaaggtaaagatgtagaaggaagtatgaggcgctgtgggagcacaggaggggctccctgtccaacctgggtagtgagagaactggtgattagaaacagccccccccaggaatgtggcccccaagccaaacctttggtaaaagttagccaggtaaaggaaagtcaatggaaaaagcagcatgtattaaaaaaaaaaagttgggagggacaaactgcagtgagccttaaacctagctgaccatcagaatcatctggaatctcattgaaaatgttggggacgtgttctcagagtttctgattccagcagtctgcataaagtcaatggatctgtatttttaccaagttccacaggagtgtcctctgagaccagtctggtaccagtccttgctgaggagagtatggagattagatagttaagcagaagccagacctggaaggacctgtagagctgttgcaaggattgacttagttaatctctggacagtgttgaggacggtactggtgccctggtacctagtaagtattcattaggtgttagtagccattgctgttaggctagttgttttaactatgctctgctgccagaggactcttccaaagttttacaggtcataggtatagtactaatttcagttattttgatagtttccgctaattagcccaaattcagttttgatattgagggcttggttggggaggatgaaggagaaacacttatcactcctgtttttcttttgtgtttttcattttgccaggtagaaacttggctctttaggggcagcattaccagaattcttattttagaaatagaattttccattgatgctctgttattgtgtcagtaggactctgttagttttcatttataatcttgattaagttgtatagaaatagtttagggtgtagtatatctcttttatagataaaacaaatgccagcaatgtagaaacaaaagtagagaaatagccagactcctttagtt

SEQ ID NO: 27335 - DNA, 1026 bp, Homo sapiens
atattttaactcttgaggaaaacaatcaagttgtattatggtggaactaactaggtcacctcctagctgtgagaccctggaaggcaaatttcttttgccaactgagtctctagttccttgtctgtaaaatggggagactaataaaatgtgtttcataggattgttgtgagaattaaatgagataacatgtgtaaagcacacacaggcacatagtaggtttgcaatcgatgtggcctcttggagttcctggcccctagcccagtgcctgccacctatgcactattcagtgtttgtgaagaatagggatgtatgtaccccgtgtatgtgtaaaaggggctatatatagatgctcacacagatccatctgtcttgagaagggtatcaatattcagccggagtggctgagcacacatgcgtgactcttcttgggttgccacatcccctgctaggcagatgtccattataatgaaatgtaagaagggaaaaaaataataataaaggcagaggagtgtaatgttatggcttgatttgacagggcctcctgctacttcagctgccagtgccagacatggaacagattaatctgtattccaacacaccactgctgaagtcaagatcgatctagttagggtattttaaacatcctgtttgcatctagagtcttatcagaaaccaggacgtctgtccatctggggggcagggggcaggtgggtggcaaggttcagcaataaaagagaccacaggctgtaattttggaagtgagagaagaacactgctgtttgatttccttaaaacaaaagagctaatggccttagatgttctgtggaaacaaaggcagctctgtagcatggccttgaattttaaagtggccctgcaagatcttgccaagatatgggcctgatggttggagtgcagggaccatctccatcctaagaatagaactctggctgacccatgtgtgtctttcttaaccatttgagctgtggaaggcaggtgcaggttctgaagccgagtgggcagagcgac

SEQ ID NO: 27336 - DNA, 1047 bp, Homo sapiens
ctccacctcccacatctcataatctggtccgctttacctctcatatctctgcagcctatccacttttctctctctttactaccaacacttacattcaggctaccatcatttgttttcttccattagtgcagcacccgcctaactaactagtctgcctatctgtaggtttgggccctccagttcattttctacacagcaaccagagatttttctaaaatgtaaattcatgtatgcacttctccacccaaacacagtaaacagtggccttgcatcgccctcgggatgcagtctaacctcctgcgccggcctcatggtgcctcgcccagtttggcccctgctggctgctctagatacatccctcaccctcgtgatgtacaaaagccattctgtaccactcacgcttcctgaccttgtgctttctcaaaccttctagacattggcccattgctccgaactctgcccagaatacctctctgtgccatcttttccacatccctttcatgaagctggctaatgtattactctgtatccttcagaattttggcaaacaaattagtcaataaacatgtattgagtgtctgtcatatactaagcattctgcttagcgtttccctgacagtttctgcagaaaatcttccctgagaccacctggagcccctcctgtgtgccccaagtgcacccttgcactgcagcctcaggctgaagatcagggatgctggagccagactgtgtagacataaatcctggctctgactcctaccagctgggtgattacaatcaagttacttaaactctctgcttcagtttcttcatcagtgaaaggatgagaataacagtacctatcatgtaggattgtggggcggattaagtaaatgcagtatatgtaaatcacttggaatatttcctggcacagggaagtatgccctaagtggtagctattattacaagtattttgggcctgcatgcttatctgtctctccctctaaactaactctcagtcttcacaaatagggactaatcttacttactttctccttttctccagta

SEQ ID NO: 27337 - DNA, 1046 bp, Homo sapiens
aggtgacacaagttaacagtgaacgttagtgtgagtgttacaaaataccaggaagatcattgtcattattattttaagtgaggcatggccaaaatcctgtgggaagccttgtgagagaggtggcattgagctggtctgagaggctaggacagagacagtccagaaagaaacagcagtgtgagtgaaggcataggggctggaaatctcgtgtctgctcagccctccccatcagggaatggtaaatccattgcacccattttgtagatggagagtatgaggcattggaatctgttgttttctcctcagagaaaaagagagtaaaggggtctgatggacacagccccactcatgccttccggggtgacaccctgggggcttcttctcattctcagtgtcagattcgcgtgaattactgctcagagcctcattttgcctcctccctaaggtgtagctgtggtgatttgcaactccagcctttaaatggcatttacttctaatgcccacatgttcaattagaacttcttattaccctcagctctactatcttgcattgagccttctccctgcacctccatccttgtaatcaaaacagtgatcttccaagaaaggaaaagtatttttaatgggtgctgacatgtagtagtagtagttggatgtttttctttctcaaaccctgccacacacaccctaagtgattcacaattttccattgttgtgagccctagcctctgtctccctcggatcctggtttatttccctagtgccttttaaggtgctgaccccatactggatactgagtggatgattgttgagtgagtgcctgggcaagcgagcaggtgagcgaaccagtgaagggtctgcacagacgccatcttcattcccacccctctgtttttctcccccactgctttctgcccaccctcacctcccccacctccatgcagaccctcgcagccatccttccaggcctgggctcagcccttcatttctctccccatcacccttcatagccagctccttagtccatcccacctcttctgtctccg

SEQ ID NO: 27338 - DNA, 1032 bp, Homo sapiens
tgggggtctcgctctgtcacccaggctgaagtgcagtggtgcgatctcagctcactgcaagctccacctcccgggttcatgccattctcctgcctcagcctcccgagtagctggaactacaggggcccgccaccacacccagctaattttttgtatttttagtagagatggggtttcactgtgttagccaggatggtcttgatctcctgaccttgtgatgcccccgcctcggcctcccaaagtgctggtattacaggtgtgagccaccacgcctggccaagtgtcacttcttttgtgacactttcttgattccttgcctcaccctagttgagttactgaaaaaaagcaaattagagagtacatttgtgtatgaagctccgttatccctaatcttacgtggtaaagccttatgttgcaagtaggctagcattattatcctcattttatagatgagatgataaaggtatagagggattaagtgccttgtccacagacatacagctaggacatgagcccagggctgcctgatgccaaaatgtgttctttttcatgtactcagtgcctcaatgcatttaataagtgaaggtggtcacctgactgcaatcaaactgtggtgctttcatttattagaattaatgagtgcctcccaccccatcataccagtttagcatttaatttgttcctactagctgttcatttgaactggttacatctttgtcattagattatgttttgagagaggaactagaccttcttgtttatttgcaacaccacaggatatcgcgtggtgcctgttatatagtttaaaaataggaattaaatcatggtctctgatagaattttcgtggttgagtaaaggatctaaacagcgctatccaatacaactttctatgatagcagcataaaggatataaacagcgctatctaatacaattttctgtgataatagcaatgttttctatctgtgccatccaacaggtagccgcttggtatatgtggctatggagcacttaaaatgtgtgactaaggaac

SEQ ID NO: 27339 - DNA, 1030 bp, Homo sapiens
ttttaagtagatagaattgaaaatttagtttccagtttttaccagctgcaattcaggtgttccaatagccacacgtggctagtggctaacttactggacagtgcagagttaaaaaaagatgctcttccaagcatcaatacctagcttccgaatatccaggcttatttcatgaactgaaaatgcccccacactgaaagaaaaggattctgtgccctaatgttcagattgattagccctgtaggttctacctagggtgaagtcattttccgtagctgagatgctcacagactgtctctgagttgccttcaaaatatatgagatttataaaaattaactttttttcttgcttaaatacttctattcctgatgtgttgtctttccattttctaggaataatttttaatttatcccatttgagctctgttctaagtagaacgtctccccttctttatggactagttttggtgtaaagtgctcctaaatgaatgtttttaatggtgttttgtatcttggcctgaatgtaggtaatgggcttttattgcagaattactttaagactttctgtagatgtcaaaaccagccaaacaagtgaaaagttttgattaaccagttgtttaaattttactcaacaactagtttgaccagtttggaatggacatgggtagtgagtgaaaggacctatttctgtcgtataggaaggacatctgaacaagtgagttgtcccccaggattgggatggaggggtgtgcatgttgtgtgtattgtgactgtgtgtgctcaagagctctagggttttgtcatatcaccttgacacacatggtgcttatgttgactgttgaggatgttgaatatggagggatacagtttatcctaaataaatccccattgttaagttctggggtgatgaaaattaattggcattgtaaacagtgaaaaccttgggtctcaagccccttagataccttgtttgtctactgagaagtatatatcaggtcttgaatgtccacactgacattttacaatatggatt

SEQ ID NO: 27340 - DNA, 2116 bp, Homo sapiens
aaggttagctgagtacaaggcctgctggagacacagggacaagttggaggatagaatagaaggtgcccagtatgaggacagaaggactttggctacccccacagtttgtcctgcctgtaaacagagtggttgagtgagtgaaaaagggagagtaaatatataccgtggtagaagctgaattgatagtggaaggcttaccttaaattcagatgtagaaatggaactgacacatattctagtttttaaaataattttaatttttaaaaaaatgtatagcttttgaaaaggaaacctggaaatcctaagttatttttaatggctgtctgactagactgacaataccaggcactataactgctgacttcgtagcagtgatagtcatttctggcctagcactagcattttccaagctctgtgactcctcccttcaagcggtttcaaactccgacctgtcacccctttcctaggtactgcagggatgtagaggaataagacacaaagtgctcctgtcggagaagaacgcttgccagtggccagagtagcaaggccaggtgctttaagagaggcccgagtgccgtgggagttggaggccatttgtcatcattaggctttgaacttaggaggaatctgtaaaatcattagaagccccttaaggtttatgaatagggacatgatggagtgagcactccgctttaggaagattaatttaataacagaatacagtcttccatatttacaggttccacatctgtggatgcaaccagctacatattgaatatattttgggtaaaaataatacatattttaaaaatgaaatggtgtgacaattatttacatatcatgtgtacattgtattaggtactataatctagacacaaagtatacggaaggatgtgtgcgtaagttatatataaataccatgccattttgtaagggatcttgagtatccctagattttgatatccgtagcggtcctggaaccaatcccccatggatactgagggacaactgtatagtctaacttgggaaaggagcaactagaggcggggagacagtggtctcaaccagctgtgacaaagggcagattgctgataagaggctgtgtaggtgaaggagcaaagggagggagtatgtaaggcatcagtctgaggtatggaatctgctagaaactgggaccttgggatagattctaatggtttccaaggccttgtacctggaagacaggtcagtgaaagtgttcgtaatggaaataggtagctcagggaatgaggagccctgtgggggaaatgattagtaattcatgtccagaaatcttatgtttgtagcaccagtaggtcctccaaatggaaataggaggaaactggaaaaatagggtaatggttaacacctattgtgccctctgccagcaggatggcaaaggacataagttgtcctaaaatgatttcttattttaagtcttgtaatgctgttcgtgagcaacagtgtgaagtggtaaagataactccagataatgaggctttgatctgtagcacccagatttacactaacaaactctctgactttgggcagactgcaacctgtggacttagatattttcatgaaaatttgagttgggggaaacaaaggcatgggtctgtctaagtcctcccagtgccaaaattcaggaattctaagtgtcgaggtagtgtttgatgtttatatataataatttctgtgtgagagtttgaaaacggaaggatttcaagttttgtaatttttttctaccttctttagcatatctaatagttacttactgagtgctcttctaggtgcttgaaagcaaacagaacagtataaaaaattttgaagtttgtacttaccttctaatggccactccttccacatgaccactttgatgccacagtggctaagtgtctgcatgggtcatatagcacacattaattaggcagctactatgtacaaagtactgttaggtgtttcttatgtaaattttatcctaatagatttttcatattaaaaatatagcaatctttgctttgcatagtagtgcaggactataaccatgattgtgcaagctgaacccatgcaaagcaatctttataatcagtggggaaaa

SEQ ID NO: 27341 - DNA, 1052 bp, Homo sapiens
aatagattttggagaaagggatagataatattacaaagatattcaaaagtcgtctaccatggcctgtctccagtagcatggtagttttataaagtaactcattaatatctaaagacagtctatgtgtcaatagcaaatttgctgcactgtagcctattaaatattgaaacaaggagttagtctttacccatgtgtttgtgttatttggctatacaggttagcttacaaaatctaaatgaaagaagttgggcacaaggtgacagtttaagtaacttgaccagtgtcttaatttaaatccaggtgtgtctgacttcagagcccatgctcttttcaaggcgggggcggggggggcttcatcttattttgcctaaaacagctttattacacatggtcatgcttaaagcctatgtaaataggaaacatgtctagtttgtgttatgttacggtgttgagttagactagggattaaatgacagcagtgttaggtcatatatctttggatttaaacactttaaagactacagcctagattattacctttcagggtaatctaactaccatctacagagctagctactccttggtgattatggagtggcctgttagcattgttttctgacaatttaagaaactcctttttgatatatacagaaaatgtatccctggtttacttttcttgttttttccccctgggtttataataagtttgatacatttaattttgggagtgacatccattttgtcaagaaaacccaagaaagaattgaagtaggttgatcagtcaacatataattttttccttctccttcttgagacaggatcttgctctgttacccaggctggcgtgcagtagcatgatcatagttcactgcaaactcaacctctggggctcaagtgatactcctacctcagcctcccaagtagctgggactatagacatatgccaccatgcttggcttattattttattttaatttttttgtagagacagggtgtcgctatattgtccaggctggtctcgaactcctgggctcaagtgatcctcctgcctt

SEQ ID NO: 27342 - DNA, 1046 bp, Homo sapiens
gatttttaattgtggtaaaatacatataaaatggtaagctacataaaacacaaaggtgtacaatttagttgtgctaagtattctcatgttgttatacaaccagtttccagagttcttttcgtcttgccaaactgaaactctatacccgttaaacaataactcatcatttttcacttcccatatcacctggcaaccaccattcttaaatttagctttttgtctgttcctttcccgaacctgtgtagtggaatgtggctgggaaaaactaacatgtctgagttgacttttcctcctatttctctacatggacatgctattttctaaacccgcctctctgtgtattagatctgctccttctcatctagccaaggccattgctccaacaatgctccctctttctcctgcattctccattttttactctttactggatcattctcaatagcataaaaacatgaatttttcccccacttgggaagatttttttcttgacctcatatcttcctctagctactgcctcatttctctgttctttttagccaaaccacctgaatggattgcctgtgctgtctctctacttcccgtcctcccagttgctgatgacttccttgttgctgaactcaatggtggattctctgcccccatcttaacttcaccccagtagtatttggcccagtagattatttcttcttcctgaaaatactttcttcacttggtgtagtagttggaataatgcctcctgaccccccaccccgcaaacacccatgttttaatccacagaacctgtgtatatgtaatcttatatggccaagggacttggcaggtgtgattaaatatcttgagatgaggagattaccctggattatttaagagggcccagtgtaatcacagggtccttgtaagaggaaggtgggagagggggaatgagaaggaggtattaccgtggaagcagaggttggagcgatgtgctttgaagatggaggaagcaactgtgataaggcataagataattaattggtgatattccaagccactaaatttgtggt

SEQ ID NO: 27343 - DNA, 1063 bp, Homo sapiens
ggtttttgtagaactagtggtttgctggacgccacgagagggcattaaggtggagaaacagattagagctttggatgcgttctgtaactttccagtctgcgttgctctgcgcggttcattcagtggaatggggctggcattccattgctgaagaagcggaacagaaaggccccaccactggaaccaacgtacagagtctgaactgaaggttcttatctcaaaccatgtctccgaggcacatgagcagaaccatttattgtaaaaaatagagccgatttgctgcattaaagaaagcaaatgactagatacagtataaggtttttttctgagatggagtctcgctctgtcactcaggttggagtgcagtgacgtgatctcagctcactgcagcctccacctcccaggctcaaccaatcccccgtctcagcctcctgagtagctgggattatagattataggcatgtactaccacgcccggctaattttttttgtttttagcagagacagagtttcaccatattggccaggctggtcttgaactcctgacgtcaagtgatctggccgcttcacaatataagatttgagagatggttttagttcttttctttatccacgcttgctaaaaatttaggcagtctgctctcctgaacctaagatttttctctcacattctgtaatagactggtcctgtcccatcacatccctatggtggtggccgaacttgataaatgtatgccccttgaaagatgcgtgaatactgtgaattccttcagattgtccaaaagtctctctgcgtgatggggcagtacataaagtttacccacttttttaacattcatttttgtaacacagccagtccgttttaaaacttccaaatcagaatgctaattaaatattttattttttaatcctttcattgccttcaggatatacatagatgaaattctcagaactctttggagaagtagttatttgcttgcgagtctgttttcatcccaaagctctaatatacttaggttttgtgctttcctttttaactttgtatcttgctttatgtaataag

SEQ ID NO: 27344 - DNA, 1599 bp, Homo sapiens
ataaaaaacacaggtgaacataaaaccaaaccacttgatcgtacataatgtagattaaggaggcatttggcggttctgattgtggtttaaggtaagtccaaacttcctgtcaggcaataaaacctttttgtaaaaggaactagcagttgaagaagagaagcatgtttataaatggggagcagttagactggaccagacaggtatctgaagaaagacaaagtcagatgtgggaaggaggtgctgcagaccaccagtgggagattaaggtctgtgctctttaagaagctacgtattcattcagggagtcagcaaagcctgtgccagccagatgtacaaagatgggcacgatgcacttctcccctcaaagggcttatgctctagtcagggggaaatagcagcaaacaaggggttagggtagaattcaagataggttgtcagtaaggaaaatattctcacttgtgtctaccttgaaatagaccaagaaaaaaatgaagatgctaataataatttgatcagatgcttattaaaattgtgagagttatcaaatcatggacagtttctgaaactgtaatgccttcagcaggtctcccaaagtttgctagactgtatactctttgagtgctctcacagtgccaggaacatatttgttcctcagtaaatacttgttctgtgaaatccatcacttgatgtaacctttttctatagagaaaagggtttttttttaaggttgcattaaaagtggcttaacaaatctgatttaatgattggttgtaaagaatatgttagtacggaaaggtaaccatttttagaagtttctgtaggttttctcctttgtactacttttcttttttcctttaagtagaattatgctttattctgagataatcatctttttttgtttgtttgtttttgacttttgcttcagggtgtcatgattgactttggcctatgatgttggcccttaaacaccaggcaagggtggaaggaatgctgctgaaaatctgtgggtaatgtttttgtcatgaacatgagaaaacctagaaatggagaaggcacgtggaaggaagcacaaatggcagcccaaagaggaggttagagaatgtggagggtatagaagaaagcccattcagaaaggcaaaggccaaagataccagaaaagccttccagcttcacttccagagcaaagagaagctttgtttgtggttgacagaggtgactacattactcccagatgtctgctcaaagctcataagacatagcgtgagtgggttggatagggttcctgtcttgtcagcgtgaataaagcatgatacagacatgttctgttagcatgatcagtgcatgtggaagagtgtgtgtgtgagaaagaaacctatttgtacaagtattaaggaaagaaaaaaggtcaggaacctgcagttttcccttcttaactgtgatttttttttttttttttttgagacagactcttgctctgttgcccagggctagagtgcagtagagcaatctgagctcactgcctcccgggttcaagcgattctcgtgcctcagcctcccgagtagctgggactacaggcgcatgccaccacacccagctaa

SEQ ID NO: 27345 - DNA, 1304 bp, Homo sapiens
ttgtaaacatttcttggcagtcaaataaacccaggcagtttctcgaaggtgcctgccacctcctccacctccccttcttgaggatcctgacacaggtttgctgcagcaagtcagatatgattcttccctattcggggccccccacggctcttctgggctagggcaggtttgccgcagtaggtacttgccgctgaatggaaggcccacctcagccccccacatctcagtataaataatgcgtgcgctggagaggaatagcaaccagactgcttgggttttgccatgtcttctcttgcataagattggtcgtggaggaaaggcaccctctgaagatgagagtgctggagagagcgttgtgcgctgtggttgagaagagtgcgctggtggggagaggagactgatgggcaagaacgctgcagcaggctcgtcctgcagctgtaaatggcacaggactggagctcttgaattccagttctaggcaggggagcgtgggtgttggatgaaaggtttagtcctgtgttacatacaggactaaagtatagtcctgagtaaagtgtctgaaacaagaagcatgtgaccacctgggcacatcatttttctacctgagtggtacttggtgtactaaagagattatgggatgcagcacacttagacaaggtggaagaatctgagtgggtctcatcacgttggagttggtttttatgggatatggaaaagaggcccggatttcttctgagagcaggagtagctgaggagccccgtggcagcagagctcgtgaactacacttgtgtgagaagacaggctggtaagttgagacacgagattcttggattttcctgagacctttctccttcatctctccagacccaaagagaataacctggaaagtcagctagtgagggtctgcaagacccaactgagagagcttaagaaccagagaatttggaggcaggtgaaggctggagttgtatttgggggagttttgtttggagtcagtcttttttttttttttttttttgagacagggtctcactctcacccaggctggagtgcagtggtgtgatcttggctcactgcagtctccacctcctgggctcaagcaatcttcccacctcagcctcctgagtagctggaactataggcatgtgccaccacgcttggctaattttgcattttttgtagatggggttttgccatgttcgggcacaagtgatccacctgcctcagcctcccaaagtgttgggattacaggcgtgaaccaccttgtctagcctggagtcactgttaatttcttctgttggtc

SEQ ID NO: 27346 - DNA, 2103 bp, Homo sapiens
catctgccccaaaaggttgtaggcacagctgtcgtagcgttgccataaagagtttgccaaatctctgatcctccctttccattgcttctcctagtgatgcacgaagattaggtgcatttattttgtaaacagattggagaatctagcaataagattcaaagctaatctggagcataaaggcacagttcagagacagaataacagggatcacaagcatgaattaaaaggaatttatttgcttcaagttcctagatacaaccttcccatgctgcacttctccactgtcggagcacgttccgaaaaacagaatgccttgatccctggtgggtgcgaaggcagttgttagggatggcaggcattggtgggctccaaaagatgaaggccccacacacaggtgtgctgcatttgggatctgtgtgggtgtttcttggaccctttcttctgggagtagggtacacactaacgtttaatccgctgtctgggtgcatgtccacagtacggtggctaaactcgaacatcactgcaaataggacgctgagcaggtccgtctgtcatgtcacgccactgcacaggtccttgtccccacacgacggggagtacttgcgtcagatgttattgaatagctcgtctcgggcaggggaagcggggagttggggatattaattgggggttttaattctattatcatgtcagctgacattatgactatataatgtagttagagacaatttttatcttgcttatagtaaaggttcagcctgccaattgtaaatcattctaatttggcaggcttatttttgacattggaaagggcagaaagcgatttgccccagtagtgtaataggagttatagaccagaggctgaaacccaaactatataaaaaggaattcagtggagggggctttgtaatctccattaatttgtgttgctacttccaggatcaccaaaaattacatgtaattttacatgttaaacacattgaaacataacctatgtttataaagcataacgggcttcccttccagaagctctcctgcttgtcatgaagtgagaacaatgaaaagtcatagcagatactcagtttaactctgtgtagaacctagtagtgtttgagctgttattcagatttgaattcagactgtgtgttgtttgcttatggacactgcctgtcgttctgtcactgttaaattaatgagtctataaggtttttcttccagaggccataggtgacatcactaaaattgcaagataaattgtaatctttgctgctgctgcactccccaacctctcccccaccccccgtggtgtgctgctttctagatgagcgtgttttggagcaggcccatctgggacactctatgctttcaccaaggaagtgcgatctgagcagccacaatccagccaaaagaggatcgtagatatttgctctgatcaactagatgaaaatatagcagaatggatttagcccactgctctgttttatccaactgagtctctgaccagcaattggtgcataattattacagcaaaagttaagaaatgaaactgtagcaattatgtaaatgaatgtgttggcctcttaatacctgttactagtggacttcctgtgaggaagttagttttttgttttgatgaaatgctttcgttttttaaatcttaattctgctgtccacatcctcccaaagtgtgcttacttcatttgtttaatttaaatgaactttcctccttgtatgtatgaggtgacttggtgggtggggtgggtggtttttgtttttgtgttttttctttcttagggcatctgtaggcctcaaaggacctttcctttaggtcatattcctcagaaagtcttcaatcttcccttgtttttgtttgtttgtttttcttaaagaatattttcaaagcttaaatttgtatattaatttaggactatttagaagtataggctgtcgttggcggcagcagtatattctgaaatgtctcatagatatatatttttgaataaagatggtgttgttgaacaacattgtgtgattttttttttaaactaccctgttactgaaaacagtgcctttctttgtaagcagtgggtgattagtaatcac

SEQ ID NO: 27347 - DNA, 1050 bp, Homo sapiens
tcttggttggtcttaaaaccatgtaaggatttgcaaaagttagtgaatatgtgtgtgaaggtcattatgaggaggtttttggacaataaagatttttttttgtatagcaattaaacatgacaaagtatgtagactgaattaaaaacacatttcataaaattttttttttcttttttttttttttgagatgcagtctcgctctgtcccccaggctggagtgtagtggcgcaatctcagctcactacaacctccgcctcctgggttcaaacgattctcctgcctcagcctcctgagtagctgggactacaggcacccaccaccacacctggctaatttttttgtatttttagttgagagggggtttcgccatgttggccaggttcatgtcgaactgctgaccttaagtgatctgcctgcctagtcctcccaaagtgctgggattacaggcattagccaccgtccccagcccataaaatattctttataaggattgttatagaaaaattttcttggttccgttttgtattatttggtcagtttttaggcttagcactaatagaaactgatgggacaacttatgttaaattcagatactcaagaaacttgtccttgtgtgtctgatcagatagggacacagtatccagttcttgctttagcacatggaagaaactcaatctttaaggctgaaggtttaagtctgtagttgtgccccaaagtaaaggtgaaaaattccacatgctcagagaacaaaagtgactctaatcatgatagcttgggacctagaaatggattctgtttaatacgaggtactcatcagtgttagcaggtgtgtttcctgacatgtgcaaagactttttgggcagaatagttgattttctttggtgcgagatgatttaagttttaaaattaaggtgcatggagtttcattctaactttttatagatgcggaaagtaacttggtcaaggctacatggttagcttctagcacctccaggactagaaagcaggcctccttcctctggacggtgtcccctttcgcccccgacccct

SEQ ID NO: 27348 - DNA, 1050 bp, Homo sapiens
aacaagagcaaaacttcgtctcaaaaaagaaaaaaaatgtattttccattgtgacccagaacatatgcatatattacaaaggaaacaagtttcacagaaacattgcttgcctttattatgtgtgatgcctttatcatacatcctataccatctaattaaaacaagtattatccataacatttatttcatgacccatagtttgaaaaacattgatagtttcatgacccacagtttgaaaaacattgatagaggcaagatgtttgcagcattctttatcatgccaatagtctatacatctgttttatttatttctgttaatttccaatagtataatttgacatgcatttctgttttgtcttttcaggtgccatttggattgtactttagtggcacgatgtactctgagtggaggtcactgcatttggtgattcagaatgatcaaggccataccagtgtgctgcacagctatccagagagcgttggacgagaggtggcaaatgctgtagtccgtcctcttgggcaggtgttaggtaccccttcagtggctggtagtgagaatttgttaaaaactgacaaagaagtaagtgtttctaaatttcattctcttatatgaaaatgtacatttgttcttgaagaatttgtttaatgttaacttttttgttcttttttctttgaaaagagctgtagtagaataacgtcaactttttaatggatttctccccaacgtagtatgacttctcaattttgatcttgtttgagttgagggctgggactcggagtttgtggaggttataaggagtgagttgtactgttttgctgctgggactttttactagttatggtcaattctccacttgagctgaaggccaagacaaagacttgaatgtcaaacacttcccccaaagatctaggcttagtcttctgatttccatttagagtgtgtttggaaggcctcatccctacctctggatggcccctgactgaagactcatgtcaagttttcaggctatgtgtatgctgtgcttaagctctcccctgtccccatcccta

SEQ ID NO: 27349 - DNA, 1050 bp, Homo sapiens
aacagttgtaaagtaagagtaaacagttgatctttcttcctgttgtttgtgcatttgcataatctggagatggaatgtgactgactttatatgattttctaaatgctacacatacttaaacattaagtggagaaaaaactctaaaatgttctattttgcatatctaatctctatggaaatttgaaatgacctgtatttactttttagttcacagagcaaataataataatatctaaagggtaaaaaccagcataggcttgatattcaaaaataagtaatttattttcttcttaaagcttttgcttgggaaattgtatgtttgatatgtgaaaaatgcattatctaaaataaatctgatatttacgttgagacgaatatactgtcaatttagaggtttttggcaataaaagagattgacattttaaatcagtctactgagataggaacgtgtaataattctatatggatattttcttttgtctaggtaaaatggaccatggaagtaatttgctatggactgacccttccattggatggagagactgtaaaatattgcgttgatgtatatacagactggattatggctttagtgttgccaaaagattctattccattgccagttattaaagagcctaatcaatatgttcaaactatactaaaacacctacagaatctttttgtaccaaggtaagctatacctgtctatctggcccattatcagggtcatagtaaaatattcataaacgttactatagtataggagctgatttcattgttagtcctctgaacagtgacttcatgtgttcagttaaagattgtattaatgtgaatgttaggagagatgggcttatgtaatgtttactaggagtttttaacaggtatgtgttctttaaaggtttttagctttgcttctaaaatctcatacctgttagatattaaaatactgtaacatctttcccttctactcaaaaaaatatacttttgcctatcacaattcttgtttccatttaggctaaacacaactaagggagatgcatctaccttaatagg

SEQ ID NO: 27350 - DNA, 1676 bp, Homo sapiens
aagggtctctgctttctctcagaaatgaattcttagctgttactataattcttagctattattattatcatctcagaactaggatctatgtctgtgaacattatactcgtaattattttgaatattcttacaaatctttaatttagaaaagttgtgaatataaagatttttgggaatataatttgagaatgccatggttgagtttagggatgtctttgcttgctttattttgttcaaattcagacactttatattcttccattttcatattataattttatccacaatttgaaagtagtgcttctgggataggtaaatgtgcttacttacaataagtgaaaactttaaaaaaatgactattgggttattcttgtctttatgttcatgtaccttgtattttgagttttctgtaccatgtttatatttattaatttgcattttctagaatgaatcagtcctatttttcttttttctttttgttaagatgtaattcttacaatgtaacttttgggtatagagctgttgacactgaaatctgtgaatctagaatggctcaacctgttgcttggttggtgggcttgcttaaagggaacttatagatctttttgctctccagggagtttgtaacagctttgctcaccctcttgcaccagaagataaaaaccagacttcaaatcatacgtgaacaacatcttactttaaaatttttccttgctggggagaggatagaagctccttttctcctcattgtgttcagagatgataaaggctgttacattacccaggagatatgaggtgtccaaatagttaaaggggttagaatgctaggtgccaatcttgaggtctcaagtctggtgggaggcatgggtatattaactgttttttaagtactggctgccatcaaggaattctgccatgcagttcacctctaacttaaagtgtttgcttctttgaactggttagcttttgatttacatgacagtacactgtgctttgtaaaagtaacattgagctgggaagggttaatgaactaaaattttaatgcacgttatgggcacttcaaaacctcagttctttgtagttgtgtaattttcttcgttcattgttttgcatgatacaaaaatcataattttggacctgaatgcacaatttcctatgtttttgaactagcttgtggtatcgtaaagcttttaatttaacttttaaaaagctaaaaagcttcttaatttattgtaaaatttcaccatctttaaagtattttataattactactgtcctttgatttgtttccatttatttctattatcttgcagcatcttttatccaaattcttctttcttataaatcttgtaagtaggaaccagaagcttctccttaattgcagtcatgtttttatttttttcataattccattaaaaatttgattgtcattgtctcttgtagtttttgcacttgggaagaaaaatacttttctgtgttttgaatggggaagattgttggcaagagcaaattaatctgcctgaatcagtcccattatttctgtatactagtctggtcatgtcatgaattccaggactttgcactaactgtgttttggcttttttttttttttttttttttaaagctttaagcttatttttatacagatttagtgtttgatttgtatgcattctgca

SEQ ID NO: 27351 - DNA, 1045 bp, Homo sapiens
ccattatactttagactttgtcacttttctcctaaattaactcataatggcctcccgttcttcttgacactgttttgccttccttaactgatcattcacacaagtgcagaagtgaggttaatatcaacagagtatttagatatctgcatacttgctaggttctcaggagatagaattaaactgaccctatcagagggaaccaagtacagaattttatagatatgaaaaagaatggtatatacaggcaaataggcagggttatcataactatcggcgcttggtttaagcaacagaaaccctctcaatctgacttaagtaaaaggagaagaagttgtgagaagctagtgatatttattaaattctaaggtcaggaaatgcagtatggcctcatgaagagcagatactcaaggaccaaaacaactttattcctctctctttctctgtcttcctggtctgccagaactgcttcattcttctcttctctgcagatcattttctcttattgtagtgtgcttctgagttcccagttttcattagccgggcatgatggcatttgcctgtagtcccagctactcgggaagctgaggcagaagaatcgcttcaacccaggaggcggaggttgcagtgagccgagattgtgccactgcactccagcctgggcgacagagtgagactccgtctcaaaaaaaaaaaaaagttcccagttttcatggccttggtctaggtgaccatcaggaccaattagtatctctgaattttaattatagactcctgggaaggaggatctaattaatctgcctgtctctggtctagtcagctacagttgtgaaggtgggtcacataagggtgttggagctcacccacttgttgtgggggcatgtttctcaggaactctgggctggggagatatcctaaatggtactttggtagtaggggagaaggctatcaccatgaactttctgactgagccataagactgaatgggtggtagtaggacaaaccaaaacaacagattcatgagagggcaagttattagtttagtttt

SEQ ID NO: 27352 - DNA, 1095 bp, Homo sapiens
tagtgtgcagtgggagaaataacacctgaaataaaggagaaaaacagaaggactggccgggtgtggtggctcacgcctgtaatcccagcactttgggaggccgaggcggatggatcacccaaggtcaggagttcaagacaagcctggccaacatggtggaaccctgtctctactgaaaatacaaaaattagccagcgtggtggcaggcacctgtagtcccagctgcttgggaggctgaggcaggagaactgcttgaacccgggaagcagaggttgcagtgagccaagattgcaccattgcactccagcctgggcgaagaagtgagactccatctcaaaaacaaaacaaaacagaaggactaagtaaaacatacctggatacgtggaacaaagagactaagagaaggacgaagaaaaatgtaagataggtgagaatggaaaactgagagcaaaatggcaggagacttgaagtgctttttggaaaggaataattgaaatatggaataggcaggaagttactgactgtaactaggaaagagccgaaggaagacttgtaaaatgtcgtattcagatgtgtagggcactgtgactacatgatcctggaattttactgtagtcattttaagacaatcagctaatcaaattagcatgcctaaagaaatttaccaaagtttccaaatgtttacactagaagcactgtttcaaatgatttgtgagctcctagaaaagaacactgatttatgagaaagttttttttttttgttattgagtcaataaagttaagaagtgtctgttgttaggtaccagggttatagtgccgaacaaaatctacaagatttctggccccctaaaactactgcatagaagggaaggcagatgattaaataagcaaacaaccattgtaaagggtgttaatagggtcattaaagcatgttataggagccatagcaggaaaacctaatctggttttaagaaggtggcctggaggaaaagatattctagctggtatttaaggtgtgccttaactgtaggtaaggaggtagaagcagattgtcactgacaaaataataataacgtgtaaattcttcagggtaaa

SEQ ID NO: 27353 - DNA, 1430 bp, Homo sapiens
tctcatgatttttacataagcaacattagagcattagaaatatatacttgcctaaaatcccatccagcccagagtttgtgggaaagtgtgatagttacttttcaaccaagccctcaaagatcacagaacatattttctaaaaactctttgctttagatgaaattagctaaaaaatgtcttgagagagaattttttaatttgtagagaataattaagatgatatttcaggacagcacagtccatatatttgccactcacttatgtaaagcgattagaaaattagatttcctattatctgtttgggaaaatgagggagatattaattgtaatgctattattttcttccagaaaactttcccctctcagagctgatgacagagatcagtactggtgtggaaactactgcaaatagtagcacttcactgaggtacactctatttgcttgaagttcatcagcgtgtctttttttaacatattgattgcagcttaataaataaggaattatgaaacgaaagagttgtagacaactagaaataaaaacaaaaaagatcaaagaaagaagtttgtatacaatgtacaaggttatcaaattattatagcatggatttttttaaaaccactttattgaagtataactgattgacttgttaaaagctatacgtatttaatgtatacaacttgatgagcttggagataagtatatatgcatgaaaccatcacagcaatctattcctgaacacttctaccatctccagaagttttctcctgcccacttaattcattattattattattttgtaataagaaccacttaacataagatctaccctcttagcaaatttttaagtatacaatactgtattattagctgtagccactgtactatactgttgatctttaggacttatcctgcataactgaaactttataccaccttttggctaatacctccacatttttccctccctgcagttcctgacaactagaattccactctctgcttctctgagtttattttagatttgtcatataagtaatatcatgtggaatttgtctttttgtgcctgccttagcgtaatgtactctagattcacccatgttgttgcagatggcaggatttccattttaagactgaataatatttcattgtatgtgtacaccacattttccttgtctattcgtccattgatggatatttaggttgcctccatatcttagctattgtgaagaatgctgcagtgaaaatgggagtgctgctatctctttgagatcctggtttcagttcctctggatatacaccctgaagtgggattgctggatcatatgaacattctatttttaatttgttgaggaaccatactgttttccacagtggctgtaccagtttacatttccaccaacagcatacaaggggattcccttttctccac

SEQ ID NO: 27354 - DNA, 1063 bp, Homo sapiens
tgtgtatatttctggggataaaatatcgggggctgtagctgagccaggtcaacattcactcctggagccctggtggaggtgtcctggtgaatctttgtgtttcaggttcaacttgcctcgaaccctgtgctggatgcctggtacggtgctcgtgactgggccttgaaccacctagatgataatgaagtttggatcaccaggaaagagtatgaagaaaagggaggagagtacctcaaggagcactgtgcttccaacatctatgtccccatccgcctgccgaagcaggcctcccgctcctcagatgcccaggcatccagcaagggctccgctgctggtggaggtggtgctggtgagcaggcatagcagaggccctccagagagactgccctgcacgccatgccttgggccacgttggcagtgtgacaggactgtgattgtgctagatgtacctgcccaagtctgctggtcacatttggcagcaaaatggatttctcctggggagaacaaagttaagggacactgagacctgcccttcagaattcggttcacttgggggcttctgtggtagagactaactggccttctgatgtctttgttcaactgtggccagctgtggcatcagcttcctggagcagtaaatgaagacagagtggaggacacaaatgtacaaaatgcacaagactgatttcttaccacattttagtctttcttgttttaaaaaaaattctttaaaatttatcttgtccgtgtagatactttattcttctggatgtattcagaaattgcatgaatgcccagtgaggggaggtctttcatgcatataaaaaggtaatgtttattgccgggcacagtggcacgtgcctgttaaggcccagctttgtgggaggctaaggcaggaggatcgctggagcttaggagttcgaggctatcgtgtgctgtgatcgcacctgtgaataaccactgcactccagcctgggcaacataggaagacattgtctctaaaaagatacatttttcataaaaggtaatgtttattcaataaaagcagttgcctcaggaaccg

SEQ ID NO: 27355 - DNA, 1069 bp, Homo sapiens
aagatgctcagtaaatactgtaggggcctattatgtgcacctttgctcattcagctacatgctttgaggagaaataaagggcagggggaagggagcggtagataggaagaaaagtagttcaggtgattctgtctgcctttccactcagcaagtatttgtccctgggtggctgtgcctggggtttgtgaatctgccagccccttccttgactcttgtttctatatacctttcaaagtgtgggcattctgccacactgaatgaggtacagtgtttaaaaacaaatggtttggccatgcgcggtggctcatgcctgtaatcccagtgttttgggaggtcaaggctggaggattccttgaggccaggagtttgagaccagcctgggcaacatagcgagatcccatctctacaaaaagttaaaaaattagccgggtgtggtggcatgtgcctgtagttccagctactcagcaggctgaggcaggaggattacttgagcccaggagttggaggctgtagtaagctatgatcatgccagtgcactccagcttgggtgacagggcaagaccctgtttctaaaaaataaataaaaacacaattacgtatagcatggcttgaatacaagctggctgcttaccaggtgctcaggcgagcttcaccaaaattggaggaaatactgttttgaaccttttgagaacccatatgtttgtttcctaagcaagtttttggataatcttgaattatacaggatattttccctacatacttgctgtagatccacccctccaccactgtatctgttgatgacgcattcagctttttgcctctgttgctgtgtgaactgggatttggctgggctgtggccgcctgcctggaagggctacatagcctcattttggcaatgtgcttatgaattggctgtccggctattcctggtttgttgaatgagagttcagaggcaaagctggtaccaccacgaggttccaattcctcagagtcacgtttcttaccagtgcctattctcttttgttccaaagaggccacttttgctatgacctcaccctcgggcatcctc

SEQ ID NO: 27356 - DNA, 1028 bp, Homo sapiens
gtccatagattaaaatgcagaagttgaacttgtattgagacaacacagtcagcaagtcctagatttcaagccttggcccaggtctgcaggggacgaactgggggttaacagcaacacacagtctggaatcctggttccttagggatctggacccagcttgccctgctcacttgaaggtaggggcagttgcaggcatctccattagtgttgaaggcagagccagagctgtcagctttagactcaaatcctccacgttgcttcaagccttgtaatttagagctttagtctagaaaatactgattatgtttctgacccacctttgaagtgtcacattggcaatggcatcttaaggtagagagcaggaaggttgaagagagggtggggataatgagcggtttacatgaatctctagaatttgtgccatttgtacatatgtggctccaatggttgtatgttctgccgcctctgcggtagattgtctgatggtttgcatgaggtgtgtctgtagaattttaaaaagaaaaccccatttttgaagaaacacacaaccctgagtgataattacgtgtcagccctgggtaaaggtagaaatgtgaaggcttgtggaaaatgaggcagtaagatcaagaaaatcttgacacctttctttttcaacagtaccctcattgctcagaacaaaatttgaactttcttcaccaaagaggctgtgggaaaaaacaaattgaactctttttcttggaatttccttttgtaagaagtttattaaaaaaatttgtttttaacctaagtaggatttatctatattaaccaaacttagctacaaatggacttttgctgttctaaaatataaaaactaccctctccaaatgaaattgatgacgatgatagcttccatttgttgaggaggttttataatcttggtgttggataggtgctttatttacattatctcattgaaggctttcttttttttttttttcgtgatggagtcttgctctgttgctcaggctggagtgcagtggcgccat

SEQ ID NO: 27357 - DNA, 1071 bp, Homo sapiens
cagtgagccaagattgcaccactgcactcctgcctgggcaacagagcgagactccatctcaaaaaacaaaacaaaacaaaacaatgttggaactaaagcatcaagagattgttaaagatcactgcctcttccccagcaccattatgaggccacctgttcccttgtctgccttctttaggctgctgtatagacaatagtgactctatcttggatgcaagtctgccatgttcacttctgtttagacccagtcttataaatgcctcctgatttctgctttgtatattgtccttagtgtaagaacatgtcaacctctctgggggcagcactattgacagcttcttgttttgttttgtttttccccaaaaacagtctacgcataaacaagtagatacgtgtttgccctaagaagaatgcagttactagggtattattcacactgttctacatctcacttccttttcttaacatatcttatagttcattccatatcagtacaagtagatatttcctcttcttaataactacaaattattccattattggaatattttatgactgatttaaccaaacttttgttgatcaacatttaggctgtttgaatttttggctattataaacaactctgcaatgagtatgcttgtatttatgtctttgtacacatatagtatgtagcagtatgtctataatttcttgttttttttgttttgttttgttttttttttttttttttttttgagacagagtctcaccctgttgctcaggctgaagtgcagtggcatggtctcgcctcactgcagcctccccccgcctgggttcaagcaattctgctgccttagcgtcctgagtagctagtattacaggcactttccactgcgcccagctaatttttgtatttttagtagagacagggtttcaccatgttggccaggctggtcttgaactcctgacctcatgatccacccccggccctggcctcccaaagtgctgggattgcaggcgtgagccacctcacccggcctataatttcttataagtgaaaatgtaaagggcgtatgcattatgtattttgat

SEQ ID NO: 27358 - DNA, 1044 bp, Homo sapiens
ctttagataaatgattatattgagatataaggtgacttagaaactggaggaggcaggccatagaaagctattgcagtggtctagagaaggatggtgtaacggggtcctcaaccaagaggtgatagtgggataatctggtgaggatgggaaggagaacaatttacaattttagcgttagggtctgtagacattagaaacttaggttggtgcttttgcaccaatctaatagatggatatttgtgatgacaaaggggaagggacaaaggtgcacagtgactgatcacgacttgctgccttggcgaacagtgctagtattaaatgtgatagaaaagtaaagattgtttttttgaggggaaattaatgtgtgtgtttttaaacatatttattttttcctatattattgatggcctttgatgacattagcaggaagtttggaatgggaatctgaagcttggcagaggtcagacgtagaaggtgtggacatagggattgaacatcctgatacatgcaggaaggagatggaacagaaataactgagaagaggattaaggacaaagtccatggagcatcaacattcaggagtcaggagcagaaaggagatagaatggcagccagggaaatgacagaggaaccagcagactcttcatggttagagaaagcaaagacagagtgaggtttctggagaggtgggtaggtggcagtttcagccaacagagcggccagggagcaggagaactggttcagtcctgggttattcatcttggagatagcacgtccagtggtagggttttagggttaagggtgtctaagggtaagatgataaaaatccctttgcatatttgaatatgttaacaatgtgttgttgactgtttggtccagacttgtggtcatgccaggatctgtgtagatctttttttttgtctgctccccaactccattttgaataatgggtttataaataggttgggacccagatgtaggtatttttttaaagtttcccaatagacagctagggaaaggtagacagacctagtaaaggtagat

SEQ ID NO: 27359 - DNA, 1008 bp, Homo sapiens
gggaatccaatacctggatattggcaaggtattgccaatagagggcaagaagggcaggtggggagttgaaagagtcagcccagttcagcaaaatgttcaggaggcagttgcatgaacagggctggtgttggcaccagagggatctgggttagtgtttagattccaagttgctggccctgtagttgctcattgttgttctcattgtggctaataaagagatactcaagaccgggtaatttataaaggaaaggtttaatggactcacagttccacatggctggggaggcctcacagtcatggaagagcaaaggcatgtcttatatggcagcaggcaagagaacttgtgcaggggaactcccatttacaaagctatcagatcttgtgagacttattatcacgataacagtatgggggagactgcccctgtgattcagttacctccactcggccccgcccttgacatgtttacaattcaaggtgagatttgggtgggaacacagccaaaccatatcactcatttagtatgagaagggcacaggacacgggatgccatcgataccatcctggcacatctgtggcctgtccggtcctggaggtggtagaaagtccagacagtgagggggcaatggagatggcagagaaccaggagagttgggggccgggagctggcgaagagtagttccaagaagcagcggccagcagagccgagtgctgctgaggccatcaggaagatgccttgcgtttggtgctacccagttgttaggttcttgggaagagtggtctcttcggagtagtgggaacaggtgaggctcttgtggattgaggagagggtacaagcaggagaaggctgcagggggatttccttataattaagtccttgaatagaagtctttagaagtatcagttttttaaaaaattgggtattcaagagctcagtggagatcttttcttcttttaaggtaatggcactctagtgtcaaatggagtttggtgtagtgcatgaatcat

SEQ ID NO: 27360 - DNA, 1600 bp, Homo sapiens
cttcagtgtggtgcaaggaaagtatcagaaaatgtctttcacttcttgttggcacattatatggttgaaaccaaacatgctttttgttttacaggaaacttcggctgttctcaggaaattctaagcatcgctgccatgatgcagatccagaatatctttgtggtccccccaaaccagaagtctcacgcagtaagtcagctctgtccccaggctgtctgtaccagtctcttttgctttgagctttcgttgtcaaaactgtactcaggaactgctgaagacagagctgtacaaatgtgatctgctcatgttttgagtgtttattccgtgcttgatgttgtgtcaggtgttttgcaggcatcattccactttatcttcattataagcctgggaagtagatattattatcatattttatttatttatttatttattgagaggaagtctcgctctgttgctcaggctggaatgcagtggcgtgatctcagcccactgcaactgcactctgcctcccaggttcaagtgatgctcctgcctcccatgtagctaggattacaagcgtgctccaccacgcccggctaatttttgtatttttagtagagatggggtttcaccatattggccaggccggtctcgaactcctgacctcaggtgatccgcccttgacctcccaaagtgctggtattacaagcgtgagccaccgtgcccggcctattatcatattttaaagatggaggcatagagaggttaggtaactcattcacagttgcacagccagaattgttggctctggattcacagtccagagccccacaccttaaccattgaactaccaacttctagtttctgtcagggaaattgtcattcagactgctctgctagaaaccttggtgggcacattagtgacataagaagtcaggtgccagggtatagcaggctgattctgggcaccacacgacatcatggtcatgttgcaggtgggccattataagctagagagatccaatccccacctaaggtgcaggcatcagcaatgactaattgagtgaacactggaaagacggaaggacaagttttgatactgaagagatagatactcagaagtaaggtgtgttgatagaggtaggtcagagatgagttcaaagtcagttcctgtttgaaagtcagagaattagcagccttatgcatggaggggctgaatttgtatgtgtaatgaggaggagagagactttcttagggattgttgggatcctccttgtcagttgtataactatagattacaaagtttttctgcctctgtgcccagatgcttatgtctgtttttgtttagttttgtttttaattaacctggaggaggagagagacaagaacactaacattttatcaaatttctttgccagataccttgtaataaattatcttaatccacagcaatcttgataggtttagtttcctgattttacagataaggaaatcaaggctgagagaggttaagtaaccaagctgagttctttcaagatatggcagagctagaatgctgcaaactaggtctttctgaatccataacccacacgctattcaccatgcaatattacttccagtg

SEQ ID NO: 27361 - DNA, 1038 bp, Homo sapiens
tgaggatctcacctgagagtgctgctccaggtttgcctgatggtgggcgtgggcagtgggagagaaatcacagcattgacggtcttctcttctccaactcagcaccctgaatcgagttctggtcttgagtgctaattggtctgctctcctgctgaaaagtggccaaagtgaatttgtttgcaatgtgaagggaaccttgagctctggaggcccagtataatgccagtgcttaatggctctgtggagttctgctggatacaaaggagggagaagagagggcatctcttcttccccctaacatctcagcctgtgggagtgattgtatccctgccacttgtctttctaaagaggctgagccgcctgagggctcgaagtcatgcctggtcaacttcttcccttccaggcagagctttgccacctcactcctcaaaaagccacataaaaagtgagatgggattttaaagtggttttatatccctttgtatacgatatggcacatctggaataaggagtgacatggaaatggatgttggtgggcctggtgtacttcaacagatccaacaactggataagggatgacatcactggtattttcccaatatgctctggagttgtaaagaggctgctacagcagcattgctgggggactctttctaaggtccaagtgctctaagaactctgagtagaatatggaaaactgttcttgactgcctggcatgttgactcttcctgttctatagactctgtgtttctggtcataggcatagtcatatgaagctcattccccaggacatgcagatgaatccttgcatgggcctttgatcctaacaaggcaagttaaattccttccctaaattgatgttatgaaaggaatgatctctctggtctcaaggaggcatggaaaaagtcatttgcaatgggaaagcctgagaatgacacatggagaaaagtagatttgaacaatggaaaaggtgactacatagtgaccacactgttcaagtgccctgatgcagctgtatcttaacccctggattttct

SEQ ID NO: 27362 - DNA, 1028 bp, Homo sapiens
attttatatgctggccaaatcctgtttctgactttcctggcacagccctggacatgcttctgtatcataggacttgttccccagcgcctttgctacttccttcaggcacattcctaggaaagattggcagtggggtttgctctttgccagcactcctgccggtttgggggttatggatgccaggttgggctccaggcactctgctctccatttgtggaggcagggacggtaacagcacctgacaagtagggatgatcacattgtattcagaagcctggtggagctctataaacccaaatttctaacagtctccaatgtaatgccctgtaatagaagctgtccttaaccctcaatcatctgtattcagctagtataaaaatgcaaatctgctcttatgcctaaacagttaggagtagaggagacttggcttcctttggaaagtcaggatgatagcttcatcccattctggtttttgtgattaattgtgacctacaaaggggtttactactctagcaggaactttgaatttcctatatacatctctttctggttagcaggcagaggaaatatcgttgacttttggcttcctggcaaatgtctcatttgccttgtcatttgttgattccttttccctgatctctgtttggtgtgataatgtacagcaaagctgaaaaccgcagggctacatgtacacttgtaggtacctatgttgtgattgccaaaaggctcagaaagccagttttctagtgaaaatggctaacattctaagaaatgctttcactgagaaagagaacgggtcaggggaaggtggaacttaaaggaagatggagtgttcctgaattcagattcctgaattagccatttatagtttcatgggaagacaatgaaaaaaaaaaaaaagaaagaaagaaaagaaaagaaaagaaacaagcaaccccaaaggtttttatcctttcaggtatccaaacatctttattctagaaagtttctcctcgatggtaaaataaagctaggaccttatagcaagt

SEQ ID NO: 27363 - DNA, 1046 bp, Homo sapiens
aagtaaggaagggatacatttttaaataaaacattgcattttggtaaaaaacacagattatgagaacacattgagttagaggaacatcatattgattccaagaacaaaaagcatggtggagaaattttgtaaccatgcaaatccagtgtgctctgttctcatgagttaaaaagaattttcctcctatagaaacttgttatttaaatgtgtgtcacatgtaaataacagtctaatgagagcaatatagagggagaaatatgtaagcaagggaaagtgggcattgttttgtttttttttttctccatctatttcaatacttgggtctttcctaacctatagtgtgtcctgtttctccctggctagatttcttaaagtttctgcctattcatcactcaagtacctatctcaagttgtagctacttttgtgtgcagggtgtaatagcagatgttctcctgatctagattttgttgctctgcctaactgcatgccatcatttgtttctccctttgtgatcttctactgtagtcaagtgtccctttagaacaaacttcatgggatggacatagcctaatgagctcattgctgatgaagtctttttttcctgtgcattggttagtgcagtaagcaaggctccttaactgcctgtcccagtgtactgaaaaataatagtgttctctcaccttaaactacaacttgtggtttttgcttattgcttctttagtctttgaccacatgcatgtttttacatagttgcagttattttattatattcctttttctgtcataaacactttccaaatgtgtttgtggtactcaaattatagcttagcagttaaataatttgatatattacagtttcccctcttgttaggtgtatccaattttggggtttgtttgttcgtttttgtttttttctgttgttgttgttgttgtttaagggaagcaccaaaataaacctctttttaaaattaattaattaatttttttgaggcagagtctcgctctttcgcccaggctggagtgcagtggcactatctcggctcac

SEQ ID NO: 27364 - DNA, 1053 bp, Homo sapiens
tacattcatattgttgtgcaccatcaccatctccagaactctacatcttgcaaaactgaaactctgtagttattaacaattccccacttctctgttgccccagttcttttttttttttttttttttttgagacagagtctcgctctgtcgcccaggttggagtgcagtggtgtgatctcagttcactgcaaccttcgcctcctgggttcaagcaattctcctgcctcagcctcccaagtagctgggattacaggctcccaccaccattcccggctaattttttatatttttggtagagacggggtttcgccatgttggccaggctggtctcaaactccagacctcagatgatctgcccgccttggcctcccaaagtgctgggattacaggcgtgagccaccgtgcccagcctattcccccagttcttggtaagcaccattctactttctgtctctatgaatttgactactttaggtaccttgtattaatagtcatacagtatttgtcctttgtgactgactcatttcacttaacagaatgtcaacgctcgtccatattgtagcatgtttcagaattttctgacttttaaaggctaaataatattccattgtttgtcctgcattttgtttattcattcatcttttgatggacatgggttatttctgcctttggctgttgcagatagtgctgctgtgaaacattcgtgtacaagtatttgtttgaatattgagtatattcctgggaatggaattgctgggtcatgtggcatttctgtgcttaactttttgaggaactgccatactatcttttccacattggctgcacctttttacgttcctaccaggaccacacgagggtgctagcttccctacaccttcaccaacacttgttattttttgttttattgccatccttatgagtatgaatggtatctcattgtggttttgattggtattttcctaatgattattgatgttgcatatttttgcaggtgcttattggccacttgtatatcttctttagaaaaatgaccattcaagttctttgccccac

SEQ ID NO: 27365 - DNA, 1036 bp, Homo sapiens
agagcgctatcctgaaggcatcaagtggaaattcctagaacataaaggtccagtatttgccccaccatatgagcctcttccagagaatgtcaagttttattatgatggtgagttgtttcaaggttcttgattcttggccaggaaaagaaatctgcttctatttagggatagaaaacaaggaaggatcctatgtaatagataatcctttttatttcattttgttttattgccatgcaattttgaggaaggggcatcaggtgttaactcttaaaggctcatttgctgctgaaaaagtgccatggaaaaggggctattcatgtcttccctacatagtccaaaaaaggtttgtcaacatggctaacagtgtgtggtccacaagctgaaggttttgatctgaacttcatttctagggagcaactcttcgcaagagttattagaaaagcctcacttgaatggtagtattttatgttagcaatataacaatgcaatcggacaagctgctcatcactagaaacagtattagtatatggtcgaggattaatagtctgccatccatctctagatagggctggtaggcatctgtcacctattctgtgtagcataacactatgcctttgatatatgtgcaatcaagtctgatgagctgctttaaagaaatgccctgcctgggtctcttagaaccctcagaattgtcccttatctgtcgttggtatttgtatccttgggtttgaaggatttgagggtagcctttgacatgcctcctgttggcagtgtagcagtatgtagatggtaataactgattttcttcattccatgagttttatccagaaatggttagagcattgttcctcatacccttatgtgcttatgactcaccaaagtggatctgagcccatttaacagttgtggggtgggcttcttttccctttccccaccgtccctcttcttctttcccctttcccaaccatccttccctcttctgtcccctttcctgacagtcccccttctcctttccccagcattcctcttccacctc

SEQ ID NO: 27366 - DNA, 1033 bp, Homo sapiens
attaggcttttcatatgggaaatctgggcttgcctagtatggatatatatttttttattcatattccacccacctaactttgaagaagaaagatgcctatttcttttccccacaattcctttcttccactccctgccctatcccttcctccccttcttgaacagaggctgcttagcttagcagtggcaggagtccctctgaggatttgatttttaaaaaccattgaagaggtgtaaaggaccctgcttgctgaaaggaaaaggaagagtgactgggcctcccccaggtcatccctgtcctgagcaggcacctgggaacaattaactggcatagtctccagagaatgacccaggtaaatatatgctaaagagaaggagaatttgtacaagtagatataaatcagtatgttgtctttgttgttgttgctactatgtgtcaccagacctttatataccatgagaaggcaaaccattattaaagagaattcgctagccctgggtatttatgcttagaacatgaatactatacctcactttttggaaccacttttttctctaggtaaagtcatgaagctgagccccaaagcagaggaagtagctacgttctttgcaaaaatgctcgaccatgaatatactaccaaggaaatatttaggaaaaatttctttaaagactggagaaaggtactgtagcccatgtgttaatatcctagtaccttgcaaaacaatcaagtactaagtaataaattatcattttgcaaaacatttcctgatgtaaaatttgagttgtatggattttgttgtatttaaacttgcgtattttttgtcttcatttactatattatgtagggtttctgtccaacaagagtacttgtatatctttgctattggctctcatgtgatggcaggtaggtgggggttatcagattaggccaaacagaaaacctcaactccagttgcgcacaggaaagtttgtcgctgcaggactgccccgtgtctgctgttgcaaagagaaatgttaatctgatgtccctctc

SEQ ID NO: 27367 - DNA, 2076 bp, Homo sapiens
ctattcttttatgaggctctatcagagactcttctccatttcctgttttgatagtactcagtaaaacagtatgaatttttaaagtacatttaaaaacacccaaataacatttacaaacatatatcctttaagacacaagaatcagttttgaatctagttgaaatcaatccttataggcagatctttttggggaattttatgatatttaagtttgagaaaaccactagaggttttcctttatttgaatttattttttagtgatttttcagactttcctctaccttgacttagtctcccacaagagataaaatgcattagtagagaacagcaatctgaatctattttgagtactttcttgctgtcttccagaaaatcaaagaggagaatgaaaaattactgaaagaatatggattctgtattatggataaccacaaagagaggattgctaacttcaagatagagcctcctggacttttccgtggccgcggcaaccaccccaagatgggcatgctgaagagacgaatcatgcccgaggatataatcatcaactgtagcaagtgagctcgcacttcatcctatgggccaaaaagggggtggagggcgtcctttattgtacttgggaatatttcccaggttacacaggactgtttgggaagggagatacttaagagcaggacagtatttcatgcgtaggtctccagatgtttttgaggtacagttgtctcccctcatccacaggggatatgttccaagacccccagtggatgcctgcaacttcgacccaattgctgtcacttggaacacatttctgttgatgtcttccacccccaaatttaatgtcttttccatgtttattaagtacttatcacatagagtggctataacttttgcagtctgaggcacaacagcaaaactagcacgactttctttttccttcttcacaatttcacagatggaaggttaattcttaccttagatcttagcaacttcaccatacagttttttttattaagtcgataatttccaccttttcatttaaagcactctgtgcagcttctgtatggcatatccaaattgccaacatcaccactttcacactttggggcctttattaagtaaaagaaggattacttgaacacaagcaatgtaaaaccattaaagtcaacctgataaataaggcagctactaggttacccatgggcaagtgacatatacagcatggtatgttgtatatatggttcacgcatcccaggtgggactacaagagatttcatcatgctcctcagaatgatgtgcaatttaaaacttacaaaatgtttatttctggaattttgtattgaatattttcggatgacagttggctgagggtaagtaaaaccatgcataaggtgggactactgtattgactgttaagaaggaaacttggaaaattatgctcagcagataggtccacttggggtcatgaaaggtgaaattattcctcacatcttatttcactatcctcgtgctctgttatttccagagatgccaaggttccttctcctcctccaggacataagtggaaagaagtccggcatgataacaaggttacttggctggtttcctggacagagaacatccaaggttccattaaatacatcatgcttaaccctagttcacgaatcaaggtaaggggatagttgagagctgcactggttcatggtgctgataacctttttttgttgaaatgtaacgttctcgtcctctagaatcactttgacaaattaaaaatcctccccattgaaagaaggcaagtactttcatagttagcattatggtgatcttcctacagtgcctccatttttttggtcacattgtaatcttatttattaattcacaaatatttactgaaatcccaaatgtgccccacacagtatacatttgatgctaggaattatgttggtaaacaagatagacgtaggccctgccttcatattgcttaacgtccagtggtcagaatgtgttgaagtatggtgattgtatattggcctctgcagatgtcttctacttcctcacctctcttggttatgagaaggg

SEQ ID NO: 27368 - DNA, 1677 bp, Homo sapiens
aaaagttggccgggcacggtggctcacacctgtaatcccagcactctgggaggccaaggtgggtggatcacctgaggtcaggagttcaagaccaccctggccacggtgaaaccccatctctactaaaaatataaaaaattagctgggcgtggtggtgcgggcctgtaatcccagctactcgggaggctgaggcaggagaatcgcttcaacccgggaggcggaggctgcagtaagccgagatcacaccattgcactccagcctgggcaacaagagcgaaactccgtctcaaaaaaaaaaaaaagttgtttgctctctctctcaacttagaagggagggaaagtgatgatatgctttgagagattctattagatgactcaaaaagcgactcatggtgaaaatacagaaatccaagattcatgtgaagagttgaatatagtttactgaaaatgtgagtgtggggaaaatcaatgttcgtgaatcaatatattgttttaaatatgtgatttaaagtatgtacctgtagctaaataaactattatatgtggacatttgcatctctaaaaagtttatattttagttgcaaaaaaaaaacaacccacaaaacaacttggagtgaccctatgatgaaaatgagtgtttgccttgtatctggagtggccatctctttcaggcatatacagtctctcactttgctctatctccacagacactaacaggtttcagtaaagccaagtgtcccttctcagtgctccaatggcccccatcacactgaattgtcatggtctgttggcatttctgtacccactgctggagtgggaacttgttctgactcagctgtgctgtcttagtgctctagaggatgcatccgtgaagcgtgttgcaaggaggagagagaaaaacagaaaagtgcaggtctgccctggcctgggctttccccttctcttcctttattgccatatgttgcctcagtgatgcagtcacagtgtccctgccacctttcagaagaagatacatctgcagcccagctggagaacctcaacatctgggtcccactatgggggccaatcagcagagatacaccaaggtcaatggagacagcagtccctgggagcagccgagccaggtgtgattttgccttgagagagaacacgaggctcttgagggacagataacacaacccaggtgaggaggaaagcaggtggacatgacctaagaagtgtgaggcctgatgactaagttggagccacagatagatttgggggccaggggtcaggagcctaaacagcaggttgtgggtggagttcaaggtgcactgaggttagttcttagcaagtagtactggctgtgtgctgaggtgcaggctggctcacaaacccagaggaggggctgttcagatgtctaacacgagaaactgagtaaaaattaaagaatggtttaggccaggtgcagtggctcacgcctgtaatccctgcactttgggaggctgcagtgggtggatcccctgaggtcaggagttcgagaccaacctggccatcatgatgaaacccccgtctctactaaaaatacaaacaattagctgggcatggtggcacgcgcctgtaatcccagctactcaggaggctgaggcaggagacttgcttgaacccgggaggcagaggttgcagtgaaccgagatt

SEQ ID NO: 27369 - DNA, 1054 bp, Homo sapiens
cttcccaggcctgagcttggctgcttttgcgctggtctctagtgggaggagggagttgggggattttgaaaaaccccagatctttgagagttgttccacttagcgcgtgcctgtgctgtggtcggatgggcactctgctctgccctccattcccccgcctctcagtgtgaagagatggtgtgtctgcaactctagactgggttgcttcttgcagggacccccggagactagggttagagagacccaggctcagaaccaggtctgtgtgaaggagggagatcaggaagtgacaccccaagggggggtcccacaaaccttcttgggtatggtgtgcatgtgtgtagatagttgaggagattgggaggaaggaaggtcttgtggtgaggcagccaaccatcctcagctacaaactccagatctgacacagatctaatgcagctgctcaacttagaaatggcagcccccttcctcagtgcccccactgaccctgtcagccattgggagaacattttagtgacttgagagcctgtggattccaaagtaaaggaagaatcgacactgcaaagagctgagataaccctgggaacatcactcaggcatcaggctccaggcatggtccccttccttactccctatgctgtgttgagttggtggcactggctggaagttctcagagatctcctgggtaacagactgcattttaaaccacgcatattagcaggcaataaatgtagcacagtggttgatggcaagtctggatttgaagcccatatattcattgtgtgtttcccggccagttacttaccttctctgagccttgatttcctcatgtgtaaaatgggggtaataatatatccagtatatatggttgctccaggatcaaatgagacaattcatataaaacatctagcattgtctgacacataaatgtttaataaatatgagctgttattagcaataacattaacaatagaccgtggctgcccttcaagaccctgaactgggaatggtgagggggtgaggtgtggctataggtgaggatgaaggtgcagga

SEQ ID NO: 27370 - DNA, 1029 bp, Homo sapiens
ccctcagagcagtggggcagccgatggcctatgctagataggccacagcccctgccttagctagggattgagaagaaacagacacataagatgcaatgtggtgtgtttaggttgtgttgagtttgagatactgatgggtcgttgaagtgggtctgcttagtgggcaattggatacacaagaccagaggtaagaggagaagtcctgggctggaagcaggagtggagtgggggctgaggcatagaagggatgaggtggtgtcgcataggaagagaacttgggatggattgagaagctccatatgagaaggcatgggcgaggaaaggagcccaggaaaggcaggtcagacagactgcaggccactggtgagggagagggtctgctgtgttgagagctacagaggtaaagacaggaacgataagaacttgcaagtgccctttggattcagcagcagctaatagcccttgtgagacttttgagctgcatcagcagcatggctggcattagatggcagtgggcagcagggagtctggaatggcaaaagcagagcctttgtagggcctgtccttgagggagagaacaggtgactggggtttgagcaggctctcatgcagatggctgaaaggagcgagcagcgtgtgggaggagatggagcccaagcttagctggtaggaccagccttctggagaaggtggcctcttcccctgagcctgggggaacagagaagtattctcaagggttagggaattcctacttggtggccctttcaccaagtgcatttggtagatgggtctgtagctgctttggagagggcacccgcaagccaaatagagaagggatagggtgcttgccaggctgtcccctagaaggaaaaggtgctggcataccaggtggttgaaggactggatctgggggtctaggctgaaaagggaagagtctgaatgtaagagccactgaggccgggcgtggtggctcacgcctgtaatcccagcactttgggaggccgagatgggcagatcacttgaggtcag

SEQ ID NO: 27371 - DNA, 1075 bp, Homo sapiens
gagcaagaaaaaagagaagatgactttaggaaaatcctaaacgaggtttggttttaaaattttcttcttggctggctctcctctcctgcaagttgcctttatccacttggggtgtgatatctgaactgaaaaagctgcaccaatctgaggatattggtccaaaaagagacaagagaccacgaggctcaagcagagagcatccacacagcatccaaccagaaaggccagtgtccttcctccatgaaaggcagccagggacagatgtcccagagccaggagagagagggagagaacacaggacctgcccctaggccactgactgagcaggataaaacccacaagggcacatctcaggctacggaatagagagatttcctggtgggacggcctcccaaggctagctggagatgagaccactagtacatgtgtgagcccgcaaggcactacccaatgttctgtccaacttcctccttgtgctactagagagcacagtgtggagtccttgtgtcaaggtgctttggtccacctgaacagccacctgtcactcagccaagagaaaggagctttaagttgtacaatcactaccaaaccccaaggccctggcaagccatccaactagggcgttctttttcaggaacccaagattctcaaaaatgacactcctcccctcccaaaataaaaaagctcctttatagtcaaaaacgaaaacaagtaatcaaaatatacaaagcatatgtatcaaatttaaatttcctttatcagaatgatcatctggtttcacctttgagaactcgatctacaaccccatgtaaaaaacaaatgggtacaagacatcagcaacaaaaaaacactaaaagatgattttactatctctgacgagtccaactgcatacagagaaaagggataagattagccactttttataggctttttcttcaggagagactaacctcacccaactctcaactctgcagcccacaaatgccttctactgaaggcaacaacacaatttaacccttaggcagtgtgcaaaaccacagtgagctgtcctgtgacagggctacatacctggct

SEQ ID NO: 27372 - DNA, 1285 bp, Homo sapiens
aggttcgggggcaggctcgggtggaggtggggtagggggcgcgggggacggggaaggggaggagcataaagtataggtcttaaagctatggaacttgatgggggccaaagaatgtactatttttaagtaatgtggtattgtaccacaaagtagatctaaataagctttatgctgtatttgaactaattggggcatgttattgggaggaggttggggggatttttggttatgttaaatgtttgatgtttaaattgttgcatgttgaattcaaactttttaacaagtccttgatgtttcaatttgaaagtgaccaatggggctgaggctgtgtccactgaggctaagatgactgcctttcctgattggccttggcttttccatacattgtgtgacccttgccctatgaccctttggctgaccttaccggaagccatgacgacagcagccttttgccattagacgcagggtgatggtgaggattccaagggttagacaaaactggttaatctgaactaggtgactgttaccttgcgtgttttgtggccaaaccaccaccaaaaacctcacactgtgatgtaagtacttagtgtaaaactagtaaacatttttgtaaaatgtagaaatgcatgtaatcagttaagttttatattttacaatgttctgtaaaataaaacttagcgaggtaaatcgaataaaggagcagtcactctctaacagattgtaggagaggtttagttggatttagtctatttgacttgcccttaatttaattttatggcaaatcacaaatgtgtcgaaggtttagcaatataatagcaaagtcctactccagtaaataaaagttgatatgtttgtactaactttcaaagacattatgcgtttttatcattacaaggcatctaattgttcccttcatgtgataaaggtggtggaggtggatacagcagtcggagaacatctggcagagacaaatacggaccacctgttcgtacagaatacaggcttattgtagaaaatctttctagtcggtgcagttggcaagatttaaaggtatgttttgtaattcaagatagaaatgatatgactaatgctttaaagtaaactccttttatattcttatttctgggaatttattatggtatatagatgttttaagatttccgagtctgaccaatcttgtctttcaggattttatgcgacaagcaggtgaagtaacctatgcggatgcccacaaggaacgaacaaatgagggtgtaattgagtttcgctcctactctgacatgaa

SEQ ID NO: 27373 - DNA, 1080 bp, Homo sapiens
cctgttccaccctcaaaggcccgttctgtgtcccctccaccaaaaagagctacttcaagatcccgttctagatctcgctcaaagtcaagatcaaggtccaggtcgagttccagagattaactcagaactccttgtttgcacattattatggaacactttcctacttaggcagttactcttccatgtttatacttggcctcttctgcaagaggaatctcttgaaaacaggggcacacagaaatttgatttgtggccaaattggatgaaaaagatgaggctctaaggaaatggtggcatgaagaccctctcccttctttgtagaattaagataactttgattttatagcttttgagctaacgtaacttttgtaaagattaagctcatttagtgttgtttttttttttttttttttttttttttttttttttttagtatttcagcaggatctgctggcagggtttttttgttttatttgtttgcttatttttaaattaactgttttgagctttgaatacttaaggctttagagggagaacccaattttcaattatgttggctttttataaagcttgagttatgtaagatttaaataaaagtttgctaccaagatgattgccttattgaataggtcactattaaattcctttaaatgttgatatctgccatttgtggaaacaacgtaaattctacttaagtgtaaacaaggcaagcctcagaccagcaataaattactcagtttggataacattattttgtgcagttaatcaaatttgccaaagtctttatctgcccctttaacaagttgagtaaaaataaaaggtattttttagtcaatgtgttccatgattttgcttaaattaatacttttaagtaatggaacttttttcaaaggcaaatttaaactatttaagaaatagctcctaatacttgggatcttgtttagagaatccactttctggaagttctcagcataattagtgttgagagtggttcagttgtctttaatgtttgtcatgtggaaatggaagtagcctctttttgttctgaaattgagtttattcaaagtgtaaaagcacata

SEQ ID NO: 27374 - DNA, 1031 bp, Homo sapiens
cacaaaatcactgtgtaacattggctcacttggtgagcatagggttgactgataaaatgtttaattcccttgctagcttgtgagaagaatgagttgatgacatgctccataccagtggctagatggagtattaaggtggagcagaaaagaagtgagaacatcttgattcccctttcttttacttgatggtgtttatgaacatgccgtagtgcctttatggccagtttgagtcctgcctactttgacttttacgttcccattcctgtgttaccaccttcctcccgatttgttcacctattttgtgctttaaatctcaataaaatacttactgagggaaaggcttgttttgagtttattgcatatgcccacttaggaccagattcttaacaaatgtttttttgaattggagtttgcattggcaagccattcctgtcttgagtatgagaacaggatcttgtgttcacttacccagaaacgtgagtttgggatttagtatatggtttatgttgggcaactcattaatcactgtgcttcagtgtcatccatgaaactagggataaaacatgcatgggatgtgaagattaaaagtcaagaatatgaacagtacaagagagtaccataacaaatacaattttatttacaaatatacatggttggaccataccttggaatctacttgctaatgcagctgctgttaacagttcttgtatctgctcaagagatttctatgatcatataaaaatgcctttttaggttttcagtgttcatgccctgagtagtagtctgcagtttgctttaatacatggtaatacagagatcggctttaaatggctggctggttactgttgaatgaatgtatgataaattttttttcagaaccaacagtgtgaataatcctttcagttgtctatcagcatgaatttaaaaattactttcaagattcaacattacacaataaaacttagagttcttgcaatagagcacctagtgtagtaattaccgatttatatgctaatctttgagtttcctca

SEQ ID NO: 27375 - DNA, 1075 bp, Homo sapiens
tgcgccaccacacccagctaatttttttttttttttttttgtagagacaggattttgccatgttgcccaggctggtctcaaactcctgggctcaagcaatcctcccacctcagcctcccaaagtgccgggattacaggcgtgaggcacaaaaatactgtcgatagccagaaaaataatgtcttagcaactcacatccatgttagttgtttgtttctaggtcttgctagctcaaattccacttatccgtcttaatcaccatctaaaagatgcctttgtttttgagaatccatgtgtttgtgtaggttcaccactttcttttaatcttctgaatacctaaaataaacctttgaaatctagatcacgcacagtctaggttgagatgagagaatactgagcggatggttgtgtatgtatcaatgtgtagaaaaaggcatccatcgttatggcaaccagcatccttaactgatgcaatcctgttcccaataatatgagatgtgattaaaaattgacattgcagcaaggaagaacacatgcaatgcgttggcgtggcaaccggaatagttaaattctgcataaatttaaacctgtcgatcacagcaatttggagaatttgcctacatttcattaggaacccttttctcatctggcctgggagggaatcaggagcctggtggtctgacatgtggccatgacttaaggccaagtaaaatcaagggattaaattaaatcattggtgtgggagaggggctggatggtggactgtaccaaaagttaccctgttttcatctgcataccctacatcatttagtcactcaacagatatttattaagcacccactctgtgccccgctctgggctaggtactaggaatacaaaaactaatatttcctaccctcttggagcttgaaacctcttagcctctggaattactcaaatctatgtgaagtgccagctgtggtatgtgtaagcgagacaggtatcttgtgttaccagaaccaataacaaggagatttgattaattagagagatcaggtggaggcgaagagatcagtcaaagtgaagcagagaggggca

SEQ ID NO: 27376 - DNA, 1111 bp, Homo sapiens
ctcactgcaagctccgcctcccgggttcacgccattctcctgcctcagcctcccgagtagctgggactgcaggcgcccgccaccacgcccagctaattttttgtatttttagtagaagcggggtttcactgtgttagccaggatggtctcgatctcctgacctcatgatccgcccgcctctgcctcccaaagtgctgggattacaggcgtgagccaccgcgcccggccaattgacatttttaaaagtctttcagagtgtggttttttggatttgtcttgttgctttctagtggtgtcacttaacttgttcctctatcccctgtatttcccatgaactgaaagttagatccaaaggctgggttagacttaggttaaatttctcactgtcactgtctctgtttctctctctgtgtctctctgtctccccctgcccccctctgcttttggcaagactagttcctaggtgatactatgtactttgtactgcctcatgttggaatgcacacagtgtctgcttgtcttgctgttagcagcactaaggttgaccaatgaggtcatgtggggacaacaagagcaggtttctcaaagccagtgtctgtgaggactcaaaagacattttgcggatacaaatgctaaacctcagaccagtcagcagaaagagagaaagagaacaagtgtgtgaacacggggaaaccagtggctgtctttctttccttctccgtccccattgctgtcttccttttttcctttctccctcccttctcctttctcccggtcctttctctccccttctctcctccttccctttctcccgcatatcctttactcctactcccctcccccattccccatgcacacccctccctttccttcacccctgccccgtgaccctttccaccttctccactttccacctccctcccgcaacccctcagatgattgacggcgaggccttccttttgctgacacaggcggacattgtgaagatcatgagcgtcaagctgggcccagccttgaagatctataacgccattctcatgttcaaaaacgctgatgacaccttaaagtgactggcccagggctgggccctcctgcagcccctgcttggcct

SEQ ID NO: 27377 - DNA, 1042 bp, Homo sapiens
aaaagcagctactcagaacccattatatgccaggcactgagaatacaaagtcgagtcaggcatagtcccagtccctgctttggaaaagtttgtaatacactgagagagagagagacaaattagtaaacccagaagggtgtttctgagcatgtcaggtggggtgggagctgagcctggagaagcggagaggaacaggctcaatagcagtatcacgtgtaaggccaaggagcttgaacttgatgctgaaagccacagggagcccttgggttttcagcagccttgagcatagccagatctgtgtttcttctttttttgttgttgttgtttatgaaagaacttctagaatgttttggaaagattcttctgtcagttgtgtggaaagtggaaaggaggaggcagcctagagccaattaggaaggtggtggtgtcaccaggcaaggagaaatggggacctgaattacgggagtcaaggtgtgagtggagaggaggggctggtaggaatgggaattaggaaaggctctgtagaggactactcactgactgatgtggcaaataaagtaaaggcattgcaattttgtcaaaaaaatgccaagggaacatgtcttacggaagatggcagagtagggaagcacatgtctgtacagcatgtgccagagctgtccattggtgattccagtgagagaaagaaacgccttataattgttatattgggagattgataaagatcttatttctgtggaatttacatgaagtttcaatgtctctagacacattatgggagatctagatattctacttttttttttttttttttttttttgacatggagtctctgtctgtcacccaggctggagtgcaatggcaccacctcagctcactgcaaccatcgcctcacgggttcaagcgattctcctgcctcagcctcctgagtagctgggattataggtgtgcgccaccacaccaggctaatttttgtatttttagtagagatgaggtttcactatgttggccaggctggtctcgaactcctgacttcaggtga

SEQ ID NO: 27378 - DNA, 1035 bp, Homo sapiens
ctcccgggttcaagcgattctcgtgtcttagcctcttgattagctgggattacaggcacgtgctaccacacctggctaatttttttgtatttttaatagagatggggtttcaccatgttggtcaggctggtcttgaactcctgacctcgtgatctacccgcctcagcctcccaaagtgctggaattacagacgtgagccaccgtgcctggcctggaactaggcgtttttaaattaatttttttttgagacgagtcttactctgttgcactggctggagagtgttggctaatttttttgattgattgaggcgggggttcgctctgtcacccaggctggggtacagtgacataatcacggctcattgcagcctcgacctcccaggcccaagcaatcctcccacctcagcttctaaagtagctggtgccacatgtgccaccatgtctggctaatctttttgaaaaatttttgtagagagagtatctcactatgctgcccaggctggttgaacttctgggctcaaatgatcctcccacgtcagcctctcaaagtgctgggattgtaggtatgagccaccattcctgttctttttttttttttccttgttaatttttttgagactgagtcttgctctgtcgtccaggctggagtgcaatggcgtgatcttggcttactgcaaccttcgcctcctgggttccagcaattctctgcctcagcctcctgaggagctgggattacaggcgcctgccaccacgcccggctaatttttgtatttttagtagagacagggtttcaccatgttggcctgactggtcttgaactcctgaccttgtgatctacccacctcagcctcccaaagtgctgggattacaagcgtgagccactgtgcccggcctttttttttttttttttaatttgtagagacagggtcttcctatgttttccaggctggtcttgaactacagggctcaagctatcttctcgccttggcctcccaaagttctgggattacagtcatgagccatggctggcacttc

SEQ ID NO: 27379 - DNA, 1021 bp, Homo sapiens
gttcaagtgattctcctgcctcagcctcctgagtagctgggattataggcgcccgccaccacacctgactaatttttgtatttttagtagagatggggttttgccatcttggccaggctagtcttgaactcctgacctcaggtgatctgcctgccttgggcctcccgaagtgctgagattacaggtgtgagccaccgcacctggccctaagctggatattgttcccctgttttccatcttatgaaaacttgtaaaaaatctcttactagtggctgtcttctacctgtttctctttgtccttgtgaatttttgccttgctttattttgaatccctttttttgtcatggcagtgtggtcctggcagggagagaaaatgccagatggtgtgttttccccaaagtctgaaatgatcccttttcaaagctcaaacctgaatgtgtcatctttctggggcttcccctgacacttgggttggaaactctggcttctttccccccatggcctgtttggctcacaggtgccaccagcctcaccttgatccactgtcacttgtgcttactcggtgttagctgctttgcctcctttcagtccctcgaaccctgagctcttctcagagctcctagtgctcctctgtcggcctgcagtgcactcccgcttgtgcctattgtgtagctaatgtgttctcatccttcagttctcagtgggggtgctatttcttcagagaagttttctctgttctcccagactgtggttggtctctggtgacctctgtgttgtgcccacacctgtctgcagagtagtgtgtaccccagttgtagctgaagataacattcatctcccctgctagatttaactgtcaatggcagccacttgtcttatttaccagatggatccccagtgcctacaataatgcctggcacacagtgggtgctttttatatgcgagcaaaagaaggagtctcactatagcttggggcaccccagactctggtcttggggagtgggagggctggggaggtgtt

SEQ ID NO: 27380 - DNA, 1080 bp, Homo sapiens
taaaagtgggctctgtgcttctggggccttgtgagacttctgcacataactggcacttgtctgcctgcagatgaaggatagcagagcaagctgattatataaaactgtgaattagttaaggagatcctcagcctccatctctccttgctggtggccaccttcttacctgttgctcattttaattttttaaaactgaaagcatgtttgcaataaaaaaatcagaggtggctgggtgcgttggttcacacctgtaatcccagcaagttgagaggctgaagcgggcggattgctcaagcccaggagttggaggccagttcaggcaacatggtgaaaccttgtctctatctttttaattaaaaaaaattaaaaaatgtattgagttgtaatttacgtactctaataaacagttttgagttatgacaaagcatacagccatgtaaccactgtcacagtcaaggtatacaacagtcccatcaccccagaattccctcgtgctccttttcttagccttttttcggcccttagctccttgcactgtgatctgttttctgtctctataattttgacttttctagaaattaacaattaaaatcctatagtattacatttgcaggctgttttttttgagacagagttttgctctgatgcccaggctggagttgcagggtgtgatcttggctcactgtaacctctgcctcctgggatcaagcgatctcatgcctcagcaacctgagtagctgagattacaggcatgcaccaccacgcctgactaatttttgcatttttagtagagatggggtttcaccacgttggccaggctgggtttgaattcctagcctgaagagatccgcctgccttggcctcccaaagtgttgggattacagatgtgagccaccatgtctggcactacatttgcagtttttatttatttattttttgagatggagtctctgtcgctcaggctggagtgcagttatatgatagctcactgcaacctccgcctcccaggttaaagcgattctgctaactcagcatcccgagtagctgggattacaggtgcacaccaccatgcctggctaa

SEQ ID NO: 27381 - DNA, 1073 bp, Homo sapiens
gcccaggctggagtgcaatggcgcgatcttggctcactgcaagctccgcctcccaggttcatgccattctcctgcctcagcctcccgagtagctaggactacaggcatccgccaccgcgctcagctaattttttgtatttttagtagagacaggatttcaccgtattagccaggatggtgtcgatctcctgacctcgtgatcctcctgcctcagcctcccaaaatgctgggattacaggcgtgagccaccacacccggctaaaatttttttaagaggtgaggtcttgctactttatctgggctggtcttgaactggccttaaagtgatcttcctgccacagcctcccaaaacgctgggattacaggcgtgagctactgcacctggccctcatttgataattttctgtctcaggaatggagagtccaaattagcctgaaaaacataatctcttccgcttcctaaggtttcaggtgcaaattcgttgtgtttgagcagccttatgtgcagggcgaaagtgcccatccctctatcaagagtggagactgcattcctgtcctctgagcttacggagcatgacattttctgtctggaagcctgtacaggttgctcgccagcctgcttttacaatggaagtgcttttacaataagtttacttccttgggtcatcatgattctaaattccaggtagagagagttgcttaactattcctctgcttgatacatttgctggaggaggaaatcgctattttgtgattcagaaatcagctcaggaattttagccctgatagtgatacataatttcgggaaaagatttgtgaatcccttagtcagaaatcagtctccaaagtccggctcagtggctcacacttgtaatcccagcgcttgggaggccaaggtgggaggatcacttgagactaggggtttaagaccagtctgggcaatatagggagaccctgtctgtacacaaaaaaaaaaaaagttttttttttttttgagatggagtcttgctttatcacccaggctggagtgcagtggtgcaatctcggctcactgcaacctccgcctcccgggt

SEQ ID NO: 27382 - DNA, 1040 bp, Homo sapiens
ctctcttagtcacccgggttggagtgcagtggtgcaatcatggctcactgcagccttgaattctgggctcaagtggtcctcctaccatagcctctggagtagttgggactacaagcaccaccatggctggctgatttttttatttttagtagtgatggagtctgtgttacccagactgttctttaactcctggcctcaagtgatcctctcctgtcagcctaacactaatcccagagtgttaggattacaggcgtgaaccactgcctttggccatgtgtgtgctcttagtccttgttgatgccacgaattagagaggttctggaattttctcatgttcctcagaaactccatgtcccatggagatgcttgagtggctcagattcacctctgtgaattgtggtttgaactgtaagatgtgtacatttgacttgtgcttatctgtcttcactcttccttacagagggggatctctgtgtgtcccagatgggggataacaagggtttgggaagagactgtggatccctgcctaatctctaggtcctgaggaaggaagaaaagaatggtctgcatttgttctagttttttatctccccatggagtggctggccagctgcgggaagtggaggcggcgaggccccaggctgctgtttctaggagttggcctcatcacccaggtccctggctacctggggtgtttctctcatcctctgagtgccctggttatgccatgagagtcagccatggtggtatctccaggtgactaaggtcacataccagcacacaagggttcgtgtttgtggaacctggtagcttccttcagagctgacatttgcccacagccagcctggcccagccccataccaccagccctggcgctctggggcgtgaggtgccttttctgcccccctgctctagggcaggtggaaatcacccatggtgggtctacatctgatagaagcatcttatagttctgcttctggaccagaccatcctgggtttttctctgttctgctgaagggttccctccacgtgtccatcac

SEQ ID NO: 27383 - DNA, 1515 bp, Homo sapiens
cgtggtgtggtcgctgccgtggatctctgcacagtgggatcccttcggttcatccaaccatgttcagtccacaggacccttccctctgaggtctcatttgattctttctcctgagaagatgcagagatcctgataatataaatggggaagctgaggctgctctttgtcacttcctccgactgctcctgagcacctgagtttgcaagcacgcgccggctggtgctagagacatggtggtatcccgtgacactcagcctcaggatgggggagactgatgtgaaatacaaataacttaaacactttcaggcaaagataagcactgggcctagttcagagaagtggcaaattgctactctggcctgtctctgaccaactcccagttctctacagagcacgggaaagcccctcggggacgtctttcctgcagtgtgcaggctgcccttctcccctgctcttcccagttgatgggatggttgtgttttctctatgaaaaaaggagttggcaccttgggctttctgaaacacacaggtgttttagaaatcagtggagggtgagagaaaggcatggttgtggaggcactggactgtgaacaaggtctgcagcgggtccccctgctgtctctctccactgcatggagcctcctatgaagcccaaggtggctgggggctgaggctcccttgggcctgccatggaactgattctgagtcaagcagactttccacggaccatgctacatgagccgaggtgaggcactagttagtgctcctttcctgttgcagtggagatttggctcctctgtactaaaatatctgcatgctctccaaacaggtgtgagggcaaatcacatgaccttggcagctgtaattaaagtttgtgggggcttttcggatgacttatgaggagtggctgtgattcgcacctttcactcttagtagcactcgccctcccctgttctctgttgcctgaagctggagaggtccttggaaccccgaggcctgagaaagggaaatgggtttgagagcccccattagtgtggaacaaagggttgagtgagcctgggctttgagctgtcggggtcctaattcagcagctgtgtgactgtgtgccaggctgttgatctctgagcttctgtttctacctgcttaaaatgacggttactgcacagggctgtgtgagggttacagtgcgtctctgggctgctcccagccatggcaggcccctgggaatcaaggtcatcagctgcttgtccaaggcagcagttagtggttgtgaatggtgcgtgtgagatctgcatcctggcgtcaggcctccttcctgccttacccaggacagcccagttgcagctgggttggtcccacagtcccacacacacacagcccgagtgtggtgcctcacgtgggctgccccgtgcctacccacagccacagaccccgcacctggaggaggacttgaaggaggtgctgcgttctgaggctggcatcgaactcatcatcgaggacgacatcaggcccgag

SEQ ID NO: 27384 - DNA, 1941 bp, Homo sapiens
agagaaaccttgtcctggctaggggtctctgacaggctggggacctgcagccaggttactgcaaagaaaaaaacatcaccgcagggagtgaagagcacagattgagtcaggtgggcctgggtttgagttatgacaccatcactgctctctgggatctttcaggttccctgagccccagttaaaagcctataaaaggggtgccaagcctaagtcaggagggcacagtgccaagcagagcagagagactggaagggcgtgggaggggctttgtgcaactccgctgtgcttggggttgaagctgcgtctttatgatgcttgtggatgtttctggtcccaggaaaactaggaacagccttggctcctcctgaggctttatgtgacaaagccaacgttattgagtatgttattactggataatgctcagtgatactccacatttattgattatgttattatggcctgggggctgcacggcacccatcccagggctgatgtgcccccacgtacttgactgtgcctccagacacaccactgaatcaggctctgaaacgcacacacgtttctttacttgattacttgattttttttttttaagtaagaaagttctttagaacaagattaagttctttgcttaatttttttttgagacggagtctggctctgtctcccaggctggaatgcagtggtgcaatctcggctcactgcaagctccacctcctcccaggttcgcaccattcttctgcctcagcctcccaagtagctgggacaacaggcgcccaccaccacacccagctaatttttgtgtttttagtagagacggggtttcaccctgttgaccaggatggtctcgatctcttgacctcgtgatccgcctgcctcggcctcccaaagtgctgggattacaggcgtgagccaccgctcctggccctttgcttaatcttttaagtataaagtaagcttaagctcatgtaaactccctatctgaaagcagaaactgaggcttggaaaagtgtgtatcctctttcaggtctcagcagccaggtggtggtgctggggtgggattgcgggtttttttcttccctctcacagcttctcgcaaaatggtgactccttgacttggttttggtttcagccgacaactgccccttcaaactcttccagcctcaccctgtcaggtatcaaagaagacaacagcttgctcaaccagggcttcttgcaggccaagcccgagaaggcagcagtggcccagaagccccgaagccacttcacgacacctgcccctgtgagtgctgtggccatctctgggggtcctgcagtgcccgccttcttagctcagggctgagtgctggccatccctgggggtcctgcagtgcccgccttcttagctcagggcctttgcataggctgttcctctgcctgggtgcttttcctgctacttcccgtggctgcatttgcttaacttactcttctgatttcagtctcaatgctgcttccttaggggtaagccttctctgaccctacattctgtagagatacccccattctgccattctctcttttgtggcctgggtttcacttgtaactaagtcattatccctgtatttggtttgcttagtacatgtctgtcctcaagcaggggctggcttcaggctgctgacccgtctcactgctccttctcacccgcctcctggctgtggcttctcctcgaggctggtgctgcacggggcgggcagtgcatggccatgtctccttgtccagcgtcctacttacagttgaggaagcccacagccaggaagtgacttgtccagggtcacagggaatgtggagagagaataagaaggctctggcttctaggggagggaggcttataactctacccttccctggccaggatcaccagggtctgttgggaacacatagtccctgcctggatggtaaccc

SEQ ID NO: 27385 - DNA, 1030 bp, Homo sapiens
ctgtaggtgacggtcttaacttgtggtctgttctctaggactgtgagtggtggattagaagagagatgaggagctgccaaaagcagctacacagagaacagagttagcaaatggcacccgagacagaactatagcagatgcaagagccaaaaacccacagccgcttgactcacggatatactatgatgtcaagctgcagtcaccggtggtcacaatgggcagcctaagtcatcaggaagaggctattgtgcactgcttgggaggggtggatggctttgggaatgctgccatctaaaattgctcatggatgtatgttgtgacttaagtcttttaactgtacgtatttgttttttgtttttgtttttgttttatttgagacagagtctcgctctgttgccaggctggagtacagtggtgcgatcttggcccactgcaatctccgcctcccaggttcaagtgattctcctgcctcaggctcccgagtagctgggattacaggcacctgccatcatgcccggctaattttttgtatttttagtagagacgggtttcaccatgttggccaggctggtcttgaactcctgacctcaggtgatccacccgcctcagccccccaaagtgctgggatgataggtgtgagcccctgcgctttgccagggctggtttttggatgtgattctcagggccgtctttctttacccttctgctctgctgaggcccacagcagcctagtctccttgggtgtgggggaagggtttaaatctattcatatatcgcagaaggtgaagccttttggtgttcagcttaacatgggaaacatttcctataaaacgccccatcttaggtcgaccctgccgttgtccctcacagaactggaccaaagtctgaatggacgcaattgacacatatctcagggtgttagtggttttggtcctctgacattctatttacatgtctggtgttaggtaggatttcttctaaaaattggcctggagctccttcccaccccccaccctgttaaattgtttct

SEQ ID NO: 27386 - DNA, 1023 bp, Homo sapiens
acacacacacacacacacacacacacacacacacacatcatgagatatgctttggagtcatactggcctgggatcaaatcttggctcttggctttgccacctatgaagagttaatttccttccttccttccttccttccttccttccttcctccttccttccttcctccccttcccttcccttccccttccttccttcctttcttccttccttcccttccccttccttcctttcttccttccttccttctttccttccatccttccttccttccctccttccttccctccctccctccctctttccctccctccctccctctatccctccttcatacagccatccaaggagcatgcactgcctgctgtatgcaaggctttgtggtaggtgccaggcaggaacaggtaattaagacatggtccttttccttgagaagcatgatcttattagagagacagaaataaacaatttcaaatgtgtgtggtaagcattatgttgaagtagcacaggggagtgtgggaccaccaggctaggctggggacagtcagaaaaggcttctcagaggaagggacacttgcctgtgcttgaaggtgagtagaacttggccaagtgaagaaggtagggaaaagcattccaggtagaaggaacaacatatgcaaaggcatagaaggtgctgagagtgtcaagatgtgaggctgaagaagggagccaggggcatttggaaagctgtttattatctctgacttcagttttctcgtatacaaaatgtgatgagcaatgcttacttgtttatgaaattaaatgaggtaatgatgtatgtttaagcacctggtgtagttagcttcaattccctttccaaatctgtctacagatgcctaagagccaggctttgattttaaatgagagaaggaataaaaagcactgaagggcctggccgcccacttgcacagtgcaggtttcctgcagctgctcttgtgttggtcgctttattgctgctttggacggagcactaaatgtctgcat

SEQ ID NO: 27387 - DNA, 1050 bp, Homo sapiens
aaacagtggtaactagaggccctgggcttcctttgtatttaccagagtccagatgaaactcctggcccctgtttttcagaggcattaagcaaaagaaatatgtctttttacattttataaaactcagaaaaatggctttaaacagcttttgctctcctgctataattatttattttcaaacactcctgcaggggaccgctccgttttcttaccctgaactcctttttctcataaatgaaccatcacttcaataaatcattatggaaacagagactaacaccggctctgaaaggttgaaagatttatgtaacacatttatgtttcccattttctcattctggtactcggctgcaaaagctaagctaataaaagctgctattaatatttcttgttgcctagcaaccccagagcgggagtaatagcttcggctagaaaaatagatgaccgataaggaaaaattcaattcttttattatctcagggggaaatggccttttactggaacattatgatgtacgagtgtgaagttgaacacaaaagatttttttgtatgtgtttgtttttctgtttttaatgaacattattttacctccactaactcttttagggcacttttacttttctttcgtaaaccccccatcccatccctcatgcttaatttagcagctacagtagttaagaatctgtcggcgttctttagtttaaaaatggtttttgcaaaggtttacaactcggtcataaaaattcactccctgttaaaactcaggccagtgataagctaacacgcaggctggttttctgtgaacaggatcacgtttgttgacgagataagattcatggttttccctacaagaaaggtcggaaaggaacaaaacatgttcttttccatgtcccagttttctttggaaccagggacactgtctcttttgagaaccgtttgctctgcagtttgggatgcgttcacactgggagaggatggggcacagatattcactgagcacctgctctgcagagccttggtgccgttcccttctcccagcaccctttaagg

SEQ ID NO: 27388 - DNA, 1051 bp, Homo sapiens
gggactcaggctgacaaaaactctacagttgcatgactgtaccacctagaatacatggccttctcagtggctgctgtgagggaaaagagcctggggaggcacacgtaggatattcacagtgttagcctggaagtagcgtcatttctacttatctttcattggacagaactaccatgtggcctcttctgactgctgtgggggttctgggaaatagaagggaacaaatggaatgtttcttgaggattactctctctgccttagttttattctagtgttgtgagtgaagatgtcagatggatcaaagtgagacttgcctcactgagtgtaagcttacaattagtgagccttatataagacacagctctgcatgtgatttagataataagcagtaggaagaaaaattatagttatgaactggagaatcaattctttctgaatcacctagattttgagtgtatcttattgtgctccctaaaacatttttaggtgataaggccctgtgtgtagaatttctctcttgaaaatacagaaatgacttttgaggcaaaatcattttgtgagtggaggtcatactttcttgttttttttttccttttttttttgagatggaatcttgctctgttgcccaggccagagtgcagtggcgcgatctctgctcactgcaacctccgtcttccgggttcaagcgattctcttgctcagcctccccagtagctgggactataggcacgtgcactgtgcccagctaattttttgtttttttagtagagacggggtttcaccgtgttagccaggatggtctcgatctcctgacctcgtgattcacctgcctcggcctcccaaagtgctgggattacaggcatgagccactgcgcccagcagaaaatggttaatttaaaaatagcaaagaggccaagtgcggtggctcacacctgtaattccagcactttgggaggccgaggcaggcagatcacctgaggtcaggcgttcaagaccagcctgagcaatgtagtgaaaccccacctctactaaaaatacaaaatcagccgag

SEQ ID NO: 27389 - DNA, 1083 bp, Homo sapiens
ttgagatggagtctcactctgttgcccacgctggagtccagtggcgtgatctcggcccactgcaacctctgccttttggtttcaagcgatcctcctgcctcagcctccccagtagctgggattacaaatgcctgccaccacgcctggctaatttttgtatttttagtagagatggggtttcactgtgttggtcaggctggtctcgaactcctgacctcgtgaattgccctcctcggcctcccagagtgctgggattacaggtgtgagccactgcacccggctagtaagcataaacttctaaagaaatagttattaagcagtctgtatgtgccaggcaggtgaattaggctaatggaagaaaacaaaagctctagagccagatagatgtgagctggagttctggctctccaccatctatttgcatgttgctctgggcatatcacttgccttccctgaccctccatttcttcacccataagaaggggaaagttgttgttatgaacatacctactctgggactgttgggaagattactggaccaaaataatataaaggccttagcaaagtacttaaccctagaggtgtttgatatatcatcaatattgttgatggcatttggaatgagatgtttcacatttagtatgctgctttccagatgggttggaagaagattcacacacgtttcctaggccccgaaacctgacatttgctctttctttttctcttgctcttgttctagggaatgacaatggataaaagtgagctggtacagaaagccaaactcgctgagcaggctgagcgatatgatgatatggctgcagccatgaaggcagtcacagaacaggggcatgaactctccaacgaagagagaaatctgctctctgttgcctacaagaatgtggtaggcgcccgccgctcttcctggcgtgtcatctccagcattgagcagaaaacagagaggaatgagaagaagcagcagatgggcaaagagtaccgtgagaagatagaggcagaactgcaggacatctgcaatgatgttctggtaagaggccagtgcttctgttttgaacagtggtttctaaa

SEQ ID NO: 27390 - DNA, 1026 bp, Homo sapiens
ttgccccaagccacagacctagggagtaagagttgggaattaaagtttggatctatcgactctaaagcctgtgatgtttgcactagaatgtatggtttttcacattctatattgttaaaggttatagctgtatttaactgctttagtagactttgtcataattgttttcccccaaagcatttaatatacaacttggtttagaataaatatctaacaaatgtataattgaatggcagagacactgacacttcatttgataggtcattgctcctgcccagtttgggactgagaaaataatttgatagttggtccaatgtgtgatacctatgaaagaaccgagcctttaatattttcatctttatgttacagccactgtgtcgaactcccagcaggcttaccaggaagcatttgaaattagtaagaaagaaatgcagcctacacacccaattcgtcttggtctggcactaaatttctcagtcttttactatgagattctaaactctcctgaaaaggcctgtagcctggcaaaaacggtgagaaagaccctttgtgatatctaaccatagcaaaacagtgcttgtgttattaacttcattttattcctgaacatactcattgtcttggactttttttgaaagattttctgggggtgggagtgtatcttttatgagataaatacagatctgttacttttttaattcattctcaataccttctgctgactttgtttgattactgttttttgcgggtggttgtagaaagttccaggtgaatgtagttagttgtttcttaccaagctttgggccttggttatacattgtcattctcatgccaagatttgaggttatagttgtataaaagaaatacacagcacattcttgttgtgtgttggattaccttccatattcttcctttggccttctctacatattttttatagtccctcaacatgcacacaactttttaaaaacatttttattcgggaaaggtgccttaaagttccgtcacttaaatcagatttagtga

SEQ ID NO: 27391 - DNA, 1031 bp, Homo sapiens
cctttttgaattctatctttatctgtcttttgttcactttttaatgctatatatgggcaggggtgagagacattactgagcaccttggtgagcaagcctggctttaaagattggagaagagcttctggcaccagaaccctgtcttcctccagttctcaacacggtgttgctcttcagtcataccggaatctgaatcaaaaaagtatttttaaatatccatgatttctccctgtattgaggctagccctgatcatgctttttgtgcctgtcaccaggtctcccaagtgcactcatccaggtcagtgctcagatgtgtttaaggagaccctatattcagggaagttgcgtgaacactgcagtggggagaattgagaatagtcaggcctatcagtctcacagaatcacccctctacctttgatattccacttagctgtagagtccatctgtttgtccatctgctgaaatgagaaaagaaaaatttatgcactgatttaaaacaaaccaaaaaaaaagaaaaaaacaaaaaaaaaaatccctcctttctagctgaacaaaaatgtgcagttaatacttggcgcttgaaaatgcagtagtgaatgtggaaccaagcctgtctgtatatctggtagctcttttcttgctttgttttttcttaccagtattctgcctaacgtttgcttctgtgatggttatattgcctagcaagcacacccgtggttgtgaaaatagtatagcaaaaaagaaaaatccccggttattgatgtactagatttgtgtatgtcttttaaacagttctagtttcaccttacacagaataatcaggaaaagtgtaaaaattcaaaagtgaaataaaaattttatcagttagttgcctgtgaattgatgtgtcaccaccatctctgttgttaccagacctagctaactattctgatcacacttatttttaactctgttttctttaaaaataggcaaacagttttatttcattatttaggaccagaagtcaaggtgttatccaggggaagaaatt

SEQ ID NO: 27392 - DNA, 1056 bp, Homo sapiens
gtgggaatgaggaattttccaaagagatcagtgtgagtgacaggatggggggacccgcctgaatgatgtgatgttgggttctgaggaagtggtctagaagttctcttttggctactgagtccagttgtaaacatccttcagggagccttgtgtttggaggaaaaaaggttgtcttttaggttaagatccttttgaaaaatgcgagagaaggctgtggcacatgtaaattaggcatcagtaaatttgattacacatcataaaaagctataggtcctctttccaagcaaatgcatatacatttgatgtagaaacatggttgaaagctggaattttaaagttaatcaggtttaaatgtaaaccccagtcctaccattacctagctgtagaaactgaggcaagtggctttgcttttcggaccttgtttactcacctataaagtgggagcaacatttctcacctctccaggtgtcctaagaactactaaagaggctgcatgtacagcatctgcattcaataagtagtgaaatagtgattgtcgtaatgattcatcatacaccttgcatacagcttcaggagatggaccttcttgaggactccccgaacaaaggaaatgtgtaaatttggattgcttagagttaaggcacacctggggtgaccatctttttaacaggacaaacggtataaaatggggattataaatatatctattttttgtgtgtgtgatggagtctagctctgttgcccaggctagagtgcagtggcgccatctcggctcactacaacctccgcctcccgggttcaagtgattcttctccctcagcctcctgagtagctgggattacaggcacctgccaccatgcccagctaatttttgtatttttagtagagacggggtttcactgtgttggccgggctggtctcaaactcctgacctagtaatccgcccgcctcagcctcccaaagtgctgcaattacaagaatgagccaccacgcccagcctacatatatatatatattatacaattatttatttattttgagatagagtttccttct

SEQ ID NO: 27393 - DNA, 1107 bp, Homo sapiens
aggttcaagaacctgggttctgcctcaacctcctgggaagctgagattacaggcacccgccaccataaccagctaatttttgtatatttttagtagagatggggtttcaccatgttggccaggctggtctcgaactcctgacctcaggtgatctgcccaccttggcctcccaaagtgctgggattacaggcataagccattgcgctcggctgagattagcaataattaatgtgatatgaaaatattttctttttcttcatgacaaattcatggctaatactgccaggatttttttgttgttgcccatattcataatagaaggaaatgctaatatgaaaataaagatgtcactttttccccaatccatgcaatttccccctaaattgtatccatgacctacctgagggggatccatggactctcaggttaagacccctctactgaagggtagcagagtacagtttcaaaattactgattaagagcgtgggctcaccaggagttcaagcccagccggggcaacaggatgagacctcatctttacaaaaaatgaacaaaattaggcatggtggtgcttgtctgcagtcccagctacttgggagactgagttgagaggatcacttgaggctgagaggttgagggtgcagttgagctgagattgcaccactgcactccagcctgagtgacagagtgagatcctgactcaaaaaaaaaaaaaaaaaaaaagaaaaaaaaaaaggaaaaaaagaagattttaaaaataactctagtccttatgggctgtatgagccaggccggtgtcttcaccctaaaaaaaggttaaaaacccagggccaggtgtggtggctcctgcctgtaatccctgcaccttgggagacctaggtaggaggatctcttgagaccagcctgggcaacatagtgattgctgatctctacaaacttaaaaaaaaaaattagctgggtgtggtggcatgtacctatagccctaactacttgagaggctgaggcaggaggatccctggagcccgggagtttgaggctgcagtgagctatgatcataccactgcactccagcctggatgacagagtgagaccccatctctttaaaa

SEQ ID NO: 27394 - DNA, 1067 bp, Homo sapiens
agtcctggctaacgtatgaaccacaggctgagtgaccccagacaagtcactctttcgagtctctcttatcccggctgtaaagtgggagccgcgatgcctcccgcatcgggaggttgtacatgtgaggtgtgaagacatgtaaagtatctggcatgcagcaggcctcatagatgggggtgcgtgctgcatccctcaaacagctcagtaaacagggtgcacgctacatccctccatcactcctcagtaaatgggggtgcacgctacatccctccatcacagcttgctaaacgggggtgcacactacatccctcgaacacagcttagtaaacaggggtgcacgctacatccctccatcacagctttctcgcgggcctgcccagtgctgggcttagcccatggggaggagggaggcagcgcagccccaggagccttccttccccaccccagcagctcttgtcttgtcttgcttttaggtgatgacagagggtggccacagcaaggggtttggctttgtgtgtttttcctccccagaagaggcgacaaaggccgtgacagagatgaacgggcgcatcgtgggcaccaagccactctacgtggcactggcccagcgcaaagaggagcggaaggccatcttgaccaaccagtacatgcagcgcctctccaccatgcggaccctgagcaaccccctcctgggctcctttcagcagccctccagctacttcctgcctgccatgccccaggtgacggcctgcccgcaactcccaccgcagccttcccccctgccccagcaaggcagagcatgaagactagagttctagggaaatggaggtttctaacttgcttctgccgaggactcattaggaagtctttgtttccctctctataaaagggagagatagtgttagtcaaatggcatttcccagtgagagaagctcgtgaatgttgtgctgaaaaagactcttaatgatccagcaagtttgggaaatgctgcgttaagcaagacctacatttttccttcctcccttccttcccttccctcccttccctcccttccctcccttcccttc

SEQ ID NO: 27395 - DNA, 1024 bp, Homo sapiens
accagttttttctttttttttgagacggagtcttgctctttcgcccaggctggagtgcagtggtgtgatcttggctcattgcaacctctgccttctgagttcaagtgattctcctgcctcagcttcctgtgtagctgggattacaggcgtgtgccaccatgcctggctaatttttgtatttttagtagagatggggtttcaccatgttggccaggctggtcttgaactcttgacctcaagtgattcccccatcttggcctccccgagtgctgggattaaaagtcatgagccactgcgcccggccacaaccaattttttctttgtttttctccactcccactgtttcacttgactagccttaaaaataaaaataaaaaaaaaataatcttttaagaaatgcctgttcatgtcctttgcctaatttttcatggttttttttttcttgtaaatttgtgtaagttccttgtagattctggatattagacctttgtcagacgggtagattgcaaaagttttctcccattctgtaggttgtctgttcactctgatgatagtttcttttgctgtgcagagactctttagtttaattagattccgtttgtcaatttttgcttttgttgcaattgcttttgatatttttgtcatgaaatcctttttttctcctttttttttttcttttttcttttttttttttgagacggagtcttgccctgttgcccaggctggaatgcagtggtgcgatcttggctcactgcaacctccgcctcccaggttcaagcgattctcctgccccagcctcccaagtagctgggattacaggtgcatgccactacactcagccaatttttttttgtatttttagtagagacagggtttcactatgttggtcaggctggtctcaaactcttgacctcgtaatccgcccgccttggcctcccaaagtgctgggattacaggcatgagccaccgcgcccagcctcctttctttccttctgttggattgattgagtcctcaccgccatca

SEQ ID NO: 27396 - DNA, 1046 bp, Homo sapiens
gtatatcagagaaattaaaaatggagtcctaatgcagcacagagagctaatatccatctgacgttgtgtgataatgggtccatcaggatataaaaccaccaaactgttaattcaaaattaatttgataaaagtaacagaacctgaacaaaattgattgtttgaattccctggatagttataagccattcagttggctttttgtggtaaggaaggataaattttagccctgagtttttcccaggaggccgataacaacctatgattccatgaaactttatcttaaccattctctcctagatcagggctccaaatctgattgtaagttgagatttctttgggtttttacaaagaagctttactgaattgtcagaacatagtcagttactcatttattattaggttgtactttttgcttttggctgcacatgttagaaatcagacacttgctgggaggcaagaattattactaccttatttataattagaaatcatgattgaaatggtagaagaaatgctttatttgcctacgcttaagtcaatactgtcaagaatgcatcttgatgtttcctgggaactcagttatctacaatttgaaactttatctgccatttcatagagacaaaaataactctcccaaaacatttggtgaaattattgttcatttatttcaaagtgactctaaaagttagtgcatattcttaaatttaccagcctttaatggtaaggtaaaatttaatgtcccattactcagttacaacaatcatcaagtcagctattcttgttttatttaatccttcacctccactattcacccacactgcttgattgttttgaagcaaatcccaggcatatctcatttctaaatatttcatgtgtatttataaaatattattgaccttttaaaaattataatacctttatcatacttttacaaattaggagtaataaatttccttaatgccaaaaaatgccttgttactgtttagtctcctggatttatatatattttttagcttgtttgaattaggatccaaatgcgatttat

SEQ ID NO: 27397 - DNA, 1629 bp, Homo sapiens
tacatcctatgggtattaaaaagccaatagaatattatgaataattttatgctaataaatttaacaacttcaacatcataaacaaattccttgaaaaataaaaagtaccaaaattcattcaagaagaaatagataccagcctgagcaacatggcaaaatcccatctctacaaaacatcaaaaaaaaaaaaaattagtcgggcatggtggtgcacacctgtaatcccagcttgtcaggaggctgaagtgggaggatcacctgagcccagggaggtcaaggatgcagtgagccatggtctcaccactgcactctagcctgggtgacagaatgagaccccgtctcaaaaaaaaagaagaagtagataatctgaatagccctatatctatagaaacttaatagtgctgggagatataggtattattatcctcattttacagatgtgaaaattgaggctcagagaagtaaagtctattgctcaaggtcatgtggctagaatatggcagagccatgattcagatccaggtcttctgattcttattccagtgtcctttctagcataccatgttgcctctaaagattgcagctccttatttactagaaaattgttcctgcccaatctacatctccacctcaccccatcttttcttaagcactatgtttgtgtttttatcagtattatattcattgtctttggaatacatgttcttgtttgtgtttggaaaaaaaatctcttttaccagcttgcactcggaccaacttggaaaaaaaaaagcttaaatgtttttgctatgtacagtttaaaaatgtgaagtttgtagctttaactttttgtaagaaaatctaataacactggcttaagtgctgacttgaaatgctattttgtaaggtttggatgtaagtaatcaattgaggtcagcagtttgtatgagacatagcttcctccattgcccccactccttttttcttttttaagtttgagatgcttcctgtgtttttatgttagaattgttgttctccttcttttcttcttcctatacctcatcacgtttgttttaaataaactgtcctttggaccacaaacccttattaacgagaacctcaatatatagcctggataatggtgttgtgaacaatctttgtgacattgactcagtggtgtgtttattctaagatccaaagctggggagaggttggtaaacttttgttgggcttctattatgtgccagggtactgagctagttatcaggaatataataaagatgaaccagatacagtttttgcagggcatttggggagttagccaagcacaaaaacacacaacattgaacataccatggtagaagaaggtacagggcctgtggatacacagaagagggagtgacggttctgctgggatgtccaaggaaactcttctagaggagacaatataccttgaaactttaaaaatgaagaagagatggctagattaataaagagtaggaagtgagggagagaagacatcctggacagaagagcccgcctgtataaagcctctagtgtgagatgatcaccttggaatccttcatcctcatctgctgctgcacgaagccaggccagacgtggcccagcattcagaggtggaacagcagg

SEQ ID NO: 27398 - DNA, 1029 bp, Homo sapiens
gttaagcagccatttctagggtggcctcctccccaaatctgtgttactgggcccagaggaggagctttaggttgaaatggttaaacaaagagagggtggtagtggggagaccctggttgtggaattgtgggaggcaggtggccagaggcctaagtgccggggcaggtgggatgaggtggaaggatgtactgctgggattccctcactcccagacctgccccttgctgccctggccatgctgggtccccgccttcgtatacagccctcccatatattcagtggcgttcccagtgggcaactggggcccaactccggctctctggagcaaagtggaagttgccagtctcactcaggcccaacccaatccagcctccacttggggctccctgggcaggcccccacgaaggctagtgcaagggagctccccagaaagggtcagattttttagctgggagggcgctgtcttgactgcccgctgacagcgcactcaggacagaagttcacgcaaaggttgatggaatggaagagtgagtagagattattttcgaaagttgatgggattgaaaatacccagcaagggaactgcaagggagactgttcaggaaatgggctggagtgcaagctgggtgggaagaccgctgaaagtggttactggggtggaatttgcacgggaattagcggggtggtgggggcggaggtaggcaccgaccgtaggggagctccaggaagattgcgctgggagcaggagctcgggagcacgcagcagccactatgaggtgctaagcagtccccgcgctgtggctccgcccaggctggtccgcgcggcagctgatgcccagtcttggtgcccagtaatggtggggaggagtgtgtgagtgggcggggtgggagggggggagagtccatccaatcgttctccctctgtcccaaactggagatctatctgcatcgctgccctgacccccaatcccggagagctctgtgcccctcgatggctccactgctctcccgagggcgcccactccatgc

SEQ ID NO: 27399 - DNA, 1063 bp, Homo sapiens
tcactgaacaatgctgctctgaggccctggtgcctggtgggctgtatcagaatcacctatactcactactcaactcctgagcttccagggctggggaatcactgtgtgctaggcactaagggacagcaacattataggcagagcatgcctctgagttcacaggccaaggggataggtaccccagaaggtagactcctcaagggcagggatttgtgtccgttttattcattgataagccaccagatcctagaacagtgcctggtggacaatgggtgcccaaaaagtattttttgaaaaatgaaataaatagcatgatacgggtaatactgagggttgtaggagcacagaggtggagcctcccaacccagcctgaggatgtcaggggatcttcctagagatggtgaggaggaatgaaggatgagtagatgttggccaagcatagcggtatggggcaggtcgagggaggtgggcagagcattctcaaaagagggaacttaaagaatatgagtgtggaatggaattatgttgtacattggatgttgctagattagaaagcagtagccaagagtggcaggggtgaaaactggagaagtgggtaaagagacctacccaatgacacacagctggtaagccttgtggactaaatccaagactcttgaatgaaaacctccactctttttttaaaaaaaaaatatggcataataagatatggataacacaaaatttaccttctaaccatttttgtttttgtttttgagatatagtttcactctgtcgcccaggctggagtgcagtggcgcaatcttggctcaccacaaccttcacctcctgcattcaagtgattctcgtgcctcagcctcaccagtagctgggactacaggcacacatcaccacgcccagctaatttttgtattattagtagagacagggtttcaccacgttggccaggctggtttcaaactcctgacctcaagtgatctgcccacctcggcctcccaaagtgctgggattatgggcatgagccatcgcactcagccctaaccatttaaaaaagtagttgggt

SEQ ID NO: 27400 - DNA, 1020 bp, Homo sapiens
ctcctaaatagctcaccttcacaagcagggtcttgtatttgaggcaggtaggttggttatgccattttcagatggggagactaagaccagaaaggtgatttccttaggggcagagcctagtctggaagtcaggcctgtgacttcagagcaagggtttggggtagatggcacatgcgtgtgtacgtgtttgtgtgggtggagagaaaaggaggggcgcgggaggagttgctttagcctttgtctgggttttgaaggatgggaaggggtgggctgcagcactggaggaagggaaccctccaccctgagatctctgtctctatcctatcctgtccctggccttctgaggcaagcggggccaattaaggggaaaacgtacctcctccatttgtgctgaaccaatccctccaacccctctcaggagggcatgatatggagagttgggcattggctgtgttccctgaatacagagtatctctcttgtggtgcctggaactggcatcccctttgtggagcttagggcaagccccgcctctgcatgagacttggtttgtgggacacacttggtttcagggaaggggaaagaggtcaccaagggcagaggtgtccaggccggagccaggggccccactgttgggatgctggctgcagtggggcgccccaagcccaggtcccctctgtcttctctttcgactttgcagctgtacttgttttgctcctctacccgcaggagctgacatggacccaaatcctcgggccgccctggagcgccagcagctccgccttcgggagcggcaaaaattcttcgaggacattttacagccagagacagagtttgtctttcctctgtcccatctgcatctcgagtcgcagagacgtaagtcccaagtcctgagaagagggactggggtagggtagggaggatgtcctgtgggtcctgaatcttgtggcactctctcccctctggttttcttggccctctatgcttctaacttgggacctgacatgtaactctcactgtcc

SEQ ID NO: 27401 - DNA, 1029 bp, Homo sapiens
gcatagagtgttgaataagacagaggacactgcactcaagaaatataagtctactagctagggcaggtgtcagttaattaattacagttgtgttcagttcccttaccaagggaaagagcagaatatcctgagaggacctggattgggttcgaagggggcacggtgttcgtcacgtaagcacttcaatactagcaacctattgtcatcatcgcttgttggctggggaagacagggatgattccagaacccagattgcccagtttcagtggcagggctgttccccatctactcactggcttgggactctgaacatggcctgggcaggtggggtggggagtgattcttacctttggcagctgttaactgttgatatttctttacacagaggcccccccagtgcccttcctgcatgcccagcggtacgtgagtggctatgggctgcagaagggggagctgagcacactgctgtacaacacccacccataccgggccttcccggtgctgctgctggacaccgtaccctggtatctgcggctgtatgtgcacaccctcaccatcacctccaagggcaaggagaacaaaccaagtgaggacctgagtcctgaaccaggcccccagcccgccctctcatgtcctctccaggtcccccaaactctcatttcccagggtagttcctgaagtacctctgaaaagctacacaggcataaagagtaaggaatagtttctcaaaactggaacgggagcctcactgtgccaggttcagaagtaatttataaaacagcaataattaaaacacataatactggtgattcttaataggactgtacaaggacagtagcttcctttttcacttacttttgcctcctttctggagcattgggttttgtgatgattcatagactctttaaggtagggaaagggtttggcaacgttaggcttttgaagctaggaagatagcagagctggagtagatggtgttttgcttccttgggaggggtaaagaggtacagttaattaaatttttttatt

SEQ ID NO: 27402 - DNA, 1045 bp, Homo sapiens
ccgggggcagatactttcggtttgcagctctcagggcagcgctgccctgggacgcccagtgggttttcacggctcccctgggtctgggatcagggcagctccgcctaagggcgcggcccaatctgagggttcgtcgcccccgcgtggtcagacgtgggaatggcagcttctgaagctctatgtgtggtgcctttctggggctcaccaggtgccatgttgcgtgggaccatgaaactgtggtggtcttgtctctgccacaagataatgtaggcttgggcctcaagataatgtcggcatggtgtcccatctttggcatgagtcctaccctttccaagtgcagtggtggctgattcagtggtggctcccagggatatgataggcaaagggggttcggtctctgctgtctgaaattaatcctgggctcaagagagaggggcgcaggtgaggcctggggctcttcatgcctgatttcccgctacccctctggcttcctccaattcctacatccaagttaactctgagacctgtggttaccaagaagacagtcgatgtgggggaagggcaaaaccaagtacctactatagctacaaggaataatataaaggaattgttccattttgtatattggtatcatcagcttcttgagaagccttttgggtaatttattgtaaaaatcactactttaaagacaaaaatccttaattttaaatgctacaaaatttaagagctcgtttgagttgatgcaggacccacagttccctatagggcgatcactgatgagtgtatgtgagctaaacgcacaggagcttattctcgagagttctcaggaattctccggaattatgagaagcatatcaaccgcttcatcgggggggctccacttggcattttacagggagagttgggcagttcccttctcaaggcaaacagatcttacagtggcgtttattcagataaatatgagagccgtgtgggactggctgtatgatgacggggatatcctcccactgaatatgcctattacccaggtcatggtaaatctggg

SEQ ID NO: 27403 - DNA, 1032 bp, Homo sapiens
gcccaccttaattcatcctgggccaggcacagtggctcatgcctgtaatcctagcacttggggaggccgaggtgggtggatcacatgaggtcaggagtttgagaccagcctggccaacatggtgaaaccccgtctctactaaatacaaaaaaaattaaccgggtatggtggtaggcacctgtagtcccagctactcaggaggctgaggcaagagaatcacttgaatctaggaagcagaggttgcagtgagcagacatcatgctattgcactccagcttggtcaacagagtgagactccatctcaaaaataataaatagtaaagattaactcatcctgtctccatcactcactgagacctgcctgttctcttccagcttttaagaagtacctgcaagaaacctactcaaagcaggtcaccagccaggagccctgacccaggctgcccagcctgtccttgtgtcgtctttttaatttttccttagatggtctgtcctttttgtgatttctgtataggactctttatcttgagctgtggtatttttgttttgtttttgtcttttaaattaagcctcggttgagcccttgtatattaaataaatgcatttttgtccttttttagacaagttgttgcgttgtaatttcactagggttggaggtactcagggtaggcagaggtggaacttaaggatgtggggccaagcaatggggtgacaaagatttattcccttgtaccttattttatgactctgcatctgtttcttcatctataaaatgagtgtcacaataatgcctcctgtctatggagtcggtgatgtgtaccagcaatgttagtgaatgttggagctccctcagctgtgttgcagatgaggctgagccagaccttaggctgaaacctactcctatagctgtagaaggaacaagcgtgtgtgttgggggggggatcccaacacacagccacccatgttctgtcctgaagaagaatgcttaggtcaccctaagcaggtccagggcctggggagacagccaggaaa

SEQ ID NO: 27404 - DNA, 1074 bp, Homo sapiens
aactccttcaggtctgttagcagctggttggttgtgcaagcctgaagcgggaggggtttgggattggaagttgggtcccttcatgtctataattgtgctcttaggtctctcctcttgggttttttcttaatctaacattcatacaaatacacttgggatcttgttaaattcttttctgtaggtgtgaagtggagcctaagatccagtctgtttatttattttggtttctaaatagtttccaagtgatgtcattgctgcggtctgcttaagaacaaaatttagagcaatgttcttagaatgtggtccttccagcagcagcagcatcacccggaacttgttaggcaaattcttgaccccaaactgccctccaggttctgaaggtctcccacggttgaaaatcactaggttagcggatactggagaaaaccagagctcagaacctggcactaaattagtcaatatatgctggccagggccgggtgtggtggctcactccctgtaatcctagcactctgggaggcggaggcaggaggattgattgcttgaacttaagaattcaagaccagtctgggcaacacagtgagacccccatctcaaataataaattttaaaagaaaaataaataaatcttggccgggcctggtggttcacatcagcaatctcaacatcttgggaggccaaggtgggaggatcacttggggccagaaattcaaggttatagtaagcttatcactccagcctaggcagcagagtaagaccttatctctaaaagaaatgtttcgaatactaactgtggtggatgtgttttcatctgccatgtggtccttggtcacggtgtttggtaccttagatggccacatggcctgccttgggccagtcacaggtctaaactgtagttcagattcaactggtgttgtctggaattaatcactgggagagagtaaagttattttactaatggggttgctaaaagagaagggagtcagtctcagctgctgggggagcccgctgcagacggaagaaagccaagtagagacaaacagctgggagtcggagagatgacattaactgaga

SEQ ID NO: 27405 - DNA, 1033 bp, Homo sapiens
cacgcctgcctataaaccctcatagtgtgacctttgacccctggtgtgatcttgggcccgggctgggaccagcccctagtgtgggttgtgggggcggccatggagctgggcagctgcttcaagacctatgaggacttcaaggagtgcttcagcgcctacaaaagggagaacaggtgctccttcattctcagggactgcgtctccgtccgcttccacaacctcaaccatggcacctccatccgcgaagacatcctgtaagggcgggcggggcggggcgggccaagagggtggggaggaggctggacctccggagggctgcctggaggaggaggggtgcataggcacgcattgggctgcgtggccattcattcaacaggcactcattgagcacctgctgtgtgccttgtgaagagagctaagcctccacggccattggtttttgaccacccactccactttcactccattcacaggcttttctggaatttataactgcagtttctcccattgttttgagcagctgcagcaacccaaatacaaagtatggctttcataaacggataaaaacaccttggcgataatttccttcatcagtctcctctttacaaaacagtcacatggtcgttggaatgttcgttcattcattcattcagtttttagttcttatatatttgttgaaacagggtctcactctgtcccccaggctggagtgcagtggcacaatcagctcactgagccttcaactgctgggctcaagcgatcctcccacctcagcctctcaagtagttggaactggaggtgcacgccaccatgcctggctaattatttgattttgtacagactgggtcttgttatgttggctaggctgttcccagactcctggactaagcgatctttcggcgtctcaaagtgttaggattacaggcatgagccactatgcctggtctattcattcattttgtaaatggtttttgagctccttatattaaccgttttcaaacactttccatgtgccaggcagtgttctctatgc

SEQ ID NO: 27406 - DNA, 1062 bp, Homo sapiens
ctgcaggggtcagagggtggggcaggaaaaccgttaagagactgttcagacagggaggtgacggtgacttggaccagggtggtggcagtaggatcagggagaagagttggattctagatatgcttttaagatagagccgatagaatttgctgagggattggctctgggaagggatatgaagagaggagtccaaggtgactccaaggcctctgggctgggcatttgggaggatggagctgccctttgctgaaatggggacagtggagggaggagcaggttgggaaaggagatgggagcacctcgtgtggacctggcattgagccaggtgtttgaatatatgatcatctccttctgtccattttatcacgcccattttggaaaggatgtgacagagagttgaggttaatcagcatgcccaaggtggccctgctggtacatggccaggccaggcctcccacccctttaccactctgctgtcctactgtgttttcttggctttctcagtcccgttcctcctcttcgttttgaggaaatgacaacaggagaactctgcagaagaaaccacctaggagccgagacctctccctcgttcctaaagagctgtccagcggttaacgctggacacacatcaggtctgctcagtggatctgtcacccacatttttccctgacaaatttgttggattaacctcatgaagatgaatattccacagtagaactcacacttaaaaaaataggagtcagtggcataaaggctttgatttttctgtggacacaggcttaaatccagattctaccgcttgatggcttctccatgggagcctcagttttctcatctgtggagtgggtgtgtattactccattctcacactgccaataaagacatacccaactgggtaatttataaaggaaagaggtttcattggctcacaggtcagcatgtctggggaggcctcagaaaacttacaatcatggcggaaggggaagcaaacacatccttcttcatatggtggccggaaggaggagaatcagtgcccaggaaagggggaagcctcttataaaa

SEQ ID NO: 27407 - DNA, 1101 bp, Homo sapiens
tcggggactttggaaataattcaagcaatgaagattggaagagatgatcagggaaggggaaataaatccagcagagatgaaagccaaggtccgcagctgctcggaccatcaaacctttataagcaatgtgaggtttttaaggaaaggagtgaattatagctgttaggaccaaggacaaaaaggctttgatctaaaagtgggagacatcttaaaggaagctgtggcttttgcataaggtatttccacatcctcctggggtgcattagatgaacccatttggaatttacaggtctgcagaagggcccttattcctaagggtatacacttgaaacaagcggctttgcaggagtggagttgatatttggagagagaaagcgtagcgctccagcaggcatacctgagaaccttgcagcgttttacgaggctccttgccccgctgggacagacagatacaggatgtgtgatcttacgaggcattcgagcattgccatgggaggtcattttggtgagcccttgacctctccatttgaaaagtatcagtttggaaaaggttgtctttactgccaggaaactttagaacagaggctataacatggctttttggacagtcactctgtcgctaaccagatgttggcctctgtttgccctggggcgagaccctagcctatgccggactttccctctcgttgagcactggctgccaaggactcatcacagcacgttctgcatcgcttcgccattgcagtgtatgcacggtgcacgtggctggcatcgcagaacgccatcaaaacagccccataggcggccatctgctgtgaagaaatcagaagtatgtgcaccacatacatctaggtgcattgggaggaagaagtaggggggcggatttttagctgggttaagtcaaatacccaccgaaactatgaatgaaccttccagtaggaccaaaaattacagcagattggaaatgggagaaaactgagatgaagaacaagcccccgaggcagacactcctgggttctaatcccagttttgctcataatctgtgagttttaatttgcaagttgcttaacctcaaggatgaaagcttcagtttctcacctc

SEQ ID NO: 27408 - DNA, 1049 bp, Homo sapiens
ggtcttgccgtgttgcgcaggctggagtgcagtggtgagattgtagtttactgcagcctcaaactcctaggttcaagcaatccccccgcctcagcctcccaagtagctggaactataggcatgcgccaccacacctggaatttttttttttccaagatggagtcttgctctgtcacccagagctggagtgcagtggcacagtcttggctcgctgctacctccgcctcccgagttcaagcagttctcctgcctcagcctccctagtagctgggattacaggcacacaccaccacgcctggctaatttttgtatttttagtagagacagaatttcaccatgttggccaggttggtctcgagctcctgacctcctgatcctcccgtctcagcctcccaaagtgctgggattacaggtgtgagccactgtgcccagccaatgttttaatttttttgtagagacaacatctcactatgttgaccagactactagagtggccataatcaagaagactgaaactaccaagtgctggagaatctagaactctcgtgaattcctagtaagaatgcaaatggcacagccactttggaaaacagtttggccatttctttaaaaagtgaaacacttaaatgaccaaactccggggctcaagtgatcctcccacctcagcctcccaaagcattggaattacagaaaaatctgaggccaccacacctggcctcaaattttttaaaaacataattattaaggaccaggatctgggtagtgggcactatctcacttatttctcaccatagccctttgaaaaggacaccgtttattttcttcatctatccaggaaattgaggttcagagaaatttggtaaccaaagtcacaggttccatcccagcctgtcagacctcaaagaccccacctggccatggtaccctcctcctgcatgttcctctccgactgtaagaaacctaacctggctcttgggtctgggccgccaacatgccatccggacagaggaagatccagagacttaggggtcacgtgagccatagccacg

SEQ ID NO: 27409 - DNA, 1112 bp, Homo sapiens
attataagcgacagaaattcaatgcacatcagcttaggccaaaaaggagaatttgttcatgtcaccaagatgtccaaacgtagacctaaagcaaggtgggatccagctccctaaatattttcatatgaatctgtgtgcactgtcaggaaggctctgcctgtagggtgacagagatggctgccggcatccttgagcctagatctaccagctcagccaccccaggaaaaaaaggtgcctctcccaggagtcatagctaaagtcctcaggccaatgcccattggctcataatcatccttgaatcaatcactatgattctagccagggatgggttatgagatcaccctgaaagacccataatgggtgttatttttactaaaaattattaactgctaatttacggatgtgactgctcattctcagagagattgggtatctccacaatagcatgctgcctcctttgctaaccggttgttttttgaaggtgtctaataaagacactgtgttgggaatccccaagaccaccttcggcctcaatgattgactagaactcacaaggctcagagaagctgttagactcacagttacagttattacagtaaaaggacacagattaaaatctgcaaggggaagaggcacatggggtgaaatccaggaaagaccaggcacaatcttccgggagtcctctcccaggggagcacggacactccacctaattctcccagcaacaatgtgtgcgaacacatgccaagtgttgccaaccagggaagcccacttgagccttgatgtccagggtcttattgggggtcagtgacataggcatgcgacacctaagtaactgacctcagccactcagacaccagcaccccagagcaaaaatagacattcaccataaactacattcttagcctaaactatctcaagtggaagtgcatggtgtggcccaagggcttggagctcatgcaccaggaactggccaagggccagccctgaagacagacatttcttaaggaatgtgcagggtttgagcaacccaggcctgctgagttaaccctttcctgcacagccagcctctaaatctttatagcagaccccaaatgaaatcagctaaatgg

SEQ ID NO: 27410 - DNA, 1085 bp, Homo sapiens
tcctaaatgacatttgttagaaaaacaggaaaattcataagaataattggaaagaccgttaaaatagataaggctttagcaagcttaatcaaaggggaaaagagagagatcaataaacaacatccagaatgaaagggtggacattactaaaatccaggggaggttgtttcttttaattacaagaatgccaggcacactgttttaccaatgaatttgaaaatctaggtgagattgacacttttcaggaagacacaaattactgaaattagcccaagtggaaataaaaataaatacaacaaaccaaagatcatgaaaatttgttaaatcattaaagagaaagtgcgtttttggtgcccccaccaaaaaaggcaccaggtcccactggttttaaacaagagttccaacaaaacttcaaggaaaggataaatctcatccagcataaactacagagcaaagaaaaagatggaatgctctcccacacattttataagactaacatcaccctaaagctgacactggagttacagcgcatatgacaaatggacaaattgcggtcgtcgctgctgaagttggaaggcccctgcgatcccagcacctaccttcatccatgccctgtgactctttacagaagttttctgcagatcctgtctgagctttagtttccacactggtgaaaagaggggtctggactataattggtatcatttatttgacacctgccccttgcctcgtaacacacctgcaagcagatagaataaccatattttgtaattttttaaaaaacactgaagactgtctgggtgcagtggctcacgcctgtaatttcagcactttggaaggcccaggtgggtgggattacctgaggtcaggagtttgagaccagcctggtcaacatgatgaaaccccatctctactaaaaatacaaaaaattagccagatgtggtggcaggcatttgtaatgccggctacttgggagactgaggcaggagaatcgcttgaacccaggagatggaggttgcagtgagccgagatcaccccactgcactccagcctgggtgacaagagtgaaactctgtctcaaaaaa

SEQ ID NO: 27411 - DNA, 1032 bp, Homo sapiens
tttttcttgctctattgttatggcgagtacttctagtacattgttgagtagacatctttgttttgttctcagtgttcggggtgaatattaagatgttatgggtctgctgatctgctttgtattagtatagtattgtttctagaatttcatataaatcccatgtaatcataaagtatgttgtgtcagcttcttttttttctttacgtatattttgttgctgttgttgtgtcatacttcttttgcttagtctaattccctgagattcattcatgttgttgcatatatgagttcttattttgtttctgagtatgtatatagtatatagacaatacatatgggcagtttgtttatttaccagttgagcaacatttcttagctattatgaatagagccgctgtgaacatttgaatacaaaccttagcgtgggcagaaggtttcattttcttggacaaatatctaggaggtggaattgctggatcatatggtaaatgtatgtttaactttataaggaactgtaaaactgtttacctgtctgttccattttgtgttctcaccagcagtatagccaaatttcagttttgtaacctcaccaacacttggtattaatattctcctatgttttagccattctggtagatatgtagtggtatcccattgtgattttaatttgaaatgtcattcagcttctttggtgaagtgtctgttcaaatcttttgcctccttttcctttcctttttcttttctcctcccccttctgttttgaaaatcaggttgcttttctgttactgaattcttagaaaaaactgagttcttaggaaaaaaactcatttttttaaatgttctcgatatccatcttttattagatatggtttgcagatattttctcccaggctttgttggtacaattctaattgatcagctgagtctctgtagtaatgctccatttcttggtcatatgtatattttgaggaataacaagtgttttaaagctcaaaataacagttatgctaacatatactataagctgcattc

SEQ ID NO: 27412 - DNA, 1058 bp, Homo sapiens
cggtggctcacacctgtaatcccggcactttgggaggccgaggtgggcaaatgacctgaggttgggagtttgagaccaacctgaccaacatggagaaaccccatctctactaaaaatacaaaattagtcgggcatggaggcacatgcctgtaatctcagctactcgggaggctgaggcaggagaattgcttgaatccgggaggcagaggttgctgtgagctgagatcgtgccattgcactccagcctgggcaacaagagcaaaactccgtctcagaaaaaaaaaaaaaaaaaaggtgggggggtttgaaacacatgggcaattagaaatactggtgtcagagtttaacaagtgaatgactctcaatgactgattaacaaacgacctattagttggtttctaagtgtgttttcatcagaattgaggtggaagttaatcaaattgctctctgagagatcatgaaaacataatttttgatggtagttcactgagactcttatcatgtaattaagattatactgaaagaattgaatgacatcgctttcacataactccttccatgtatttaatctacttatgtcagcacattttaatcttacaaaaaatgagtgcatgtcagtggtgggagaaggacaaaacatcttgctcattgtagcgaacagattcactgacagtgaaaagtgtatttttatgtatatattacccaaatttgtaatatgtttatgttttgaacaattacatcctaataatgatcatagtaactcagaataagatgtttttcaatacttagaccttatgatcagatggaatttaattatttcagtttatatatcttttttcagatataggataataaaatacattcaagcataaaatggcatttcctcatgattaaattctggggaagaagaacggaaattttatatttcaggagaaaggaagagttgtagaatttctgacttggagatgatctaggttcttttcaatatgtaagagtgatataacaccttattaaaatgctaatgctcataatatcttggaagtgactacttcgtaact

SEQ ID NO: 27413 - DNA, 1058 bp, Homo sapiens
atactttattgtggcctggtgggtagctccatcccagcacttggggaagctaaggcaggtggatccctttagctccatgagaccagcgtgggcaacatggcaagattccatctctaccaaaacgatgtaagaattaaccaggcgtggtggtggtgtgtgccggtaatcccagccatttgggaggctgaggtgggaggatcacttgaacctgggaggcagaagctgcagtgagccaatattgtgccaccacactccagcttcggtgacagagccagactctgtctcaaaaaaaaaaaaattattgctaaaaaatgctgattgatcatcttaacatttagtaagctgtaaatcttgctgggtgaaggtcttgcctcagtattgatggatgctgactgatcagggtggtggttaatgaaggctggggtggctgggacaaattaaaacagttttttttttttttgaggcagagttttgctctgttgcccaggctggagtgcagggtgtgatcacagctaactataacctctgccttccgggttcaagcagttcttctgccacagcctctcatgctgaggcaggaggatcacttgagcccaggagttcaagaccaggatcacttgagcccacgagtttgagaccaagctgggcaacatagcaagaccccatctctataaaatattacaaaaattagctgggcatggtggcatgcgcctgtagtcccagctactcgggaggctgaggtgggaggactgcttgggcctgggaggcagatgttgcagtgagccaagattgtgcctctgcactccagcctgggcaacagagccagaccctatctccccaccccataccgtcccccaataaaaaataaataattttgtttttttaaaggctggatgcggtggctcatgcctgtaatcccagcacttggggaggctgaggtgggtgaatcacctgaggtcaggaatttgagaccagcctggctaacatggtgaaaccctgcctgtctctattaaaaatacaaaaatgagccagacatggtggaggcgcctgtaatccca

SEQ ID NO: 27414 - DNA, 1041 bp, Homo sapiens
tggacataattgcagaaattgtacaattaatgcctccccctttggctgagataaatggttttggatttgtcttgctttcacatgtaaatagtgttgaacagttaacaaccccatgaaaaaggcagggtagtttttctctattctttccttatactctcatgggactctggtctttttaattcttccttttatccatggtgtctagcacaatgtggcacatggatgcttagcagatgcttactgaatgaacatagctttcattttaggaactttaggtctgtttatacctgcttcccttttcctaattaattgatggcagcaactgtgatttgcttatttccaagtgccagtgcagtgcctgattctaatagatacacagcaagcatttaattgaaatcgaattaaaatctaacacaagatcatttcaagaagcaggactttacaaaatctaggttttcagaagccaaggcgtctgttttcactgcgttattatgaattttcaggctgattccgtatagaactaaatgtttaatttattaaatatgtagaatacattataagtcagcttgattctttctagtatatatcacaagatatgtggtaatacctgtctttattttactagacatgcatatgctgtaatttgaaataattccttgtcccccactcccttatcaagaagattatagcatttaaaaaagattgttataaatgtcttaccaatgttctcctgggaagcaaatacatttttacttaattgaacatacaataatggactaagtaatgggaaaaaaaaattcttaaactgagttaagtttatatagctcaaaaaaagtggtaccattttatataactttattattattattttttaagacagagtcttgctctgttgcccaggctggagtgcagtggcgcgatctcagctcactgcaacctctgcctacggggttcaagcgattctcctgcctcggcctcccgagtagctggaactacaggcgcccaccaccacacccagctactttttgtatttttagtaga

SEQ ID NO: 27415 - DNA, 1058 bp, Homo sapiens
gcctcccaagtagctgggactacaggcgcctgccaccacgcccagctaatttttgtatttttagtagagacagggtttcaccatattggccaggctggtctcgatctcctgaccttgtgattcacccgcctcggcctcccaaagtggtgggattacaggcgtgagccactgcacctggctctttaattattcaatttattattattattgtttttaagagacagagtctcactcggtcacccagtctggagtgcattggcgtgatcataactcactgcagcctcaaactcctcaaacaagcagtcttcctgttttattcctaagtagttaatgctataggtgtgcaccatgatgcctggcttatttttaaaaaaattttgtagagacagggtgttactgtgttgcacagattggtctcaaactcaagtgcctcaaactcaaactgcctgagcctcccaaagcactgggattacttgagctactctttttaaatatgaaaattggaaaatcaaaaccgaacatacctttaagtttaaaactcttttatttgaggataattttaaacttaaagcaaggttgcaagaaaatagtacaaagagtttttacgtttatctcccccccgggtcaggattcacctagtgtcaactcccttcctcatccttgctctgcctgtccccattcccaggtttattcactcactcattatatatgcaatttttcttaaccatctgaggataatttgcatatgtaatagcctgttaccccaaatattatactaagaatattggtctcttaaataaccgtcgttcatttatcaacttaagtgtattaatattgacaacatacttttatgtctattgtccatattctaattttgtcagttgatccaataatattctttatagcattttcttaccctctagcacaggattcagtctaggatcaaatattgcatttagttgtcattttcttatagcttcctttaaaatctggactgtttacagactttctttgtcttttgtgacattgacacgtttgaaaatacaatacccctgaga

SEQ ID NO: 27416 - DNA, 1123 bp, Homo sapiens
ctgggcgacaaaacaagactctgtctcaaaaaaaaaaaaaaaaaaaaaggctgaaacgagccagtgtataaggagcagctatgtggtattttagagattaccatgtatagattgttgttaattgtgataagaggaactgtaaatgacggctcaaagttgaaatgcttggatgatagagagcatttacaggaaacagcttctgtgatatgattccaccagctgtagcatattaggggagaggatcagggctgcagggactgtatagtgtagatgttagctaggagtgtattctttgggaccctagacttctgtgttcaaacctcctgccttccacttgctacgtttgtgatcttggacaagttacttccttataggattattgtaaagattaagttaattgacatgtgcaaaaaacttggcatgtagtaggtgctcagtaaatgcttgctattacttttttattattattattttaagctgtgacaaaccacagcagctgtaattactctggtttgatgttcttaaccttagttcctcgttcaggaatgacttactgctctatttggtttgtagatgcagtaaataagaatgtaattacgtgattgaaaggctgtgttggagtattaacttcctaaactcaatgaagacaggggttgtcctttgtaaaaattgtgataatcatgatggagcagatttggagtaatctcaatgattcgtccgcactatacaccaaaagcataaatagggactgcccaagtaggggatagtgcccttccaacctttatctggagaaatcaagacagcctgtgagagtattcatcgccccaaggatactgttgctctttaccttgttatgaaactttgatatatattaataatcttcaacctttcagccctctgttggagaatataattacattcttaaacctcccttttataattgtcttatttaagactcatcttctcccatcatgtatctttaagttatgtttctgctcttaaactatatgaagtttggaggcttaataggataatctatttaaaattcgatatggaaaaatttatctatggctgggcactgtggttcatgcctgtaattccagcgctttaggaggccaaggtg

SEQ ID NO: 27417 - DNA, 1041 bp, Homo sapiens
aggcggagacaggtgaaaaggggacgctagtacaatctaagtttgggattttgccagaagttaagactaaaggtcagagagagtccaggctattgattgcgtgtcatctgataatagtcctgctgatgggatctaccctggaaaatgaggaaaaaggaaagccgagaggttggccatctcaaggtttgacaggacaaagacaggttctactgggagcaattgagagggtcagctggaaggagagaagaggaaggagctggaagttccccagttccatatagggacaagagtcagtgtgaccagcctcaccaggctggcttggagtggaggaggatgtggtaggtgactgggagctaaaggaatttaggggcagcgttggtttctgtgggggaagcctgcgacagatagaagtctgaggagtgtggaagggttactgtgggatctgggggcattggccactgatgggattgttgggcagtgctgggtttgaggttggtgatggtgattgttggacttgccttgggagtggaagagagaatgcgagccagtgtcagaggtgctggtgaatggaggtgtgtgacccgagcggtaacatccagaaaggatttcccgcaaagacagcgcggcttttcagctgcagctgccccaccctgctccagtctccctcatttccagcctggaaattgttgctaattgccccattggcagttgggaaggcaacgcctgttaagatgtggagcaataaagtggagcaggtatgctgtgccgtatgcccctcttcctgcaccgtcctccttctgtcatcgttgagtggctcaggagtgctggccctctaacagactgcctgggcgtggatcctgactgcagagtagcacttctggctgtgacgtgggcagatggcttaacctccctgtgctcagattcctcacctgtaaaacagttaatggatgattagagtgttcctgcctccctgggttgtggtgaggactgaatgagcacctgccactaggaggcaatcagtgagtcagctatcatcattat

SEQ ID NO: 27418 - DNA, 1045 bp, Homo sapiens
tctgtgtaattctttattttaattcccttttttcacatggctgccaagaagctcaggtttacattttttctctgtgactaaggttttctgtcataactggctcttctctaattcctttattaatggtactttaaaaaaatctgtacctttcatgtttagctgcttctaatctttttcaaaagtgaatgggggtgggtagggctgctgcattgcacagttctggaggcaccattgatctggagagaattgtatattgctgtggccctggcagtggggctgtggataacaaacactcgtaaggcttaagcatcactttggccaaggcttttccaggattatgtcagtcatgggctggtggcacaggaaaaggggaaaaagcaacagctgggaggttcacagataacttctttttggtgtcaggcagccctttagggtaagtacagtactaatttggctatgactttgtacttgtgttttaagaagcagcggaaaagcatggtctgacagaacctgagagagttctaggtgaactggagtgccaggaatgtgctattcccccaggagttgatgaaaactcacagaccaacgggatagccgatgacaggcagtccttgtcgtcagcagataatctggtatgttggtgatcatcctctgtggacttattgccatttttactttttcaaaagatgcagaattaagtctttcctcaaaagaagcaactaaaataagcaagccctgttcctttattagtcacacagtcctgggctgatattctttgtattagcaggttcagttcttagaacgtgctaatgttgcttggtatataacatcattattaaaccctgtttactcagacttctaatacttaaatttcttgccacttttcttctctctcaaaatagtatacattcattatagaaaaataaaatatatagttacccgtctttccttctctgtattgaaaagtcagtatgactgtattgaaagccatccataacccatagattgcccttgttaacatcttacttaaatccatctagatttt

SEQ ID NO: 27419 - DNA, 1093 bp, Homo sapiens
aaaaaacgcctacccatgctcatgcctgtaatcccagcactttgggaggcaggtggatcacaaggtcaggaaatcgagaccatcctggccaacatggtgaaaccatgtctctactaaaatacaaaaaaaaagaaattaactgggcatggtgacgcatgccagtaatcccagctactcgggaggctgaggcaggggaatatcttgaacccaggaggcagaggttgtagtgggccgagatcgcgccattgcactccagcctagcaacagaacgagactccgtctaaaaaaaaaaaaaaaaaagcctacccatgaatgagagttggctgagttgacagtttccttttttttttttctcccctcaaaacttttccattatttctctttactcaaaacttgacctaaaaatccaggagagatatttcccataaagaagcttcgtacttattagcaatcactctccgttttcttttctttccttcccccattccttagtcactgtaaccactgatctacagatttgcctgttctggacattgttccattgtccatctttccctttttattattttaatattcattatattctatttattaaccacgtagtttccttatactaacatctttccctttaattctatcctttttcaactcatgtatgttgcctctattgttaagtgcatataatgtcgtgtcttttgtgttcccatcttcttccactgttactgccttctgccttctttgtgttaaatagatattttctagtatatcattttacttctggtcatttcttgtactatatcttatgtattgattgattgattgattgattgattgagacagtctcgctctatcacccagtctggagtgcagtgatgtgatcttggctcactgcaacctctgcctcccaggttcaagtgattctgctgcctcagccgcccaagtagctgggactacaggcatgcaccaccatgcctggctaatttttgtatttttagtagagacagggtttcaccgtattggacaggctggtctcgaactcttgacctcaagtgatccacctgccttggcctctcaaagtgctgggattgcaggc

SEQ ID NO: 27420 - DNA, 1059 bp, Homo sapiens
caggtttggggcctgcgtattactaagccttttgatacgtaccactaagctgacctgcagatatctctgtagccatttacacttctgtcagcaatgcatgagagttcctatttctccatattcattccaggtcttctcattttaatttgttttagtcattgctaatttgataagccaactgtatcacattgaaaaagtgtttcaaactgctagtgaggtggcatattttctctcataggattgatcattcttaagaattgccttttatgaattcttttatgaattactcttagctcatctactggattattcatctttctcctattgatttatgcatttttaaatatataaataatgtagcatatgcatacatgagttgcagatgatttgcccactttattatttccttttcattttggaaaatttagcttttaagtaaccaaatctatgcgttttttatttatttttttattccacttctggcttccacttttggcatcattaccataattttataaagatccctctgtatatcctctgtacatatgaatgtattaacatttttaagacgtattcttgatacatatcaccaaattgctttctacaacagttttgccaggagtgtacaagaatgcccatctcactgcagggagaatagcttttaagtgtcatctttttgttttcccagaaatctgagtggatgacaacaacctgcaatcacgcactttatgctatttgtgatgtttttacccagttttatgaagctttgaatgaagttcttctttctgatgtatttgcacaattgcagtggtgtgtcaaacaaggtactctttaagcctctaggcatcatttttcttacatagtctttaatgagaggttagttttttcaatatttaaaagcatggatgtagtgccatggagtacaatatataatttagttggtgaaatgtatacgttttaattacagtataaaaaacagtgccccccccaagtcagttcataaagcatttcttaaagatgggatatagttatttttgtattctacaagatgtaccttca

SEQ ID NO: 27421 - DNA, 1050 bp, Homo sapiens
cgggagaatcacttgaacccgggaggcagaggttgcagtgagctgagatcatgccactgcactccagccagggtgacaaagcgagactccgtctcaaaaaaaaaaaaaaaaaaaaaatgttaactagtcaaaggttgttaaccactaagaggaataaaagaccactcttaagggatacagaagtagaaaatgcagaaagcaacaaaactgagcttcttggccaggcaagcaatggctcacacctgtaatcctagcactttgggaggccgaggcaggcagatcgcttgatattgtggcacaggagttcaagaccagcctgggcaacatgaggaaatcccatctctatttaaaaaacaacaacaacaacaacaaaaaaaaaaaacccacaagcttctggcctcttcagaggggctggctactgcaggaacctgaaacgtcctctggttagggcacagtccagtggtggtctttaggagtagcccactgggtggcagagaaacttgctggaggacacagaacctgcatagctgattccctcactttcttcaggtctttgctcaaatgtcacatttttatagagacttttcccaactagtttgcttaaacgtgcagtcctaccctgacactttctatccctgtctctacctatcatcaatatttaatatataatattcttaaaatatttcatttattgtctgtcaacaccatgggagcagagatttttttttgtccagtttattcattgctgtgccacaacatcaagaattgtgccttgactgggtgtggtggctcatgctgtaatcccagcactttgggaggctgaagtgggagcatcacttgaaaccaggagttcaggaccagcctggagaacgtagtgagaccccatctcttaaaaaaataaatcatgccttgcacatagtaggagctcagtggatatttcttcagtattggctgaatcattattagggttaatctttatcatctaacatagatcagaaactgtttgccagcctcctcatcaagtgtgtggtccagttggaattgatacag

SEQ ID NO: 27422 - DNA, 1028 bp, Homo sapiens
tttttttcatagaggaagtcatgttttaaatactagcaaaagtaatgtaaattttattactgctggaaaaaatacagctgtgagccagaggctgtccttttgattttaaaattttaggcagcttgttcagtaaagtttcctagggtttcatacatgtttcaagaatgcattcctgggctaggtgcagtggctcacgcctgtaatcccagcactttgggaggccgaggcaggcggatcacgaggtcgagtctgagatcattctgaccaacatggtgaaaccccgtctttactaaaaatacaaaaatgagctgggcatggtggcgagcacctgtaatcccagctagtcaggaggctgaggcaggagaatcacttgaacccgggaggcggaggttgcagtgagccaagattgcgccactgcactccagcctgggcgacagaaactcttgtctcaaaataataataataataataattcattcctgtaatgaaataattggagacacacacactcctgcttatgcagtggaggcagcactgatgaaactgaaactttggccagccaagcctgccatcatggaacggctcagtgtgttccttcaccagccagtgagcagagtctaaatggaaatgtttcagggtgttggggaataagtgtgtcttatagacagggatgacttttggagagtcatgactgccgttgtctgcaatcacaatgcccagagcattccatcttcttcattagctcttctatcctctgtcctgtcctctagcaagacacgctggatgcagatatccacatagagacggaggatcagggcatgtataagtacatgtcttcccagcacctcttcaagctgttggactgtttgcaggaatcccattcattctcaaaggccttcaactccaattacgagcagcggactgtcctgtggcgagcaggtaaggccacacagcagataagatagatggccacactggtcaccttcctaaaacattaaagtgcttggaaaatgcccaaaattttaaac

SEQ ID NO: 27423 - DNA, 1143 bp, Homo sapiens
aaatctaaaaattcactttcttgaagtacttttgaataaacaaatttaattgtggcagttaagttggtcatttgttcatctgacattcatgcaactgagttcccacattatgttggggctgctaatgattgatctgaagggatagtctccagtcttgactggaaactcatgttttgctgggtgactgacatgttgtgacttatcctttagttcatacaacaaatgcttactaaatatgtactgtgtgccaggtaatgctgaaggtcctgagcatacagacgaaagtccctgccctcaggagcttgcagtctagtgtgtgtatgagacgacaaagaagtttatttcaaatgagggtaattgctaacacagtaaaacaaggatgatgtagatggtaatcgtagaaggcctttttgaagagttgacagtgggctgagtgctgaatggtgtccattatcaaattagaggatgagcattattatggtcagggagaactcttgtggccagtttgtagaacagaaggcttttgtgcctggaatgtagcaagagccaggaggaggtaggagatgaggtcagtagataccagattgcttagaccctgctgtggtaagggatttggtggtggtggtggtggtggtggttgttttggagatagggtctcactcccattgcccagtctgtagtgcagtggcctgatcacaactcacagcagtctcaatttgctggatctacaggtgtgtgccaccacacctggctaattttttgtatatttagtagagacagggtcttgctgtgttagcccaggctggtctgaagccggctgaagcaatccacctgccttggcctcccaaaatgctgggctaacaggcggcagccactgcacctggccaggagtttgggtgtttaagacaagtaattatgaggaatctaaggagttttagttgagaaatatacaaatgctagagaaacataatgaagaaagtgaaatgcagatttattaagaagtgtatttttaaaaatcaagaaaataagccctgtgtggtggcatatgcctgtagtcccagctattccagaggctgaggcaggaggattgtttgagctcaggagttagaatccaatctggacaatacagtgagaccccctgtc

SEQ ID NO: 27424 - DNA, 1086 bp, Homo sapiens
taaatctcttgaactgtgtatttcttagcctatgttgttagtagttaaatcgacgtaggccatttagttagcttaaaatttgtgggctgggcacggtggctcacgcctgtaatcctagcacactgggaggccaaggcaggaggatcacttgagtccaggagtttgagaccagcttgggcaacattgtgagaccctgtctctacaaaattttttttttaatttgtcatctgttagatgtgaagttttttggtcagttataagcatattatgtgatttagttttgtttaagctttaaatatgaaaacttctagaatcataatcttagctgtcatcttctgaactctagaatttatctccctagatgcaaattcttagcactttgtagtatttgcgattacatgttgtacatgaaggaatttcttgtttctttaatctcagaactttatgtgggatatttatttgctgtttaaaattttaatttctcgttgtggggccttttttttttttttttttaagacaggtcttgctccatcacccaagttggagtgcagtggcaccatctcagctcactgcaacctctgcccccaggctcaagacatcttcccacctcagccttccgagtagctgggactgaaggcacccactaccatgcctggctaattttttgggttggttggttggtttgttttgagacggagttttgctcttatcgcccaggctgcagtgctatggtgcgatctcagctcactgaaacctttgcctcccgggttcaagcgattctcctgcctcagcctcccaagtagctgagattacaggctcctgccaccatgtccagctaatttttgtatttttagtagagacgggattttaccatgttgaccaggctggtctcaaattcttgacctcaggtgatccgcctgcctcagcctcccaaagtgctgggattacaggcatgagccaccatgcccggcttcaatttttttgtagttttggtagagatggggtctcaccctgttgacaggctggtctcttaactcctgagctcaagcagtccacccacctcagcctcccaaagtgtcgggattt

SEQ ID NO: 27425 - DNA, 1045 bp, Homo sapiens
accaaaccttcctctatttgttttcttagaaaattagtaaataaaaaaacagttatgttttacctaaaatcatgtggacatgaatgtggattttgtgttacttcctcagttactgctttgcttttaggttgaagatgaaccaaacaaaatttgtgaagccgatcgagtggccattaaagccaacatagtgcacttgatgcttagcagcccagagcaaattcagaagcaggtaatgtcgctccactttttagatgggctcctctgtaaagctctgatctaattaatcttttcctctcctagttaagtgatgcaattagcattattggcagagaagattttccacagaaatggcctgacttgctgacagaaatggtgaatcgctttcagagtggagatttccatgttattaatggagtcctccgtacagcacattcattatttaaaaggtattgatgcatagattcatgtttttaaaatactttctaaagttttatttgcttgtgtaaacagttgtgtttttgtgactgttgtcattcctttgaatctgatcatcttggaatgagagcagaagtttctgtattgcgtttgtttcttctcaactaggatgtttatttcatattgctctattacctgtgaaatacttagtcttgataaactgcttgatccctttaaaaagaaaactggctgggcatgatggctcacacctataatcctagcactttaggagggcaaagtgggcggatcacctgaggtcaggagtttgagaccagcctggccaacatggtaaaaccccgtctctactaaaaatacaaaaaaaactagccaggcatggtggtatgtgcctgtcatcccagctactcaggaggctgagacaggagaatcacttgagcctgggaggtggaggctgcagtgagccgagatcaaaccactgcactccagcctgggcgacagagcgagactccgtctcaaaaaaaaaaaaaaaaaaaaaaaaagaattccctttgaatttcggaatttcggaaacccatctattcatagatgtcca

SEQ ID NO: 27426 - DNA, 1060 bp, Homo sapiens
gcctggacgacagagcaagactccgtctcaaaaaaataaataagtaaaatatgaatagtctcagcttagtgcaaggctgtttcactaagatcagcatgctgggtttatgatgcactaaaaccatgttgctaaattcctttccaaggccactattgaactctgcagtacccatgcaaatgatgcctctgccctgaggattctgttttcttccctgatcctgatctcaaaattgttctatagtttaaactttcaggtaagttcatttgatttcttgcttttggttcttactctttgattttaaatagagttttctttctgtttgataaagacttctttgccagcattgatttttctgaaagaaaaggttttttctgactctatttatctatagtgttctgttctacagtagttctttcagatgctaatgagatgtttcatggaaaaaagcagtattctcttatatctagtaggttagcaaaaccccacatcctaactcactcttggagagtcaccctgtacactgttttactggtggcattaagaagctagatttctgaggccttcctctttcgttcatttatatgggtattaacatttggggaatcatgttttggttaggggttgctgtccagcttatacaaaatgacttttattggaagccatatgagggagacaaaagacttgaagtaccagactttgaaaggggtaggaactagtagtatttcagaggaaacatagccacagggctatagcagggaatgcctagttaccctgttgctactgagatagtggcctccaatcattctttctgttcttaatcattaattcaagattcaggaccaagaaaggggtgttaattggtacaaactgttgctatactgcgatgcaaggagggcctagcccattcattgtttgtagccagtacctggacttaccttcacaacatgaataaactcatagtggtagggaaagcattccccaaaaggaaattgggttgttttagctagaataggagatgaacagcccaaaaggacatgtcccacatcagtgttcagctgga

SEQ ID NO: 27427 - DNA, 1024 bp, Homo sapiens
gtgtataaaatgttttgtccacgtggtaagggaacttataaaagtggtgttcttaatattttaatcaaaagtttcaagtcagtgtttattctgtaggatctccctgaattttttgaagataatatggaaacttggatgaataattttcatactctcttaacattggataataagcttttacaaactgatgtaagtatttaaaatgttgcctgagtggtctttttctttcattaagagttatttggctacagtctggaaacctatttactcttgcattgttaaaagataaaatttcaatactgtaataatatttgattctatttgatgttacatgtttggtgtgtgtagtatacagaattactcttatcatgggcttggcttaagccatagtgtacatataaggctgtttcattacattattgaaagtaggtctttaaagtagtgacattatggatatttcatgaaataaaattatttttcattgaagatactaagaaaacttaaaactctataatggtagcccctttttaaaaatcatctggctaggcatggtggttcacacctgtaatcccagcactttgggcggccaaggtggggaggatcccttgagcccaggagttcaagaccagccttggcaatgtaaggagacccccatcactacaaaaaataaaaataaaattagccagatgtgttggctcatgctaatggtcacagctactcagaaggcttagttgtgaggatcccttgaccttgagcccaggagggcaaggctgcaatgagctgtgaccatgccactgcactccagcctgggagacagagggagacctcgtctcagaaaaagaaaaaattatccacagctcgagaaagagagaaaatggtaaaagattgtaatttgtaaatatttctgatatgggttttatattgtgtacttttaaacatataacacttattctgtgctactcatttgttaatatatttatgaccttctttccgaagagacaaaagacaaaatattaaaaatatt

SEQ ID NO: 27428 - DNA, 1030 bp, Homo sapiens
actatcgttgtacaacagattttgtctcagagtttgactatattaataggaactttaaaagatgtagctctcataaaataattatttcagtccaatgggagggaaaaacactccttcagaaaacaaaacttttcttcacacaaaagtcacaaggaaattttttggatagaattcttacaaggacctttttgcccagttaaccatgtgctaccttgtgctactatttatgccttaagtaatcagtgtgagggagttttggttttggctttggtttttgttcttactctgatgtcttcccttgtctcactctgtcaccaaggctggagtgcagtggcatgatcatgacttactgcagcttcgacctccctgggctcaagtgatcctcccacctcagcctcccaagtagcagggactatgggtatgcaccaccatgcccagctgattttttttattttgggggcttgctgtgttgcccaggctagactcaaaactcctgggcttggcccgtcgcagtggcccacgcctataatcccagcactttgggaggccgaggccatcctggctaacacggtgaaaccccgtctctactaaaaaaaaaaaatacaaaaattagccgggcgtgatggcgggtgcctgtagtcccagctacttgggaggctgaggcaggagaatgacgtgaacccaggaggcggagcttgcagtgagctgagatcgcgccactgcactccagcctgggcaacagagggagactgcgtctcaaaaaaaaaaaaaaaaaaccactcctggcctcaggccatcctccagcctcagcctcccagagggttgggattaccggcgtgagccactacactcagccagaatatactgtttgaatctaatacggaaatattttgtaattcagcaacttatttgaaagacttggtgaaaagattggtggtggcatagctgtagtttacaataactgatttgatttggatttaattgataaagagtctagttcaggaatttcagttactcctcttacttatgt

SEQ ID NO: 27429 - DNA, 1517 bp, Homo sapiens
gcctcccaaagtgctaggttacacgcgtgagccaccatgccggccatttctgacattgtccactctacttatttgttgttgaaatgactttaatgaaataatagtgattaaaattaggttgttggtattttaatgttcttatttggtgaaattaaaagttagcattctgatactgatccctaacatttttgacagttgcaggtataatccaattctggggaaactgtcacattagaacaagtgagcctatctcatagttgtgtgaattacctaatacctcacctttcagggtagcatttgctgctctagataatgattaagagtatatgaagtagtcatctgatgggaacgaattctttgctgtagaacaaggcagttttacatactcttctgcattctcagctgtaaagtacagtgacgtcttttggagtgttatctgaaatatcatctctccttgtagctgctgatgaagaagcatttgaagataattctgaggagtacataaggagagatttggaaggatctggtgtgtatcttggttttttagttactagtctcttagcaagccagttttaaggtggttctctttctagtaaatgggagaagtgggattgagaataagagtgttttttcagcgggctttcattgagaactgttgtctttcttcaacttgtcttaaaaagctcttatatgacctgaatgaaaatatcaaaagttgaatcatttgtctgttcttacatagtatttatcaaaattctgtgattctgtgacctctttagtttcattttgattttgtatttcttgggggcgggaatgtttttttcattgtttgtgttgctgatagctattgggtggccctttgtttttcgttcttttttttccgttttacaatcgtagccaaattattccaggcaatttgttttcttataaattggatcagcttgttggtggttgttttttttccccataatatattttcttttcatttcatagatattgatactagacgcagggctgcttgtgatctggtacgaggattatgcaagttttttgagggacctgtgacaggaatcttctctggttatgttaattccatgctgcaggaatacgcaaaaaatccatctgtcaactggaaacacaaagatgcagccatctacctagtgacatctttggcatcaaaagcccaaacacagaaggtaaatatttttaatgtggttttgtttctaaaacagacatcagtgacacccacacaagtcaaaaagaaataacgtctctgataatagagcttactctgccagataacctattctgattaagatttatataatctctgaagatggctttatgttgatgtattgagcacttaagtttcttatagaccagaaaattgatagatggccacacttgttaccttagctgagacccgctgtatcaaatatgcttaacttaaacttagctgttctttaattgaggaaagtttctttattgtctattagtatagtcttattttacatttt

SEQ ID NO: 27430 - DNA, 1026 bp, Homo sapiens
tagaggtttttaatgaagattgttctcgtatttgttgctttttgggggtgggaagagaacaaaaaatgagacacaaaaaggttaaataactttttcaagaaatatctgctagtgatgattcttaagtttggtgaaatcttagtctccttctctgtgatattattattttatggtatgttgatttatctgcaagatgttatcctcatagttttgtgctctgaaaaggagaatttagaaagtggaaattgaaccattatgtgcaagtgaaagttttggtttctgggcagcagcatctcctattataacagagcttaaaaatagcaaattgttctttaaatcaacaggtccttctcttccaattgtcttttactcaaatatggaatcattgcatttagagcatgtatattattgtgttttttaggtgccaaaagaacatcttttagtctcgattcctctcttgattaatcatcttcaagctgaaagtattgttgttcatacttacgcagctcatgctcttgaacggctctttactatgcgagggcctaacaatgccactctgtgagtattttattctaaagttttttagcctggggtaggggctgtactgtgctggtcaaagatatctgaatgttttcataatttcactagtgggaaaacaaatgtctgctttctattcctttatactctgtttcattctaaaagcatttgaggctgcttactaaaataggtgcattatgacaatacaatttaataaactggagccaaggaaagtaactgagataaagttaataaacagaaatgtgtgtcaaaggatcctatatagtagtccaagaaactccaaattttatttggagtctcttagcagccagggcaaagagggaaacttgggaagttaaaattttcacagggtctatgagataaaagttaaagcagagaatactgtacaatagtagtagtagtgttctcagcaacaatcatgtaacagttattttcatgtggctatttgcgtaaggtcacttatttctg

SEQ ID NO: 27431 - DNA, 1035 bp, Homo sapiens
aggctggagtgcaatggcacaatctcagctcactgcagcctcactctcctgggttcaagcgattcgcctgcctcagcctcccgagtagctaggattacaggcgtgtgctaccatgcccagctaattttgtatttttagtagagacagggtttctgcatgttggtcaggctggtcttgaactcccgacctcaggtgatccacccgcctcagcctcccaaagtgctgggattacaggtgtgagccactgcgcccagccttaatgtccatttctatgagagcggctaactagtctgtaatcttcattactgtgtttttagggtatgtaagaatacacagtatgtaataccttctctgtacggttgtatgagtgaatgaaataattctgcgccagcctagtggaggagcaccaatttatcctctagcccttttaacccaggtcagggaaggattttctctaggaagtgatctctaagctgagatatgacctaaccgaacgttaggtgtgagggataggtagcaatctgttgaagggtggatgagtctttgactccagtagaggaggaaacatgatgtgcagagttcaggaggcaagagcagatagctttctgtcctttatgcttggcatgtatttggggctctgcttagtaaacatttattttagaaatgttatttgtggaaagagagcttttatacatttttagctgacaaatttatttttctcccatgcttcctatttttaacccatttatggtcttttgagcaatatttttgcaatttggactctgtggctttacatgtatttttagaatttttttaggctcctaatctctttttttgagggaggtggataggcagttttctcttcagtttcctgtagtttgtgatcatgtttcctttaggctagggctaaacattttctgatgctggtttctttttctttttcttttttttttttttttttgagagagagagggagtctcgctctgtctcccaggctggagtgcagtggcatgatcttggctcactgcaacctcc

SEQ ID NO: 27432 - DNA, 1874 bp, Homo sapiens
gctcacgcctgtaatcctagcactttgggaggctgaggcaggtggatcacctgaggtcaggagttcgagatcagcctggccaacacaatgaaaccccatctctactaaaaatacaaaaatttgccgggcgtggtggtgggcacctgtaatcccacctactcagggggctgaggcaggcaaattgcttgaacccaggaggtggaggttgtagtgagctgagatcacaccgttccactccagcctgggcaacaagagcgaaactccgtctcaaaaaaaaaaagaaaagaaaaagattatggcatttggctacagggtagaggtgtgatggggtttttttatgttttgactttcagtctcttcagatgatcaaaaacagcagtcttgttatttagtaatttatcatattcataagaagtaactaacatctaagcattttactatttcattatagtgataatctaatattaagttgatttattttgctttaatagaatgtttggaatggttttggaaaaaattattattcctgaaattcagaaggtatctggaaatgtagagaaaaagatctgtgcggttggcataaccaaattactaacagaatgtcccccaatgatggacactgagtataccaaactgtggtaagtacttcattttaatatttttgtaagttacagcttccttcccatatgactgcaaaattaacaaagcttattctcttgggggccaagagaatcttggtctgatctcagcttctccacaatcagatccaagacatgatttctggatccttctgggcttagaatgatcttgtttcctgcttctttttcagggggattcatggacccctttaagagtctgatctaggtgatctctaagacaattttatgacagaagcccaactaaactgacttatctttaaggggaagaactgaataagccaagaaaagaaccatcttaatttcaaaggtccccttttattcttgagactatgagtctgtaattttgtgtctctgagcaattgctggttttaagtcttccgagtattttcttgacctttttatctcttgctttcttccaatccaggactccattattacagtctttgattggtctttttgagttacccgaagatgataccattcctgatgaggaacattttattgacatagaagatacaccaggatatcagactgccttctcacagttggcatttgctgggaaaaaagagcatgatcctgtaggtcaaatggtgaataaccccaaaattcacctggcacagtcacttcacaagttgtctaccgcctgtccaggaagggtaagtgtgttgtcaaagaactctgtgataaatggagactttaatgggagggcaaaaggatagtagtagttctggtgtctgttttcattggtgggcgtaataaaactaaatctcattgagttacagcaagcttattttctttaattaaaaacactgagccctttttttcttgtattatgtactacaaatatattttaagtgaatggatttaggagtgagaacaaaggaggaaaaatcccttcaatagaaatgtaataaggctgtatagttgcattttgtcagcactttataataagagtttatttcccagatcgaagtaatccatctattattaaaatgtggtagcatttttttatttttatttttatttatttatttttttagacagggtctcactcttatccaggctggaatgcagtagtacgattatggctcactgcagcctcaacctcccaggttcaagtgatcctactgcctgtcagccttccaagtagctaggacccactatgcccagctaattttttatttttttgtggagacagggtctccctatgttgtt

SEQ ID NO: 27433 - DNA, 1072 bp, Homo sapiens
tggagaatttttggatggtgattaatgacttgactggctgctcttcccagagctgtggcagctctcccgtagaagatggggtttgtattggcgcaccaagatctccaacagccagtgtgtgtttcccatctcttgtaggttccatcaatggtgagcaccagcctgaatgcagaagcgctccagtatctccaagggtaccttcaggcagccagtgtgacactgctttaaactgcatttttctaatgggctaaacccagatggtttcctaggaaatcacaggcttctgagcacagctgcattaaaacaaaggaagttctccttttgaacttgtcacgaattccatcttgtaaaggatattaaatgttgctttaacctgaaccttgagcaaattagttggtttgtgtgatcatacagttatgtgggtggcttctagtttgcaacttcaagggacaagtattaatagttcagtgtatggcgttggtttgtgttgagcgtttgcacggtttggataatcttaaattttgacggacactgtggagactttctgttactaaatccttttgttttgaagctgttgctatttgtatttctcttgtcctttatattttttgtctgtttatttacgcttttattggaaatgtgaataagtaaagaattacttgtgttacttgccaagcagtgcacatttcatagtttcaaatctgtaatcagcaataaaaatcctaaaatatgtacctaagaacatcttaagggcaggttttcagtgctctctcatgcttttataaaaatgaagaatttctttaaatttcttccttttcctttcctggactctgtaaaatcctaatttctaaatcatgtaaactcagattatttagtctttttttttatatgggggaaggggacattaatatagatttggggcttatttactagaattttctgtagcagttcctaggtggcagtgtgagttttgggtaggtggctcctctgggagaaatgctctgcctcgcttaatgggatggcggtcgagagtacttgagactgtggatgttttgatctctttcatctctgc

SEQ ID NO: 27434 - DNA, 2375 bp, Homo sapiens
ttcatttttctactctacttttcctttcccctcaatgacccccaccccaaaactgtgcctaaatactattcatgcagtctttgagaatcaaacaggttcacactcttattcctgagtacagaaacttaccgaatcacacagctggataaagccgggattgaaaccctggcagtctggtttccagagcattctggcttagccacttatgccatggtttggcaaaagttagaaacagctaatcagctaataagggcatgatcacaaggcattttgctaataagtttttaaaatatacactatgggtgttttttggttgtgacaattcttgggtccctattcataggagcatcccccgcaccaatccctaggcacaatcctgtatccagcctgctggacatgaccgtttattccatttcgtaaaccctaagcatttgctctgcaaacctcctcctgcttggtccttgctcttactccttgtctgagaaacatggtggctgagctttgtgactgcaaggcagggctcatccttagggtctaccctgaggtattcttagtaggactgctctttgatagggcaaaggagtttcatggaccctttgaaaataatttagaggcattttcctttggtttctctgaatgagctaagaacccctgataataaggaactgctgtgggctgatggtcagttcctccagcccctccattctaggaaggtgtctggtaaagcagctcactgtgtggttggggaagggagacaaactatgaagttgtgccgatttctgggttttttcccttacacatgggatggtgtgagataaaaatctggcaacatagacgcagtgttcatgtcaagaaagagccacaataggtaagtcccaagactgttttctcagacctcatggaaaaggagacctcttggagaagtgagaagcaaaacgagaacaggtttattcaccttggactggaaagataacgccttgtaagcagttagaggcaacgcttttggatccagaggggaaaaggatcgctgctcccagcaacctgtgcttctgcagcaaatagcagagaagacagatcccgagtccctcttaagtgggtccagcagggcacggggaggagaagcttggcactcgccaggtcctccccatccaagacagaggaagtcttggtgtcctggaaaggccaggcaacccctgccacaggtttgatgtccaggtggaggcagccccacacaaagagcctcctctgccatgtttatcgatctcaggcgggaaccagggaagacgtctctaaagtggtgcctgcacagcatcctggccagtcaggaggaagcagcaacctaagccaactgccacaggttggcccttccaaaccccagccatgggaacacctggccctccccactgtgcttaggaactgagtgcttaggaaactaaaggatggatttggccacgggatgggccagaggtgctccagagccagctgaggcacatcaggccaaagtcaccctgcacttcccctgaggcagcagttcccaccaggattcacaagatttggagtgctgtcagaggaaccgcagtcatttatggctgtatattttgtactagaaaaaagtcactaggaattcatgggtgatattgcttaggacagtggttcttaaagtaccgtcaacatcacttagcacctaagtgcttagtagaaactacttcatcaaaaactctgggaatgagacccagcaaccttttaacaacccatccaggtgatgggatgcatgttcaatttggtgagccatgacttaggataaagctaagtaaaagtaagtaagacatagacggtagcaaaaattgtgaagatcaggtttgagaacagtggtctaaagcttcatgaccacaaaaattggaagggaccacattttaaagatgtgaaattaacagctttacttttgtgcaagaggtggcagaaaaaagatgagctgtggtaattagggcccatggggctgagcatcatcaccccgggagctatgggcctcgctgggccaaaaataatgtggcccctgggctgcagaagttctgagcatttccagttttcttagctgaagtttgattcagccttgaacggtgtttacattgtacttgttcataaatccaaggaaccaggaaagaaacttactaagactcagaattttcaggcacacattacaaagttgccagcacattttcagccacccaccaggtgcacatacactctgcgtacagaacagacaccagtcagaggtttgcacagcaaaagggccaagcgacttccaaactacagagaatctcaggccatctgccttgggaggtcttttggcagccataacaaatagactcaaaaag

SEQ ID NO: 27435 - DNA, 1077 bp, Homo sapiens
cccggcgtgtagagggaagggggcggggctagacgcggcctggacaactactagagcgcctcgggctgtgctgctcgagactacatttcccagagcgacgcgcgcggagcgggcgggaaagagagcgtttcgggtccagtgcgcaggtgcgaaagccatctttggttatataagggaggttcaggaagccattcgttctttcgcgtctgcggtgcccggagtgtggtacttctcctagttgcagtcaggcttcatacgctattgtcctgcccgtaagttcccgttttgtgtgtggtgagtggaaactccatgttcttcgttggagacctctggtcctcccttcccttctttgtgccgtcgtctctgcggccagccctaatctccttctcgtggcttctccgtctctgaccccaaataggccttaagggcgtgggagaaatgagtttctggagctggaaaagccactgccttctgcacgggcctgagaagcccttggctggtgtaaatgatgacttcacttttttccccatcagatcgacaatgctgacgtcttatattttgccagttagttctgatacatcggcctcaaaaggcccggccttgttcgtttctgaccgtgggaagatggcggttaacgccctttatttgttggttcacaggttagagcagccagcgggtacagaatggattttggaagagggagtcaccactggacctccaaggaagccacgtgcagacatctacaaccttcgatctcctgacgagtaagtctttgtctcctatgggtctactgtagaaaacacgtgctttgagaagctttagttttctaggaaaacgtgggatttaacaaagcactttctatcgagcatttattaggtatttaaaaaagtgttctgacggccgggcgctgtggctgacgcctgtaaccccagcacttggggaggccaaggcagatgggtcacctgaggtcaagatttggagaccagcctggccaacatggtgaaaccctgactctattaaaaatacagaaattagctgggcgtggtggtacgcgcctgtaatcccagcaactcacaa

SEQ ID NO: 27436 - DNA, 2738 bp, Homo sapiens
aaatttccaagtggagggatgatttattgacatattttggaaagccaaatgtgtttttctgttgaactagccactcaaaccagtgcccgactacataactaatatttttgctagagtccaggagtgaggcgtttacaaagtctgggcttcatgggaacacatgtgaagcttattgttccagattgttcttttgtcaggtaacttgtggtaacttgtgttaaaatgcaatctcttggtacttgttcacttcccaactcagtaaatgccaactacttcctcaactcttccagccacactggcttctatcatgggcctgtactcagagtgtaagcactgaagacaggggtgtttggtttggctaccaagttattgccagctacaggatacaacacagaagtgctcaaacaccgaatgcaaatttgcaaatatgaagcataccaaccaaatcttactcctcatggctttcaaatcttactcctcactcaagaacttcctgctggcatatatgatgacttagcttttttccccgacagatcgactatgttgatctaacttttctaagccagtttctgtctgatatgccagcttgagcagctcctttgtcccagctcccctgggcatctagctgatgggagctcatttttctgttttttcatttcaggtttattgttggccaaaaccaggctttgattgaaccaggatgaatgcgggtgttggaagtagaatatatatatacatataaaattggtaagtggtgccaacacgtcttccctggctgagtagacacaggctctggagggggtagtagctgcttttcagtgtgggtttgtcaccctacttcttgtacgactcaaatgtggcctttgcagctgatgatacagcttctttccccatcagatcgaccctgttgatctctacactattggccagttttgtctgatgcattggccccagtaataactcctatctttgttttctgcttatctttatcagagactattgcttgttcatgggaactgggctttctctattttttccagcattcagatggcttcttttgacctgttaactttctataggttgggagccacgtgtaccagtgtgtgttgatcttggcttgattcagtctgccttgtaacaggtgaggtttctgctttctatctgccaaaccccaccgcaaaatttgtccaactgggcctaacctcaggacccatttccaagttgggtataaaactgggagaataagtcattaggactgacattggcctgttggtattactaggtctttgttggaaataagagcttggagttccaaagaaaacgagcacttgaacaaaagatttctcagcaaggcaaatttacttctgccgtagggtgctgctgctggcattcctggcaagagcacacctaacaaaagagagaaagggtttttattcctaacaagtagtccctgcttctgtgtcctatccccattggctggagtcgacagcgcaatctaaactagtcctgattggctattttaaacaggaggcatgtgggttacagctgtgggaagggcaggaaacttgtttacagagctggttgctaggagtgagggggacttttccaaatagggaacaggttacaggttgagattggccggagaagttgtttatagaacgggtaactcggagcaggaaggtatgaggaagttgaccttaagaacaaagaacaaggaagttaaaactttgaagagaaatccattgtatctaacgatttcccccttttgatttttataattatttctcttcagacttgttttagcgtgtcttgattttgttcctcttggtcctctgaaattagaagcttaactgaatgatgcgagggaggattgaggaagattttggtgggtgagagctgttaaaataagcttttgtattaatcctcagatacagggtatgatacagcatcctacaagaatgagcaaacctattctgatggcaggagattgaggacgtaagtcctttccatttgcggaactatttttccattaaaatcgtgaaggggtcatttattccagaatttctagctagctcattggataaagcagtaagtccttgggcctttgttatggttccatcgggagcagtattattagggatgaaagtacaacactgggttccaatcatgacacaaactacacctttctccgctagtatcatgtctaatgctattgtattttctcaggccgtttgactggtgggccctaattgttaaactgttcccttaatagcatccctagtataattaatgaatcgttgctgggttacattttttgtgttttttttgagatggagtctcactctgtcgcccaggctggagtgcaatggtgcaatggttcactgcaacttccacctcctgggttcaacctactctccttcagcctcctgagtagctgggggctgtcaccatgttggtcaggctggtctcaaactcctgatcttgtgatccacccgcctcagcctcctaacatgctgggattacaggcgtgtgccaccactcccggcccaatctacatttttatttagagttgaccaccagaacaacatggattcaaacttgcagctatttgattttgggccttaaatctatctggcactcctcgtgggattccaatggcatctatataaacatgagagtcacgagggacatccattgttttatgatgttctgtttttatgtatgttttctggatgaaa

SEQ ID NO: 27437 - DNA, 1063 bp, Homo sapiens
aggtaaaagagacagcccctgacctccctattttcctggaaggccataagtggaatattttttctttttcccatttggggcattctcttttgaagtgacctactcttccacatttgaaacatttgttttcccctcttccctgtcctgcactgtgacttccaggttttattcccttactccttgtatacagtttggtcgctggtggcctagagggtttgtaagttttacttccttgtgtctcctactgcagagttctctgttgtaaggtagacagcatgatttttgccttttgtttctgctgctctttgtccctacttatatgcttctctaagaagttagtctctgggacaatctttccaattctctatcttttgtagttgtttttagaggtgtttggccaagtcttagtaacaaaatgaagctttagcatcccttgccccagtgggtcttccatttctaaacctgcatattttctcatctgttctttaagcctatttaggaattcatgggtccttcatccatcccttgtatgttgaatgcttgggaaatactctcagttcgggatactgatggaacattttgaccggtagggtgttaatgttcccagactaccaaagcagccctatggatcatggttcttctcccaagaagggaatgcctaaaatggacataagctcggcccatacaactggggtcctaaaaaatgatttgatctgctaccccataagggtcatctaacaagggcttgagtttttctttttttttagattttgtacttctgagctggttaagggggcatttacgaagctgatgcctcctctcccaaggggcacttcttcaaggggaagagagttgggggcaattctttggaggtggaaaggggaaagggaagttctgagtatcctttttacattgttctatttcatgctgtagggcttaagtgtgtggctagggggaacatggggtattgattcaggattatatgggggagggactgatgagtggggggatcctgtgtaccggcttgatgcatggggtttggcagaggcaagtggtctggtgg

SEQ ID NO: 27438 - DNA, 1077 bp, Homo sapiens
ctgtgttgctgagagtctgggtttatgtgtcaccttgggtgggacccaatctcctgtttgtgaggccaccgcaaagaggtggtgggatgcctctcctcaagagaggtgatcgtgggcttctcctgaaggagaacggtaatcccagatgagctcccaaattgttggcaataagagctcagagttgcaaagaaaatgatctccaaaagatttctcagcaaggcagatttacttctgcagaatggtgctgcttgcactcctggtcacagtgagagcaccccgaacaaaggaggtgaagtggtttttatccctaacacagctagttcctgcttctgtgttctatccccattggctagagtccaatctaaactagtcctgattggctattttaaacaggaggggtgtgggttacagcagtgggaagagcagttgccacgagcgagggagacttttccagataaggaacaaatgcgggttacaggttgggattggtgggagaaatgtttacagaatgggtaattaggagtgggaaggtatgaggaagttgaccttaagaacaaagaacaaggaagttaaactttgaagagaaacccatcatacctaacagtcttgtaagaaaggatgacaaagtgattgaacattgggtggagctaattttccttggccaattcacttagtaagataaggagctccaaatcatatttaagttgggagtcaattgattttacttaattcttgtgaggttcagttataagattcatcatactactaccatgagccatcctcagctccttgttacatgggcctgttaacatggcagctttgtctataagcaaacccaggagagaaagacatagcagagatggatgtttgaagtctataccttccaccccctttaaagagaaagtaacaccactccttttctgtgtcccttggggacactacctccatgtctggtcacatggctggactttacagcagataagcatactgtggcctgagaccatgattgtatgctttccttctgctgacctttacaatccctcaataaattgagctaacacagggaagcttttttac

SEQ ID NO: 27439 - DNA, 1044 bp, Homo sapiens
ttttcttacaccttttgagtatagtgtttttgccatcatagatgtggctcctcataattctccaacttttatattaaaaaaccaaaacctcaaaaattgtagttcatgtcagtcagtgatgactcatcttagaagtattttgtttttggatgtgtgaatgtgcatagttcttaaagtccaacattcatgtaataagacatcttgcatataacaatgacccttacgtctaagatgttaaatagatcctaagcctggtataactttattcaagtatccttatttgcccctaaaatgtctttaatacacattacttgggttatttcttgaatgaacatacaggtatcccaatttctgtttttaagagaatggggtcttgctctgtcacccaggctggagtgcagtggtgcagtcatggcttactgcatccatgatcctcctgcctcagcctcccaagtagatgggactgaaagcacacactgccatccctggctaatgttttcatattttgtagagttgcagccttgctacgtgacccaggctggagtgtagtagctattcacaggcatgattgcttgaaactcatggcttcaagggaaactcccaccctcaatatcctcagtagctgcaactacagccataccccccactgctcagcttctcatcctttaaaagatttttactggtagtgtcctcattctgggtttttgtcttctgtgtttactgtgacatgaagtcatttttagatgaaggttaaacattttgccaacgcaggtacaatatgggattcaataaaagtacagaattaaagttgtcttattagagattgggaagtttcccagctccgtttatcggtacttggccgtaccgataaaggggatggacttggagtgaccaggtcttagtcacatgtattttcataccctaaacaagaagcggtatagaccagaatggagcactgattgtaatccaccttctttcttagaaactggcgatggaatatgagaggagccctctggaaagaaaaggacagaccctgtgctttca

SEQ ID NO: 27440 - DNA, 1035 bp, Homo sapiens
ggcaccaaaagttgcaggatgaactctgaccacctggcgacctcaactgggagtggggtggaatggtgttgggagtcagccagagctctccatctacaaggttcatttcttcactgatgttgcagaaataattgtagcctgaatagctaggtcttgggagaagtgatggaaaggcagtcttgctttcaatgcttacttgctaactcaggtgactggaaacccaagagcacttccagggagagtgctgaggtccagaaagtactttttaaaaattatgttagaggacatttggttagaatttgtaaatgctgacatagctatcaaagtaattctgtatttcataaagctaaagaaatggaaggaaaacgtttttctccagctggagcaaagtgtaacaaaatattgagatatctaccatttcaagaatttccaactttgtgccaaaaaagaatctagaagaagttgccagagaaagtatggttttcgttctttcagggataaattttcctctcctgccagaagttgctttgtagcttgcagtcatttcgagacattactggtcttttgctttatagttaggtgttcagcattcctaagaaattctcagtatagaaaaggaccatctgcactccaaaagcacatgtcccctccttctaccttactgtatttttaaatgagtgtctgtctggccacttttcattctttataaaaatatagtatcaacctgaagttctaaagagttccttggcccctgttcgaagctttcaggatactttccatactttatggaattctgtagtttgggccttttaaaaactaatttcttttgcacagttaaacaactactatatatagaaaaaagaaaaatcttgtttattgacaattatttttatcttgtttcattctcttccagtccatgtgtagacatgtccgtatgtattagatgcctttgtatagtttaatttgagtttatatcattttttctgttctttccatgtattagttgagttcacatatttatttatttatcttttt

SEQ ID NO: 27441 - DNA, 1022 bp, Homo sapiens
atttttagcggagacggggtttcactatgttggccaggctggtctcgaactcctgacctcgtgatccgcccaccttggcctctgaaagtgctgggattacaggtgtgagccgccatgcctagcgtgtccttcccttttaagcagaaaatgtgacacttgtgaaaaagcttgtaagacagcacttccctttttttccctttaaacctttaaatggcaaatctaggtaattaaagttgtgaatttttatttttgctttgtttttaatgaacacttgtctttcagaataggattgtgtgataatgtctaaatggcaaaaacaaaacgtgattttgcacaattaacaaaactactgcaagaaaaataaaacatttcttggtaacaaaaaaaattaatacatttgaaacatttttcatgtaaccttactgaccaggaatacttatattttacagtcataatggtagccctgcagtgcactctgggagtgagcgagcgagcattggcagttcattgtagtagtgtaggcagcctgcagtagtgcagtctcctgtgtctttagcatgatgagatggtaggatgcacccgagccaacgggccagcatccttactggccctaagctctcagaaaagcttcttaaactctctgagcttccctacagtgttcttttgaggattagaagtaattgaaagtgacaaatcctgaaagaagcagctcaacaaataatcattaattgctcctgatcctctgaatgaattgaggggtgtccttaattaggtgtatgcacaaagatcaactaggagcaaaggaaaatgttagaacttgtgtttctatttatttttaacctcactcttttacaatttctatttttttgtgaatatttttaaatataagctgggcgcagtggctcacgcctgtaatcccagcactttgggaggctgagacaggcggatcacctgaggttgggagttcaagaccagcttggccaacatggtgaaactctgtctctgctaaaaatacaaaaatt

SEQ ID NO: 27442 - DNA, 1031 bp, Homo sapiens
attttttatttttttgagacagagtcttgctctgttgcccaggctggagtgtagttgtgcgatcttggcccactgcaacctctgcctcctgggttcaagcgattctcctgcctcagcctcccgagtagctgggattacaggcgtgcaccaccacacccagatagttttcgtatttttagtagagacggggtttcaccatgttggccaggctggtctgaactcctgccctcaagtgatctgctcacctcggcctcccaaagtgctgggattacaggtgtgagccaccacgcccggcatcagcccacattttctcaagcaccttccttgagcccggccagtctgagttagttacctacccaccctgcttttctacagccctctacccctcccgcggattgtcattagtgttcatcttgtttttctccctcattagcctgaggggaggagctccttaagggcagcagctttgctctcatctctgaaccccagaaaataacagtacctgggacaaagtaggtgaacaataaacgtttggctgactgaatgaatgatggtatgaatgaatgaatgaatgagcgaataagcaagaaatgttttaagttaatttctaagaactttgtgtatataacattttaatttatttctgttttctttcatttcctagcacagctgaaggtttaacaagaaaaaatatgtcagatgtcagtgggtggcaaacatttttacaagcccttgactacttcctcaaaatgttctttggctctgcagcgctcggcactctcactggcttaatttctgcattaatatccttttaatgtgatgaacatgcagggttaaaattattcctgataacttctgtctctagccagtttctcctgttttttaagggggccaattttagatgaagattttgcttaaaggaggatttttttgcttagtttttgtttgagaaacactctaactcaaggattttttaatctaacgtgaaatttaggatgtcacttttcaaagtttaaaaaacatgtacactg

SEQ ID NO: 27443 - DNA, 1067 bp, Homo sapiens
tcagaatgtatgagagagtgccagttgcttcatattgccaccacacttattttaatttaaaaaagtttagctgtcctgataggtgtgtagcaactgcatttagatgtgctttggtgtggttatttttatattcgccttgggttcattgagttttttgggtttatagtttatatgagtttatagctttcatcaaatttggtaagcttttgcccatttctttatcaatatttttttgttccgccttcctcttccccttgagacttcagtttactccagttatgagaggtagcatgctattggcccacaatatgctttgcctttttttctttttttccctatgtgcttaattttggttatttcctgttgccgtatcttcaaagtcactgatcttctgccatgtggaatctcctgctaatcctacccagcgtatttctcatttacatattttataattcatctacagcagatccctttaggttattttcatttcttccatttctctcttcatcatgttcatgttttcttctatattctggagcatatgaaacatagaaatttctgatagctgttttaatgtccttgtttgctaattccgtcatctctgtcaactgtaggtctgttttgttgttgatttttcttgtgcttataggtcacattttcttgctctttgcttgttattaagttttgattggatgtcagtcattgtgaagttttatgttgttgagcacaagattttattgtattcctttacggagttctggacttttcttttaaaaacaattttttttgtgtgtgtgtgttatttctggacttttcttctggcacgtatctaagtctcttgacatcagtttaatccttcttgaggcttacatttaaacttttttagggctggtgcagagtagcagggccctaactaaggtgtctcaggtaccgtgagctcactccactctggctggtgggaacgcaaactattcccacccatgtcagcttctggaattgttcagcctacttctttttaatggttctttccccagcttcttgtttcatccgacatatttactgatcag

SEQ ID NO: 27444 - DNA, 1053 bp, Homo sapiens
ctgcagtcatttgctctgaatttttgccactttgccgcagttggggcccttgctaatgacagtgttcagcagattgacagattcttgtgtttatcatcttccctgggtgggatcgtgtttatttgcagaagtatttgacagttgactcattacattaagagatttctgaataccagggacatgtagcttatgtaatagaaaagaatgagagaatttaagcacaagtttgaccaagatattggctgcaggattttcaagaaaataaggaaagtgttgtattggattctgactgtgaatgtttgcttgcttaatagtttagtaccatattggaatgaaatcattggggttgaataatccattctttggtttgtttcagaaacatgtgtgtttgcatttcttggcctgtccatttttagttttcctcacaagtttgaaatttcctttgtcatctggtgcatagtaagtattttcctttttttttttaaatttaattacttatttgtagatcaataaacacatgttccggattcatttatgtaactgttaactgttcaaagtcaacagctacatagacactcttttgtttaaagtttcttttgttaaaaaaaaaaaatcacaaacatacagtaagggggcaggggtagaattaagtgaataaatatccccagaaaggacttttgcttgttttttaagatttttaatggccttgaatattatggtctttaaataaaagtacaggtttgtaagtttttgtgtgaggaggtaaaagcagatttcaaaattgaatatgtaattgatcataaccatgtaaaaatattatgcacagaaaaaagaaaatatgtaaagaaaatatagccacatgttcacagtggtcatagagttgggatttctttctcttttctgctttttctggataatttattatgtacttcttactgcagttttcttcaaatttgtctatttatatttgtctatttgtctgtttataagatattgttcctgcaacctgggtacttccatctctcagtcagcaagagctcattgctcttggtc

SEQ ID NO: 27445 - DNA, 1845 bp, Homo sapiens
ccaagcaggacaggaaaatttcacaggaggtttcacaggttttaattatcttcaaaaatacttcaggtcaaatagcatatatccactagccaaatacggctgtcaggtttatattctttccctagagctggatggtttcaaaggggcacactgttgtcttgccattatagtagtaggtaactttggccaactatatcaagtaaacctcttacttacatatatagatgtcaagttaggattttagagtggtattcggtcttgatggctgaatttcagtatctaagaaagaaagctctctgctaaattgtcataaagaatattttttctcagtctgacagtgtctgaaactcagacttcagaataactgccctttttgttaatgtgacacagatgaattacattcatctgtgtcacattaacaaaaatgactcattaaaaatgagtcctaaaaatgactcattaaagagggctagttgcgctatagtttctgctgtattgtatggctctaaaaatctgattctgtactgtgcactgattccacctctcagaaacaactcttcagctcagtgcatctgcgtgctctgttccgacagacttacaaatgttctgagcacttggtctgtgccagcctccattcgtgtgctgtctgggtttctcaatctccatttaagggaggcatccttaacttcatttaagaatcaggcagcagactgggtgcagtggctcatgcctgtaatctcagcactttgggaggccaaggcgggtggatcacgaggtcaagagattgagaccatcctggccaacatggtgaaaccctgtctctactaaaaacataaaaattagctgggcatggtggcgcacgcctgttagtcccagctactcgggaggctgaggcaggagaatcacttgaacctgggaggcagaggttgcagtgagccaagactgtgccactgcactccagcctggcaacagagcgagactccatcaaataaaaaaaaagagaaggcagcagagacagattaattttcccaaagttacatacctagcatcacaaacagttgcactggggatccggtccctggcaacctgctccggatccagttgctaggctgtcctgcttctactgaaagccagtctttgcatctagaaacagttgctgaggctgcatgtctctttttgcccttaggattatgatgttgatgaagaggacatgatgaatcaggtgttgcagcgctccatcatcgaccagtgagcagagtccgtgcttgctatctgtctcatgttacagagcttccattacatattaaacgtgaaatctatgactcctgtaccttacctgttcaacagacctgaaaatgagccatggcattgggacagggtcacttctgacaggggaagtgggtccccaggtcagcccttctcttccctttgggctcttgccaaagctgtcttcccctactgttaaccttgtttgtcacacggtcgagttcgtattggttctcggctacttcctggagcttctgccgcctcctgtggaagataatctagcttctccacctcttgtttcacactcattcctcccatccagtgtttgtctctcgggtccttcaagccagccaggaccttttctgggtcatgaatagcacaatgaagcaagtgtctcctttccttgtccccaaggtgtgcagactttggcagccgtgcacctgaccagagctgaagctcccgctgggctgtggggttgccagaagctggggttgccatcccggggtacatgtcaccagtcctcttggggttttgtaccatctgatgctggaagttttgattagtgatattttctactac

SEQ ID NO: 27446 - DNA, 1029 bp, Homo sapiens
aagcttcagagaacccttcccaaaaggacaaaaccagctcagtgttttagcactccgggatcatatggcatgacagcatggctgctttatacttttttgtgtatgtgaaattaaaaccaaccactcaggaccaatttctctgaagctttttgtcaatctttcatttgcttttctcgtctagattgtaagctccttgcagccagtgtctgttgattcagtcattcaaaaaataatacatgaacagctactaggtaccaggctctgtgctgggcagttgggatatgtggtgaggaagacaaacttggtccctgcccttaggaagttcagtagtccagcagacaaagtggctgaataaagataatctcagttcacagtgataagagctcttacaggcctaggctccaggtgctgtggggatgctcaggaaaaggtatctaattgggattgggagcaggcaaaacaaataaaggatagtgtataaaggtaatatctagttgaagttctgaagggcaaggaggagtgagcctgtatattctctgagtctctccctaatctgggattgacttcttgtccgtctctgttcatattaagtgtcacctaggcttgaaagggtgagatcatatttcacttccttcctctttggtcttaacctttctctgctaccccctcacacaatgcatatgcattattctcttattgtatatatttttcctctcttccttttcatgtttcctctgccattacttttaacctcgactgccatatggcctctaaacgcttccagaagggtagcctagtggaggttattccatcatggccttgagctcatgcgaccagatagtgaaggcatctgtgtaggtgtcttctccaggagggtgatatttgtttcattgtaaattttgtagccctagaacaccaacaacagtgcacagtaattagtaggcaggcagtacaggattcattgaagtgaagtgataacttttatccaagtatgtatgcagataatctttgatttgtacaaaaaaaatt

SEQ ID NO: 27447 - DNA, 1082 bp, Homo sapiens
ttttgcatcctaattttaatgcagttcagtgtggtagacctgtatttgcatattgaatattcccttccctgttttaataactctattttttccttttcttttatatctcctgcttctctagctagtcctagaccttactcatcggtgtcttctctgtttgttcctcaacttgaggagttcctacagggtttacccaatctgctgctttcatttagcccttttgttctttttgagccatctcattcactcacccaggatgtagcatcggcccttgaattcagtgtgcacacatacactgtgcactatgggacagccttcagaggcactttgttcctgaaattgtggtggtctttgcctctcatggagccttgcatatgctgtttcctctgcctggaatatcctaccttttacttaactgattctcgttcttctttccagtcacattttgtacatttcttctgggaagctttctctgatttcccctttccacaggtccaagttaactgccttgtctaggtcctcccatggccctctgaaggcctcctttcatagcaccatgtctgagtatactgtaataacacgcattgctctgtaatagcctgtttacttacctattgccaagtaatctatcaagtcttataaagggcggggctgcttttgttctagtcatttgtatctcttagtacccaatatagtgtttggcatatagaaaatacccaacaaggccagtcgcagtggctcatacctgtaatccgagcactttggtaggctgaggtgggcggatcacttgaggtcaggagtttgagaccagcctggccaacatggtgaaaccctgtctctactaaaaatacaaaaattagccaggcgtggtggcgggtgcctgtagtcccagctacttgggaggctgaggcaggagaatcacttgaactggggaggtggaggttgcagtgagctgagatcactccactgcactccagcctgggtgacagagtgagactccatcttaaaaaaaaaaaagactccatcttaaaaaaaaaaaaaaagaaaaaagaaagaaaatacccaataagtagttcctgaat

SEQ ID NO: 27448 - DNA, 1061 bp, Homo sapiens
gctaaagtgcaatggcgcgatctcggctcactgcaacctccgcctcccgagttcaagcgattctcctgcctcagcctcctgagtagctgggaattacaggcatgcgccaccatgccagactgatttttgtattagagacagggtttcaccatgttggtcagtctggtttcgaactcctgacctcaagatctgcccacctcagcctcccaaagtgttgggattacaggtgttagccactgcacccggccgaagctgtcatattaaatagcactttctgcttttagcaaatttaatccaaatgagactttagattttcttgctctgacttaccagcagttccttgaaacacatttaattatttttgccagaaaatcactcaagcacttacgccatttttttaccgtgaaaatatgctgcattattttaaaatatattagaagtcagtaaccataagattttatatgttttctaatgtattctgtaagctttctgctgcttttgtttggaaggtgtattttgtaacgtagaggactgctttatctgcttgtaagcttgatttttgtttttactgtaatttttttttcttttgctgtattgagaaatacattgagtaattataaagtcagtggcatgtttataagttaatatttgtatctattccttagttactctaactcaaaacctaaagtaatcttcaactctaatttactctgacatccagttgactgccaagtcctccaacttaatccttatccttttttttttaaagagatgcagtcttgctttgtcacccaggctggagtgcagtggtgcaatcatagcttactgtaacctcaaattcctgggctcaaatgatcctcccacgtcagcctctggagtagctggggctacaggctcttgctaccatgcccagctaactttttatttttattttttatagagacagagtctcactgttgctcaggctggccttgaactcctgccttcaggcggaactcctgccttcaggcggtcctcctgcattggcctcccaaagtgctggaattacaggcccaatttta

SEQ ID NO: 27449 - DNA, 1093 bp, Homo sapiens
attatttgagcccaggagtttgagaccagcctcaaactgggtaatataatgagacctcatctctacaaacaggaaaaaaaaaattttttttttttttttaactagccaggtatagtgctaatatacctgttctgggatccagcatgctctccctgacctgcagcttcatctccaccactttgcccctcactcccaccacaatggctttcttctcttcctcagacatgccgtgcgtcctcctacctggaatattcccctccaaacattcccatggctcactccctcaccttcatcagatctctgttccagtgtcacttttactggaaggtcttttgtgaccatcctacttattataaaaaaataatctgcccaaccttctccttttatttcctctacttgatttttcaatttagtacttatcagctgacatatattttgtctctctgtctctctctgtctctcatagaaggtaaattctataaaggaaggaatttttatgtttggttctttgctgtagctccaatattcaaaacagtgcctgacacacagtaggccctttatatttgttgaataaatgttgacactctgatatctaatttttgtctggtgactaatacgaaaactatagagtgataataaaagcattaccttagtagactggaaagggatgagcgctaggatgaactttctgcctggcgatcttgctgaatttaggaggcagattggggttcaaaggaggctgaaatggctaggatttgcagagcagggtactaaggatgagcaggctatgacagaaagaactccagaaatctgcaaagggatcaccttgagtctggctggatacagtgtacactttgtagggtgtctcttcatgagcttggataaagaacaactgttggggagtggataattcccagcactcattcaagcttgcatcggccagaacggagagagacagacctctgtaatacgtaggatatttggtagaaacattcaaccgaaaaccatcagatatgcaaaaagtaataataataagtaaacaatgtgatgcatagctagaagaaaaatcagacattagaagcaagcccagaaa

SEQ ID NO: 27450 - DNA, 1029 bp, Homo sapiens
cctacattctatgccagcagcctgatcaggtcctgggtaatgtttgaaatggctacacagaggagtttcaaagccttttgttcaatctggcttcacctcgtagacggtgagaaagcgtcagagccctgcaggatcccgttgccacgtttgaccggggagccgatgggtttggaagtctgagccctgtctgcacaacctgccccggtcagcagcttcgtgcccccacccccatctccccatgaggcaggcatctgtgctgaccatggcttccatgttcagaaacccccaggcctttgagttatcatgaagcttgtgggatgtgctccaagcctcctgccatagaaaaactgccatattgctcacaataattcactattatttgtttccccagttaaaatgcgcacaatactggccacaaaaagaagaaaaagagatgatctttgaagacacaaatttgaaattaacattgatctctgaagatatcaagtcatattatacagtgcgacagctagaattggaaaaccttacagtgagtatagcacacacttcagcacttcaggcggctactggttcacatgcctcttcctttatcccttgggtgatattacctaatgtcagtgttcctggcttttgtataccccgagcaagatgtggtttgggcactgtggtgagcggagcttacttgtgtacctaccaagtgcccagggagggtggaggccacagtgctctctctgacctttaacaacagttaacaccagttcttagggaaaggagagtttcttacccaaaagactggttcctgcttgtgcagctgcagagggactggagcggcagcctgcaagtcccagtgaagcatgctgccttctttgtggtcctcagtcttcgagtctgaagagagggaagaaggggtataggggctcactccagtttcatagctagtgaaagttttctgggccaggtcttgggtttttttgttgtgggaagagtttataacaccagctacttgcttggtaaaagttggtcttggaa

SEQ ID NO: 27451 - DNA, 1023 bp, Homo sapiens
accaagtctgctacttttttctctaaagtgacaatcctctgaaacctccagatcatcttgaagcccccgtctgaaagttgcccagagccagtgcctcacctgctgttccttgttcactttttcacgggaggccttgcagggctttatgacaagattttatgggtggctgcccagcatcattgtgactcgtgagacagagagaaaccagttgtaaccatgtagacagtggaagtgatagggagaaaagaggtgaggggactcttcaatccgaagggaaatgaagtctaagcaggcgcaccctgcaggttcagtgtcaagcccagggcctggccccagggtgtggtatttgttgactgggtgtgtggaccctgggagaaagtctgagaatgaatgttcctcttagaggtagagagtggaaggtgactctgtgtgtacttggaattagtgatttctgtacagatgattcttttagaatcatcatgagtatttttctctttcagacccaagaaactcgagagatcttacatttccactataccacatggcctgactttggagtccctgaatcaccagcctcattcttgaactttcttttcaaagtccgagagtcagggtcactcagcccggagcacgggcccgttgtggtgcactgcagtgcaggcatcggcaggtctggaaccttctgtctggctgatacctgcctcttgctggtaaggaggccctcgcgggtgccctggggagctcctctacctgctctgctgtgatgttttttcctaagtagaaactgaagcgctcctcttccaaaatacagagactcactgtgttagtctgtttttgcgttactaataaaggcgtacctgagactcggtaatttgtaaagaaaagaggtttaactggctcccggttctgcaggctgtacaagcatggcaccagcatctgctcggctcctggggaggcctcagggagcttccagtcatggtggaaggtgaaggggagcaggagcaagagatgggggaggtccca

SEQ ID NO: 27452 - DNA, 1128 bp, Homo sapiens
agtgatccgcccacctcggcctcccaaagtgctgggtttacaggtgggagccgccgtgcctggccccaagtgatttattttattttattttattttattttttttgagacagagtcttactctgttgcccaggctagagtgcagtggtgtgatctcggctcactgcagcctctacctcctgggctcaagcgattctcctgcctcagtctcccaagtagctgggactacaagcgtgtgctaccatgcccggctaatttttgtgttttcagtagagacacggtttcacgacgttagccaggctggtctcaaactcctgacctcaggtgatccaccctcctcagcctctcatagtgctgggattacaggtgtgagccactgcgcctggcccccaagtgatttttgaaaagcaaattgcaaaaccattttaaaatttaaaactatgtgatcttttaacatctgatactctactaaaatttctttaaagtgaaagcttacaattcaatgtgtaaactactttatagtctgaagtttaagatagtgttgttggatatcttgaaaaatttttataacaatttattgttagaagaaaaaccccatactctattcctagagcagttatcatgggagcaaaaacaaagcacaagaaacctggtatcttaaaagttattttcatgcagaggatcccaatcccccattccctgttaagagtattagagtttatcctaattgattcgggagatggggaagagaaggtacagaatagactttctgctctcattgttgaggttattgctgtgcactaaaaatttttaaaaaaatatttaaagcttgcgccttttaaaaatactcaggtcattcctgtcagtttggaattcagccagggaaatgtgtatttttaaaagcttcccagccagtcctgataatcagccaggtggaggatctgttgatgtgctacagaacagacccctctccagatctagtcagaatctctacatccagacttcttgctataacaccgtctgtttttgattgacaccagacacatatgtttacctcttcgatttattctcgttttattaggaacactagaaaggctttgctttaaactttgtctctcatagggcatgc

SEQ ID NO: 27453 - DNA, 1042 bp, Homo sapiens
ttcgccaccagcctgaccaacatggtgaaaccctgtctctaatacaaaaattagccgggcatggtggtgcatgcttgtaatcccagctactcgggaggctgaggaaggagaatcgcttgaacccaggaggtggaggttgcagtgagccgagatcgtgtcattgcactctagagcgaaactccgtctcaaaaaaaaaaaaaaaagttgccagatctatctcatttaaccattttatattagagcaagagttggcaaactaaggcctgttggctgcttttgcatataaaattttcttggaacagggtctcaccattgcccagattggagtgcagtggtgccatcttagcgtacttcagcttcgacctctcaggctcaagtgatcctcccacttcagcctcccaagtagcttggactacaggcacaaacaaaccaccatgcccagctaatttttaaaattatttttgtagagacagggtcctgctatgttacccaggctggtcttaaactactaagctgaagcagtcctctcacctcgcccttccaaagtgctgggattacaggcatgagccatcatgcctggccacataatattttatggattgtctgtggctgcttttacaagagtgattatatagcctgtaatacctagacatttactgtctgactcttgacagaaaacggttgtcaacccctggattagaacattttaaaacattatttcattatttgatttcttcctctgatcttcaagtggggcataatcttgaactttgttgatggctgtactataatggttgctgttttgttactgtatggggatactgatggagcttatgtagaagtttttttttttttctagatttgctttttactcactgtgaagcttttatgtcttacatctgcctgccacccacaaatggatccttaccctttgctctgaatgtgtggtttatgaccctctatgagcaaaggaatgagattactaggcttttcagaattaatgtttaaagagtaagaggttcagagggaagccctgcaggat

SEQ ID NO: 27454 - DNA, 1522 bp, Homo sapiens
ccaacacgtctggcttatttttttgtatttttagtagagatggagtttcaccatgttggtcaggtgggtctcaaactcctgacctcaagtgatccgcccatctcctcccaaagtgctggattgcaggcatgagcgcctagccaggaagctatcttttcttgagttatgaaactttgcaacagttgttcaaattggtgtttgtccttcctatagctttcatattttcaaattaattctgtatggctatataatttatgttttaaaaggcaattctcttgactttggaaatatggaagtctctcctttaacctattcttgttcccattcccagtctcatttgaaatcattccttttattgttagtgtgtgtatttttgttggtgtgcttttaatgcatccaagtatgcatcattttggataaaaaatacatccaaattaagatgttttaacacataggacaaacttgtgcactttttatgccaaaaaaaaaaaaaattgggttttccttcatgggatttctagaaacactgcctacactttatgaaaactacatagtattcacctgtgacaggtagagtttatcactattaattttatgaggctatttattactttccaatgcatccacttagaacaagctaagagtaaggctgctaactttaattccttgcctgattttattgtacagtgtgcacaagcacaatggtatgcttgtatatagaaactaaaaatactatgaagtacataagttccctatggcttatggagagttatttattaattaactttatggtagggctagtatgaatacctttttaacaattgtgtgctattacaacaatgaagattcaaatgactccgctttgaaggatgttttctctatatggtaaaatatatatgaagaagtcttgattacgtgaagatcacttgactcagaatacttcaatgtattttgttcacattaccactaagcatattatcagtaaactattaactgactgcacattatgtaatacgttgtactttttgttgaattcaccgaagttcttccatttatatgctatttttaatggcattccggctttaacattctgtgagtcttacaaatttgactcttgaatggcaaaataatgttagtatgtagaaggttaactttcatttataatataagtggtgcaggggttcaacattttaagtaaaaatatttttacacactacctctctctttttttttttaaagttttaacatcagaacttttgggggaaaaactacttcagggcttgactttttgtacaaattttaactgtaaaatacagatttatcttgtacgcattcatggaaatggaaatcaaagctgctattgctttttattttaattatcctgttaagggtatctatcaatggtattttcaagtagatctctgtttcttaaattattggtgaaataattgattactagatatattgtaaaaccaatagatcctggttatacgataaaatatcagctcattggtaggctgaa

SEQ ID NO: 27455 - DNA, 1071 bp, Homo sapiens
ctacttaaaatagaaaaattagctgggttgtggtggcagccctctgtaatcccagctactcaagaggctgaggtaggagaattgcttgaacccaggatgtggaggttgcagtgagccgagatcgtgccaccgcactccagcctggatgacagagctagattctgtctcaaaaaaaaaaaagaaaaagaaaaagaaaacctgaatggatccagatgaaagacatgtgttttctatatccatgtgttccgcatctttgattgttttccttttgaagaaacaatagaaaatggtgacctggcaccagtattctcgaatgtcctttgcttaaccacatttctgaactcagtaatgactttctctggcattggtctgaatgaaaagaaagcacccaaatgatacctaaatctgtgactaatggggctggtcagtagtcagagtgttcagagtgggaggatgttgccttgggattctttggcttgtgaatacacctaactccaattgacgtctaacttagattcaaaggaatggattggctcgtgtaactgaaaaatcagggctaagatttcagcacagatcggacacagtgccatctgatagaattttctgctttgtccagaggggagtcactagcccccatgtggctgctgcatacttgaggtgtggctagtgcaactgagaaactggatttcaaattacatgtcattttaattaatttaaatgttaatagccacatgtagacagtggctactgtattattttacagcacaaactggaatccctctccatttcttgcttttgttttcccctgttaccttttttcccttaggccaagtccctccttatggtggcaaagatggcctccagcaaccctggcaacattccgtcacattaccaaccacctggcagggagcctgtcttcccccatggtgacagccaaagcccagagaccaccctcactgaccctgtctcagtcatgtgcccatccctaacccaatccctataactcctaattgtcctagtctgggtcatgggcccaattctggacctattgagggagggatggtcccctaa

SEQ ID NO: 27456 - DNA, 1030 bp, Homo sapiens
ttgtagagacggtgtctcactatgttgcccaggatggccttgaactcctgggcttaagtgatctgcctgcctcagcctcccaaagtgctgggactaaatgtgtgcgccactgtgcctggtctgttttcatttctttcgggtatattgcttggccataagttgactctgtgttccttttgaggagatgctggactggttttcagagcagctgcacaattgtacccttcccaccagcagtgcgtgaggcttccaattcctccacatcctcgccagccctcatcattttccatttttgtgattgcagccatccctgtgagtgcaaagtggtacagtggaggatttggggtggggagagcttttgtcttaacaggactgcacagagtagattgaagggcagtaagaacaggaagctgggaccagcgagcaggctactgcaagagtcctagcaagagacgacggtgacttgcgccatggtgcttggttgtatgggagagagagtgaagtagttggatttgggtagagacattttgaaggtagaaatgagaagatttgctggcacattggatggggtggaaggtgggagagaagagtcaagggtgctccgaagtatttggcctgaacgagaggatgatggagtttccatttgttgaattagagaagatcatgggtggaggacctttttttttttttttttttttttttgtgccagccccttggtgagcagggccagcccctcttcaatgtttgggcattcccagctgggaagcttgcactgccactttgtgagaagcggggatgtgggaaaaaaaagtgaaaaccatgattcgcaggtgtttgtttaaaaaaaaaaaacccactcaccatctccactggtccttccttgaatgtcacttaaagtgagcctctcgcctccttcccctctgagtggagcagtttatgcccagggggttgcgaagaacagcgagggcattcatctgctcacaggctggttaaaaaggcacgtgggctgcagcctgcgggactctcattt

SEQ ID NO: 27457 - DNA, 1034 bp, Homo sapiens
tttcttcttcttctccttttttttttttttttttttttttagatacgggttcttgctctgttgcccagactggagtggagtgacataatcatggctcactgcagcctccacctcctagactcaaacgatcctcctgcctcagcctcccacatagctgggcccacaggcacatgccaccatgcttggctaatttattttattttttatttttactagacacaggagtcttgctgtgttgcccggctggattcttgaattcctgagcttaagctatcctcccgccttggcctctctctctctttttgcctcattctttcctccttatccctctagttttccttctctcttccccacttcccctcattttcccctcctttccatctgtttccgctctctggattctgccctcttgtttttggcacttgctctcttttacgtttttctcaagccgccttttgtttccctttgtgtctcctcctgtctcatgatgttcatctctgtttccactgtgctgtctccgtctctccctcttttcctttctctccctcttaaaaattattccccagaccttgaaaaccatccatcccttttcactctcaggggcctggatggaagaaaatgtcttcatcaggcaaggacagtgcaggagaggggtcgcaggtgcatgtgcaggcccggcagtgctgccggggagaaggacgggcctgggctgagatgcacgggcacagccagacctccaaggacacctcatgtctgaggaaagggggagtttgagaagaggctgccagggctccctggaggcctggaatgggggagaaggggcacaggggacagtccaggccttgtctctgaagcaggtccttcagctgcacttgggctgtgcttctctgtagggagggggcatagctctagggaaggaatttctccaggcctggcaggggcctggaggaggcatctgagcacctgctggttccaggctgcctctcgttttgcactcagggctttttttgtttgtttgtttgtttttgaggcag

SEQ ID NO: 27458 - DNA, 1108 bp, Homo sapiens
gtgctctgccactgtggtgggtgggtggatgctgcttctgttgcctccagacctcggtgcccacagccttgaggatccttccaataaaggtgtcaagagctcagccctggtctggtgtgagaatgacggggagtgatagtttccttttcacctgtgcagtgttttctagaaggttcctcctgtgcctcacctgcgagggcctgatcctgggcacctgctgatgaggctccagctgagggaggggtagtcccggcctttggatttccagcaagagtgcagaggtcattaggacccccagggtcttcaaaggcttgtttacccacatttcttcccatgcagatgagtttcctgctattgtcctaacactccggatttctcactgtggcttcaacctgcaatgggtatttctggaattcctcgaagagccaagaacacacacataattcccctatgcacatacaggactgaactgtaaatctgcattagaatttcaagataatctgcctgggcaaggtgactcatgcctgtaatcccagcatcttgggaggctgaggcaggagggtcgcttatgcacagggtcaagactgcagtgagccgtgattgttctactgcaccctagcatgtgcaacagagcaagaccctgtcccccacaccccaaaaaagtttttcaaggaagcctaaaataatgaatctggcaagatagagtagaggccaggtgcagcggctcatgtctgtgatcccagcactttgggaggccgaggcaggcagatcgcccaggagtttgagaccagcctgggcaacataatgagaccatatctctaccaaaaatacaaaaattagcctggcgtgctggtgcacatctgtggtcccagctacttgggaggctgaggtgggaggattgcttgagcctgggaggttgaggctgcagtgagccatgattgtgccactgcactctagcctgggtaaccaagtgagatcttggctaaaaatgtttttaaaaattaaaaacagaaaagcagggaaatagtttagacaatttttggaattcagagatataggtagaccccttgtttctggaaaagtcagcatttttattctcttttctttt

SEQ ID NO: 27459 - DNA, 1073 bp, Homo sapiens
catagtttcaactttaacttgcacatgaatggggagcgtctccagcagtgtggccgtatccatattgctcattttgtccgagaaattattttgtccaagggtatcagactgaggtccgttcaaagacattatatacatacacagagacacagaagagaaatctgagatgcgagtgggaattgctgatatatttgtttccaaagcaaactccatgaatgaaatgattcaataatttggaggcatttgaaagtcattaaaatggccatttggaattttcagttgttgcctccctcaattttttacgtttcccctgtagaaaaagacatcctctgggcaccctcaaatattctgggatgctaaagtcatgctaaaattatttacaattttagaaattaaaattcaggaggcacagcaagataatccgattattaatatatcagtattatttagctatgcataacaacaggaaaacgcacaatgcaaaagttttagagataatgagcttagagaaattacatggggggaagaaatacctggatcatatttgaaagcatttgtcttgaattctgctcatctaaatgagagctctctttctacctgtgtcatttaaaaaacaatttcaatatcctcctacctgctaccccagcctgaagcagggactaatgaaactctctctggacacacagatgtaagacactatattacacaacactttttaaaaaattgtttcagaaaaccaaatgtgggcatgcaaaccaaaagaaaaacctcaaggatcttcgtaagatagctagctcagggttcaagatcaagagaactttgttgcggcaggataagaagacaacagcattgcgttttagctaaacatctcttcttggcaaatgagaagcggtgaagcagggaagatttttttaaggagctttttagctcttttgcatctctctccaaagactaatttaattgaaaagctgtagtgtccatttatgattaaggaaaggcctcatgtttccacaacactgctagacactaaggtgggtttgaagaaaaaaaaaaaaaggccagcattctgcagt

SEQ ID NO: 27460 - DNA, 1032 bp, Homo sapiens
aagcactggctacattcaggttgtttatatacaatctctccccgagacatcctgtaagctggttatgattattggccaattgaatagatacggaaacctaagttttggaaatttcaaggagcttgactaagatgatgacaagcttttagataggatactgaagcccaggcccacctatcagagtccaagctctcagacactatgctttgttgcttctcatagtatttcatgcttaacagcacagactcacataaataaacttccacaatatagtatagatacatggaggctaaggccatgaactgaaatttagtgtttccccaggttgaagtaagtcaattgtgttgtagaaaaaaaaaaaaaagatcatccctacttatttaaatccccaaacaccatctttaaaacttgagcctatgaagaaaaagaataaagacttttgaaatctcttatgctatccatgatggcatttttgtaaatccattcctgtttcactaaacaaaagtagaaaaaaatcatgaaaacccccaacacagtccatctggggcgtctcagtaagaatcgtgctcacccactccacagcatctttgaggatgtggccttaagtcagacgctgctcatctgttcctgataaatctcttgtaggctccaggactcttcctggccatcaaaaaatatggaacgcatgcaacgacactgccctcttatttattttagcaaatgaaaatctgccctcacaggtttatggtcaagatgtctaaaagatgtcttgtatttgtatttaagagtcaccttaacagtaggtgactcttaaatgagtactccaaataataggataagaaaggtgatcatgaaactcaagggatcctatctgagagggagaatgttgtctacaccagaaatcatgatagactctgtctggcaaaaaaaaaaaaaaaaatcaattgtttttagttattattggtgatgtttttttttaacatttttgtttatttatttcctttttagtgggtcacattttaaaacaaccca

SEQ ID NO: 27461 - DNA, 1061 bp, Homo sapiens
tctggatcttcgtccaatttaaaaatatgttaagattatttttagatcctagtcattagtgctatgagactgttttcaaacagatttattcttttctctcatttgctcaatatttgattccctatttaaagtgcttttctcctttcaagctttctacaaatctaaacattgggagaaaaaaaatgagggaaaggaccaattctctatatttgtgtaattgtaagcaaaatgtgctgtactcttttctggccacttggcacataggttacaggtcatgaactatatatgaaggcctgcagttcaaatgagatccacagatctggtatgttcctcccagactgtgtttcaaatagacaagtgttagttgcctgggtttttttttttttcttttaaaggagacttcatttaaatttcagggtattttatatccaaatatagaattagagccttctttaagacttgatttgaaagcactgaagtcactatcctatatggcaataattgggtggagctttcactgttggggcttaccactcccactgtgactgctgggacaaggctcaaacttctgaaactctgtggccaaggagaggagactagctacagtttcttactgaggaaagggagtggtatcagggggttgggggagacccctgttgttgaatgtccagaggtggtgcctgtgatattgacccccataggtgagctcgtgtgatgtaatggtcaggtcttggcctttacgtgaatctacgtgaattccaaagtggtgaatatatattccaccactttggaattacatcctcgtgggcaagttgcctacttcctccaagcctccgttcttgtttgtaaaatgaggacattgttacaatctactcgtagaattgttttaagaattaaatgaatccatgagttgagtccacaaagcattgagcacagggcttgtccagtggagaaagtctcatgaaggttggttatcactctcttcctgtattagtctgttttcacactgctataaagatactacctgagactgggtaatttataaacaaaagaggtttaat

SEQ ID NO: 27462 - DNA, 1037 bp, Homo sapiens
aaattctggcttttaatttttttaaacattttatagtaagagcaaacatttaatatggttcataatttttgaagatcttggtttattacttcatcatatattgattcaaagatctggttgtcaattattattattatgtttagtgacttcatttaaatggctgtactagctgagatataacacaaaaatgcatgagttcaagtggatccaactaagcccagatgatgaagtccatgtatccagttgcataggcacattgaagctgcccttcctggaaataggctgagatttaaggaaggagccaaggatcacatcagccctccaccttgatgaacttccccgccccacccctgggtgcctgcccccggcagatgacaccttcacatctagaacaagtcaggacaccagtgtcaacctgtattttcttactttcagataaaaattactatttcttacctaaaaagaaaacacaaatagatataaattcaatttcttatatgatcttcctgtcacaaaatgaatcctctcttgaactctctgcagtgcacacaggcccccaaagggagacttactaaaatgtaatatgagcttccaattctctcctatttataggatgaccctcacctttaggagctcttcgactgccagtgatactctttcagccacccccacccataaaaacatgtagttctctttcacccagacagtagtccctgagaaaagcgacagaagtagagcccgttaggattgcaggaggctgtggtatggcagtgtctggctggtaggtgtcccatgtacccaacaagtgctctttgtcatttgtttttcctctctaagcaggaaattattcccaaccctaagttagtgaaaccaaagcttcctcttcccaacacacacacatacacacgtgagtctgactgcttgaattcagaggcaggttccatgaatggaaccataactggagctggtttgagaccaagtttataagaaacaggatccttctcattgtgcctgccctcctgtgacctgtctgcaag

SEQ ID NO: 27463 - DNA, 1017 bp, Homo sapiens
tggttcaagggaaagaggcaatgcagcagagactgatttctgggatgaggttttttgtttttttgttttttagttttttaattcaatatttacatgggtccacttagtgtcataaaaggttttaaaggaacttgctataaaaactcaagaggaaattaaatgcaaaccagtacacaccagatgcaagataggaatcaagaaatatagtgaatatttcctgtggtatattaattaaaatattatttccccgtaggaatataataggatgccatgatctattgatttatttattcaactagaatttgccatatatgtcgctccaagctggatatgaggaaagggaggtagataacagtccctactctcagggagctttcagtttaatggggaagacaagtatcaaagaatctctataaaagaaagcagagttcattggtttcatagcagagagtagctatttgtgtagcagcggagtgtaggtgacagacacattaggatcacttttatactacaaagattagaagtgcacatcaaaccattagcatcagatagatattcctgactgaagacctattcataagtgtatattttttatacatatttgttagaatatcagtgattaagaaaatatacacatattattcacttaaatataaaatatgtttattgatctttaggaaagacatttcacaaataatccttcaatgccatattaccaagtaaaattttcctctaactcaatgactaattccgcttctcgaccacagaaaaaggttgaatatgctattgtgtgcagagcaacaaatgaagtaaaaatttatgatgtacccacttaatttgacccacatgtactcaggatttcacgtgaggcttgggagttatttattccttgctgaaatgattctattctcttaccttgctttttcttttctcaatatgataaacattaattaagtatctgctttgtgcaagacactgtgatccgaataagcaagtcatgttctgtgatgttaaatg

SEQ ID NO: 27464 - DNA, 1048 bp, Homo sapiens
ctacagggaatatcaggccaagttttttattgtttctggttgtgcaaactggaccaactatatacactgaaacaggtgatgcctaagtaccagacccttgaactggatgaggaaaagccaagatgggaaaccactggaaaacatcgcagtctattgattctgtgtatcatttcgcccaataccgttgtcgttatcaagggctaactcttatttgtcaagtaaagaaagactacaggttcaactgacttctaagttagcaaacattttggttcctccctatctagttaaataaatgagtttctttttctaaagcctcaactcacctaaggacagggttctttgtttttctctgcttaattgcgtcatattcctccataccaactacacaaaccccagcacacactcagctgcagattaccatcctgtgttcttgtcacctcatgcattttacctgctggaaataaatgctcacactctgcccaatcccatctttccctgcacctggacatgcttcagaactccttttgtctgttcctctctctcatgtgcctgaactcttctgtgacttagaatctctagcacatgattcagaaccttaggatctgtccagtggcttcttgtctgttagtaatttttgttctctcaatgatatggtgtggctgtgtccccacccaaatctcatcctgaattgtagctcccataattcccgcgtgtcgtgggagggacctggtgggaggtcattgaatcattggggcaggtttttcctgtactgttctcatgatagtgaataaatctcatgagatctgatggtttcataaagggcagttcccctgcaccgctctcctgtaagatgtgcctttgctcctccttcaccttccaccatgattgtggggcctccccagccatgtggaactgtgagtctgttaaacctctttttctttgtaaattacccagtcttggatatttcttcatagcagtatgaaaatggactaatacacctagtaccttgtaagcatgcaccatttttactcatatttatatcttcctc

SEQ ID NO: 27465 - DNA, 1024 bp, Homo sapiens
gaaaagactaggaaaaaataaatacccccgtccctccccaaatgaaagatgatttacaaaaatgaaaatctgtatcgataacagagtcttacagatgacaaaatataccagtgatggtttgtgactaggacatgagctgccatttctcctgaattcatatccagttttagggataatgtaatgaaaatgttttagtgtgattagtaagaggttattaattggttaaagaccctcctacagctttgagatttattttgaggacaatgaagaattctatctcacttattttgtttcacgttcctattgactttgaaatgttgtccttttttctgtttatgtatgcttaagaagaagaactaaagcgactgtctttcttcttactcaggaagatttgccagaatttaacactaacacttcatccctttggaatacccagtcgttcaaaattttttgttttgcctattagtgatttaaaaataccctagcttcatgacatttgcagatgtagcattatggttttgtctatcaaggaggcagccaaaggccgagggtttgtattgtgcagggtggcatttatatgtaaaagtgtgtaattttactagtgagctgcccagagctatgtcgaaatgtagatttgcggcttctctcttgggctacattgtctctgcctgccagtgtagttgtaaagcagtacacacaaaacaggtcactttttacaaatgacttttgattctacatttatacggccattaagaaactaaagaagtcaaaatttttcagatctacctcactgaattttatgaaggaaaagatatgctttggtagattcataaatttaggggattttgagggctgtagaatgtatctccaacaaatggcaaaggtctatggcaaataactctgatttctcaggagctgtttccctgctactcacataaaaaacacttcactactaatacctaaaacaaccccatagttgcttattctatccaaactattatccaaagttatttccttaaaaagt

SEQ ID NO: 27466 - DNA, 1065 bp, Homo sapiens
ttctgtttctgtttttactggaaggaattataaaaatttccagtttgcattgataacttgaagagggaatgtctattttttttataagttttcttccctttctatgtgaatttttttaactgtaagcatttattgcattttttttacttctgtcttttaacatcatttgatttatcttgggtaaaatcataagccttctttattattgtttaagtttctctgatttaaaaaaactaaaatattattaaaaattaaataagataacatagctaaggtatttttcataatgtttgccacagaatagccactaatcaaatttgtcataagtaataagatcacttccataactacaaaaattttataacccaggaaaagtaaagaacgacaaaatacacagcaattactcaaaagatttttcattccacttattctggttaatttcaggtcctggaatcaagaacaagtgtttatatatcggttaaattgttttataatgaattttgaagaacccttggaattatttttgtgttggaattatattgtattaaagagtgtttgaagcaatttggatattcaagtggacttagttttgtcggggttttttccactaagatttttcactgtttgggcattatttaagattcagcccaacaatatgtcactagctaaaactgaatgatgctgtaatccatacagaggacaaatgacaaatttgttgactaaacttctatcagtttggttagtgaggagcattctgattataggtgggaatttttgagcaagattgactcttaatttcatgttcaatttttaaaaatttattcatcctttcctctgtttttcttcctttccaaccaaacttcctccctccctccctccctctctccctctctccttctctccttctctccctccctccctccctccctctctccctctctccctctctccttccctccctcccttccttccttccttctttggttaagcacctattctgtattttaaaaccagtagtcaagctcagttcatacttttttatgcaagtgcctttcaccaagacaa

SEQ ID NO: 27467 - DNA, 1051 bp, Homo sapiens
gaatatcatgagtgcagactgtgacttcagagcatcccttttgggaagtctccattagcaggtgtaccaaaaagggttccatatggctccaatatccagtaggattggatgcatatttgagcacaacccaaagagatgaaataatccatccttggtttatttctagatgattaatctctcctcaatatccaagacctgttttatgattaatttgagttttcccacaaccaagaatctgtatcacatcctcaagagtaacagagccccacatccaatgtgatttatttaagaaacaaaagcaaacaggctgctgagtctctaccttcagtgtccctggttcgccaacaatttcataccattaatttctttttcttccttccctgcagtttctgaagaatacacaactctcccttctgcccctccaccctctaccctccaagaactcaggacagttcttgggattttttcattatctcttttcagctggaggtattccaaatggacctcttgaattcccaccctctcatctcctgacttctcctctcctgacttctcctctctccatacaaacattctcaaatctctcttttcaacaaatagacaaataactgaaatacaaaaatacacttccgtacttcagttttctcattttaaaatgagcttaaatatagtatctactttatagggttttgcaaggattaaatgagttagagctaaagctcttagaagattattggcccacaggaagtgctcatctactctcaggtaataatttcatgggagggtgtgtctgtctcaatcacctatcatctgtctgtcggtctctccgcctgtctctagacctatgcttctttctcaatccaccctatctctctcttatctttcattaccaacctctttggaagagtccttctcattttctccctggagctcctcctctcccactcactcccatctctttcaatttgctttggccaaccctagctggacctgaagacgtagttgcatggcccatcctgtgatttctcttttgagctcatccctccagaaa

SEQ ID NO: 27468 - DNA, 1047 bp, Homo sapiens
aattatttaacacctgctaatgattaattaaaatggtatacattttgccaaagaatctctctaacttttggtaatctgaacttctctctttccctttgataaacgtgctcagagtaaaaaacaaccaactaccaggagggttttctgccaaatttgttcccagaatgtttaaagatgagtgtctctcatcttttcctctgtaattcattctctctctgtgtgtctctcctctctttgaacagggatacagcctatgtgtgttcaatgttctaataaccccaaatttagacacaaaccattatttactgatatttaatgaagtcacctcatggcgttttaatgattgctagatggaacaaatctaatgattgttaagatggaactttacaaaccctttcagtcaggacaagtggcctgttctccccacttctccttgaacttggtgtactgagcaaaagacatgcaagcaatgaggttgagactcatttttcaacattacccaaagaacagtgtgtactggatccctggcagctgagaaaggacccttcccctggctgggagacaaaacttcaatgaaattagggcattctcccaacccaaccattcccaccctgtgctgatgtgaaaaagttcaaaggatattacgggcaaagctctcaagatgtgtttccctcgagaatatttcaggtcacccaatgtgtaagggcccctttgaagtcaagattgattgaaaaagcacaagggtgtggagtctaagaatttggatgtggccatcctctgcgtccctgagtgaagatgctgctcgggtcagtattcatattagcctggcccattccctttgcctgcggtatttacagtaacccacatgcagagcaggtggaagccaaagcggggcatagccagggattgtggcaggggcttgaaaaagtgttttcttttaattgtagggggatgattctgtttggcaggattcaaggctcagctgtgtgtgagcagatccttcatacacaaccacacacacacatatactcagcttcctctcacatt

SEQ ID NO: 27469 - DNA, 1127 bp, Homo sapiens
tctcctgaaacaaaaagcagagggatccctccacatggccctccaagaggccctcactccaggcctggctacccttgagaatagctcagcttccttgaacactgaatcctatatctctttactcagcctgccaacatgcatgccaattagtgccaataataacatacatactaacagacttttagaccacagtcacccaaacactagagactcatgacagggagctctcattccgagtcatcattttttgtacctactgggtacacgctgagaaattctcacgatctcctcatttacgtctgccttgaaccctgtggcatcttcctgtgactttaaacagtcatttagtgcggtagattggcgaaaacgatcctgtcaccatcggatatgtttttaaatgaggtcttggttgaattctggtttagtttttaaaaatcagccttcttgagttttaaattgttcttatgttatgattccacttctgctgccatttttaaaactgtcagtgtttttactgtaaacactattgtggactttcaaggtgactacagaaacgtatacctagcaaaagtctgatatgtaactccataccacccatgaattattttgcacaatttcatttaaatcattctgactagaggtttggaaaaaattgaggtggtatagttttaaaaataattgttttcctccttctgttgttgtttttttgggacagggtcttgctgtgtcacccagactgcagggcagtggcgtgatcacagctcactgcagcctcaaccttctgggctcaagtgatcctcccaccacagccacccaagtagctgggaccataggcatgcaccattatgcctggctattttttttttattttttttgtagaaacggtctagctatgtggcacaggctggtctccaactcctgggctcaagtaatcctcatgcctcagtttcccacaagtactgagattacaggtgtgagccaccatgcccagccattaacttttcatatgaaagaaaatttctctaagaagaaaataaaatataagggtttatttctaatttttacccacatactattagggtaaaacaaatgcagcatataaaatattcttctccaataatatttct

SEQ ID NO: 27470 - DNA, 1031 bp, Homo sapiens
tttaggtcataagtaatctaaaacaatttcaatatgtatttgtatatagctttaaaagccacatgctcttgactaatagaaattaaacagagagcaaatcaatgagtctgaaatgcataaaggcttgaaattatagtcatcactgtgtaatatagtgtacaagcttaacagcacacctagccttgaaattgttggcaggaaagtattctagtccaatgagctgccacttctgttgtgggcggcttgataaaaacacatattcagggtgaaaagcgcgtaaggttgccagacaaaatacagaacggatgtccagttaaatgtgtatttcagataaatgacaaataggttttgagtataagcctggcccaaatattgcatgggccatacttatatttttaaaatattcattgtttatcagaattcaaatttaactgggcatcctgtatttttattagctaaatctggcaaccctaacagcatagattatatggcagttgggaagaacaaaatagcctggacaaattaatatctattaatggcatcaaccattccttcctccattaaataaatattccttcctttcatcctcttttccctcctttgttccttcattccttcctctttcccttctttccttccttccttttttcttctttccttccttcttttcttccctccctgcattcctttcatccttcaacaaatactggttgtgcttttactatgcaccggactctattatatttaacaatggaagtataatactgaaccagaagttctaccaattgtaatagcaaaacatgccaagccttgcagcaagcactttgcaaacattattttgctttattctcacaaacagccgtatgaagtagaggttgattcactcatgatagggaagagaaaatggaggcagagagattctgcctgaattccccaaggtcctacaatctctgagcctcactcattcattatgacatatctagaaagccatcgttccacagcaagcactgtgctaattcccagggagtaag

SEQ ID NO: 27471 - DNA, 1022 bp, Homo sapiens
gatttgcctgcctcagcctcccaaagtgctgggattacaggcatgagccaccacgcccggcctcgatgatgattatataaccacacaggtaaacgttgatggcactggtaagagtaccacctatgaggctgcaagggccacaaagtctctagcagaggctttgacctggcactgagatcaggataggcctcgagggaagatgggaagggcctcagagctagtgagctgaaacaagaagtgtgtcccaggcagagggcagagcctgtgtcgaggctccgaggccagtaagaagagggacaagtacaggtgcctgaaagaaagccagtgagctggaagggagagggagagcatggatggtgtgaaatgaggctccagtgatgcagtttcttttaatatttcagcctctgctcagatccttaaaggcgctattcacatctttcaataatctcacaggatgggtgatagtcatccattttacataagaggaaactgaggtttagaaataatgaaaagccccagcctcacagtccatggcagagagaggatgggagtccagcttagaccctacacatgtgttccttctaccacatgactcttgtagtcatgtcatctcctgtctgtacctacaaagggctgtttaaagatgcccagtgtatgttagatgcttgcaatagtcaaggtcagatactcacaaacacttagtaaataaaactaagtaaggaataaatgagtgctgacatactcatcaacactgatatttattgaatgcctcatatgtgctaagctcaggctaagcacttttcacatagtatccttcttaattcttgcaacaactttttgaaataggcatttttattactattccccctgtgctgctgagaaaactggagctttaagagctctagtgattgtccaaggtcacgcagctggtgagggttgaaggtgggactcaaactcccagccagagcctgaatcttaaccctccctggactgcttctggtgaagcaaagcaaagtccatgg

SEQ ID NO: 27472 - DNA, 1005 bp, Homo sapiens
tgatgctggagcagaccagggaacaaggacttggtcacaaggccatggatggttgaaccaatacgagcaccaaattatctcacgcatcacacatgcagaaacgttgcctatctttctttcctcgctagcgctctttctctttctttgcctctttttctctatctctatcactgtcttcatccccttccctagagatgggcacgttgaatactctgctctaagtcttctaggtccatttccacccagagccagtgatgccgtaaatacagccacaggtttttcccccaagaattcccataagctctttctggtcttactgttctggtctgtttggcccctgctggagctcaagcattgatttttttctgctttgcttgctttctgacagcacggcttatattggaaaggtctgtgtcaggaattagagaacattcctaacaatggggaaaagtaccctaatataaatataccatttgtggacttgcactttgacaagtgcaaatgaactggaagacactggaaaagctctgaagtcatggaaacatgtaacagaggcatttacttaataactcatctcattccttgagctcaccttatcaagctttaacctctgagtctctaagttcctagttcaaaaatgcagagtctcctctgtcctcatgttaatttttaaattatatatcattgtagagaggcccttatgttgaatattatgagccattttcatatctgaaatggggaattataactgaacattagcaattgcctataaatctcagcaagcaaagtggcatctataatacatggcattaactggggagaaatgtggtgcacaaaaagggggatttagaggggtggaggtgattttcaagaggaaaggctgcaggtcgatgagcacaagccccctgtgtgctgtataattcctaaaatcttagtggacctgggtggaagtttgttgacacttttggaagcaatggttaaaactgttcagcatgttgcctgggc

SEQ ID NO: 27473 - DNA, 1027 bp, Homo sapiens
accttggctaatgactgattgactccacatcaatcagtcattggctcaaggatagccaggggtacacacttgaaggcagcaagggcactctgtgtgtactggcagagcagcttcagcgaccaggggacatccccagaagagagctgcaggtgcacctattagaaagtaaaacactcagaagccagacgtgggcacaaggatatagtatccaaaatccaaaggcatccctactgtgtcctctacagatgcatttccctgtggccaggttcttatctagctctcacttgcatagaaaaatgtctcagtttccccaaagttacctttgtgaataaaggtagactctccacctacctctcagagctgatgttaaaatatatcaagttcttttgtccaaaaaaaggatcaaaagaagaggtgactttcacctgattgtcactgataaaataattaatttacatagcaattcaaaatagtgcaaatatacaggaatcacgtttttgaaagtgatcagagaagcctggcctctggcttagcctttcatatgcagatcagtgagggagagggaactggcattgactgagtacctgctgtgtgcattgtgtcaagagcttttctatcttttttctgatttaacccttaccacacgctttaagtagcgatattacccccattttatggatggggaaaccgaggttcaggtataagcccctcaagggcagaacaggggctgtaaaatttaaaatccttaactcatattcaccgaatggacctcagaaaggtctgtaacatactgagggtgaccatgactgacaggtgacagagttaggatttaaggccggttctgacactgaagtctgtgcatttttctagtggcacctttcagactggtgattcgaaggaataaatacaaaatggctagccagtggcgtcatgcagtgctctttgtataaggaggtggcattcctgtgccaagcatgtgatttgtgtcaattgcttgctgtcgtgaggaggccttgccgagactcct

SEQ ID NO: 27474 - DNA, 1040 bp, Homo sapiens
agtgaaggtagaggtatatggagtgcagttgttgtagcatttacttctcgagctcagtggaaaatgttttctgccattaataatgccaaaaggttatgtgtttggccttcctggattcttgtttacatgtgttttaaaattaacattgacttcttgccatttgtgtttgttcctaagcggagtgagcggcttattaatgattagaattattgttgctattatgaatgcactaattaaaagaaaattctgtcatgaggctttgtgaggcaacacaagactttacagttagagacgtcaggtctggaagtgtggagacaaaagtgtgaaataagaaaacagagttcaggatgaggaaaagagttctcaagatgtctacagtccttcattagagattctttttcagggcattttccctagtaagggtatgatgaaaatccagttgttttttgattggaggtgtcacctttattgtttttctttttttttggtcttagggcagaaatagccggcttctctccaacttgaattctaagaacattttatcttctacagctttattcaaatatgtaaaaacaggcacagtagctcacacctgtaatcccagcactttgggtgactaaagtaggaacatcaacggcttgagcccaggagtttgagaccagcctgaacaacacagtgaggtcctttctctacaaaaataatttatttttacttagtcaggtagggtagtgtgcacctgtagtcccagctacttgggaggatcacttaatcccaggagttcaaggctgcagtgagctatgattgtaccaatatacttcagcatgggtaacagagcaagaccctgtctcaaaaatacacacacacacacacacacacacacacacacacacacacgtaacacttctgaattgatgaccagatgccagaccaaggatgccagaccaggacacagttcctccccgaggttcatcatctaggggacaaggaagtgaagcgaatgcacaatcgtagtgcctggacacattgctgtgatgggaaag

SEQ ID NO: 27475 - DNA, 1127 bp, Homo sapiens
tgggctacttcaagaagtgtttcttctgaaatcaggttctgggctgaagatgtgagaattttaggatattagctcttgtttctgccctcccaccccacttctataccaaagcatgcaaagcctttcactgaatgcaatgaaaaaagaatttatcaaaaaggaagagaagcaaagagaaaggagaaagaaaagaaagagaagaggaaaagaaaggaaggaaaggaagataaaaggaagaaagagaagaaaccactgtacattagacaagtgttaatgggagagttcaggagaaggagttttacaaataagaagaagacattttattctccagggcaacaagcatgatgtgtatttccagtatatgtcatgtacatctcccaaattagcatgctaccaatggagtgatatcaccatattaatattgctgcttcttcaactgtgtcagcctggcttttgcaacacacgtctgtcagccatgagatgttggatctcagtgcatctaaccttcctgtcattcaaagtcatttgaaagtggaaagagtaggaacccttctgacttggaagggcatttgcagaccttcctttagtgtgctctgtgtaacatgaatcccaaaaccgaggaaacaaaagcaaggagggctcatgatcaaatgagtatggataatgcttttaactccatctcgttattggacattcccagtggaagtgagcaaatgaatagctctgaaagccactgaaataaagaaaattgttgagcatctaacatagtacctcccaactctctctgaccatggaatgttttttctccacctggaattcttttaaacaagtattctaaagaacatgctttgaaataaaagcaagagcccaggagacaggagacctgactaaagactaaattgcctttgcaggtcagctagtccaacgtttcattttagagataagaaaatgaagaaacagaagttgtatggtcagtggagggtcacagaggcagaattagaaccaaatgacccagaacaaatgcatttacctctgtgggcctcagtttccctgtccctattggactagatcagaggatatcaactagtaggccttgaaacagtcttagatgtgtcacctaattctga

SEQ ID NO: 27476 - DNA, 1033 bp, Homo sapiens
ctactttccttcttctgcatccccatcatcttgacactaaaaaaagaaaaagaaagacagaaaatgtgtgcatgaaatgtgaccagggaatcaaagatgacagagctttgataaggtccagaaagtctcagcccctccaaagcaagcgattaaagagaaaggtgacgttcggtttattcaaatatgtttatctgacatctgtctgggtttcatctgaagtgtgtaggctccttctggatccttccccacaagagcctggcttcagtatcatacactttgcgtgggatgaagttctcaagcctcaacagctaaggaaatctgccagggtgtctggcaaactgtgtaagagggagaaacaccccagctctgaattcagcctgctgtgaattatattataaccaactggttataatatatggacagagttaccaggtgtctatgcgggatttggatgtactaatgtttgcttgtgttgagtgaggctgggctaatgagcctcggttacaggtgtttgggagaagtatgaatacagttggtagggcatagtgataaagctttgctctgttttgtttttaacaaaggctacttaagaagctggaattataaagcattgtggtctgagaaatttatagggcagcttgaacggaaggtagtaactaaccagggagaagccacggaaagctctgaatcctctcctggacaccagagggtgtgccagaaaagcaggcaaaaaccgaggtgcttggttcttcttccgggacctggtgggggccaggagatttaatgtgagggagcacagccgggccagggggaaccaaaatcctgataccaggtggcaccgccaaccatgcacgacctctgaggggagaggggagagggccaacaggaaagccaggcaggagccagaagaatgaggagcacaaaagagccaggcgtagagaatggacagtaggtgtcagaccctggtgtgtgtgggagaagtgaccaccatggctcaacggaagtcagtccctcagccagatgatgaatattc

SEQ ID NO: 27477 - DNA, 1051 bp, Homo sapiens
tctttccggaacaaacacggtaactgctgtgtgggcacacaaggcagtggccagaattctcaggtcacttcctgactctctggagctccaactgtcggcagataaaaagaaatctaggcactgagaaatcccaggcactaacattccggacgaccaattggcaactccaacctctccagcagggtttgtaaagaaaacgtaatgagcccaggtgaggctcattagagccagcctggaattctgccagtgctaccatgagctttatgccaacccttgattttcatatcagtggcagtactgacaaggaagctggaaggcaggctgggaggaagctttgtacccatggagtcctctccctcctccccatccagtagctctcgccacgaggtgaggcagttggcttcatcaaatcagaaccagctcatgagtaattttcactgtcttccctttctaacaggctgggccccaggtgatcctaaaaattaaatgaagctcagaaaatgagacacttaggagagccaggcatgaatagcctatccccggctctagcggaactctttacttcccttgtcaatttccttggacttcctttgggcctttgactagtggcaaagtttcactccagaatctcacagctctggagtatttctgccagagggtcccagtcccctgtgtgttttcttgttctcaagcaaaatttaaaatgggcaatggtagccaatgctgtcttttctccttgtaaattgagatatttatgctgatgcaatattttcagaataggactctaggctgcctccaagcttccaggtacttcccagattccagcaaaaaattcttactaccatcaccctcctcctcctcatcatcatcatcatcatcatccccattatcatcactgtcattactgggaatttattgcatgttaagcaccaggcttgcattttgcttgtattttctcaattaatacaagcattgaggaaggtcatattgttattcccacattaccaaggataaaacaggcttaggtaaaatagcttcccaaggccaccct

SEQ ID NO: 27478 - DNA, 1055 bp, Homo sapiens
ttcttccagaaacagggaaatttatgtggggagcacacagttgggagccgtgagccagttcttgcttacaaatagcaggaagaaactagacggggaagaaaggaagacattcattactgaaggcgagggatttgactgggcctggaaactccaaaactgcagccccaaattgcttcatgaacgaagccattcacttttagccacacgcagacccgtttatttagatcaaattaagatccgaatacagcaatcttaatcatttaattgtttggtggggagagcatcatatagtctgtatcttctttgtttatggcttcaccttgacgagctgtgtctgtgactcatgcattgggtttgccatccactgtcctgacgtctagtccctgcctgaccacttcccagctgtgtgacttcagcaaggggcttgacctctttgggcctgtgttcaattttataaagtgattgtgaggcctgcttcacaatcacaattaaaacttgaagttgtaagtaaaaatgccccctgaccaaaaatgagataaagcaataatgatccaggtggtacctgcattacttagtatcctcagtggtttttttagacatcaatggaggatatgtctaagtctacaattaaatgacattgtactttctcattttaaaacataaaggagtcggctggacgcggtggctcacgcctgtaatcccagcactttgggaggccaaggcgggtgggtcacgaggtcaggagatcgagaccatcctggctaacacggtgaaaccccgtctctactaaaaatacaaaaattagccgggcatagtggcgggtgcctgtagtcccagctactcgggaggctgaggcaggagaatggcgtgaacccgggaggcggagcttgcagtgagctgagaccacaacactgcattccagcctggggacagggcaagactccgtctcaaaaaataaaaattaaaaaatgaaaaatcaaaaataaaacataaaggagtcaacccagatctagatatatggggaaagcatgccatgtatagtaggaataatataa

SEQ ID NO: 27479 - DNA, 1028 bp, Homo sapiens
gattccaaaaacggggaaggaggcaggggaaaggggttgaaaaattacctgtggggtactatgttcactacttgggcaacgggatcattagaaacccaaaccttagcaccatgcagtatatccatgtaataaaccggcacacataccccccgaatttaaattaaaaaaaaattacattaaaagataggagtacctcctttacaccacctgaattatcatggcacataaatctcacaccctatttgccaaggccattcgttcctagctgttttacaggtaggttagctttctcaatgcaagtctgtgggacggatggagaaaaattccccgagccctttgatcctgccccagctgggccccgccgcgctgagccttgggcgcgccccctgctgcccgcggccggagccgttcgccacacccccgtgtttatgtcggtccacgggggttgcctgtccctttaattggcatgtaccaagtccttccaggtcacatttcctccctacgtcccagccgtttggactcactggccaaaagtccaagaggacggaatgtggagacagtgttgtatttttgcggggagttctaggccgaccgggagcgagagaacgctcgggggcgaagcgcgccattgcggccctccccgccgcctgcggtagtccagtcccaagatggcggccaccatgaagaaggcggtgagtggggagctcggggctctggatgctcgggcggcgccggatctcggccgctggggcccgggcgcgggatgctgggggtgcgcagctccgaagcccggcgtgggacccgaggccgaggccgaggccctgagagcggtcccgcggcaaggcctgctcgcgcctggcgccctgagcgttttcctaggcacctggccagccgaggcggggcgccggggctggggccgggagcctcgaaggacgcaggtccgcctcccgcgatgccgagggtgcccccggggagtctgaggaacctgcagccccggcctcgcccctgaggtgtgggaagccgaaggt

SEQ ID NO: 27480 - DNA, 1063 bp, Homo sapiens
ttggcgagggtctgtgggtaaaagcaccagggggttaatcttggctcagtttcctaaaaagcattgattaatttaactggcttttaaatatccccttccgctgatatttgttgtcagctgcctacagtttaatatgcagcgttcacaaaacagctgccagtgctacaattaatgaagcaaaacttaatatgtaatcacaatctaaattagcatcaatactttgacattcattacattggtttgggggaagaaaagtagttctggtatgtttcattgatccccagataccttccaatctggacatgatggggctgattccagatggtttttctgaaatttcattaaggtaggtcagcgtcatttgtctctgtttaggtaaaatataaaaaccctgcccagtagcagtggcatcgcttggttcctgatgcccatgttccagaggaattcggataccacaaacagctaagacaatctcagcttttcttagacaatcttctatctcaaacttcagacattccagaattgtcatgatgtttacactgtctgagttaaaaatcctgttcaagaaaaaaaaagattttgtatcacttcttaaaaaggaatattcatagcacttgtcacaaatagaaggcaaccatgagataatacaagccagggagaggcttgtattacatgacaggtgtaattagtctgctgagccagctttacccaatgaagggcatatgtgttagagagattagctaagagtagaaattcgagcatagaggccaggtgcggtggctcacgcctgtaatcccagcactttgggaggttgaggcaggcgtgtcacttgaggccaggagttcgagaccagcctggccaacatgatgaaaccccgtctctactacaaatacaaaaattagccgggtgtggtggcacacgcctgtagtcccagctactggggaggctgaggcagcattgcttgaacccaggaggtggaggttgcagtgagccaagatcacaccactgcactccagcctgggcgacagagggagacactgtctccaaaagaaagaaatcccag

SEQ ID NO: 27481 - DNA, 1038 bp, Homo sapiens
tgtatacttcaaaaaggtgcattggccaggtgcggtggctcacacctataatcccagcactttgggaggctaaggcaggtgaatgacgaggtcaggagatcaagaccatcctggccaacatggtgaaaccctgtctctactaaaatacaaaaaaattagccgggcatggtggcacgcacctataatcccagctacttgggaggctgaggcaggagaatctcttgaaacctggaggtggaggttgcagtgagccgagattacaccactgcactccagcctggtgacagagcaagactccgtctcaaaaaaaataaataaataaaggtgaattttatggtacctgaattatatcttaatataatattaatatattattattaatataatttatatcttaatatctctatggatctcctccttgaaccaaactgttcattgcgtggggtcattgttccctccctgttatctgctatcgcctgcagcatgccaattacttggccctgaagttaatttctaacaatgataacatttaaaaatgtggactgtctcagccagaaatcagtcagctacttcaatgggtaaatacatcctggtgcccagacttgtggggacgacacatgggacaaccagaggacaagacgctaagtgctatctgttgaacttgcctcagaggtgtggtaaaagaaaagaaaatttaaaaataaaaaattaaaaaatgctgtctgacaagaagatagcggtaagctatcccccacagctggttggggatagaacttgagcctggcttggaagaatgggcaccattttgtctaaataaaaatgcaggccggggccaggcgttgtggctcacgcctgtaatcccagcattttgagaggctgaggtgggtggatcacttgaggtcaggagtttgagaccagcctggccaacatggtgaagtcctgtctctactgaaaatacaaaaattagccaggcgtggtggcgggtgcctgtaatcccagctgctctggaggctgaggcaggagaatcacttgaacccg

SEQ ID NO: 27482 - DNA, 1031 bp, Homo sapiens
ctaccaaaaaataaaaaaataattagccaagtattaggggtcccaaaattagccaaacctgtggtctcagctactcaggaggctgaggtgggaggatcatttgagccagggaggttgaggctgtagtgagccgtgatcatgcccactgcactccagcctgggcaacagagtgagtgagaccctatctccaaaataaaataaatttgggggtttgtgtgtgagagcatttcaaggcttttttcgtgcactgtctttccttaaattgtctttcctagacctggtatattttaataatcttttagccctccatatctgcagcctttgaaaggtagcattgttaaatatgtatatagtgtacagtggaacaaaacagcttccaagccatgaataatgttaaaagttaaccattcagttgactgaagccatctagcatccaagagatacagtagagtatctttcagtggaaatcattgtcaaacttatggtcaaggatggtggttaacttttttcccgtttatgtagtgccagaatctgcacaagaacaggaatgatttccagttataattctcagagtggaattattttacattttatgtttttgtccagggttaaagtacttccagggagttgtttcaaaacacattgctcttctaattagagccagtgcctgtgttctttttttcttgtaattcttctacagtcttcctctcccgactcccaacaagccttcacagccagtagcaaaagtcagcaatatgggtttgatatcgcattacctccagaacagttcgttgaaggatatagtctttgagaatttgttaggatgggatttcatttgtggtaaagactttttagggtgagttggcagcatcccatatatactctttcgttgcattttttatatgtatatattttaaaggaaattcctatgagtaaatagataatggatgggaacctttaaaggtgaacccgaagtattttgccatatattctagcatattaccattttaaagcattaacattaatttaac

SEQ ID NO: 27483 - DNA, 1050 bp, Homo sapiens
gatggggtctgggcacaaatgctggttgtttagattcctgtcgagtaagtgcttggtgccaagcaaaagaggttgcgctgagaactggctcagatgttgcacagagactgtcagatggactgtggctcagggcctgcggggaatgcccccagtttctttactcttggggctttcatgggctccacgtgtggctctcagagtcccctctctgctgcctcttgaccaaggatcagtttctcctaaaactcactctctgtaactcaaagaaaataccatttatttcacaaaaagaaaaatacagattcattgttaagagtgtgtgatcttgtgctctaagtagcatccagggtggctgacaggctcccatcccggctctacatgggacagccactcaggttcctgtgcccatttcctcccctggaacgcaggccctgcctcatcaggacaatctaagtcattcacggggctgggaccagtgtctgcgacagagcaagacagtaaatgatagatgtgttgtgctgtgtctgctttgctggagttggcaattaagatgacgtccgccagcactcacacagccagcaagagaacgtctgggacagagtgactgatgggcttcccttctgaggatgcgaagtttagaatcatctttatcccaaccctgacagttttggctcttcatttttctagcaatgaatgagagctcttctggaaaagctgggaagcctccgtgtggagccacaaagaggtccatcgctgacagtgaagaatcggaggcctacaagtccctctttaccactcacagctccgccaagcgctccaaggaggagtctgcccactgggtcacccacacgtcctactgcttctgaagcccgcactgccaccgctcctgccccagaaggttgtttagtttccacgtaggcaggtcgctttgtgcctctgagtgcgctgctgtgtgttctctctatagttctgtgtcataaagctgtcctggccagccttcaagctggtgtggccactcttgatgtgaggcgtgtcggttccaggggggac

SEQ ID NO: 27484 - DNA, 1033 bp, Homo sapiens
aaataggaggcctacattaaaattagaggatctggtatagggaggggggttcataagaggagagcgatagagagggctaggattggagcaataatataaagggtgatagtagatgttaagggccgcgagggttctttggtgaaaagttttattgcatcaaaaaatggttcaagcagtctgtaaggacctacaatgttgagtcctttgcatagttgtatatagcctaagatttttcattcgatgagtgtaaggaacgctatcgcgataagagtggggataatgagcaggaggaggttaattacaggcatgttgttaagaagaggagttgaacctctgattataaagtgttaagttttatgcaatcgctgggctctgccatcttaacaaaccctgttcttgggtaggatgtgtgatgatttaagagactgggatggcatcatctatggagtgagggcactttatgaagtgggccctatttctcttgtcctttcgtagtaggaggaatgttaagtaggtagaaaccgacctggattactctggtctgaactgagatcacataggactttaatcattgaacaaacaaactcttaatagcggctacaccattaggatgtcctgatccaacatcgaggtcgtaaactctattgtcgatatggactctagtataggattgcgctgttatccctagggtaacttactccgtttatcaaattattgggtcgatgtgtaataactcacttagacttgtgtggtcttaggttgttaggaggttgaattatgctccgaggtcaccccaaccaaaatttttaatgcagggataggaggctagggcctgtaggcttgttggagtttttatttgcattgatgaattaaagctccataaggttttctcgtcttatttgtttatatccgcctcttcacggatagatcaatttcactggttgaaagtaagagacagctgaaccttcgtgtggccattcattcaagtccctatttagagaacaagtgattatgctaccttcgcacggtcagg

SEQ ID NO: 27485 - DNA, 1042 bp, Homo sapiens
atcaccaggctcggtaggcgtgtcaccgctactcatgaatcttcccactgttttgccacataggtgagtgtgctctttcagctattcttgggtagctcgtctggtttcgggggacttggccatagttctatgtaaagttatttctagttaatgcattatgcagaaggtataagggcttgtctttgctttttagtcctcaatacagttctttcatccttcccttacagtactgtgtctattgccagaaatatctaccagggtagaaatttctatcgcctatacttttgtttaaggtaaatggtttgattaagatagtttgataatatttttagcgaggtttggggctagagttgtctgagtggtcaggtcatgatgaaatcttctggatgtaagccggatgctttgggttaagctacactttggtttatccaagcgcactttccagtatgcttaccatgttacaatttatctcctctatacctgtgtagaaaattatcagtaatagtgatttctagagtagtattcgaggaaggtgatgggctgtgtgtgcgtgcttcatggccttattcaaccaagcactctgctcttggtttactgctaaatcctccttaagcccttagatttcataaggctgtcatgagattttctggacatagaaaatgttgcccatttcttgccacctcatgggctacaccttgacctaacgtttttatgtgtatacttgtgcttactctataacctttttagggtttgctgcagatgggcatataggccaggggcaagaggtggtgagacgtatcggggtttattgattatagaacaggctcctctagagggatataaagcaccaccaagtcctttgagttttaaattgttgcttgtagtactctggcgaatggttttgttaatgtaactgttagggtttagggctaagcatagaggggtatctaatcccagttcttgtcttagctactgtgtcttcagggtattaaagctactttcgtagtatgttttatttcaactggagttttttacaacttag

SEQ ID NO: 27486 - DNA, 1046 bp, Homo sapiens
ttcaccccagtctggaaaaattgtcttccatgaaactggtccctggtgccacaaaggttggggaccgctgctttaatgtgatcttatttagcttatatataagaaataattctgtgtataaacattttgacatagtttaggggccacagttgctcccattttattcagtagcaaggatcagcttctctgaggcatttttatcacctgtaaaatgtcttcctgacatacctgattaagttattgtgacactacattaatagatatatgaaaagtttgaaaagtgaagcattcatttcatatgcaacttatttttagtttacacacagaaaagtagcagcatgagtagatttgaaacatttctaatgtattttgtctgtctttactgatcgggcaacgggtcagaattagaaagtttcttataaagtacggcaagaaatagaattaactaatgcaggaatccttttgctcaaatgttatctaatggctattggaatttataaaacggaatctaagtttcatagcatctagtgggaggatcagacacaggaatgagagttgtacgttctgacggggaggcaggatgaactggtgctgggtgggaaaaacaatacagaaagcagctgtaaagtttggaaaggcttctgtgaatgctttacagaagacaagaatagaggtaaatttttgtttgtttgtttgtttttgagtgttgctctgtagcccaggagtgcagtggtgcgatctcagctcactgcaacctccacctcctgggttctaagtgattctcctgcctcagcctcccaagtagctggggttacaggcgcccaccaccacacccagctaatttttgtatttttagtagagatggggtttcgccatgttgccgagactgatcacaaactgctgagctcaaagtgatccacccgccttggcctccccaagttctgggattataggcatgagccaccacgcctggccagcagagctgattcttgaaaagtaaaccatttgcctatagctttttaagcattgtctcatccaattgaggc

SEQ ID NO: 27487 - DNA, 1052 bp, Homo sapiens
tgcaggttgtatgagtatggtgccggcatctgctcggcttctggggaatcccaagggagcaggagatggagcaggcacatcacatggcaaaagcaggaaagagagctatgggagagaggaggtgccatactttacaacagccagatctcagagaactcactattgtgaggactgtgctaacacaggagggatccgcccccatgacccagacatctcccaccaggccccaccttcaacactggggattacatctcaacatgggatttggtggggacatgcaaactctgtcagtgaggaaggattggtaaaatgctaagtatgttttggtttttgtttggtatggccccagtatttaaattagtttcttccctttgaattgccacaactaaagctgttcagcacattcttacatttaccttgatctgttttgtttttgtcttgttgaaagcatgatgctcctgttaaaaccatccattggatcaaagctccaaactacagctgtgtgatgactgggagctgggataagactttaaaggtataatgtgcagttgaggcattgtttggccccatcaggattgtcatttatttttgcaccatttcgacttctgctctgaatggtcacatactggcttctcttttttgcttttagttttgggatactcgatcgtcaaatcctatgatggttttgcaactccctgaaaggtgttactgtgctgacgtggtaagggatttcaacttaatatgtatttactttaaaaaaaaaacaaaataagtattctcaccttgtggcgtcctgcagttagtgagtggataatataaaaatcctgctagctttagtaatagatataaaggatcgagttgagattgcctcagtcgtctccaattgggagatttttgtgctgcgtttcttttagaagtactaaatgctggatgtcaagttttcctgccactcgtttgaacatatgcagctagctacatgccatctctagtgtgacatctatcatgtcctttccatggcagtaggaaaacttgcagtaagtttgtgaggtggt

SEQ ID NO: 27488 - DNA, 1050 bp, Homo sapiens
aatggcatacaaatgtattgatgtgcacagcgtcttacaacgatcttaaaggcaatatggttgatgctttcataccatcttgaggtcacagaaagaagggggctcagggcatggcccaaaacaggctttcatggtaaattgggttctcgtggcaagacaggttatgggaagaagagaagaagaggtctgtgtagcaaaggtggtcttgttaatgtggaggaaaccccacaggtagcaccctcggagagaactgagacctttaacggcatcagactgcagttaatcttccctaatcaggacaagggaagggccttggagaaagcctggctgcatcaatgccgattttctctgcagatgcagatctccccaccaaagatagcttttcagctattatttccagcccttctgtatagccatcttgaaatatgtcagagaagtctattttggggcaaaatattttggtttccttgagaataaaattacacatctggatgggttggttccattgtaaattcctagcttccaacttcaactctgtctgcatcatgcctagatgcttgctagctttttcaccttagctcaatcctccacttgccacagggctgctgggcctgcactcttgtcagcttctccttcctttagtctttgtctcagccaatcagatcagctcttgctcagagaaaaaagaagctaatgggaacttcctcctctttctcctgccagatctagaaatctgcccgtgcttgcctcctcccctgccttttcccccatgaggtggaagccgtcctgctaaggccagttttgtggtgggacccatgccctccagccttctcaggaaccgtatgcagagtatcacctctttcccatacacccgtctctcctgccgcgtagtacttctcccttagcactgacactagctcaagtctagttgatcctagaaaacacacctcccttgatccccacatcctcctccagtactgcccgcgtccctattccttccgcagtggggcatcttggatgaaatgtcctttattccctcacctcccactc

SEQ ID NO: 27489 - DNA, 1055 bp, Homo sapiens
ctacggtatcccacaccaaacccaagactacattctgtagctctttattcacatgttacccttgcctcaggattctcccttgctactgccaccagtaccatctactttatacgtatgtatggatgtcatatacatactaaatatttcccttcttttgcctactagaatgtaaactccatgagagcagagatttttgtttgtatttgttgctgcctcccagcacttggaggagggccttaagtgtaaaaggtgctctgtgaatatttgcagagtgaacatttgatctgaacctgcccctctcggccaccaccagcctgttgctcctgatgtgcttcacagcccattcaatgggacctccatctcctttgttatagccagaaatcttgaggtcacccctgattggaactttccctctcctgtctcactaatcctcagtctcctcccctctaccctgaaattatttgggaatctgttcatttttctccctccctcctgccaccacatctaattcaaatcttggaaagcacttagatcagaactctatgacattggtcttggcagtaatttcttggatatgacaccaaaaagcacaggcaacaaaagcaaaaatggccaagtggaactgtgttaaactaacagctcttgcacagcagagggaaccatggaaaagagtgaaaaggcagcctgtggaatgggagaaaacatctggaggctatttctgacaagggattgatttccaaaatacgtaaggaacccctgcaactcaatagtgagaaaactggtgacgtgaaaaatggaccaaagacttgaatagacatgtctccaaagaagacatacaaatacccagcaggtgtatggaaatgtgcttaacatcctaactatcaaggaaaggcaaacaaaaaccacagtgagataccatctcctagctgatgggaccactgttaccagaaagcccaaagataacaagcgctggggagggtgtggggaacatggaacccttgtgcactgttggggggatgcaaaatgccacaaccgttacagaaaactggaggcct

SEQ ID NO: 27490 - DNA, 1050 bp, Homo sapiens
tcctgcctgaatgacagagtgagaactccgtgtcaaaaaaaaaaagtctattgtggtcagagaacatactcagtattatttcaaaccttttatatctgacatttgtttcctagcctaagatgtggtctgtctttgtgaatgttccatgtgcactagtaaagaatgtgcattccgctactgatgtgtggagtattctgtaaacgttaattagctcatttaatagcactgctcctatctccagtgtttttactaacttttttctcttattttgcagtaaaagagtatttgaagcagctctaattaaagatttgtctatttctgtttttaatcaggttttgcttcatgtttcgaagctttcgttattgagtgtatatgcatgtagcattgtttttatatatttttatataacatacatgtcatgtattatatatattatatgtatgaattatatatctcttaaatgtatctgtgttatatatacataaacagaaacaaggtcttgctccatctgtcaggctagagtgcagtggtgcagtcacagctcactgcagcctcaacttcccagactcaagtgatcctcctacctcagcctcctgaataataggaccacaggtgtactcaccacatctggctaatttttttcattttttgtagagctggggtcactttgctgcccaggctggtctcaaacccctgggctcaagccatcctcctgctgtggcttcacaaagggctgggatgacaggcatgagccacctcaccgggcgtcattgttagattttcttgatgacccttttacaaacgtcatgaaatgtctctcttttgtccctggtaagagtgccgttctgaattctacttggtctgatattaatttaagctctttggcattctatttgattatctcttcccatgcatttacatttaacctatttatagctgtatttttcaagtgcctttcttgtagatagaattataggctctgcttttatatctaatctgacagtctctgccttttaattatttagacctccacggtctagtacagttgct

SEQ ID NO: 27491 - DNA, 1079 bp, Homo sapiens
tagtagagacgaggtttcaccatgttggtcaaactggtcttgaactcctgacctcaagtatcagcccgcctcagcctctcaaagtgctgggattacaggcttgagccaccgtgcccagcctgtttaaagaaatcttttccttgattttaaatattttccaaaaagtttttaggctgtatgatgaacatgtagaaggtgataaaggatttgcttaggatgaccatgaacctgtggaacagtccgttgtgcaccactctgctttaagtgggtatcgactgcttgggagagattactatgcagagttaatccttagatctcattagcctaagagatggtggagattcaagaaaaggttaaaggtgtgtgtgactatggaatgcacacaatacttcactgaatttatggatacacttgagacttccggcttcttgaagccactctaacataagccaaatgtgcgcttaaattcagctaaccctcactgagaacccatcaagttctttgcaccattctaacagagacaactttgtgaaggtcccttgatacctctgttagaggaacttctagatgtcatgtgcctttggtctttttatgtctcaatcttggtattcagtggtgtttccatcagtgtacataatccagagatccaagggttgtttgcatgagatttctagttttgagaagtgagaatcctttgttaattgtaaaatgtgctggattgttcatcctcgggaggcactatatgccattatggggatgacaccatcccatatgccatgcaaagaacagggtttgcagtaaagagaggtgctggaatgtaatgtcagagcacacctatgttccaggagagctaaacaagtctactgcagttaaagaaaagaaatgtttaaaataccttgcaacaagttttttcattgagagcacgtactctgaccaaagttcatgactacttggtgtgcatgaagaaagtcatatttttagaatgccatgataaatggagaagtatatgaaaagcattctagctttaggaaataatgctagtatggattttagattaaagacataataagatctgccta

SEQ ID NO: 27492 - DNA, 1029 bp, Homo sapiens
ttcttgttcactggcttagtaaaactgcgtgagcacagtgcctggcacactgactttgtattgaagtataatagacatacagaaatgtgcacgtatcagaagtataaggctcagtgaattttcacaaactgaatatactccggtgcttggcactctggttgggacatggccgttcctacacccaacggtaaccatcctgatactaattcttcagattggtttatctggttttgttttacatatattttgtactttatatttttaaaaacactctgtttcctcttgtgtgtctggcttctttcattctgcattacatttttagaccatccatgtcattgcatctagctgtgaatgatccactctcatggctggtttgtgcgtgtgagtgtcagagtccgagttgtgcgggtaagggggcagtgaagaatacccacaatataattatccattctgctgttgatagacatttgggtagctgtttccaatttagagttattacaaacagtactgctctaaacattctgatcgtattctttggtgaacatctgtacacatttttgttaggtatatttatacccacaagaaaaaatgcttgtcattgagtatgcatgcattcagtacagctttaccgccaaccagttttcaaagtggtagttgtactagttgacaaccataccggtagtgtatgagaagtccgatcaccttctgtctctggtgggtagtcagtgatctccattttcatgacagttaatgaagtcgagcacatttccgaatatatgtttacatttgtcgtatctacatatcctcctttgtgaagggcctgttaagtcttttgcctgttttcctgttgggttacctgcctccttcttaatgttttatagttctttattttggagatgagtcacttattgactatgtatattggaagtatcttctactgtatggcttgcctttgatttttttagtcaactccttcgatggattgaagtttttaatcttcatataatctgactgatccttgttttcctt

SEQ ID NO: 27493 - DNA, 2020 bp, Homo sapiens
gacttctgatgggattgggcccattttcctttcactgcgtccctcatgctgtctcctggttgcggtgcaaggaggctgccacggtgctgggatcctttttctccgcagagctgtctggagcaacacctgcggcgatgggaagccatgaccctggtttctcccagatactattacctctgtaatttgtgcctttatgttttctatgttgttacttttgttttttttttttttttcctaccttcaccagggccacgaggtaaaagttcttgtctgacatgctcattctttctttttgcgtgtatccagtgatgtgggaggctctggggaggtgatggatgcacaagacagataaggcctctgctctcacagagcttaccttccgacgaggacagacaaaccaacacacaagatcattgcagatagtgctaagtgctgtgtaggaaatggaacagtctgactccatggaagcgtactttagattggaaggccgggtctccactatatcgctagcaccggactcacagtagatgctcagttggtatttatgaatgaatgaatggccagaggctctccagtttatatgtcctattgggaagtagtgtagggtaacttacccaaagttacccagttggcaaatggtacatttgaacccagacttcagagttcacgctcttaaccgttttgctgtctgatcgctgggaaatactccagaacggtggctgtcactttgccttccaagttaacaatgtgaaataactctgaatttacagagaaccaaaggctttccaattaaaatgaaaaaaccgaaaaaccccaccaaacctaccgtggattgtaattccaggatagtacttgagctttcatgatgttctcatggccttctggggatgccagattgggaaagaagtccaggtagctaaagtgaaaatagtgagccttagtttccacttgagttgtctgaagttctttctctatctgggaggcctggcttggcttctcctgataattggtgggttcattcggttagtccacaaacatttactgagtacctgatctgtgtgtcagatacccagagaagccaagttatatcagctgtactctcctattttccctcaacctcctcccagtactttagggaagggggcagatgagaataacagccaggacaggacaatgatgtagggtagtccagagtgctccaggagcattgaggaggtcaactcctgaaagaggtgtcatttgagctcagttataaaggtcgagtagaagaaggctcaaagaaggaaagggtggggaacatttcagacagaggaaattgcatgcacagaggcacaaacactgagatgactgggctcctttgggatgccactagtagtttttttttttttgagatagagttctcactctgtcacccaggctggagtgcagaggcgccatctcactgcagcctctgcctcccaggttcaagtgattctcctgcctcagcctcttgagtagctgggattacatacaggcatgtgccactacgcctggctaaattttgtatttttagtagagacggtgtttcactatgttggccaggctggtctcaaactccggacctcaagtgatccgccctccttggcctctcaaagtgctgggattacaggcgtgagcccggccaccactagtggttctgaatgacagcaacaaagaacatttgttgtggttgcctggcaagatgggagacaaggctggtgagtagacaagagtcagatctcagtccctttatgcatagatgcagccagtgtccaagttaaaattgtgttgcttctccttgagcagtccttccttgcattaactttctgaaaacccccaaatcccagtacaaactctgttgtctaatatgttatggaaagaggcactcatttgagaaaatttaagattttgttcaattgttttactgaaagatgtgtgaccttaggccacttcactcctcaaagcctggggtggttattcggtcaatggggatgatgctcgt

SEQ ID NO: 27494 - DNA, 1033 bp, Homo sapiens
acagcattaattctttagctttagcatggcactgattttcttaacacttcatgatcacgtggagcagactgtgctttacagcacaacagagcgtcagccatgtgctgaagattcttcgtggtagtggtttagatccaccctgaatagattatcttcatttatttaattattaagtagcttgcttatcaaaagcggcattaaacttactaaacttgagtcaaacgtaaatcttcatagatagtaccatttacttctgaaatcttgttcctgggagaaaaatgtggactggaagttaactttcttttatccacctattcactcctttttcttcacagttaactccttaggggaaaaaatgtatagttcttgaccatgtgcttatgtttgtaaagcaatgatgtttccttaacgtgagtggttgtgacatagatcactgttatcttcataattacctgggagcttttcatccaagtgtggatttactaaaataattagtctgaattgatgcttattaaagagctgaactcttaaacgttaacactatcttgtatttattaaaattgtatgcatgtttccttcaaatgctgaaggcagaatactgagaactttgaccctgtgttattatcgctaagtagttgaaaattaggggaggagtcaagggagtatattatattggttatcactcaaatactacccctaggcatgatttttagaaccgaaacttgaatttttacataaagaattatctccaaaagtgtcttttttttttttttttttgagatggagtcttgctctgttgccaggctggagtgcaatggcactatctcggctcactgcaacctccgcctcctgggttcaaacgattctcctgcctcagcctcccgagtagctgggactacaggcacatgccaccatgcctagctaatttttgtatttttaatagagacggggtttcaccatgttggccagatggtctcgatctcttgacctcgtgatccgcccacctcggcctcccaaagtgctgggattacag

SEQ ID NO: 27495 - DNA, 1077 bp, Homo sapiens
ccacattgccctgcccatctttccagcatcgtctttcctcatgcttgtgtttcagccttttagttctccttggccatggggctttggcatactatgtatcatgacttaccctgtatgtagtcataaagtaacagtttttagctgtttccaccactaaaaattagttgattccttttcctcttgtttgtttcactgcgtccccctgcttacctttgaggctcagcacaggcttcacttcttcaaggtaactgtcctgacattcttcactcacattgtatctgttcctctggctcccacacatgtcacagcatgttgtcattggcaacgtgatacgtgactccctttcgctgttagtcagcaagcccccccaccctttttttttttttttttttagattgtgtctcttctccccacatcccagtgcctagcacagcacagtgcatggtgcatggcagtttctcagggagttcatggtctctgggtctaaggcataggcgaggaagggttggtgtttaggagaaagctgagaaagatgccaggcgcaatggctcacacctgtaatccaaggattttgggactccgaggcaagcgaatcagttgaggccaggaatttgagatgagcctgggcaatatggcgaaaccccatctctactaaaaatacagaaattaacctggtgtggtggtgcatgcccataatcccagctactcgggaggctgaggcatgagaatcacttgaactcaggaggtggaagctgcagtgagtcaaaattatgccactgcactccactctgggtgacagagcaagactgtatctcaaaaacaaaaacaaagctgagaaaggagagaggggggaagaaagaagactttcagtggtgaagagtaatgaagcctgtcggcagggcccgttatgtacagccgatcgatgtagacacagtgcattttgctcagaaaatatttgaagattttccactaaatgctggttgcttttctctcttgtggaaacttatgtttttacttctcctcctcttctatttcagagagtcaggactacctcttaggtgtgtgttcttttacccc

SEQ ID NO: 27496 - DNA, 1044 bp, Homo sapiens
ttgcccaggctggagtgcagtggtgcgatctcactcggctcactgtaacctccccctcccagttcaagcaattctcctgcctcagcttcccaagtagctgggactacaggcatgtgccaccacgcctaagtaatttttgtatctttagtggagacagggtttctagattaaatgtagaggaatatagaggaatgtagattaaatgtagaggaagagagactgcttttggcctaagcagttgggtgagtggtggtttctttactgagatgagaagcattgagtttgagggaggagagtgggactcaagagtgccgtttggacatgagaaacttgagatgctcagtacacttgcaacgagagatgttaaataggtagttgagtctggagctcaggggagagggccaggctgcagatataaatttggcagtcagcttattgttgtgacatagaacagtaaggagtaatttcttctgattaaagagatttggtaaacctttccaaaagagaagacgtttgagcaaaactttgaagaatgagcataatttccaaaggcagagtaagggaaaaatagaaaatatttttcatccaagtctcacagcctttcccctggcctcttcttgagtttaagaagctgctgacctggttgataatctcttatcactggtatagccacttaggttctttattgaaaaggaaccagaacagattacacactaactgataaaccacgttctactgtttctcatcgttcacagattgaaaattccagttggatcatcaaggtgcagaatgctaaacttgttcttctcccctgttctgtatctggtgtgaattggatgtgttgattttcgtatggaggctttttcacatgctgtcatctccactaaagatggaacactttggagaagttttacttctgttgttaatgactttttgcacttgaactgttaaaacaactacaaccatgagaaattgggaccccatgctattttatcactcatacccctaacttgagcatattatctgtcttgactcatcctgctt

SEQ ID NO: 27497 - DNA, 1716 bp, Homo sapiens
tatctgatcgtttctgcaaactcttattccctgcatctcgtctctctcattatggtgcacccatgccagctctccccctgtgcttctcttgagtctgcaagacctgatcttcgaatcaagttattatcttgaagtcaggagggtcgaagccagcattgattgaggggcttctatgtgctggacctgcacatgtactatctcatgtcatttctcttacctgccctgtaagggatgcattgtcacctccattttactaagaagtagactggtggtcatagcatcgtgaaactagcaaataacagagccaagatgtggatcattctgactggctctgaagcccatgctctttgaactgcagcactctggagaaaggaaggaactgggattttggcatttctgtatcctctggatatgtatggtttaaatttttctgttgacatcaagggcagctgaaatcttttgttcccctcttctatctactttccccccctcgatttccatgcctgtatcaaatttgagcaagtttgtcagtagatgaaaattaccaatttttataggaagaatagggaatgcagcatggttttctgaataaaagaatctcagtaggtggttgtacaatgttagtgtgttttctgatataaaatataaatatgtatgggtgggtgtatgtgtatgtctctatctctctcttttttttttgagacagtctcactttgtcgcccaggctggagtgcagtggcgcgatctctgctcactgcaacctccacctcccagattcaagcaattctcttgcctcagcctcccgagtagctaggattacaggtgcgtgccaccacacctggtaatttttgtatttttagtagagacagggtttcaccatgttggctaggctggtctcaaactcctgacctcaagtgatccgcctgcctcggcctcccaaagtgctgggattacaggcgtgagccaccgcgccaggcatctccgtctctctttcaggaagatccattgtttccccatcataggaatttttaaaaagtaaaagcgaactctgcctttgttctgatttatgattgcttactcaaggaagaccaagactttgtggttgtggccttcctttggcagataaagtaaggcacagagtgtggcacagtcatcaagggtcacttggatggtcatggcagcactgctatttgaagctagtggcttggctcctgatccagtgctctttctgtcatactaaactgcctcagtagtgttagaggatgaccccacttatgaatgaatgtaaaaagtaccatcattctcaaagtttaatgtatttgggggaaaaagtagttgaataataaaatgtccatgtgtctgtagactttcttcctagatgagacaagatcatatctgcaccttagaaagagctcctttgttattatttggtatttagctcagtgcttggggggaaccaaggtgaaaccagatgtcattgcatttctaggacagccttgcaagtcagcaaaggaggccagccccatttgctgcagttgtatgtgctgagggaccactgcatcatttattagacatgcatagcttgggataaaaagcactgcctttttccaggagtcctcttggtattaatacagctacatgatgacatcttggtgagtcactagagtcctcaggaggaggaggataccagtcgacaggcagtgcagattatccaaa

SEQ ID NO: 27498 - DNA, 1027 bp, Homo sapiens
aaacttaggtggtaaagtaacagttggacacaggcataacctaaactttttgtgtcagtggattataatatgtgggctttcccaaagagttgctttaggccctggccccttggacctgtgatttgaatccttttctttgtcctttacatgggtgctcgtctcatctcatttttattgtagccccttctgaggtttgtgctttttggatgaggtcacatggtagatagggggtgcagggggctttctgtttgcattcactggcccagaatactgtggttttggcccgttgctccatgatacatactatcaactagagatggttttgaattatttaatctggacctcagcaaaataggtacacttaaatagagattgaagaaagggaggttggaattttttcctcctgagatttcaaatgtaaggaataaagaactttttgaattaacgaattgttttgaggcagtggggatcttcccatttgttctagctttacaaaattaaatctattttctgaactgtacggtgggaaaatatttttaaggtacataatttctgaaaatgtctttgtggtaagctgttagtggttgtggatttttttttttttttagtgcttcagttaataatgagggagttttccattaatattccaaaccatgtttgccagcggatacagcaggtgaagtggtaaaattatgggcccatcaaaaatacttatgcttcctgtaatatgatattaagtttaatatttttataaccttcactgaattctaatttcactaaagtagcaagcatgcgtccatttgcagttcagttatgcacattggttgcctgtgtcccaagcaaattagaaatgcaaaatatctgtgtgtggaggggggcattggaaagagtcattaaagataccgatatttagttacagatacactttactaagtgtaccttgggaattgaaaatggattaaagacaaacacaaaactcccagtgtctgaatctgtattttaaattagaattcaaaggattaaggag

SEQ ID NO: 27499 - DNA, 1040 bp, Homo sapiens
gagggtgggggtgccttctttttctatatcataaccttgctgctatcctggtctgtaatcctagaataccctggaattcccatcttctgctgccaaaaggagaagtaatcaggagcgtatcctcttaggacatgggatttagctaggaaggtgctctcactacagcctggagggatggagatgggtcttggggtagacacagcccacacactgccacagtgacagaggagggatttggtaatgaatgtgttccgttggtagttggcagagtggttctgaaactagtcccagatagtatgcgcttatactttctagatatgcctttaaaataagtttcattttctcattttaatttaatttattatttttgagacagagtctctcagtgtcccccagcctggagtacagtggcatgatcatggctcactgcagcctccacctcctgggcccaagtgatcctccctcctcagcctcctgagtagctgggaccacaggcatgtgcctccatgcttagctaattttttaatttttttgtagagatgacgtctccttacgttgtgcagactggtctcaaactgctgggctcaaccagtccctccacctcagcctcccaaagtgctgggattacaggcataagccaccatgcccagctgaaaacaagttttattttcataaggagagccaaggttacctggtcatccagacattgtttagaggattcctttttgttcagtggtgggcctgtcccacagagtagcaacatggggagcattggttgactttgaggagtcaggcagcaagacttcagggtttatgaagtgtaatattttgagaaagtgagtgtatttaatcttgtcatgttacaaatattgaaatctcagcagacttcagttctttatttgatatacatcagggctttctcattaagagtatttttctgaaattgtcagttataggaagaaagttattcttccagcaggtttataatatcttgattattaaatttaaattgttttagtggaaggaggcaaaaccggaag

SEQ ID NO: 27500 - DNA, 1050 bp, Homo sapiens
ctagcttcttgggtggggaagttgatgagccagtgaatatatagatttctttttgcttttggtatttggctatttttttctccccagggagaaatttccatggctttcatgagagtctcaaaagggtccttggatctgcctaaattaagaaccactgtcccttgatcagaaatttctcaactgttgaagctcttgtccccttaaaaaaaaaaacaaaaacaaaaaacttggccgggtgcggtggctcacgcctgtaatcccagcactttgggaggccaaggcgggccgatcacaaggtcaagcgttcaagaccagcctggccaacaaagtgaaaccccgtctctaataaaaaatacaaaaaattagttgggtgtggtggcaggtgcctgtaattccagccactcgggaggctgaggcaggagaatcgcttgaacccaggaggcggaggttgcagtgagctgagatcgtgccactgccctccagcctgggtgacagagctagacttcgtctcaaaaacaaaataaacaaaaccccaaacaactcaaactctccattattgtaaattgaaaataaatgttgagaccaaaatagtttttattttgaatatgcatttttaaaccacttgggtgagaatcttttttcagagagtgaatactgacctatactctgttttaatgcaagtatagttctgattttagaagactctaaataggtctgggcagttgtggctcatcaaactattgatgtggtgatgagcttggaggtggggtgcctcacagtgggtaggaggtggagattatggaaggaaaatctgagcttctagcttctggatgaggcagttggcattggcaatggaaggttgtattgtactgagtgatgaagtggggaggcagggggtgcttcttttggcttgtggtggtgtggaagttgctcccatccaatatgaaacagctctgaatctgtgctggtcacagcatctcttaggcctctgtttgctaaacacctctaaggccccttccagctttaaaagtatgagttttcttctctttt

SEQ ID NO: 27501 - DNA, 1101 bp, Homo sapiens
gcataaaaagtatagtttgtgggaaataaaacatggttaaaaacaaatatgaaaaaatgtaaatggatttaattaccaatcaacagagattatctaattggatttcgaaacccctagctatgtgttatttataacagacatacttgaattatagggacacagaaagtatgaaagtaaaataattcataaaacttgccaaatactaagtaaaaggaaactgggtggctacatcaaaatcaggtagagtaggatacccaataaaaagcactattagggataaaggtggtcactccacaaaaggtccaacctgccaagaaaagatggccatatcagaacatacaaagcaaacattgctatagctagagggaaatgttgacaaatccatcgttataatggcatagttttgcacaaggcttctgattatttatagaccaagtagacaaaagatcagtaatgacaccaaagcttaaaaaacacaatgaacaagtttaattcctttcatatatatgtgcgtgcctgtgtgtgcatccgtgtgtgtgtgtgtatgcaagtgtgttgtgtaagcatagtgtatacagtggtccccccatgtgcggttttgctttccatggtttcagttacctgcagtcaaccatgatctggaaatattaaatggaaaattccagaaataaacaactcatacattttaaattgagtgctgttctgagtagcgtgatgaaatcttgcaccattctgctgcatcccaccctggatgtgaaacccccttttgtctagtgtatccacttatacactacctgccctatacaatgcaataataggaaaaaacatagtatacataggatttggtattatccacagtctgagacacccactgggggtcatggaatgcctcccctgaggataaggggggactaatgtacacacacactcacacacacatacatatatatattactgtgtccaaaaattagagtatgaacattcttttcaaacacatgtgcaacatttacaaaaactgtccccatactaggccatacaatgtctcaacaaattcaaataattggtattatacaggctacagttctgattacaatgcaaaga

SEQ ID NO: 27502 - DNA, 1172 bp, Homo sapiens
gcagtcagatccggggatggagggagccggagaagaggagtgagaaggccggggaggcaggccctgctgtcttcctgcaggccggcagcctgctggcagtggaggaccaggccgtccaggaaaggaaggggtcaggaggtcgggcagggcctcagcaggttcagacaagtccccagaagggagctgcaggcgccctcgagtccaggccccaagcctggctccggttgtccaaagagggcctaggccaggcctctggtgcggaaactgagtcacagccagacctcagggcacggcctagacgcttacgagccaaagttaggggtagagagcagagacctccggggggtctcagggagtagggggcttcagggcctcccagtctagagccggattggcgagttagacgcttgtagatccaaggttggattggggtggggtctctgggacgttggatcgctacgcaaggattggggggattcaagtgcttagagatcgaagtctgccctgggtagggggagtcagacaattggaaagcctaggtagttatttggggaggggtctctacgccttggcgaagcgcacagctgcatctttttggcttgaggcctgaggccttgtcgagaagcttccgtgaaagggtgggccagccgggccacgagaaagaaagtgaataaatcaggaatataagtgggcggggggcccctgagaggggggtcgcaaagggtgagacatggccaccaggcgtttaaccgacgctttcttgttgttgcggaataattccatccaaaaccggcagctgttagccgagcaagtgagtagtcacatcacctccagccctctgcattcacgtagcattgctgcggtgagtctcctggcggcctctccgacacacggaccgtgtgcactgcggctctgcctgtttgtctgtctctgtctgtctctctgtttaaaaagagaagataagaataataagactaagaataataagatctcttggctagagtcagggggcatctgtagccctggatgaggaagaagcggtgctgtgaggccgcagctccacctctgcccggtcttctcctcacttccgcagcacccccccccccgcaccccccgccttggcgtcactgcgctacaggccgcctgtaatttacatatgttttaacgctaac

SEQ ID NO: 27503 - DNA, 1465 bp, Homo sapiens
cagggcagcatgaaataaaggaaagagcactgagaattgaatctgagaattgaggcctaagtcctgttctgctgcaggctcagagtgtgtccttaggcaagcctttaatcttttcggacattttttgcctcatttgtaaactgaggggtttgggttaggtgatttccagcagccctatcgattcaacagtattttctcaagttctgttttaatacattgtttctcctgactttagctttaatttgaaaaggagaaattcatagtcaacagtgttgtagctgtcagtccaaggttactgacagaaatccttagaagtagccccagtactgtgcaaaagtaactttcacattattatgccagccaagtgcaggttttaaggtagcaactcattcaagcagcttggctttaggaaactgaaatggatttatgaagctaaacaattattcaaaacaaattgtaaagtcataaagaaatgaatgaaaggtagatattgagatgctcttctgatctgatgaaattctgtatggatttgtgtggtttccttcgatctccgggaatggatctaatataggggttggagctactttgttagtgtttactgcctaatctatactctgctttaaaataatgcataatctataattggaagctagcgttaattggtcttagattagtttgaaacataagcacattatttttaataaaatgtgtgctttaggaaaaaggaaattaaggattaactatggttataagaaacctgaggtccttattcaggcttgactacaatattagctaagatttatggagagtttactttgtgcctggctctgggctaagccctttccgtgtgtaagctcagctcatcttcacagtgctctatcaaataagtactattgtttttctcagatacagataaggaaacagattttagaggaggtaggaaactggcccagtgtcacccacctgatggctgggggctgtgattggaactctggcaaatctggcttcagagccccgtgctcacctcctgggccactctggtgttggctgcattttcagaacttgtgctgcagatcctggaaaatggaaggacctattgttttaaaacaattttttttcttgcaataggctagcatctttctttatctcactttatgaaccttacatagtcaattttaacttgcagattgaagattctaagttttagtacaagctgagtctgttggaaaattagttctctgtctttagaatccaagtatgaaatcattatatatttctctttagatctacttgcttttctgcttttaaagattccatgggagcagtgaggcttactttgagaataagggtactttgttggataaaagtgaagcaaacttttattttggcagtaacggaaataaagtaaatatcactatagcatagacctgtgtttccaactcattttgctcaacttttccagact

SEQ ID NO: 27504 - DNA, 1465 bp, Homo sapiens; identical to SEQ ID NO: 27503

SEQ ID NO: 27505 - DNA, 1465 bp, Homo sapiens; identical to SEQ ID NO: 27503

SEQ ID NO: 27506 - DNA, 1052 bp, Homo sapiens
aaatagtgaggcccatccatgagagctgcagtggaataagccccagacacatggcggagtggaaagacccagatgcagagcagcatggataatatgattcctgctccttttttttttttttttttttttttttcaggaaaaataactcatatttatgcttgtgtgtgcttaaaaaattcctgaaaagatacacaagaaactgttaacagtggatacaccccaagaaacatctgggatagaaaacttcctttctattgcaaacccttttcttagggtggatatatatttttaaaccatgtgcatgtatactttgccactaaaaacaattagttaaaaaaaaaaaacaccactcaacgggtagctgactgagccaggtgtcatggtcatgcctgtgtgggggtttcctttcccattcaggaacctcactgccagctccccgcctgggcacggggccctggagagggcttgggggcttggagagcaggcgttctgagttaaaatagatgttgctactggctgaacagtttgaagatatggagcttatgacctcaaaaggaagtgtataggatgcgagggagggtaacaaattatggaaccacttaggttgaagaaccatttgaataatgttccaaggaggggcacataagtggtcataattacttcggggtctgctgtctgaaccgatttccagtctttcctacttcctttttcaggcagcaagttccagaaactggctactcactgcatgaacttggcaggcccttttgcttttcttatgtttcacctctaagggcttaaaagggagtcttcacgctctgtgatcagaggccctgcgtagagagcactatctcctccacgctcaccccagtgctattagaaatgcaggttgctgcctcatcgtgggtgcccacggccacctcatttccttgtgcgtttcacttgcctcttttgctcttttgtgcagtgccgttatctttttcatgaagtgtggcttccacaattgtctgtgacgtacattttatttacctcgtgcattcattccactcgtttct

SEQ ID NO: 27507 - DNA, 1052 bp, Homo sapiens; identical to SEQ ID NO: 27506

SEQ ID NO: 27508 - DNA, 1052 bp, Homo sapiens; identical to SEQ ID NO: 27506

SEQ ID NO: 27509 - DNA, 1048 bp, Homo sapiens
tttcccttctaattttggcaggttattgtgtaatggcaattggaaccactagcgttcaagtagaattaaattgttgttcaccgttaaaatctgattagggcattttattatcttgccagcagggatttgggtcctgatccccctgaaaccaactgcagaatggagtgttcaggctctggaagatccagttacattaattactccagtggttcccagtgaactgctatctcttctaatccagcatgtttccaataaaagctctgttcttcctcatagcccagtgtccccgtcttccaatttaattgtttaagagattaaacaattaaacatcttccccttgagtccaaatttttaattttaggtggtagactggagtttaccatttcctgctctgacccatagagatgtggatccacgtttatagacgtgatagtcaatttgcaggtctacttatgacaggggcgagcttacctggtgttctctgcttacttgaatccaagtacgtaggcagcaaatgggcgcagagcttctgtgctgctcagagcctctgtccactggaccatagatttcttagggccccaggaagtccgaatatggcatttctatggcagctgaaaccaataaggaaacctcagtctgtcagtacttctttctcgtgagctagatgtgatggcactaaccagcattctgccatcgagctcctgacactgcttgagggtgaactccagagccctccgtgtgtacctgcagcacacagggaaggaaaacatcatcttatggatgatgatgtctgtaatttgcatatctcatttttgacgttcagttttcccagttgctattgttgattgtctgtaactgtcatttattacctagggtacagtccttgacagaattgactataacgttgaacagtcctgtatcaaaactgaagatggtttgaaacagcttcacaaggtaatatgtctttcaagacttgggaatcttaggaactattttcaaataatcaagaattggtaagagggttcttttccaccataacgatcttcag

SEQ ID NO: 27510 - DNA, 2473 bp, Homo sapiens
taaataaaaactagtgaaatatgttttgtaatataacacagataaaaggaaaagctttctctgcgggagtgagcaaatctagtgggaactaaaaattttgttttaggttctactttataaatcattttgagaggttttacagtatattatttagtattggcttccctggtgttctgggttacttattagaaaagtcagcgtgctccatcttccctccagccacaaggctgtaggcagcacgcgcgtgctcggcagtcggctagtctaagggtgattgagcgtcgggagctgctccccatgaccggactctcggtgctgtccccgtgcctgatgtttcctcctggtggatgaggggctcctccaggtgggcgggcaggctcacttaggaaacaagcccaccgcgggggatggagcaggagagattgccattctcgccagggctgccttcccgctgtctcctcctccctcctgtgccatagcaaggtctggaagaggcagcgcatgctctccctggacgtgcctcccggcgccctctgaactctgctgtcctctggctctcctttctcagtgctctgcgtctttcgccagccaggtggggccctttggcatttctctagcaggcatgatggagttcccgctcctgccgagcttccaggatgcggtgttaaggtgaagagatgtgcagggtgcagcctcgtccccagattgagcttggagggctcctttgctgtatcgttagcggcactgggaggacgcgcctcagagggatctttctgcatatgacatccatggggcacacgtgtctgtttttatttcaaaggatgagtttttgtttccaaatttaggggaggtcgaaatggggcctcttccgggtgtctgttgcctacctgccaggtacggtcctccagcccgttgtttccttccgcggtgaaggaactgtgcattcgctccaggaacacggaccgggaacaggcgacccgtgctgcaggggcacttgccacggcctgcaggaggaaaagccgggagaagcaggcccagctgcacccggaagcatgagctttcacttccctgtcaggctttgtcttagtagtaggtttccaacaaatccatttccacgtccagggtaaataagcagcaccaggatcatggggctcttccactcctggtgattgaattccgtgggattgattggagggattacaatcatgtagcctgtagcagagacctcagtcactgtgcagagagatctggaagcctcattctggaaacgagtgggacttgatttgggattttggggaaaatgacggccttttttccctcctctttttgtaggcagaacagtatcaaaagaagaatcggaagatgcttgtgattttaatattatttgtcatcatcattgtgctcattgttgtcctcgttggcgtgaagtctcgataagtggcattgggttttcgtgtgtgccgcgcgtgtggatctcccgggtgtgaggggcttggcctgcgccccgccagctgcccgcagaggtgcagcctcgaggaatctgagggcgtcggggcagcgaacctttgcatccacggactcctccttccctagtcctgctcaagcggtccggggaatgggtttttgtttttccttcattgttgagaatttaaggacctttgatactgctgcacaatagagattgagttctgggatcagttataatatatattttttttagaaagagaaaatgagctgagagtttacaggcactgcagaagctgttcagtattatatgtgtatatgctatttttttagcagccatgtctgagcagaatgttaacataatttttggaaaaattttctttaaaccatctggtttttaagaaatttggtaccaaaaattgatgagtagaggcaaaaatgccccttcatctttctctatatattttccagttgaaaacaaactaagaagtcctttaagaatttataatccgttccccattaacttaatttagcttttccatcactgttaatgatcagagtaacaaagtgtgaaaaataagaaaccatcattgatgttaattaacacatttagatgggccagttaaaacagcttcataagttttaaattaattgtaaatggaatattcctcatttaaaatttttgcactgcattttctactgtaaaccaaaagaggttactaagcaaaaccacctaaatttaagttggtgatttaaatgaatctcacattaaaagaaagcttgacagtgttatgaaagccaccagactcagccagtgtgtccccatgggtatccccagccatccttgctcaatccattacttatatactaactacataatgacctgttcaaaccagactctatttaatgaactgtgaatttacacagaggccattttaaatgggtcaccccatttaggattagtggatctcaaattattaaccaaacatcactccatttcaaagtaaaa

SEQ ID NO: 27511 - DNA, 1032 bp, Homo sapiens
tagtagagttttaatggtctttgtgtaaattttaatggcttttccattgtttttgcttctcttaaaaagtttaagaagaatatgacctcattaaatgtgctgttttatttggaccagtcacacaaaatgtctctctagagttgactttaaagttgtttacagaaatttaaactcaattccagagattgaagttgtccaaacagctcatgggcttagtgtccaaacccctgcccagccttccctttccaagttggtgccacctccaggtagccattggtggttttcctattactgatgtggctgtggaatgataaggtcctagaggggccctggcatttcaggaagcggacctggtattccctgacaaacattgcttaggaaagagggccggagaataagaagccagcacctcatcagtcagccctgcaatgtgagacttccgtagctgttgagagtcactgcaggtgttctttcatcccatctgattttaacccatggttgagacgttccaagttagatctgctgctcttaggtgtggggctgtccacattagggaacttgcctcaaaaacagtccacagtggcaataccggacttctgttcaagctttttaaagtgctgagccttacaaacccctgaaggaaagtgaccctttaagagaggatcatctttttttatatttattttcaccaaatagggtgatgagggttggtttttgttccctcaacccatttgggtaaaataacggatctgattagaaactgttttaaggaggggctgggctcggtggctcacgcctgtaatcccagactttgagaggccaaggcggtcacgaggtcaggagttcgagaccagcctagccaacatggtgaaaccccgtctctacaaaaaatacaaaaattagccgggtgggacacgcctgtaatcccagctactcaagaggctgaggcaggagaatagcttgaacccgggaggcagaggttgcagtgagccgagatcacaccactgcactccagcctgggtgacagagcga

SEQ ID NO: 27512 - DNA, 1060 bp, Homo sapiens
gttttccaaagctcctgatctttcccaagattgtaactgaaaactgctgtctcttgttttgttcgttttgggggtggtggtgctggctgggccatgcttgtgaagtgatgtgtgtctctgatttaacggattcactgttttctctgctaattgagagagcgttatttacattatttatttgttttgacacaagtgctttcagtgttttatcctagctaatggcttcttaaaggtaataaaacccttccaacgtaattggtcagataaaactttttttcttgtatgcttaaataaagcaattagtgaagcacttctatccaaaatgacttttttgtccttttttaaaaccaatttactgttactggaaactttttgtacaataaagcaatcacgcagattaaagaacatcctgcaatcctagtattaattttaacaatgggttcatgttttcttccagtgcatttgtgttaggggagggcttggccagttttgtgatcctctgggcccctgactctgttttgtgcctgaggcctttgcctcagtgtccgaaagtagatctatctaatggatgctttcaaagggacaatctatttactatctgatatacaaaaagaacaactgcctaaaaggcagataagtatttttcttatgaaaatatatgctttatatacataccaagaaacatttggaaatctccaaataaaactgtgatgtgccttgttgagaagcaattcttacacacaggctgtaagagacttgactttctaaatgattttgtttcctactctgttacaccaaaaacttgagagacaagtgtctgccagtttaactcaaagccaagactatgtttccccttgattgtgcctgtcctggggtcctccgaggaggacctttgtcctgaaacttgactttgatgcatttgttttgctggtgggagatgtggacctgagtgatggtaggggtatgtggtttcatcaccagaacctatacaaacaaaaaatagcagctgtcatgccaggtctctttggcacccttggcgtttggtcctgaggtgttgcgg

SEQ ID NO: 27513 - DNA, 1034 bp, Homo sapiens
gggggcaggggtgggcaagtggttctggaggagccgtgtggccagccctctgtggccgtctttgccgttcacccctggttactcctccaacagagggtctgtcctgcctctgggacaggctggctgggaatgccccagcaggaagactcttctgagcttgaattccctgttcacaggaagccacttgacaaatgatcacagattcatcaggcagcagccgtgagtgttctcagcactcctccacctctagaggtgctgcggcctctagaggtggaggagcacctctagatttgaggggtgctgaggacaccccacccccactctggacaaagatccccctcccacaagagctccagcctggaggctccactgtgaacgcgaatgtcctgcttggccttcacatatccttgttggcctcttagaaaggaatacgcctctgtctgagccacagaatcaatcctcagggtaatgcatttacccagagaataaaatcagcatccacgtgtccacactggtaggaatagatcactgaaggaataaatgaatgggggagaaccgtttctcacactgaatcccagtttcaggctgcagaggtagtgatggaaacaggaagtcgtcaccccacagccaggcttcattccaggtgagagtggcccacagtgctggaactggagcatgagagtgggatgggaagaggacagtcaaatgctctcagagtgcctctcgcagctttatagtggtgacactcacaacccagcctaaccaggtgtcccagggcatgtcaccagggcagggacagagccacctgacatgcctccagaggcagtgtacagggaaggacagagcatttctgcaggattcccaccaaaaatgcatggcctgcctgtagtcacaaggacacgtcagacaaacccagcactgaaagtgccaaggccacaaaagacaaagccagactatgcagtcgcccagattaaggagggcaagcaggccaggcttgatgtgtggtctgatctgatctggacgtctgaggagca

SEQ ID NO: 27514 - DNA, 1034 bp, Homo sapiens; identical to SEQ ID NO: 27513

SEQ ID NO: 27515 - DNA, 1034 bp, Homo sapiens; identical to SEQ ID NO: 27513

SEQ ID NO: 27516 - DNA, 1096 bp, Homo sapiens
agctgccccccccacccaccacgagcagcgcccccccaacactattttaataaaccattaaaaaaaacacattttcctgctggctggccacattgagagtgctttgtgaaaagaaaaaacaaagacattcacaaatcagataaaactggagaatgacatttgtctgtaaatggcttcttggtctggaaatggcgtggtttctttttttttttttttttttttttgtcctcctcaaggtgggaggggggattgagagtgctctaaggagacttttcctccaggtgggaagagataaaaagacattaattagttgtttatcaagtgacatttagttgtttggttttgggttttctttttttgattgcgatttttcctctgattaaaaaaataataataaaataaaaaaaggttaactataaggagatggcctttcctccttttttttcttaaggtgctgttttgggggaaaaaaatgtaatgaaatgaccaaaagaattacacagcattaattaaaaatggaagttttccacttccttgataatttggctatctgaataaatttgtgaatttgctaggttaagacctagttcgtggtcacatttcaacaaaacagcttgagtataaagaaaataataaaaggctgttcttatttattttcctttggtggcttttggtttgctctttttgcataggtcatgactttgttctcctgggtccagatttataaaagcagaaaattactaattaagtcaaaataagtgtctttggtgtttatgcatttgcaatttcagtaattaaatggtacatgtgttgctgtcttgtctaaaacttttaaaggcagaattatgctgttgggatattagtatgcgtataacttgatttcaaagtataaatctggaaaagtctagaatcttttctgtgaatgctatctcagtactactttaagtcaagtgtgatgctaatgatatcttaaaatttccaacaccttttgtgcagtgatcacaaagtctccacttaatttgagactgttactcagaacacgccttgcgtcacgggggctaatctaagtgtcctagtctatatgactacattacat

SEQ ID NO: 27517 - DNA, 1050 bp, Homo sapiens
tggtctccccttttcctcagcaacatagttgtacccagagggaatttatctttagaaagatatagtttgtgaggaaagaggaggatggataagtggataaaatgtaatgcagttttaggggtggatttttaagtagcccaaggggtaggaaacctgcacagaaagaagctgcgttgtgaaaatgttgaggaggaaagtgctgcatcgctacgtgatgtggaagagactgcagtgtctgggcattgttgggaatcccgggtattttaaccatgaaacatctgacaacaaattatgtgtctagatatgtttatgtgtgaatgttcatgtatcagggattcagtttcacagttttaacttcaattttcttgtttaccccacaaatgacaaaattgcgtcattccttctctttgcccctttccaacaccaccccacaattttttaaacaatcaaaagaaaaattaaaaccagcaaaccttaaattcttgtttgttatttggatggtgaaatactgcaggtagacactgaattggacattgatttccttttctctgcgtcgaaatgtcaaggaaagttgcaagtctgtgattttgtgtttggttttttgcatgttgcttctatggaaaaacaaaacaacaacagcagacctccctgcccaaagtgttaaaatgcctccttcataacctgagacttactttcattttctaggtgctggagaatctggtaaaagcaccattgtgaagcagatgaggatcctgcatgttaatgggtttaatggagagtaagtgtcaaatctgtgcaggggggcaccaagtaagaggaacagactttatactaacctttaggaagtataggtgggctttgggggctgggcagccagttttcacttaatttttcctgatttacatattagaaaatcctgggaagggctctttagggtccctcaccccccacccccttggatctttggtgcaacaaatactactgatgaaagcaccagtgtttgtgacaaacatctccctatcccaagaaaatcgtgcctggttgcagggg

SEQ ID NO: 27518 - DNA, 1071 bp, Homo sapiens
tcgttctcgtgtaacaaaacgtgtaaaaaaaaaaaaagaaaaagaaaaaacaaaacaaaaaaactaagttgaccagtctgttttcactggtatgagagcattaaccgcactagatttcaagcacctgaaggcactagtttgtaattactagctggttggcacagtcctgttccctttcttaaacttggattcgattgaaaatttaaccttgagttgcttcagcttccatttcaaaaggggagttggagtcaaggtggtagcgtttaattataccaaccaccccccaaaaaaacaaacaaaacaaacaaaaaaacctttactagtcactaagcatccaggaaacaaaggtgaactttttcacctttcagagcaaggcaggcagctccttatagagaattctagaatttgttagatcaaataattgtttagagaaggatgacatcacccatacgaatagtcctgttagttgaggatgctttttctactttaaccctgaattcagaaggattggttgggatgcacagggggcttcttcactcatctgattatgactctcaatgggttatcaacatgcacatacgtgctattgagtaagtcagcatcacttgtcaccaaccaattccgaaattaattcttgacacacccctcgataaagccctgccagcggagactgccatcctgacaataaataaataaccctgagacagacttccaaccatgaatctgtcatttgaagaaaaatcttgcataaattttccccctgcaacttgcaggagtacttacttattcatgagagtagttaagcaaaaataatttgaccatgtatcctctagataaatattttgatgaaaactggacatggctagcatttttcaaagatgcagcagccactgtttaccttagcttgagtcggatggaagctaagtcacctttgaaataaattactgacagcttcattacagattgccctaaaatttaaaaatttttatagaaaggattctcctccctaagcgagccagcctgtaacaccaggcaagggttttaaaccagaacttctcttttctgttttct

SEQ ID NO: 27519 - DNA, 2132 bp, Homo sapiens
cgcacacacagccacacgcgccgcgcacacacacacgcatgccaggtaaccactctagctctgctgtgtatttagcatgcagtggtggagtggctatttctcatgagaccatccagaaccattgacttagtttagggcatctcaaagaaacagcttctgtggccggggaggggaggggcaaagatattggggtctggggacaaagtaactgacacatgtttgttcatctgtttcttttagaatataatatccctagatgatggctacagtttctcatcttcccggctatgtcctatcacaatttgcatgctggaattgctcggtcttaggaacttctaataagaatactattctgttatctgaggggggaggggggatggggcccctgctacctgaccttaaacgatgattgaaaaaacgaaaaatgaactgaaatccttaattggcagaaatgtagtatgacaactatccaaaaaggcatctctataagaaatgactaattgacaatctgctgtaccaaaagttggcatttgagcaagatatgacaagtccttagtgagcaacctactgtgtactagatgtcctgctaaacccttgaaccctactaataccttggcctgcacgtctctctcactctgttctgcaagtcaatataagtattaacattcgtgataaataaaaattctctgcatgtttcagcaatccctgtatctcgcgtctgtcttctgtcttccttcctttgtctgtcttttcccaccaaagcacaaggattaaggtggagacctgaatagcttcccccaccacttagttagctgaagcggggggaggggaggagctcttaaaaactgaacgcatcccatctgctgtatacatagaagggggaggaggaggaaccaagaccctaaaagtacttccagccttagtcccaattttgtagcgaatcagaattctagctaatggcatatgttttgcctttgttgagtagtttaaagacatctaaggaattttctctgaatttcacaatcaacgttaaattcattaagcaatagtaaaagtgatgataaacccgccaacccccagtataatatctccatctacatagtaattgcttcaatggaagaattttatgttttagtattacacacccgaattagattttagatttctattttagctgttttatacttgatatactcccacacctattcacatacgtagatgaatactgaacacgttctcaaaatatccgtattttaagacgggaagttttccaattatcatactactgcttagaccaaaatatcaaactgaatgaaagaaacttgtttctggaaatactttctcttgctgtatgcagatttggatatttagtacccgaatgtatttaattttactattgtggaacctcaaaaccaaaggttaatagctttcattacctgtgaagtggagcctgcttttaatgaatgggaatagatttgccctagggggttttgggtaaattctgaattcaaaagtgaacattggggaccatcaaacacatgtccttttaatttataacatctaaataatcgatgttagactgtaataccaaggccggggattcttaatttcagaaatgagctttgattctgcacatacaaagcagacagtcgcacagagcggtcaggactcactccctttcactctaaggtggttgctttaagagtctgggggccagaatcagatttcagatttgtacacaaggcctgaagctcgctcacctccctgtcatctgtgtttctgagattctccggacctgcagcacttttacttaaatggccctgaggggattcctggcaacatctgtcccccctccccaccccagacaccccccaccactaatgagcgtggcccctctgaacttccccagctcttcacccaatgtagaagagcagtggtgcagtgacctgtgaaaggggcttcacgtaggaagggggcgagatgggatccttcagcaggtgaaggcccagaagtacacagacatttattcagaaagaataaatttgtaagtataattctttgagaaaggaaagaccaaatgatttgtggaaggcctgtcgacaggcccgcacttgaccccaccgtccgtcccc

SEQ ID NO: 27520 - DNA, 1050 bp, Homo sapiens
ttgttgatgattcctttcttagaagccaaccagttaccccactggcagaaagttctaatctgattcaattgtttatttataaagtccttaattgcattttttttcttttagtgcagcgacattattttacataaacatttaaagcctgttagagcaaaatgatgatgagtttcatagtattcctaattagtaggaagtaattaattgaattgaccctaagcatttagggaaatagggctgtgctcacattttgaataatgtaaaaatactatattttattgctgtaattttaaaacataacaaagaggaatggtgaagacatagctacgcctcctctctccttggtagttgttgattgatctatttctgctctcaggtaagcgactctagtagctgcctagtgttactagatcctagtgactctaggtagagtttgtttttgtgttgtcttgacttttgaactctatttcatatccttatttattccttctcaccgggtcttgattcaaggatggtaagtggtcaatggattttaaatcctaaactgtacacctaagcagtacaataccgtggtggggttattttcaaataaaacaaattactacctgcgaggaggacaggttaaggcctgcagtagcaatgggaaaagcatctttctccaaagtcactcataaaggtgggctcacctggttggtgtgttggcaaatgaagaagggggaacttaaaacacagactttattgcacaactctacctgatgcccaggctgcttcccttgctgcctaacacctgacttaccattgcctcagggatcgccctctgtccctgtcacccaccatggtctctcccagaggacatcgtacccgatagctagaaagttgcctttgaaatagtttatggcttccctcatcttgcacatgatatagcaagcatgtggtggtcagggttatttaaaaaatatgtaaacattattattatttttttgaaacggagtctcactctgtcacccaggctggagtgcagtggtgcgaccttggctcactgcaacctct

SEQ ID NO: 27521 - DNA, 1118 bp, Homo sapiens
cccgtggctcaaacagccctgcatctgccgtggccggcacgtttctggttgaactgcctttatgttaaagttcagatactggtagtgtgcccatttcttaagctgtctatttttatttgttgagctggggtttggctggctccactccagatgtctctctcacaagatttggtgctgatgatctatttatagaactgtggttctgttgccatggtaacatgctggaggccagggcggctggggagctatttctggactggtgctgtaatgtaagattgattgggcaagttagtatatcctctaagccagactaactctgaactagtaaaaaggaagaggggaacagaaaacttaggcagtttctttaaataaacttttctctctttatgattttcttttctcgttagcccgctttaaaacaattccaatctctacatgcccctccctccaaaaaataactggttttaacattaattttccatattaattaccccaatctttcaaaagtaaattttcctgtgtgtctagtcaagcaacacaaacaagatgctttttttaatgaaaagcgtaatatctggagtgttctatttcatggaccaaacagaacggaagagaactttgtgtttgtttcctgttcaggatggctagggcgagaagggcccctttgtgccaacctcttttgttctctttaatcaatgagattcttaaaaagtaaaaaggaagggatacagattctcagtaactaaaacaatctcgtgtgcccttgaggggaaagtccttgatgtttttaagaatgtcactttattgttttttaactgaatgatatagaggtatacaattttcaaactgtttgccattttaatcaagcaatttgaaaattaaaatgtttttgtcaggcattaccaaatggcacagaatgtgataggccagcctggttttggggtcctttctctactggttgatatgcataaaaccttctaaaaatcaagaatattgccagagagcaacaggaataaagaagctaagtaaagaataaaaaagaaaaatagaaaaaataaaaataaacacgaagaacaaagccccaccaccgtgctgtgctgtttgtgtggccccactgc

SEQ ID NO: 27522 - DNA, 1073 bp, Homo sapiens
ggatctataagagaagcaagaaaaacgcactcccactaattctcatatggaaaaatcagggttttgaagacttcaggagctacagagatgctagcaccccagctctgcttgaattttaaattacattaatatgtattccctttttatatagctactcccgagcccggagaggacccacgcgtgacccgggccaagtacttcattcgagatgagtttctggtgagtcgagcctgtctttagtttcctctcttgttcctcctctttttctcatggatgtaaatttacttaattccaaattcaggggttcagctacccagttccatggttttagttcacgcacatccagtgtggatttgagctctttgcgcccctctttttgcttttgttttcatatgacatcagaggctggctgacagccgtccctggtaggtgtccccatcagggatagggtggttcctggcgagggtgtcactgacaagtccccttgtttgtgcccgcagaggatcagcactgccagtggagatgggcgtcactactgctaccctcatttcacctgcgctgtggacactgagaacatccgccgtgtgttcaacgactgccgtgacatcattcagcgcatgcaccttcgtcagtacgagctgctctaagaagggaacccccaaatttaattaaagccttaagcacaattaattaaaagtgaaacgtaattgtacaagcagttaatcacccaccatagggcatgattaacaaagcaacctttcccttcccccgagtgattttgcgaaacccccttttcccttcagcttgcttagatgttccaaatttagaaagcttaaggcggcctacagaaaaaggaaaaaaggccacaaaagttccctctcactttcagtaaaaataaataaaacagcagcagcaaacaaataaaatgaaataaaagaaacaaatgaaataaatattgtgttgtgcagcattaaaaaaaatcaaaataaaaattaaatgtgagcaaagaatgatgggactcccgtgagttatttgtggttctgagcaaattcccgtcattcatggttttgact

SEQ ID NO: 27523 - DNA, 1075 bp, Homo sapiens
ttgcccaagtttgtgcagtcagacctagaccccactgatgggagattggggagtctcatgtttggggaattttaatcatgatcctaatttggcccactgacaccagtgggctctcatggatgaggggggtggaccagacgttcatttcatgtttattctgtgactctgcttggaagaggtacagaaagttaggaaaggtgttaggagggtggcaagaactggattttaaaagatagttggtgacccaaattctgttcgcctgatgccatgttacatagtgggaggtaggaagatgtgtaaggaggccaccgtgatgttcagtctggatggtggaaactaagagctgcagacatgcaaatagatgagtcctgctacagattgcaaatggggagtggtgagaggtcagaacggacaggggaagtgggaagggcacgctcttgctagagctggggcgttttttcctgaaggagatgggaatctttaagcaggagagagacgtcagttttgtggcttacaaagatcactgtggccacggtgtgaaagatgattgaaaggaaggaataagactgagacttcaggggaatgttgctactgcaagcatacaaaaaataaggaagagcagaggcaaatgtggaaagaaggaccaccttggatagacagatgggagatggaactgatgagtctttgtgacaggatgtgggggtggggtgagggagagaagctgaggatgattttcaggtttggggggtaacaagtagatatatgaaggatacctttacggaaatatgggttgtaggaagaagatctgtttctagggaagagatgtcagttttggacctaaagagtttggatacttgtgagacatctgactggaaatgagaatggaatgttggatacctgagtctggagcttaagagaggaaagacggagagagagatccaggctaattctagattggtgagcaggtagatagcatgacccaagaggtggtggaagaggcaggtaggtgagtgcccagggtggaagcccaagagaacagacaacgtgggaatgaagctcggggtgaagtccggcc

SEQ ID NO: 27524 - DNA, 1028 bp, Homo sapiens
aatttaagaaactatactttcccccatggaatggtcttatacccttgatgaaactcaggtgaccatagatgggtggatttatttctagacacacaattacattctattggtctagaggtctatcattatgctagtaccacataatttcaataatgtaggtttgtcgtaaattttgaatttgggaagtatgagttctccaactttattcattagagttttttggttatgctgggtctcttccattttcatatgatttttagggttagcttttccatttctgcaagaagaccattaggattttgatatggattgtattgtatctgtagtctatttcagggagtattgccattttaacatatcaaatcttccaatccatgaccatgggattacctttccacttatttaggccatctttaatttcttgcaacaatgttttgtagttttcagtcttatacctcccttggttaaatttattcctaagaattttaatctttttgatgctattgtaaaggacattgttttcttaatttcatttttgtattgttaatttctattatatagaaatacaactgatttttctgttgatcttgtatcttgcaactttgctgaatttgtattagcttctaatgattttcttgactctgtaggattgcttagacataagatcaaatcacctgtaaggagaaatagtttcgtttctcccattcccacttggaaatctttttctttttcttgcatcatttctagatctagctacaacttctagtacaatattgaatacaagcagtgaaagcaggcatccctgtcttattcctggtcttggcagggcaggggggcttttagtatttccccattgagtattatgtaagctatagggcttcatacgtactctttatcatgttttggaattttccttctacttccagttttttgagtgttattataaaagggtattggattttgtcaaatgctttttgtgcatcaactaagaatatttctttttcttccctcattctattgatatggta

SEQ ID NO: 27525 - DNA, 1047 bp, Homo sapiens
ttttatccctttaaacaattactgtatttgtttttgacgtagaggtttcaattttttcaccttgggggcaaatgaaaaacttggcatttttcatttgggaacatataatagcttgtaaacttttcagacagcagtaaatgtctgaaaaaatatcaaaaacagcataaagacaagattatgtagctctaattatacgtatataattataaaaaacaatgtgcaagggttatattttaaggtcttttaaaatctgattttgatcataccaaatgacataatattttttatggtagccttttactttcaagacttaattttcagacttgtacaagttccttcttacattctttccctctcacaccatcctactggagaaagcatacttttatgctaagatcttactttaagctttttatgtgaacaaaagatgtacatatagtaagtattacttccgtagtcctcaaatttactataacttttgtacttagtatatgttttatatttggaaaacagcactacgcttagttttcctgtagttcctgagtgatgtctgtgtgttccttgcctgcccttttttgtgagcacagattagtctgttatccatggctggcacttcacttatgatcctttctctgctagatttttatgcagctctctatgaagtttcatggcccatagatattcaaaagcaagatattctatacatatgtgtatatgtatatatactccttatgttaatactaaagtgtttatgctgagttgctgcctttccccgtcatgtatccatgtgcatgctcttagagaccttgaatggttgagggtaaagtgatttattagtaattctacttgccttgtgtatgtctgagctgaaaacaatcgtgattaagaaatttagaggtggctgggcgtggtggctcacgcctgtaatcccagcactttgggaggccgaggcaggcggatcacctgaggtcgggagttcaagaccagcctgaccaacatggagaaaccctgtctccactaaaaatacaaaattagccgggtgtggtg

SEQ ID NO: 27526 - DNA, 1029 bp, Homo sapiens
taatcacatgtgtattttctatcatttttccccttttgcacttcaatgtgggtatttttctattctatcatccagctcatgagtcctctttttagttctatctaatgtgctgttagacttgtctattgagtatgtaatttcagttactttatttttgagtttttggatgtccagtttcaatttgagactctaattctctactagaactccccattttattatttattttcttgtatatgttaaccatagttctttaaaaatccataccttatgactgtaatgtatggatcatctatggatatgcttctgttgtctgctttttctctgtgtcttatttcatggtatacatgctaatttttgaactttttcttgaatgatggtgcagagcctctctacggtattacagtcttacagagaagaattttattttatttgagtttatatcaggcagttatatcaggggaagaccactcaggctaatcagaatttggttgatcacttcaggactgggtttctactctgtaagacagggtcttttttcttctatttgccgcttttcccaggtatacctctgaacttcactttttcttttttagccctgtaagactgctgaaagccatgcttagtttctccgacatctagaactgtttgtgcttgtctttctaaccttttgctagtccccacttacgcattggcaaatatctcaaggggaaaaccagagtagaaatgctgggcttgtgtctcaatgcttgccttccctccaagatcttggacctatgtgtcctggtagccatcatgtccttgaatataaccttcatctcccatctctataaactgccaaaagctctgctcagctcccacttcatgcttggctttctgctcaggttctcagccttttgcccacataacttgcaaactaaataaacctcaaagtgaaagcaatggagaatactcgtctcatctaaatatgttttctttttctccgggatcttggactatctgtcttcgtttggtagacctttctccaac

SEQ ID NO: 27527 - DNA, 1037 bp, Homo sapiens
tttgtttgtatttctgtggggtcagtagtgatatcccctttatcattttctattgtgtctatttgattcttctctcttttcttctttattaatctagctagtggtctattttattaatttttttcaaaaaaaaactggattagctattttcctgaagggtttttcatgtatctatctcatacagttccactctgattttggttatttcttgtcttctgctagctttggggtttgttcgttcttggttctctagttcttttagttgtgatgtcagaatgtcgatttgagatctacttttttgatgtgggcgtttagtgatatcaatttccctcttaacactgctttagctgtgtctcagattctggtatcttgtctctttcttctcattggtttcaaataacttcttgattttggccttaatttaattatttatgcaggaatcatttaggagcaggttgttcaatttccatgtagttgtgtggttttgagtgaatttcttaatcttgagttctaatttgattgtgttgtggtctgatggactgtcatgatttcagttcttttgcatttgctgaggggtgttttacttccaattatgtgatcaattttagagtgacatgtggtgccaagaagaatgtacattctattgttttggggtggagggttctgtagaaatctatcaggtccacttgatccagagttgagttcaagtcctgaacatctttgttaattttctgtctcagtgatctggctaatattgacattggggtgttcaagtctcccacaattattatgtgggagtataagtctctttgtaggtctctaagaacatgttttatgaatctggatactcctttattgggtgcatatatatttagaatagttagctcttcttgtttaattgagccctttaccattatgtaattcccttctttgtcttttttgatctttgttgttttaaagtctgttttgtcagaaactagaattgcaacctctgcttttttctgctttccatttgcttggtaaatttttccccgtct

SEQ ID NO: 27528 - DNA, 1101 bp, Homo sapiens
tccatgcaatgacaaaaggtggccttcagcagctccaggcacacagcctcccagctcagcaccctcaccagagaaagcacagatccagcaaacaattagaggatggcttcatttaattgcattaggttatgtgaccatctctgcactcattcccatgattagatgtgaaaactattcttagaactagcctgtgggtctgcaccatccttaccacatggtctgagagtagggaaggggtgaggtccccaaacaaaatgatgacagcacacctggaagaaggggaatgcttgctgggcagtgaagaggtgtctttcacattaaggctgagaaatggaaaattaatcggtgatccaagtgaggctcaagaggaaattctccctactgcctattcaattggaattcccctgaggttggtgctcaatgaaactttgttaaatatgttaaatgaaataattgttcaagaaagcagaagatagcaaactgtcatctgtaaggcaaaattgcaaactactggagatcggtacagtggctgactcccttccacctgactggtttgaaaatcaaatgatttgacacatgggctccttggagagatgaggcgccacagcgtttgggcagagttaggcaaggttcccacaagatctgctgcaacccaacactgaaaacccagaatgatccagccttgctccccgtcctgatgtctgccggcactgctgggcagaggaagggctcctgtgttataggcagctcccccacaggcccctgggttgtcctgacaaaggagaggatggcaccagtcgcagaagctgcctgccaactctcacagttgttctgggcagataactccgtcctgacaagcctgacttgccctagagtctctccaaagcaagggctgtggctgcaggagggagggacatggctgctctggacaccctcagggtattgttcttacgtgatctgtggacaagcagatttggtcctttaaactctgcctttacctgtgggctgctatttcccatccacaacccttcttcaccactgtggttccacttaggtgactgcagacctaaagccctactgggagcattgcattttccagct

SEQ ID NO: 27529 - DNA, 1031 bp, Homo sapiens
attgctctgaggagttttacaaaggtgacccagaccctcagccacagtaaaccaggctttcaagccttcctcccccaccgcctttccacccacaatgaccactcaaacacggagcttggaatcctttgaaatgcctggtggagctggctctgtccctgatgggtatggctggtgtgaggaactggggacatcagggagaacgcagaactgaacttgaattactcacatcacacatgagctgaaacccccagaagtttaacaggacattattcattataatttatggaaatatattagagaatttcccaatgtaactgaaaaggtctaaatgatattcaaaggagaatatttaatgacatgttagaaggtactacatttgagagctgtttgttaaagtgctcccaattttgacaaacgtttgtagaagtgtttttttttttaaatcctgagggaacagaagtaataatgtgggtaaaaactttgagtaatatttacaaatgacactgggaaaaataagaaagcatctgacgtattttctcttgtttgcataataaaatcagacatcactggcttatgtacataattatcaggactcatctttataaaaccaataaggaatgttaaatcaagaatttttgttagaattttaagttaaacagatggtaaagacttactagtgccgattcatctaataaaaaaaaatctcaggataacttcatctaatttcataaaatcaaagcaaatagagtaagtgctttaccattttcttttgagaatatatacgtgtatatgaatatatatgtgtgtgtatatgaatatatgtgtatatatgtatgtgtgtgtgtatattgcattaagtacatttacaatgctgtgaaaacataatcgctacccacttccagaacttccttatcatcctaaacagaggttctgtacccactaaacaataacccccattttctccctctcctcagccactgattatctctattctcgcttctgtctctgtgaatttgccaattttagttacc

SEQ ID NO: 27530 - DNA, 1065 bp, Homo sapiens
gcaaagctgcttttgtaactggaaattttactatggcaaacagtccagtctccttacgtgcataactcctggttcatggcaaattggttcatggtaaatttcacacaggcttctgtgccctagagggccttaatttattttaccagtcctattaacaatgtttacattgcttttatatttcactactaaacgaacactgcagtgagtatcccttggatttttatctctgcatacaagctaatatttatgcaagataaacctctagaattggaataattgctagattagaggaaatggccaattaaaaaagtgatagatcttactaactcttcctccaacataatagtaaccatttattatttattatttttatttttttaaagacgaggtctcactctgttgcccaggctggcgtgcagtggcgtgatcacaggtcactgccgcctggaactcccaggttcaagcgatcctcccaccttggcctccccagtagctacaactacaggtccatgccacgccaccgtgccaggctaatttttattttcggtagacacggtgtctcactatgttgctcaggctggtctcaaactcctggacttaagtaaccctcccacctcggcctcccaaagtgctgggattacagatgtcagccactgtgcctggcccatttattctttagatgaccgagttgggcattcagctcatccagggatgggtgtgtgtgtgtgtgtgctggggaaggggtgctggtatcggagcttctgaatcctgaaagtgtcggacggggctgaaccacagggttgagcgtcctgcctgggctgtgaagtttctcctacagatggcgctgttgcctcgcgcctgtcactcaggccgaggggcagagtggtaattctaagacaaaaagaaattaagcagcacgcaagcgggctgccgcatttttatgtttatgccgagacgacccaaatctatgtttcttcaccttcctggctgtacaactcagataactttgtgatccactcttcttcagaaggaagaaagaaaagattctatttgaccgtctttttt

SEQ ID NO: 27531 - DNA, 1036 bp, Homo sapiens
ccggactgtaactaccaggttcagaacatgcttggagttaggttttaaatgtaagtggtaagactgtcctctctgcccgtttgaaatgagcacaggccgtgttgcaggtctctgattcggagtaaagatgagcctggcttcctctgcggaggaggccagaagcaggtgcggagggcttagcagaggcctttgcactcagagacttgcatctcctgcatctttttaggcctggaaggcacccgcatgctcctctcggcgcaaaggttccaggaggtggtgaccttgatgaatctcagtcaagattatgaataatttaggagtaacacaacccagccagagaatgctttcccagacagcagacaggctgccgttcttccaggcgtccctaaatgggcatcagatataggaagactggtgggcacagcagcggagggcttttttcttggcattattaaaagctgacgtgcttctttgtgtgagttgcttgttccactgacatagaattgttttgttgtcactgtagctttagtgtacacataagcaaagcaagctctttaggtaccgtgaaaaagcgatggtggatatttctgtgtgtcttgagcataaattgtaagaaaaccaaacagattttaaagggtttgggggggatggcggggagatctgggtgtttgcagaagaagggactgtggctgggggttctgaacaggcactgccatatgtcccaggccacgtttagtgcacagtgattatggcaaaggtgggaacttgaaggggtgacctggtagcattatgctagaacctgagtggcagtggtcctgggctggacacaggagcctggccctagtgaaggatcttgggcagcggtcagggagcaaaggccttggggtcatggccagaggtcaagagctaagtggtatctgggagccaagaggtcaaggcaaagggcctcctgccagtgtttaatgttggccagaagcaaactcaaggcttgggaggcaggtcagcaaagcaggaaggaatgggccggggaggaccc

SEQ ID NO: 27532 - DNA, 1082 bp, Homo sapiens
gactgagatttcttggtttataaaatgggggtaataaaggtacctgctttgttaagttgtttggcaggttaacagagttaacctatgtcaagtccttaaaagtgcctggcgcctgacattcactcaagaaaagttagacgattatcattgtcctaagagtcttagttttccttctagtatttttgccttaaaattcatctggagtttgtacataaggtatggatttaatgtaattgtttccctatgactagcttactgccccagcatcaggtattgaacgatccatgtattcaccacagttttcaaggctacttctattccatatcagggttccagatatcaatttctgtgctaccctgttccaaggtcctaatttttttatccccaggacaaaaatgcatgtttaatttcatatagacttaatagccgataaccgagtggtcagtactcccttgtacatttttctccaaaactgtcttaatcattcttcatgtaacttacctatgtggattacaggagctgctcgtcaacttccctgaaaaccccgagaccaacactcaaccactgaactctctctcctagacacaccacattaggacatttgtttacctgccattttgtttgtttaataaggttttatttcggaaaatgctcagtttgatgaacttttgtatgtgtcttcactggcaccagggacaggtcttttctgtgtcggtggctcaggtgtcttgggctgtgttatgagagtagcttgactggtccttttcacagggttcctggagctcactggaaccagagaacttcaaaactcaggtactcagagataatccttgcatttctgagcatgctggggacttcctcacaggacaggctgtctgtggctttggtgacaagatcaggctgttgggtaagctctttctgggcttgccccaacgtgtctgccgaatttctggcatgtttctgcttttcatcttctcatcttcctcttttttggtgacattacagctctgattttaactgcatttaggtggatagattctatctcaaaatttctgtcttctaactttagtattttaccaatt

SEQ ID NO: 27533 - DNA, 1022 bp, Homo sapiens
ttcgtgattacctaatcacatcttttaaccatctttttattgaggtgcttctcactttcttatttagaagatctctttgggtattaataatattatgcacatataatgcagatagtttctccaagttattacttcccatttgaccctgcaatcactcatactcatggattctattttggtgcaagccgccagtagggatccaactttgttttattataaatgatctcacatctgttgaattaaccacttcgtgttaattttaaaaataattttactattattttaactgacatattataattatatacagttgtggagtacaatttgatgtttgggtatacgtatacaacataggctgattcaatcaaccaaattaacatacccgtcaccttgtgccattcatttttaatgtcattcttatcacacacaattcatgggtttgcttctaagttttgaatctgtcctggtgatatttgtgattatttctggataataagagactattttaacttactgttcatattttgttaagacaatccacctctgcgcttcccctccctccctttctccttctcttgttttatccctccttccctttctctctctctctctcataactttttggctgactttatccactttttcatcttgaaaaactttaaaatcatattgttaagattcaaaaagccttacataagaactttcattggaatttcactaaatttaaagtttgatatttttacgacatcagaccttctcacttaagactatgatgccctctccatttcttcattgtcttttatatttctcagtacagtgctataatatttttatgaagtcctgtacgtttctttttgagattagcctgaggtatgttacgtttttgtggccattatccctggaatctttattttatttttttaactggttattgtgggtaaagacacgcattgattttctatttattaataggtgatttaatgagcccttgttacgtatctcagtagctcttctgttttcca

SEQ ID NO: 27534 - DNA, 1044 bp, Homo sapiens
atgggtgaaccttaaaacatcatgctaaaagaaagaagccagacaaaaaaggccatatactatgtgattcctttcatatgaaatgtccaggatagggcagtctgtagagacagaaagcagattagtggttgacaaagagctggggaaagtggaaatggagaatgactgctgatagctatgagcttccattttagaatggcgaaagcatcctaaaattagatgatgaggatgcttacacaactgtgtcaatataacagaaagtattaaaatgtttattttgaacaagtaaatgcttatgttgtgtaaatgaaatcttaaagccattagtatagctgatgatgaatacttgtccttcagtgtccatttgtgcacatagagtgccatgttcacttttatatagaatgcatgcatttatgtatattgtatacaatgtaggcatttgtaggcatggtctttttgttttcacttgcatggactactgaatctgagggcaggacctttgtgtgcttagaaactcttgattgatctgtgggtcccacccacagatggaggccaattttaacttgtcaactgctcagaagcaagacagaaaattatcaaagagacttgcaccatgaatacttactcaggatagattaagacagtggctcccagatgctaatctgtggattggtagcatttttagtgatgaagtgtctaaaaattagaaccaagtgattaatagtattgtctcaatatgaatttattagttttgacagccatactatgattatgtaagatgtcatcattacaggaagccaggtaaaggatatatagaaactctctatttttgcaacttttctgtaaatatactttttttctacaataaaagtttacttacacaatctactaccccccaaaaaatccaaaaacccaaactaacaacagtgacaaaataaagacaaagacagaaagaccttggcagtaacttaaaataaaaaactctcttctattctaaaatgatcatcttgatattggtaacgttaaatgttccttttatggaga

SEQ ID NO: 27535 - DNA, 1048 bp, Homo sapiens
ggctaattttttatatttttagtagagatgggatttcaccatgttggccaggctggtcttcaactcctgacctcaagtgatccacctgcctcagcctcccaaagtgctgggattacaggcatgagccatcgtgcccagccagtgtttattttttaatatgtcattggactgtcatattggattgaaatcttgacaaaggagtataaaagaactaacatattagaaacatatcattgttgataggcacttaaaacgaatagacattgtacctccaatagaaatgcaagtccatggaaaattgctacttgggccaggtgccgtggctcatgcctgtaatcccagcactttgggaggccgaggcaggtggatcacgaggtcaggagtttgagaccagccttgccaacacggtgaaaccctgtctctagtaaaactacaaaaaaaaagttagctggatgtggtggtgcatgcctgtaatcccagctacttgagaggctaaggcaggagaatcgcttgaacccaggaggtggaggctgtagtgggcccgggactgcagcactgcactccagcctgggcaacggagcaaaactctgtatcaaaaaaataagtaaataaataaataaataattgctagtcgatgtccctacattttgcactaccctccatatctccagaaacaatcatttgcataaagtagggtccttatcatgagtgaccccttgctccagagagagatactgctcagcaattcttaatccaaactggcccaacctctctctcatggagggtccagagagggaagggtgaacaaatcttgcagatattttgcaactgaatagctctgtgatctgtatgtgatctaataaacttggtggtttatcagaatcatttccgtgacagaatctagaatgctggatttaatgacaaccatgatagggacacagcactgatttcttttagagacaggttccacaatgccccttgagggctggctagtaatgacatgcagaatcggtttctctctgttggaagggagaagcctggaacacca

SEQ ID NO: 27536 - DNA, 1024 bp, Homo sapiens
ggagagaggttctatatgcatttttttctgtgtgcatttccttaatgggtaatcatttgatgagagattttaatgtgtgtggaggcagagatttaagatctggaatgtctgagtactttctatcccattcattcatgaaggtctgcagcagcgtcttcagtttgcacagcatattgagtcccacctacctgataacttcctggacagaactgggttatatcaaaacattatgtgaagtaattaaaaagcagtgcttctcaaagaagatgccagggtctgtttctgcagccagctccctcctccctaccctgtgatgggcacagaagaggtcagttcacatctaactagagcagacttcaagaagcttgctgtggtgggactccccagtggatggtaaaatgataaccagataagagtgatctttgagcaacaaaggaaatagacagacccaggctctttctaagcatacgaggcacagaacttacacttgtcggtgctgatggaagggccatttcaagatggcgccctctccttgcctaatgggacctacagcccaatgatgccttgtatttttaagtagagggaaaactctctatagggatatctcctgaactgcagtgtgtcaatatgcttctgatttgagtgtgttcctgtagatcactgtgtagacataatcattaggcaggcactctatatactgaagaattcaactcttccccagatttttcttttaccttttgccattatcgttctcaatgagagatgtgctgggagatctgtaaaaaatggggtgtcaatgccccaacgtggctcctggtcattggtgtggccatgggtggtgcaagaggccgccggttgttcatctttccatgatccctcatgtctccgcaatgcatacacccggagtccccccaagacaaagggaggtttcttgtcttgctccacaacatgaccgtgacttatctaccatgagtaggtaagtcctttggagggattctagtaggggaaaaatacaatatttctc

SEQ ID NO: 27537 - DNA, 1050 bp, Homo sapiens
cctgctgacttgcttcttgggtgactccatggttttttgcctcagtctaattatgctcaacagtggcacacgtcagtaaaaaccccatctggctctcacatcacaaaagactgtatacgccttgaaacttaatctgtgctgagctgagcacatgctgctaaatcacaggcccccgaagagtcaaggtgacatggcaggcagagggaagaccagccgtcagaaccctcagcaccacggggctacatttcacctttagttgggaggaaactgaaggcatgctttctggtttatctggatgttcagaggaaatgagggaggtctggaaacacacattgagaccaaccctgtgccaggcactgtgtaagaagcacttcccccggaaggcattattgcccagcaatttacacttcatttctgtttgatttagttgatgaccctgtgaaatagaccacaagtcacagattcactgtctaagaatctgcaggccttgtaagcccccaaaatgcttcatgggacaatgttagtcacatgtcgaactggcgctcccaacttcagaacctccctgtgcctttcctgacctcataaaagatttccaggggagagaaaaccccaggcaggacaagaagtttgtggaagcctggattccagaatagagataaatctgatgtcaaaaaaggtgttttaaatttttttcagtgagcaggtgggtaggtgggtacagacatgcccttactttctgagtaaatgctttttgagaatctgtgatgcctgattcctgagctgaacattagagaaacagtgctggtctacataaggggaaatatatttctaaaagtgtggaatcgttctcatttataaaatgcttatatttgatagttcaggatttttgctttttagggtttcactaaaatttaaggttaccaaggattagaattctagttagcacataattctatattcaaaatgtgccaaaagatgtgttattagtgagagaaaaaataattttgtgtaatttagaagttatctgaaagttaattcaaattatggact

SEQ ID NO: 27538 - DNA, 1054 bp, Homo sapiens
ggtgctttgcaaagcatgactttgcatatctattctaattttatctttgcaataacctgtgggatggaaaacacttccacccatttcacagatgtaaaaaatgaggcccagcaggggtaagatgctctcaatcacacagtgtcaaagtttcagcctctgggagtgcttgttcctccttgtgttggtctgaaatctgatttcccaaacttctgcccacagtccaggcttcctacttgctcagcacatgcctgacctatcctgggggacagacctttaggtggccaaagatggcactcacttccctgcagcagtttccttccatcattgccacatccttcaagcatccttcatgcatctttcccacagcctggctttgagtctctccaacattttattttaaatctacctccagctgattgatatcactctgcaaaatttagtatttagaacctcatgccacaccacgacctggttttaaaacacctgaattaagtttacaatgatcaactgtattaactctgtcgctagggttctcttattgcaagctaagtttgtgccagcattgtcagcagccaataatagcatgaacttacacggagatccttgtgcattcattgggtcacagagcgctgttgggtacctcctacacaccaggtcttggtctctaggatataatggtgagcagcagaaaattcagatgcagagcagtagggagggcagaaaggaaggaaacaatcaaactagtgcgtgtcaggttgccactctgtgtgtgctgtaaagggaaggacgtggtgcgctcatcgtgtaaacaggcaggcctggcgtggtttgaatggggatggtgagaagacactcccctaaggaagtggcatttaatctgataggtaacgaatgagaataaagtgggtgaagtggtcaggtggggtggctcacacctgtaatcctagcactttgggaggctggggcgggtggatagcttgagcccgggagtttcagaccagcctgggaaacatggtgaaatgctttctctactaaaattatgtaaaaccagctg

SEQ ID NO: 27539 - DNA, 1048 bp, Homo sapiens
ctgcactccagcctgggccacagagcgagactccggctcaaaaaaaaaaaaaaaaaaaaaaaaaaggaggctgagatgccaagtagcttgtcacatatcacatggctggaaagcagtggaggcaggcgtgcggtctggttctgcatcccagcttttagaaggtctgttgagcttgcatggagtaaaaaggtgctctgggacacctgctatcaggaagccaaaggcaaaactgcacagacatgctccttcaaccagcgcacacggcaaaactcaggccactttggctgctcttacttgttctctataaaatgtttgtactttataacagcggtccccgacctttttggcaccagggactggtttcttggaagacaattttttttttccatggaccagggcagggggatggtttgggatgattcaagcacattacatttattgtacactttatttctattattatattgtaatatatcaagaaatctacacagctcaccataatgtagaatcagtgggagccctgagcttgttgtcctttaactagacggtcttagctgggggcgattggagatggtaacagattgtcaggcattagattctcatagggagtgtgcaacctagatcccttgcacgtatagttcgcactctagttcatgctcctatgagaatctagtgctgctgttgttctggcagaaggtggagctcagttgggaatgtgagccatggggagtggctgtaaacacagatgaagcatggcccgctctcctgccactcacctcctgctgtgcagcccagtacccgtccgtggccctgcgattgagggcccccgctttataaagaaccttacacttacttcactgtaaacacaatttgaaattctcattcttttaaaatacttagttctcatactttaagatatgtaagtttgacaagtgatcaacttttgaaaaagcagcatttaggtgtttggaaataaatggcatgactgcaaggtgtttagccgatgctgtttcttagtgatgcctgtggaaatagctatgttagattg

SEQ ID NO: 27540 - DNA, 1028 bp, Homo sapiens
aggagaatcacatgaacctgcgaggcggaggttgcagtgagctgagatcacaccattgcactccagcctgggcgacagagtgagactctcttctcaaaataaataaaaggggttttaaaatttgttgtggggggcggggaggattggtaaaggctaggaaattcatttaaaaagaagacccaatgtttgtcatggcatcttcaacttccaccctcagggatggagggagatgtgcacttggccttttctagttggacaggtgtgcaggtgagggcaggactcctgggggctttaatcggccagggtttgcctggtgcacactgccaagaaggtgaaaagacgcaggatagggatctcctataggcggtaaagggatgggtcaggtgtaagtcatcacacgctcctaagccctgagcaaatcacccaggatccggtggagatgacattgtcatgacaattctgtccttccttctgccttccacgcaccaggtagaggggtagggcgactgtcagagttcactcatgacacagagcccctctgctgggtcaagcaggaagggattcaggaccgggaaacagatgcttacaggtcattgttgaaagtgctgaggaggggctctggctggctccgggttttctcgagcactgtgtagcaaacctgccaggacagcactgactaccacagccaggacagttcagaagcctggagatcaggagtctgccagtggagtcagcacacctgcttttcacctgtgatcccaggagaggaagcagctgcctctgaggcctcaggctcagtggcctatctttaccccaatgcatgcaggtcagaatgtagctgaacagcagcccagggtcctgccctgctgccagcgggaagaagaaaacagccaaagcaggaggtgatcttacctacccctccacctccacctcgggcccaatttgcatcctgagtccctgcacgggggcctgccagggggacttcacatgctcagctgatgcaggtggaggggaagggagaaggctgc

SEQ ID NO: 27541 - DNA, 1104 bp, Homo sapiens
attctgaaatgggcctcttgtgacctgtaattagacaaaataggtcagaaaatatttttgttgctagttcccagagaggcaggggaagattcctgctttggggagaaaaggaagcaagtgaaaggagggaaggggaagatcagagagacagattctgtttctaggcctgttcctgaggcctaaagcacacaaggtagtaagaaaggctatgggagttatgagccatgaatgaaaacctctctctctcgatgtatacatatatatacgtacacacacacacacatatgtatatatagttatcatatatgttttatatatctatagataacctaatatcaccacaggtctctcttgtatctactcaactactcaactctgccaccgtagcacaaaagcagccatagacaatcaatgaacaaatgggtgcggctgttttccaagacaacattatttacaagtcaggccgtaggatggggaggggctgcagaagggttgaagggtctgtctttgtccctttgggctgctataacaaaacactataacctgtgtggcttgtaaacaacgggagtttatttctcacagttctggagtctgccaagtccaagatcaaggcaccggcagattcagtgtctggaggccccactttctggctcatggatgatgttgcatgtgtccttgcatgggggaaggggagaactccagcctctgcagcccctcataaaggcacccattccattcagagggccccacccccatgactgaatcacctcccaaaggccccacctcctaacaccatcacactgaagatgaaggttcagtgtatgaatttcacaggaacatgagcattgagtccataagagagttttatttggagtgttggaagtgcctggaactagatagaggggtacactgggaatgtactaagtgccactgaattgctggctttaggatggttaatgttatatgaatttcacttcaataaattatttgtaaaaatcaggcaatagacccaatttggcccacaagccatagtttgctgaccccagcaagctatcccttgtcccaaactaagttagatgtagatatctgagagaagttagagat

SEQ ID NO: 27542 - DNA, 1050 bp, Homo sapiens
gtttatatcaggatgctgtttgtacttatttatttaacatctgatggtggcagccaacctgcccattagacagtattaataaaatgcacaatgttaacaaggtatacaggagacttttcgcttatccttatccacttaacccaacacagagcttttaatctgcattcaggtaaagcaagaggttaagaagaagcaagaagctgggcgtagtggctcatgtgtacaatttcagcactttgggaggctgaggctggaggatcacttgagggcaggagtttgagaccaacctgagcaacatagagagaccctgtctctataaaaaaatataaaaaatatataaaaaaaaagctggacatggtggtgtgcgcctgtagtacccagctacttgggaggctgaggcgggaggatcatttgagtccaggaggttgagggtgcagtgagctctgatcacaccactgcactccagcatgggtgagagaccaagatcttgtttcaaaaaaaaaaaaaaaaaaaagcaagaactcaagaactctgggatcagatggatccaggtttgaatcccagctcaggttcttattcactgctcggtttctgcaggtttcttaagctctcagagtgtttgcgttcgtgtctgaagtgagagtcatcttagagccatgtcctagagctgttctgaagattacaagtccaggtttaaccatattaatgatggtcattatcatgattattatatttatattcataacctaagtccaacagatatgggctaagagcccagttctgccttttactcactggtcaccttcatcccagcattctccaaggttgtttgggtgcaccccagatgttgcctccagccccctatctcccgtcagctctgaaatttctgcacaccctgggaatttacttccttacagtccacttcagggctgggtttctcttttccaaatctcacttgctcttgtctctctcttctgacttaaatgtaaaatcaggctcttgtcatctgattcacacacacatatacacactcactcactcacaaaacat

SEQ ID NO: 27543 - DNA, 1035 bp, Homo sapiens
atcagaagcccagggtgagaccagcaatccggctttcatggccagcaggggatcctgatgcatgctcaagtttgagaacaactgggatacacattccacattaccagcattcgtaatcttatttacggagggctctaaatttcctgctaactgaaccactctaaattagctgagaattaaaagaagaaggaatgctattacataaatgaaggctattcaaatctccacgccttgaggaacaacttgagccctggagggcagtggcaggggaggaagtattatagtaactggtggttacagagcagagattgaggccagtcctcctgggtcaagcgcatgcaccgctgcatccagctgcatgatcggggctaagttccttaatctctttgtatcttgtttccttcttccataaaattctcatctatagcgcctaccttatgcagctgttggagggttaaatcagttgagtgaagcatttagaagctttcctggccaagactaagcgctccttgttgttgttagtattatttatctgaattaattttcagttcttctcccatttttaacagatctcaacagtgctcttatcttcttccatagcaacacgtcaaaaaacaaatgcaccatcatcctttccgtttaaattaggaatgtgaccagatttaaggaacagacattcagtttaaacaaatgaaaagttatttttcttgcctcggaatctgaggcctggcagttgctgatgtcttttagtgactcattcatgtgactctcctctaagaccccttccttttagctctgcagagtcagaactgggtcactcgtgggtcagtaggcctggggtgggggatgagaatttaaatggccaacaagtctgcagggactgctgctgctgccagcctgcaggctccgcttaaaagccaatgccttgaatgcatcaggactcatcatctgagactgggaacattgtgccttgaagaaaatcaggatggtgttagcacgagtgaagggggacagatgtgaggtctcaacaggcag

SEQ ID NO: 27544 - DNA, 1035 bp, Homo sapiens
taggaatacttgtgttttttgcacattgattttgtatactgagactttgctgaagttgcttatcagcttaaggaggttttgggccgagacgatggggttttctaaatatacaatcatgtcatctgcaaacagagacaatatgacttcctgtcttcctatttgaataccctttattgctttctcttgcctgattgccctgcccagaacttccaatactatgttaaataggagtggtgagagaggggcatccttgtcctgcgccggttttcaaagggaatcattccagtttttgcccattcagtatgatattggctgtgggtttgtcataaatagctcttattattttgagatatgttccattgatacctagtttactgagaatttttagcatgaggagtgttgaattttatcgaagaccttttctgcatctattgagataatcatgtggtttttgttattggttctgtttatgtgatggattacatttattgatttgcatttgttgaacagctgtaaattctagtaagttctagtagagttgaatttgctcctgaccaagctttctgatgatcttacaagtcactactgtgatctgtagttggagggattatcatggaggaaatgtggatagttcaagctcattgccaattaatatggtttagatctgtgtccgtgcccaaatttcatgatgaattgtagtccccaatgttgcaggtagggcctggtgggaaatgattgaatcctgggggtggatttctccctttgtgctgttctcctgacagtgggtgagttctcatgagatcttgacatttaaaagtgtgtggcacctccctcgtccctcctcctgttacagtcatgtaaaggctgccgctcccttcaccctccaccatgatcgaaagtttcctgagacctccccaaaagccaagcagatgccagcattatgcttcttgtatagcttcctatgagccaattaaacctattttctttataaactactcagtctcaggtatttatagctgtgggaggatgggctaa

SEQ ID NO: 27545 - DNA, 1048 bp, Homo sapiens
gaaggctgaggtgggagaatcaattgagcccaggaattcgaggcacttgagcccaagaatttgagtgcagtgagctataagcatgccattgccctctagcctggacaagaccctgtctccgttttttaaaaagaatagagaaaaagaaaataagaggagtgatcttggctgaagatatacatatgagaatcatacaggtgtaagtaaaatggagaggagattacctagcctgaaagtaaaaacttcacctgtgaatggggtctccaatctctccttttctctccctctttcttctatgaatgcagcatttactgtctgggtcaaagaggatgtgtcctaaaaggagaatgagaaataaaacccagaaggagaaagaaaacgtggagaatattgctgattgcagccaagggaagagaatgtttccagaaggaggttaccactgcgaggtcaagtaagggactggagaatgcttctgtatcttggcaggtggggccattggagggagtagttgtgaccaggtgaagggctgaggggcagagcagagtagagtgaggagtaaatgtgagataagaaaatggatcaggggaatagtcttatatttcaagagatgacagctagattggacactcaagtaaaatgtgagaaattttttaaacagaaaatacttgagctatttaacattgatgaaaatgatccagttaaaatatgcaagcaagaaagggacatgaaaattgcagagtaaagacctctgaaaattccctcttccataaaaaaagaaacttgcagaaaagatcagaataagctttttcagaattcgagaaattaaccaaagcttgcagcaatgcaggaagggtttgttttttccccaagaaaagtggctgaatctcagtaagaagattgagctttgtggtattttaattttccattgtctcatctcccactctccaattccataatgatcttgaaaaatagcagctcacatccccagtgcaaactgaaagtcactagagaatgcagaggggagctagaactcttcaaagcctcattc

SEQ ID NO: 27546 - DNA, 1048 bp, Homo sapiens
agaaagtggcagcaacagctagctgcccactgtgtgtgccaatgatggagtaggaagctatgcaccacgttctcacagcctctgagtgctgttgctccttgagaagggaaggcccattctactctgtttctttctgcacagaattagatgtgtcagtgaattgctctgaggagtagattagtgtcagttccttgggtcagtgcagaagggcttgtgtaaaagaagaaaggataaatagccagctccccaccctgtctttgggaatgcactttcagaactctcaagtcagaaagcccatttcctggggaaaccaaactcaccacagacagttaatgctcaaccagatttcataaaccctgttgttttcatactctggaggctccagtatttttaagctggagggctcccccatgcatggactgcacgctgagagctgtgcttcacaccaattgctccataagcatcttgtggagaaaatctccatagcttgtgagagacaacctggagccaaacatcaatgcaatcccagtctggatgagataggacatcagtcaatgacgctgagtcacccaaggtcctctggaggctggagcacacaatgggaggctttttgaggttgatatagctggaggacccagctggaggctcccaaatgggacccttgcccccaggaaaaggtgttcttcagagcatggaagccatgagttagcaacaacgtggatcagatggggacagagagagcagagacactgcactgcgtgttttgaaatctcagtgagatagcctaattcaccacattcgattctgcaggaaatcaactcatttgacagaagaacaaagcatgcattgttcaagtataagaggcctgggctgcagggaacctgtcctgacaaggggataatcatcttagctctgagagaatgaacatcacacattttgttccagtgagatatgcacaagcattccaggtatattaaacccgtgacatctaatatggttggatgttattactgtggtgaatttccccaattattgccaaaatctgttc

SEQ ID NO: 27547 - DNA, 1031 bp, Homo sapiens
ccgtcccctgggttcaactgattctcctgcctcagcctcccaagtagctgggaccacaggtgtgtgctaccatgcctggctaatttttataatttttagtagagatggggtttcaccatgttggccagactggtgtcaaactcctgacctctagtgatctgcccgccttggcctcccaaaatgctgggattacaggcatgagccactgtatctgacttcaattttttattttttcaaatatttttatttttaattattaaggatacataatatgcacattaccctgataatttctgaaatattttgtaaggattaatatacaaaaatttattcaacaatatttattggggtgctaagaaatgctaggacccaggttagacctgggctatatgaagatgaaccaggcagacctattcttgccttcatgaactttttattttccagaagagatggacattaaactcataaccatttgcaggcatgattcataaaaaatgcacttgagtacttctgtatggtcatcttatgggaagaagccccagggaagagtttgttaagctgaattcttgaaagcatggaggactccctaggacattggttctagatatagaaaaataatgtttcctttttatagctctctttacccaaaatcatgtttcttcacttcaacattcagtaagttgtggaaagctcaaattttgagttaaaatttgcaccatcataagctcaaaacagctgtatcaaggagcataagcagggaccattttgcagaaaaccctggaggtttgttcctacttacatctcctttgtctcccgcagtggggtaggatttttgcatacattttcctcccctctgtcaggggacttaggcaatgtctggaaacatttttgattgtcacaattggaggtgaaagcatctaatgaatagagaccaggaatgcggctaaaaatcatacaattcccaggatagtaaccccaccctccagctccccacagagaaccaccaggccagaagtgtcagtaactctgcc

SEQ ID NO: 27548 - DNA, 1094 bp, Homo sapiens
ggttagggaccctgctgttcccagcctgcagggtgcaagacctaatgtctatcctattgttgccaaacatactttattcattcccacaacactcaatatttttccctctgattgtgtaactagttgatgctcattagtttaaaaattgcacaacatataaaaacaaagcaaaaacctcctgagtccccaataccctaatataacccctgccaaactttttggtgactgtatttttttcatgcaaatctttcaacatatcacactcacacattatttctatgtattaattaatactttcctccatctttgtttgagtgtgaaacagcatatttcatttaggaatccctccaagtcaatcaagtatagataaaatgttcaaaatattgttgcatactaatttttctgtgaatatagtttagcgacttttggccctttgatggacatttgcttcatgtccagttttttttttttttttttttttttggccaggcaatgatgccataatatatttttgtgtatatgtatccttatgtacccgttcattcttcacatacccaaagactacaggctcctatgcactgataagaaaggctgacgtttctttgcagcttatttcatgatggatacaccaccagagaaaggaggctatttgcaattccattgtcatcttgtcctgcaaggaattttgccccaattgcaccagggagcttctctggttctcagagctcagtgagttcttgcagacactcgagatcctggatcattctagtggatgtttgaggctttcagctgccatctcgtttactctgtgtgtgcctctcaatatcaaccctcccactagctgtttgcgggggaaccccaggaatgagtagctgatggatccattggagaataggccatagaagccctccagatccctcctggatgccgggcctcaatttacttctgatagtaattatctcctggaccatgactctcagatggctagacctctatgggaaacacattccaggctaaggagaggagtattcctgttttcaggcattcacatggtcagtgggcggaatgggggtagaaattgtgggcccttgttt

SEQ ID NO: 27549 - DNA, 1033 bp, Homo sapiens
acttttgatatacatttgggctgcatccatattttgtctattgccaataaaactgcgacaaacatttttgacatatttttagtgcacagaagtatgcatttctgctaagtatatccctgaaagttgaattgtttggtcatagatattcaagtattctgcttcgaaatccccaaagagattttcaaagtattgtaacatctattcacccaccagcagttcatgactgttcaagttgttccacaccctcaccaatattttgtattttctgtctttttatctttagccattttgttgagtctgcagtggcatcacattttggattgaatttgcatttctgtgacagggaatgctagcaattacctttccacacctgtgatggccatttggcctcctcgttggtgaagtggctgttcaggtcttctgtttcctgctgggacatctgttttgttttgttttgttttgtttttgttttttccttatcaatgtaggcattctctattatatactagatcaaaggctttttttggatacaggtattcaaaatatcttctcccacactgtagcttgcctttgcattgtaagatgtcttgtcaatttaagggcaactaattaatcactctttcttttgtgctcagcgccacttgtctcctgtttcagaatatttgcctaccccaaggtaatgaagatactctctgctttcttctaaaaggtttgctgtttgacatttcacatttagatctacaatccatgtggtcttgctttgtgtatggtgtctgttaagagtcaagatcccttgctcttcccctatagatgcttaaatgaccctctgccatttatccacagcagcatcatctcccctgtgtgccaccattgtcatactcctgtgatcgtgtctgtgcgggtcagcttctgcctcactgctccatctgttcacctctgctttagtgcacacctgcccccgaggaatagcctccagtagtcccgactgagagcctcttgtgcttgctatgtatctccctccttggcagaatat

SEQ ID NO: 27550 - DNA, 1069 bp, Homo sapiens
tggagcaacaggtgagtcaggcaagcatccattagatcttcaatcagctgctccacattgcaaatatgaaggatatgctttcaaaaaaggacaagggaaaataggaaaaggggtcgtaaaagtaaagataatcagccagcattactgaaagtgaagagaaaatttcttttgaaaaagcaacccagatgtttgtccggcatgagtgtggtatttgggatcatgaatgctgaagagtaagtgtgtcctggatgttggcgtcgggtcatcactgaccctaaatctcctcaagtctcacagaaggatgtaggtcatatgttagaggtaatatgtcataaggacataggtcatactttaaccttgaattcagggaataacatttggctttagggtaattgactccaacatagaatgagccacattctctatgcattgggataattcttatttatcattaactaaattattaataactaatgatataaattacataattactgtttattaaacaatttgtattgaatgttattaacatgtcaagcctgtgggtacagtggacacaattttcttgtgaatttcatctgaggattggcatctgttcccacagcgtgaaggtgtttttgctgtctgaactctgcgtctttggctcacccaaacagggagaagaacatgagccaggtcggccaaggaggcctttgcttatggtctggttttctataggggccagagatacgcccccatcccactcgccatccctagaccacagcagccttccccatgtcctgttgttggaccgaggcacgcctgtcttgggaacaaggacctcactatttgcaactttcttggagggccttcaggatctcagagctctgtgcctcagatcccgcaggtagtactgaagactggagcctgttccaacggggctggctccgtggccggccacacactggggcgcgagcctctgctgccctctgtgttgcccatgtcttcctatggctgaggctggcttagcctgaaattcaggaggttcctctctcaaggaagcctattagatactcagatgttcggattg

SEQ ID NO: 27551 - DNA, 1051 bp, Homo sapiens
cttgttttgcttcagcatgtagtcctgattgatgaactctcagtgttaaagaagggattacgaagaatcagcggagtagtttgttctctctccctgggtccaggttctctgttgacctgtaccatgactaccacatacgggaaacttcactgttcacagaaagtcatttccctggggtttttgctgggtcctaaatgtgttccagagtgctgcaggggggactccccaaagcacctgacatgcctgttttgctctttgatccgtgtggttcatagatcactcattgaggggattcaaaattaggggcttgggtgacagtcgccaactgtttggccaggtggacagtatcagcctgatggccagctggccagtgtacaccacctgtctctgtgctgtggtggtggcggcacctgtggggtttctagatcttttctcacgttctactcatttcccctgaagttctaaaattcatattgacgatcttgctgtatgtttgtgttacacatagcaccctgacaagctgaaccatcgccattacccggccctggtccaggttgatgcctgggctttccttatggcacacagctgctgtcagtctgtcattctgcaggtgctgctttccaaatcctgcatgcactctgtgtatctgagttacagagtagtctttttttttcccccacttaaaaatgacacagatacttctattgctcttaggatcagttacctaaacctgctcatagggcaagactttgtttgaactagttggttgtgtaaaaagcagacaagccccttatccatgcccctgcagtcacagtatgatcagcaggcaggcagtgctgtgtttgtctcccggacatgctgagtgagacaatcagtgagaaagtggcccgggtgcattcccgccagaggacactttccagacctctatgcagagtcgttccaacctgccctttgagagcttctcttgatctggttacaaggaatttttctacagtcaattttttttttcatttctattccgtaaaagcagtaagatgagatgcccagtctt

SEQ ID NO: 27552 - DNA, 1031 bp, Homo sapiens
gggaacacgggtcctgccggctcttgttgcctccctggccagacaacatctccccagcctgggtctcagttgcctcctccgggacctgtgcagtgcacagcctccgctgactgtcgccgtctccgtttcgcacaggccatggcgattacgcctaccagcagtcatcctacacggagcagagctacgaccggtccttcgaggagtccacgcagcactactatgaggggggtaaggagcacggctgcgtgctgggctcgagcgtaagcgccacacgcagcagagttaagacgctgcacccttaggagcacgcggtgcctgccttcagtgagtcccttaaatcacagcacagcgcgtgggaggagagacagtgtgttctggaagctggaaattcaggctgtgtcgggagccccgcttgccttatgggtgtgttcgtgagacaggaaaggattcagccggccatgctggggttgggggcacagacttggttattgggtccagccagggagcgtggggcctgcgacaggaaggattcagccggccatgctggggttggggacacagactctgttattgggtctggccagggatcgtggggcctgcgagccactctcagagcttcctcagctggaggccagcagtggctgcgctgggtgtggcctcgcgtttcttcagacacctgcaggccaggaaacgcacatctgtggctgggggcttgccgcccttcatggcggtcctgggcagtgctgcgctgggggctgcgtgtcgggtggacttgcccctttctgtggtgtctgtgcccccaccctggctgccctgaaaccccaacagaacatcccagaatgtggagttgggaagaggtacacacagcccgttccagtcccaccccgggataaagatggcccccagagaagagctgatgatcgcctgcgggattgcgcaacctcgtccgggagggaaggcgggcctgcagtccctggggagaggggcctcgtgtctgctgacgctgaccggcaggcagcagtggctgaggc

SEQ ID NO: 27553 - DNA, 1051 bp, Homo sapiens
tgaaccccggaggcagagcttgcagtgagccgagattgtgccactgcactccagcctgggtgacagagcgagactccatctcgaaaagaaaagaaagaaccctggagtacttgctggttgtggaggaaggccccacatctgcccgccccgttgctgtcctgttgagagcacggcctgggctcccccgagccctgcagatttcatgcaacacatctgaaaacggcaaaggccttttccacagatgtcgtgccccctttccctgcagttatctcagcagccccctttctttggggatagggcggctgctgccagttcccactagatcgcctgagcacccactggggtgtgagagccaggcctggtccctgtgtgctggggctgggtgttctgagctggcactctcacagttgttgcatacctgctgggtgccagggcaaagctggcccgtttcctacaaactggctcctttattttttttttttgtttatgtttttttgagatggagtctcactctatcgcccaggctggagtgcagtgatgcgatctcggctcactgcaacctcctcctcctgggttcacaccattctcctgcctcagcctcccgagtagctgggactacaggctcccgccaccatgccgggctaaattttttgtatttttagtagagacggggtttcaccatgttagccaggatgatctcgatctcctgaccttgtgatccacccgcctcggcctcccaaagtgctgggattacaggcgtgagccaccgcacccggccacaaactggctcctttattatgtaaagaataaagtgggctataaaacatgagaatatgcaggctgacccccaaaagcctgacacccttgaaaacccactcccccatgtctcagatggctttcatgggggcaggagaaaggatagtgaccttaagtcttctcccgtgacggtgacagctcgtttgccagctgttgctggaaccggccctggatttagaggaaggcgtggaagttcaagactcaagatacttcctggatagagaataactggaaa

SEQ ID NO: 27554 - DNA, 1024 bp, Homo sapiens
aaggacttgcctgtgttgaataccagtcctgttctaggacattctcccctctcctaggagacggatgtcacgcacaaatggggagagaagtgtttattttgtaggcactaagggtttctaaaacccttaacactggtaagggctcaaaaataaacgtatgtgttcatattcgatcaccgaaatgagagttcttaattgctaattgacaaacgcgttagcaatttcagttagggagtcatctcccttgattgtgttcttttcctgtcaattttcatagacctaatttgcaaactcaatcggggactaaaatttcccactgaaaatgttaaacattttagataactgtgaagatagtttatttttattccttgccaatctgggaatatgccttttttgtgtgtttgtgtgtttttttaagtgctgtattaataatactttctgaaagaaaaggacacttaccccaaaacttcaatctgaaatgtcttacattaagaatatcttgaatgttgtgtatatattttaaaaagcactttgcaaaatagtttgtacatttatttcctaatttatacatgatttttggtgttaatatatttaatgattaataacagaatgtttatttaatgtgctgtccatttttatgtaatattatggggaaagtgatgccagcagttccttttcattattctatcttctgtcatatgaatgttgagcaaagcttaggccaacatgaattgtttgtgaagtgtggttgatggtgctttgtttttttctgactacttctatggaaggccagtgaagaagcaaaggaagacatgaaaattgacgctcattcttcttcctattgttccctgacatccagcaaattgtgaatttgaaaaatgatggccagttttcagaagtgctgacaaattcatattggtatgcaaaagctcatcacccattaaggtttgttgttgaatcaacagtactcagcatattaaaacagtacatcagaactcatgccaacagtctttatgatgggatt

SEQ ID NO: 27555 - DNA, 1263 bp, Homo sapiens
ttctcctgcctcagcctcccgagtagccgggactacaggcacgtgccaccacgcctggctaatttttatatttttagtagagatggggtttcaccatgttggccacgctggtcttgaactcctgatctcaaatgatccgcccacctcggcctcccaaagtgctgggattacaggcatgagccaccgtgcccagccttccctgggattctctgtggaactctgtcctctcttctgtaaacagggacagttttacttcttccttttttccccctttatttcagtgtgtgaaaggacattgttgcatagcagtggtatgtgtggaggccctttttctccatcttgggaggtaaccattcagtatttcttcattaaatgtgattagctgtcggccggccctacgtagtgcccttatcagggcgaagatgttcccgtctgttcccagtttgctgagatgttttgttttcctcctcatgagtgggtgttgagacggtggtaccacctgttgatatagtgaagtgcctgggctgagttttgactgcttgatgtggccttgtgttctgagattacccctactaggtcttgatgtgtgatcctttctgaactgctggattcaattgggtaatattttgttaagagttatttgcatctatattcatgaggggtatggtctataattttattttttcttagtgtcagattttggtactagcctcataggatgagttggatagtgatctcacttcctctattttctgaaaaagcttgtgtaagattggcactgtttcttcctggaatgttacatggaatttaccaggaaaacaagccgagctagagttttcctttggggagtgttcttttataagaaatttaacttattgagtagatacagggctattctagattgtttattcttgtgtttctttaataagttgcctttttcaagaaatttgtccatttcatgtaagttgaatttgttactgaatttgctggcatgaagtcgttcccagcattctcttgccctctggctgtctgtaaggtgtgtcctgataacccgttgaacattcctgacagtggaggtttgcgctctctcgttttcctgatcaggctagaagtgtgttagttagcttgtcttttcagtgaacctgtttttttctgttacatgttattgttgtctctttatttctgctctgtattattctcctccttctactcgacgcttactttgctctttctggtttcttgatttggagccttaggttactg

SEQ ID NO: 27556 - DNA, 1050 bp, Homo sapiens
ccagcacggacgctgagttttgggaacctcgcggcccaggcagagcgcgtccttgtggtgctgtgcacaccccgcccaccctccgtccaccctgcgcatgcagtgcctgtggtgtcctgaggccttggtggggccgtcctagtccctggtgcagacgaggagcctgagaggcttagcagctcatgtgtgtgtcagctgggaacccacagcaagtggattccaaagcctgccatgtccctgttgccactagcacctcctcctccactccctcctggcctctctgggtcctctccttgtccctcctggcctctctgggtcctctccttgtccctccctgacctctctgggtcctctccttgtccctctctggcctctctgggtcctctccttgtccctctctggcctctctgggtcctctccttgtccctctctgggtcctctccttgtccctctctggcctctctgggtcctctccttgtccctctctgggtcctctccttgtccctcctggcctctctgggtcctctccttgtccctctctgggtcctctccttgtccctctctggcctctctgggtcctctctgacctctctgggtcctctccttgtccctctctgggtcctctccttgtccctctctgggtcctctccttgtccctctctggcctctctgggtcctctccttgtccctctctggcctctctgggtcctctccttgtccctctctgggtcctctccttgtccctctctggcctctctgggtcctctccttgtccctctctggcctctctgggtcctctccttgtccctctctgggtcctctccttgtccctctctggcctctctgggtcctctccttgtccctctctggcctctctgggtcctctccttgtccctctctgggtcctctccttgtccctctctggcctctctgggtcctctccttgtccctctctggcctctctgggtcctttccttgtccctttctggtctctctggtcctctccttctctccttgtccctctccctctgcctctgctttgcccacccc

SEQ ID NO: 27557 - DNA, 1052 bp, Homo sapiens
tttgaaaattgcacttataatttttattaaatatatgataaactacatgttttatgacaaataaaatatgtgatatatggttatatgataaatatcacacgtaatatcttagtattttttataaattcttatttgtatataaaatttatgcaacttatgcaattttgtacgtcccataaacagagcagaacatgcgtaaaatacagaaaaggaagcaaaaccttcactttaagcacgttatctcaacagtcactgttatcatttgagtagagtacgaactggtttaacaatgctattttcttttttaatagaggcagagtctcgctctgtcacccaggctgcagtgcagtggtgtgatcttggctcactgcaggctccaatttctgggctcaagtgatcctcctacctcagcctccctagtagcgaggaccacaggcgtgtgccaccatgccagactaattttctattttttgtagagaggaggtcttgctatgttgcccaggctggtctcgaactcctggcctcaagcattatcttcctgccttggcctcctgagttgctgggaccacaggcatgagacactgtggcctgccaatgatactattggtattttaaatttattattaggaaaattgcgtatgttttttttcagggaagtctctttaaagataactcatgcttccagcctttggctcagcgtatgtgttgagtcctcctgcctgccaggccctgtgggcctgggcactagaaccaggcagacgaggtcccaggagggaggcggggcaggtggttgactcacacctgagagccaggtggtgccttgggtgccagggagggcatctgagtgctgtggcttcagtcatggggtaggggtgggggtgtctagggattgcgtttgggcggaggggacagtcagggcagagacccctggagtagactagtgtgtgagggcccagggggccatggggatgagggtggagggggtgcaggggtctccagacgacttcagtatttgctgtgagtgacatggggcaccaggagtcatttgagca

SEQ ID NO: 27558 - DNA, 1049 bp, Homo sapiens
ctcagcccttcatctgtggggctggaacgacagccacaggggtgtggctggccagggttgagatggggagcaaagcccctgtccccattccctatcggtttcatggaggagactgaggtgtggtgtcccagaccctcccctcccctcctcctgtcccctggggaggtcaccaggggcagcgtcctgcccctgcacccagctctctgttcccacccataccttggagccatgcgcagcctcccgcccacccatgaagatgtagccctggcctcaacccagcccgggtcaccgcacatttgtccatgtggtcgttcattcgtatagcaactacgaataatcctctatagcctggcgcgccctcgcctgtgggcttggaaatggggaatcggggtcccgtggagccatctcctccggctcagtggccccaagtcaggctggctggtccctgctgagctgtggggccggcgtaaagctcacgtggactgtgaatacctgggtcaaacggaagaacaactcgccacgtgttatgctgataacgggctgagctgatgacatttccgacgcgctgggttagcgtacatcgttaaaataatctgtttctttttccttttcttagcacggccactagcacgtttgaagtcacacacagggtagcgccggcctggacagaggcggacatctgacaagcgggccaatgaggatgacatctcggacggtagtcactgctacaacgaaagtcagtgccccaccttgcccagccgcagggtggaccctaagcagctcgccccacccagccggtcctgcctgctctgtccctcccaaccctgcaatgggcagatttctggggggcagtctctgacccactgtggcccaggtacagaaccccgccttcaagtctctgggcctcagttttctcatctgtgtgttggggacaaagacgccgcccggccatctcaccaggctgccgagcagcgtggaagagctctggctgtgaggtcagaggccctttgtttgaaaggtccaggcccataggggtgcatgggttgtgg

SEQ ID NO: 27559 - DNA, 1030 bp, Homo sapiens
gccctggaggggggtcagtggaggagtcattggcttcccactggggcaggggccgctgaccttggagcactctgggctctcctcctccccccgccccgccccgcccccccgctcccccttccccttccccttccccttccccttcccctctgaggcatccccgctgtgggctctggacagaggtccctcctagggctctatcagcgcaacagctaagcactcaggtgtggtgttgagtgctgccatgcaggcaggaattgatccctctatgcctcagtttccccacctgtaaagtggacccggctgatccaccaccctctcccaccacggccccctgcctgagtccctggctgaatccctccctctccccagggtacctggtggtgccagcgggtggtggcggcaccttcctgggcggcttctttgtgaacaagctcaggctccggggctccgcggtcatcaagttctgcctgttctgcaccgttgtcagcctgctgggcatcctcgtcttctcactgcactgccccagtgtgcccatggcgggcgtcacagccagctacggcgggaggtgagggccagatggcacctgggtacgcgtcggggccccaagcacccgcggtccctgggcatggaggaggagtggtgcagcacttgggagaggtggttttgaaaagggctacgtcacaggacagcggcaagggcaacacccgctcagcagggcacccggcagcatccacgtgaaaaggcaccatgccagcccccagcagtgcctgcgcttgggtcccggctgtgcccccgggcagtcatatgcctctctgggcctcagcactctgctctgtagctgtgtcaaatggaacaacagccctagtgttcggggtccttgaggctggtctctcggtgacataaaaagtgtcccaggatgtgctcctggagttgccatgtgctgggagtgggagggacacctgctggtcaggtggcaattagggaatatccaaaatacacgtaggtagcctgcacctcggccctgccc

SEQ ID NO: 27560 - DNA, 1054 bp, Homo sapiens
acattcctcagcagcattcctgcactaacggcaactctacggtaagctggggtcgggtgtgcgcttgtccagagctttccttgcagcaccctgaggcggagctctgcagatcctgagacaggagcactccaggaaacacccaggtctaagcgggcctgtctgtcactggtggcaggagagacctcactgtctctgatctctgacgaggggcttcccacttgggggggggtgatgatgtggctggggactggtccaggaggccactggcctagggggtgacttggcatgcaaccccacttctgtgggtgctgacgctgtggttttctattgcagatgtgtccgtgaccctcagagatcctttgccctgggaatccagtggattgtagttagaatactaggtactgtgcagtgtgaggaagccatggtcagttgcacagtgtgctcactgcacaagggcatgggcaagtgtctaaccaccaaggggatgtgcttcccagcaggaggctgttcccgcctgggaaggggtccattccctaactgtccactagaggggcccatcgtcatttatttgcccaaaggctttccctgggagatcatgggaaactcgcagccccaatgccgaatgcccaaagaaaggaacgtttaagccctctttgcaccccctgagaactccaacggccagtatcaccttcccagagcccatcattccaggcctcttggctgcctgccccctgcctagcccctacccaccaggagtgtgggtgctgagtgggcttctctccgcagggggcatcccggggcccatcgccttcggctgggtgatcgacaaggcctgtctgctgtggcaggaccagtgtggccagcagggctcctgcttggtgtaccagaattcggccatgagccgctacatactcatcatggggctcctgtacaaggtaagcaggcccagggaggggacagagggtctgctctgagggtggctgggggctccgaacatgccgcgatcttccagcagcttggaccacagcctagtacatcacagatgttcctgcag

SEQ ID NO: 27561 - DNA, 1050 bp, Homo sapiens
ggggcagggcgggctccttccgccgctctggctctctgcagctgcatgtggcctttccctctgtccctgcctcaagtcttcctctcctttctctcatgaggacaccagtcattggatttggggcccaccttagatccaggatggtctcatctcaaatccttaattacatctgcaaagaccctatttccaaaaaaggtcccattcactggtgtctggcactgttcaacccatgacaagcccctcagtcctgtgcctctgtttttagtcaaagggtgtgtttcattccctctttaacaatattggcgtctgctctacaaaccggttatatgggaaagataccctctcagagcaggatgggtttccgtggacctggtgagggtgctgcaggctggggcagggacaggactgggacaggcccaccagtatccaaaggctctggccgagctccccacgaggtccagcgggctcctctctccccaggtgctgggcgtcctcttctttgccatagcctgcttcttatacaagcccctgtcggagtcttcagatggcctggaaacttgtctgcccagccagtcctcagcccctgacagtgccacagatagccagctccagagcagcgtctgaccaccgcccgcgcccacccggccacggcgggcactcagcatttcctgatgacagaacagtgccgttgggtgatgcaatcacacgggaacttctatttgacctgcaaccttctacttaacctgtggtttaaagtcggctgtgacctcctgtccccagagctgtacggccctgcagtgggtgggaggaacttgcataaatatatatttatggacacacagtttgcatcagaacgtgtttatagaatgtgttttatacccgatcgtgtgtggtgtgcgtgaggacaaactccgcaggggctgtgaatcccactgggagggcggtgggcctgcagcctgaggaaggcttgtgtgtcctcagttaaaactgtgcatatcgaaatatattttgttatttaagcctgcgtccccgtaccgcgtgctttatttc

SEQ ID NO: 27562 - DNA, 1044 bp, Homo sapiens
atggattctccccttggcacccagcactgtttgcgtttgcgcctggccatggtggagcgggcagtgagagagcacggaggggctccgccctgtcgccgggagggcagcggccaggcaggctgggcaggggggtggggtctggctctgtcccacaggacggtgtgacccctgggtgggctcttgacgggctttcctcactggagttcctcaggccgctctcctgaagcggtgctcagaggccctgaccatcctgccaggcgcccgtgacccctgacctcttccctctgcctcctgctgtggcttctgtccacaagcccctccccttcccctttggacccctcaggcctccccagctgcctgcgctggaccctggcggggctgtttcactttttcctgggcagtgtcatgtatgcacctgtgggctgactgtgtggccacatccagtcaggacccagcctccagaactgacccagggaggctcccgctggccccaggaaggagaagtagaaactgatgatcaggcggggcgagagaaccacaccagcggccctgttgagaaatcaggccgagaggtcggtggcggtggctcaggcctgtaatcccagcactttcggaggcctgggcagtcggatcaccagaggtcaggagtccaagattagcctggccaacatggtgaaactgttgtctctactaaaaatacaacattagccaggcgtgatgggcacctgtaatcccagttcctccagagattgaagcaggagaatcgcttaaacctgggaggtggaggttgcagtgagtggagattgcctgggaggtggaggttgcagtgagtggagattgcctgggaggtggagattgcatgaagctccatctcgaggggaaaaaaataagaaagaaaaatcaggcagagaggcaacgccaggtcccagctggagctcagcggggagccaggggatacagtggctgaccgggcctcctaaccccccttctagcactcccccaggatcctgggtcccaattgttgccctggacaaatacgcccat

SEQ ID NO: 27563 - DNA, 1025 bp, Homo sapiens
gtggtgaggccactgcccccaagaacacagcctggtgactttagtgtacaaagcagggggagtctccaggggcacagaacagaggctaaagccagggtggaggtggccagcaggcctaggaggaggagagggtcagggccacaccccaggggaggtgcatgtcagccaggggccaccctaaggtggaagccaggagtcccaaaggggcctagagaaggagcagccccccacctggctaccgcagccctctctggttctgtgcagggtattgggatgcgttactgaggcccaaatctgccccactgggaacccccaaaaaagagccagggcaggagaatgagagggaggagccatgaaacccccgccctttaaagacagctctgtggcagctggcccaggccctgcagccctcaccacgttgggactcacttgggggtctcccatgggggtcctaatcccatctcttttcttcccagtccagaatgacagggtccagaaactggcgagccacgagggacatgtgtaggtatcggcacaactatccggtacgtacctgcccctgccccgggacacagaaccctcccgccagctgctcttctcaggcagaatgtcccaggttctactggaaggctggcctggcttgctgtgccagggccacagttctgggcaggaccctgcctggggcacagcctggtatagattcagagccctgcccttcccctctcgcgggagaccgggggcatccccctacttttctgagcttcagcacaccgtcgccttgcaaacatggccatagtgccagcctcgtgatgcacacgtgtggggtccgtgataccgcccacacagcaccccacccccatgccagccctgtctcctgcaggttgtcctcagccattaccctccacacccctgaatcacggaaacccctgtgctgccttcagggtgctgaggaggggacctgccaggcctggcctggctggcgaaatggggaaggggggtccctggggcttggaggcagctgctgt

SEQ ID NO: 27564 - DNA, 1050 bp, Homo sapiens
gccgggcggtccctccccgatagggttggtgagaaggtaaagaatgctcttcctgcacccaggaggtggcagtccacatagagaagcaagcaggggtgatggagaacctgcaggcggtacagccagttctcacagggtgttcgaggcgcctgtaccctgcaggggccccttgtggctctcatccagccagctcctccccaccagggggactcggggtacagccaccctctaggtgatgcgtcagcatccccctaacccccgtgtgtctagggcccacaggccattttcacagggatggcatgagtcctcccctgggcccagagaggtaaatggagagagagactgaatcgtgggccagggtggggagacctcgtggagccgggtgggagggcaggccagggcggggtgcggcccagcaggaggggccccagccattgacctctcctgacccggatctctcgcaggcgcagccacaacaacctccgcatcacacgcatcctcaagtcgctgggtgagctgggcctcgagcacttccaggcgccgctggtccgcttcttcctggaggagacgctggtgcggcgggagctgccgggggtgcggcagagtgccctggactacttcatgttcgccgtgcgctgccgacaccagcgccgccagctggtgcacttcgcctgggagcacttccggccccgctgcaagttcgtctgggggccccaagacaagctgcggaggttcaagcccagctctctgccccatccgctcgagggctccaggaaggtggaggaggaaggaagccccggggaccccgaccacgaggccagcacccagggtcggacctgtgggccagagcatagcaagggtgggggcagggtggacgaggggccccagccacggagcgtggagccccaggatgcgggacccctggagaggagccagggggatgaggcagggggccacggggaagataggccggagcccttaagccccaaagagagcaagaagaggaagctggagctgagccggcgggagcagccgcccacagagccaggc

SEQ ID NO: 27565 - DNA, 1045 bp, Homo sapiens
acccatctgcccaagggttttaaacatgcagttctgtgcgccacagtcccttggtccacgctgctgttgaatgaacgctcaggtgggtggcttccacattcctgccgctttgaacggtgcttctgtgaacagcgttgtctgtgtttggtgcatcctggtgagtttttctagaatataaatgtattaaaagtagaattgctgggttgtgaggagcacacatgttcagctttgtaaggagtaccagattgtttttgtagcacagtccgttctcctgataccagagtagaaaaagttgaagtgaacttattctttgctaagcattggcattctcagtctggtgggtgtcccacggcagcgttgtctttccgtacatgctcagtgtgggattctccggctcacagctcttccagcgctgccctctgcccttggaggagcatctaaacccctccctcagctgttatttttttcctgtagaaataaatcagaatgagttatgcagaaaaacccgatgaaatcacgaaagatgagtggatggaaaagctcaataacttgcatgtccagagagcagacatgaaccgcctcatcatgaactacctggtcacaggtaatggcttacagtgaggatgctgttgcatgaatgtgattctccctttttgaacacataaggagtgctgtagcactgaggtttgatgacgtagttatttgtgttcagacattatgaaaacacaatgctaacctggtaagtttggaagttatcatgtgaaagccttttctgaagatgagatttttccaggtctctgagacctaacacaaacccatttttcagcctttgacagttttacagttactcaaaataattgagactgttgtgaagtaagtatattgaaagcctaaatagttgatctcttctggccagtctgcaaaaatatgctggcctgtttctggaaagtatgcccaactcagaggatgggaatggggaagagcagaagcgtgcagagggaaataacagtcaggctgttcttgatgtcaactggaggaagggcag

SEQ ID NO: 27566 - DNA, 1024 bp, Homo sapiens
cgatgtcctgcttctgttcactcacagaactgtcccctgctccgtggtgggcaggagggaagtggtgcagggctgcgtgcattgcctgcgagtcgggacagttgatgggcacatggccttgtagctctgggcacagatgtgtttggattcattgcagcggaccaccgggcactgttgaccccactgagcagtgctaagtgttggtttagtggatgttcgtggaattgctgacccatccaagggcgtcctttggagccagtggagcctgccggcgcatctgaggggcagaatgctgctagcacttgaatctgggatctcgccttattctcaagtagcaaggcatctcgacaagcatggtctaggtctggtggccagcttgccagtacctgagccggtcgggtcatctgcctctgagggaccgtcctcaccgagctcctgcatcccttgagtgttgatcaggaggcgtccacagcattgttctcgcctctgaatgatgcttctttctgtgttggagcctggcgaagttgtgttttcaagccctctacttctctttccagtgggtaggagcttttggcagtgtttactttacctagatggcttatataatccagtaagagatgcaaagataaaattgctgcggttgttacagaagcatggcggcctccagactgacccattggttgccctttagattttgtaaggatgcggtgctggggaggtggtgcttccctaccccctagaaatgctgccttccaactaccactctcccagatgtgacccttgcgattatttcctctgaggtttgaggatgaagataagttggagggaaagagagtaactaataggggatgaaatatagcagaagctagaagaaagcggtgaggtgagagagatgcatctgcacgttttcttcaacagcaccaggtgattcagcatattcctaattacctttcactattcgtgtatataagatcgtttacttgcataatatatcatcaatttgacatattcttaaaactagagg

SEQ ID NO: 27567 - DNA, 1033 bp, Homo sapiens
ttttctaaggcaatgtgatgtctttgctttcttatttctctttctctgcgttgttagttttgaagagtggaggagctaggggctccagaaagaatcttacacatgtgttgaagacattgatgtcatagggagcggggagctgcattcccttctgggctgttactgctaaatctcagtatgaacagaccaggcggaaagcttggtggccaagcagtctgtgtgcttccccgctgatggagaacgttgcgttgttcacaatagggcctcatgggtgtagccgcatggcagacccatggctggcgcagctgcctgttgccgtctgtcttcagtaactgctgctctgttaactgttctattctgatactacgcgtgttgttttttacaacaggtatgtttttgtttcagaaatatgtattgcttttctcatattttttgcaaattgtattgtcaacatgggtcatttaaagtcctgtatgaaccataacctgctgtggtacctttgtacatgtttgattctgtattctttattccagtgtggcatatgtgcccctctgtatcttttgagaagtgcggaataggttgcttctaccacctgttcttaatgtaacagtaaaagttttcacatttttctcagaactgttatctggaagctctcttttttcctaagggtattttaataacaaatactgatgcatttgtattgaaagttgatatcttggaatggaaggacagaagaaagctcgcctcttggaactgtagttggctctcctctcactctgacagtgctgccccttttagtttgtaaatctgtacttggtgtgtttaatttgaaacctatcggctgctctcttgactggggcacttaatgtttcataaactaatttccttggtgtgaaggaagtagaacttttgagctacccactgcatgattttaaactgattttaatagcctaagtaattactctttttttttttttttttttgcttaatgaaattttccaaacatattaaaaacagagggaatacgccagca

SEQ ID NO: 27568 - DNA, 2556 bp, Homo sapiens
ccccccgagctttaaagtgaccaaggtgcctggactgtgctgggcatggagccgtccccacagcagggtagatggggctggggcggtggcactgtccattgaagatagcgctggtgtggcttccccagcccgtcttctgctccagcaggccccggccctgtcctgaagtctggaggatggggttggccctgctgttccctggccttgcacgctgctcacgtgtgccctcaccccaatagcacaccgagctggcctccctctagggagaggccagcatttgtgctaatccagtctctgctgcagctcttctgggcatctcagagttatagggcccgcccagagccgctggcagcccgggggccattgagagacagtcctggacctgagtctgtgggccctgaggaaggatgcctggcagcccatgttaagtctgtcaagccttgtctttgtttttcattttaggctacaaagtttggatcccaagcgagtcagaaggtaacagaggagaagcttctgcaccctggtgcatctgaaactatcctgagtctgacgtcacgtgcagcacctgaagctgcctggttccctcttctcaggccacatgctcagagctgaggggtcccagcgtagaagggggtgttcctgccatgctgttcccctcctcatgcccgggtggctgcctcatggacccactcagggcctgcagggccaaactcgtttcctgttcactggtagctggtaccggtgtgtggccactgcagccggccaccttgttgggagcaggactgcccggcttggcagatggcccacgctggcggtggccgctcagccagaagggccgctgtggttggtgctgtgcctgcggcacactggacgcgtctgcacttcgaggcaacggagcgtctctttgctctggccagggcttcccccagtcggggcagtgtggcctcaggcctttgcatgttttttattctttaggatgtgggtaggggccccgcggttcccacttggtggtcagggctgtgatctggctgtcctcgggttcagaatcacacccaggaggcagtacccatgtgaggctcaccatgaaagctcaggactgcaggcgtggagctgtgcatggctctaggacgcgcctttgccccctgggcgagggtgtcctttctcacgaggtgcccatccgtcacccccgtggcccatatcaccccttcctctctgagggagtctccccacgtgcccacccccagctgcagggacgcccatctggctttttcgtgggcctcccagggtcctgaggtgcagtcgctcgcgcagtttctgaaggtggtggtcagttccagggcagggagcggctgctccagggttgtgttgctgagagcctgcccggtgctgccttagtgttgcggcaccccatggtgggttcgaaggcgctgctggttactaatgccgcccctcaccttgctctctcctcacctgtcttcttgctgtcgggtaaagttttggggtcacaagcagcagccggagccggtaaagcccgtgtctgctcgtgcatgccgcccgcatctccgccgagaatgtgcttggcttcctctgtccctcctgcgtgctgccactgtcttgtgtcacctcacatgtgcgcacgctcagaccctctccctggcctcggtccgtggctctcctttaagatccaggatctgcatcaggcttggctgtgtgtgcctgtcacccctgcgcagtaccactgcgctccccccgggcaaaaaaatgagacccccatctccaaaacacacagacccccaacgcaggcctgctgccggggaggtgctggagggagggcgggggcactgggcgcagagctgctgagcagggtttcctggccacctgcgctcccttgaacgcagtgcaaaggggaggatctttgctctgtgacgagttcttccctttccggcctttgatccgtgctgctccctgcctttgggggaagaggaggcctcacaccacatccccaggtggccgtgtggcctcgactccactgacccaggatcaggagaggctgagctcctttctcagcagcttcttcctatggccccagcctccgtgccctcttccctccaggggggactcggtgcctgcctggggaggaaggagaggcgttgcaggtcagcatggggtggctgcagccggcgttggcctcaggcacaggctccacagggcctgttcccaccagcccggcccggcagggccgcatggtggcgcgtgagggaggaccctggagggggaccttcctgcaagaattggtgggggccgcggtctccgccttctagaggtggcggcctactgcccttcgggtgttgtgtgcaaagccccgtttcctgctccctgcgcttgtatcctgctgccttccctcctgctggtgaagctcgtgctgccctttgctggcctgtgctgccactgccgacccgtgtcccgtggtggagctgtcgtggggctcacgtgacttcccttcctacaggcgtccgagctgggccacagcctgaacgagaacgtcctcaagcctgc

SEQ ID NO: 27569 - DNA, 1215 bp, Homo sapiens
tgttctcggcctctgaccccaacaggggaaccaccggggatctcatcgggcctggccttgtgctgtctactgagaggccagccctggtgggcacagatgcactgcccactaggtgggcccaaattttccctgcagacgccatgtcccttctctccctctgtgtatgtggtttttcagtggtgtgattgcagctgaggacagagggcagggccagatctggggccagcgtagctgagggcgtcgctcgggagggcctgtgtcccggcttgaggccaagcgcccctgcccctccccacttgactaaaccactgttttattgcagcagtttggagctggtagaaaaggaagttttctgtaaaactgtcctccagttggggtggttgataaagagtgggccctggttctccagctccccagcagtttcctctgctctgaagcgggagaaacagatcccacctggtggggctgctgtggaccctgagcgctggcctgggaaggcggtcactgtccaggtgcagagctctcgggggcacagaattcccagtggtggactgagtaacagtcatttagagtcccccttctgtctctttaaaagcccctcggagggccacagttatcagaacagcggtctggaccacttccaaaacagcaacatagaccagagcttctgggagacctttggaagtgctgagcccaccaagacccgcaagtccccgagcagcgacagctggacgtgcgcggacacctccaccgagaggaggagctcggacagctgggaggtgtggggctcggcctccaccaacaggaacagcaacagcgacggcggggagggcggggagggcaccaagaaggcagtgccgccggccgtgcccactgatgatggctgggacaaccagaactggtagggcccactgcgcccccgtccccagcgcccccgggcgacttcgtgtttgcactctgccctcgtcgttcctcctccttccatttgacccaagaatcagcaactgcagtgtgaggacagcgtctcgggaggcaggaccctagggagacccgggtgtgcgccgcctgcgcgtggggagtcttcggtgcgtgggggcggcttgctgtccagcctgtgtgggggccgtcccgtcccacactcccctgggcattcttggactcaaggccggggctctgcgtggcttgctgggaggtgggctgcagcacagaggcctg

SEQ ID NO: 27570 - DNA, 1023 bp, Homo sapiens
ctccacaagggctgaagaggacgggcgggctggaccaggcggggctccgagacgcgtccgagacgggggcctgggcccgggagaggggcgggggctgggctcccggacccgggcgcggggccttttaacccctgcagacccaggaccggccgggccgccccaagacgaacgccgcagggctgggctcagcccaagccagacggcgagagtcgcaccgaggtggaagctgggggcgcggcctcgccggggccaggaaaggggcggggccgggtggggcccggggaggagcctgtgcgccccgccctccgtgacgcgccgcggcccccgcgcatataagtgggcgcgtccgcgcgtgcgcaccccgcgcgcgcctctctgtcgtggcgcggcttcccgcggtcttctctgcaaatgggctccgtggcctagcgcccccgtccccgccacccgtgatcgtgcgccgaggcccgcgaggggtcgccgcccaggtgaggggcgccgcgcgcgggtgggacgagcaggcccgaggggcggggggcgaggggcggggctgggccgggggctcctctcctctccgcctggcgagcgctgggctcggggtccccggcgggctcctctcgggtcgggcgggttgggacggcgcccaccaggttcccgacgtctgggccggggccccgcgcacaaagcgcctttgttccacccgctcggccggtttgggctggttggagccgcccgcgccccgcgcggcgaaggcggtgccgggagctggggagccccgcctcggtaaataacccagcgcggcggctccacccgctggggagcgcccttcatgacggaaggccgctgacccgaggggctcctccacccccatgcgcagatcccaccagccagcaagctaaagcatggcggccatcccctccagcggctcgctcgtggccacccacgactactaccggcgtgagtagcccctgccccccatccacgcggatgctctgctggcgccagtgccggccccgtgcaggc

SEQ ID NO: 27571 - DNA, 1075 bp, Homo sapiens
ctcacgctgtgaggctgttgctggggctgataagggtggggttcactgctgcttctggagagccttggacagcaggcagtcctggagctggacaagcaggacccagggcagccactgaggtgggcccccgtgccacctttagcggggggaaagggagcagggagggctggtcctctgagggattcaggccccttacccgagggcctgcggggcggggagtagcctctggctgtgagctgggaagccctcactctggagggacctggttcctgctggtaggtgtctcccaagggcctcccataggggtgttgccccaagacaggctgaggggtaggggctgcaggcaccgtggaggggtcttcctgccacaggcagcccagcttaaagtgagggtggctgcatcattctggcctggtataggcatggagtgttggagtccgggagtgctgcaggctggcagggatgggggtccacacacaggagtgcatgggctgtgagcttagtagactccttcataaccaaggtgggtggtgtccccacacctctgccaggagcctacagggattgactcagttctgttgagaggcagcttagtgagcaggtgggagtcagtgagatagctggagacttgatgtgtggccagggacatggtgagaggaggggcctccgtggggtgggaaagggtggggttcagtggtgggggagggactctggggaggggtggggatcagtgggtgctccctgcctggtaccctgttccactgcactataaatagctgtactagttggtgggaagctggtgggaaggcatctggcttgtggcctctgatggctgagcctttgtcctgtccacagggtggaggcagcctcacccagccatccaagccggtggtcagtgctgaggctgggtgggggagcctccgatggacccaggagtgggaggctgctcctaatggcagttgagccccctgcagccttttgcagtgtccagatgaagcccacagagaccctcctccatgtacacacagctgtgagggtagcaggagttggtgttgaagggagagcccagccacgc

SEQ ID NO: 27572 - DNA, 1029 bp, Homo sapiens
ggccaggcacagtggctcacacctgtaatcccagcactttgggaggccacggtgggcagatcacgaggtcaggggatcgagaccatcctggctaacacggtgaaaccccgtctctactaaaaataaaaaaattagccgggcatggtggcgggtgcctgtagtcccagctatgcgggaggctgaggcagaagaatggcatgaacccgggagacggagcttgcagtgagccgagatcgcgccactgcactccagcctgggcgacagagcaagactccgtctcaggaaaaaaaaaaaaaaaagttccagtaaagcaaattttaaaagagcccacgtgtccaggtgtacctataatcccagcactttgggagcctgagatgggaggtttgcttgagcccaggagttcaggactggcctgggcaacatagtggggctccctctctactaaaatacaaataaattagccaggtgtggtgtcacatgcctgtcgtcccagctactctggagggtggggctggaaggtggcttgagcccaggaggtcaaggcagcagtgaaccatgatggtaccactgcactccagcctcggtgacagggtgaggccctgttggaaaacaaaaatgaggaagaacctatgtggttaatcactattcttgttccacttacataaataaccacaccaggtttaatgaggccaaacttactctgcaatcaaatcaatcttttattatctttgatagaaatgtgttaatttgaaaacaatcctacttttattatctttgatagaaatgcgttaatttgcagccggtcacggtggctcacacctgtaatcccagcactttgggaagccgaggtgggcggatcacctgaggtcaggagttcgagaccagcctggccaacatggcaaaaccctatctctactaaaaatacaaaaattagtcgggcgtggtagcaggcacctgtaatcccagagacttgggaggctgaggcaggagaatcacttgaacccgagaggcagaggttgcagtgagcca

SEQ ID NO: 27573 - DNA, 1050 bp, Homo sapiens
tgtgatgacgcgggaggagctggacgcagaaggaccagcgaagaggctcatgactgcgtgatgtaggcagtgggaactcgaacaggagaatggctgtcagcggcttgcggcctggtggtgcctgttttaccccacattccctcccggaggaccctgaagggcgtggggactgtctgagatgatcaagccctttgtgtgagggcgaggggtacggagcctttcgctcagagcgcaaacgtgcgtggtgcctcagtgtagctctcctcagacacacacggcatttttcctataccacaacgttccctcccattctaacatcggaatccaaactgcgccttcacgcacgggcatctccattccctggcagcgattgtctttggttttggtgagaaaggaaataatggaacttagagaggatgaagtctttgagccaatgtgatctgtgtgtgtctgtgtgtgtgtctggatcagtgtgtgtctgtgtgtgtgtgtgtctgtgtgtgtccgtgtgatctgtgtgtgtgtctgtgtgtgtccgtgtgatctgttttgtgtgtctctgtgtgtgtgtctgtgtctatgtgtatgtctgtgtgtgtcatgtgatgtgtcttgtgtgtgtgtctgtgtgtgcatgtgtatgtctgtgtgcatgtgtgtgtgcatgtgtgtctgtgcgtgtgtgtctctgtgtgtctgtgtctgtgtctgtgtgtgcatgtgtgtgtctgtgtgtctgtgtgtctacgtgtgtgtgtgtgtagacgtggggggggggtgtgcactttatttcctcacgtgcccccgctgcctccagcaagagccccggcccatgccactcaccgcggagcagctccagcaggctgcccttggccatgagctccgtgatgatgtacacggggtcccccacggacaccacggcgtacagcgccaggatgtgtttgtgccgcagcttcttcatggcctggatctccgactgcagcatctgctggtgcaggaggttgtctgcggggacgggtggcctcggtggatgcagcccctgacccccca

SEQ ID NO: 27574 - DNA, 1046 bp, Homo sapiens
ctcacgtggactcccatccatcccaggcagcagcttcccacctgggccctacgtgcaggatgagggctccttccgggtcagaagacatggcggcctcggggcaccgtcccctgcatggggtgctcacaggatcttctcctctctccttcccagggtgtgcccttactacctgtcccggaacctgaagcagcaagccgacatcatattcatgccgtacaattacttgttggatgccaaggtgggggctcagtcctgtagctgacgactcctgatgtccaggggtgtccctgggcttgggaacagctgtccgagcctttgctgcttcagggccttagatcagcaggcctgggtgggaggactcacctctgtcactgggcaggggctcaacctggccagacacacttgtgagcagccccaggccacaggtcagttttctgagcagtctgggagcgggcaggctggtgggagtgaggagagacctccaggctgtggtccataggccagtgcccgctcttgatcctgacagctcaggttctctccttcacgtcaggccatgggaggcaccgagaacacaggaagcccactgactcccctcttcccagcgcgtgcccggccccacactcactccccctcccagcatgtgcccggcttcacactcactcccctcttcccagtgcatgcccggccccacactcactccccccacagcatgtgcccggcctgacactcactcccctcctcccagtgtgtgcccagccccactcccttccgccccgtgtgcccagccccacgctcactccccccgccagcatgtgcccggccccacactcaactcccctcctcccagtgtgtgcccggccctgctgccctcctccccatgtgccctgcttttgtgccccacactttttacttagtgcaggtgggatcacacgccacgggtcaatggtttgtgtgttcacgtgacgatggcgtggtgacgtttccagatcccgtcgttggttcgctcattctcggggtgtatatttattgagagctcatcatgctgg

SEQ ID NO: 27575 - DNA, 1017 bp, Homo sapiens
atccatcgctgtgaagttgtgtagccactccacaaacgtgtggcaaacagccgagccgggagaagggaagacgtgttcaaagattcatatgtggccaggctcagtggctcacgcctgtaatcccagaactttaggggccaaggctgggggatcgcttaagcccaggagtttgagaccagcctaggcaacatagggagaccccatctcaaaaaaaaaaaaaaagaaaaaagaaaagacttcagtgtgcaggtttaccagagttttgtttgcagttgccaaaactgggaagcagcccgcgtgagcccatccacaggtgaatggacagaccgtggtacccgaacactaacagcagccacgggcgtggactgtggtcacacagcagcagggagccgatgagtctcggacatgctaacccagagaggcccattgaggaggacctactgttttttgtgtttttgttttttgttttgaaatggagtctcgctctgtggtgcaggctggagtgcagtggtgtggtcttggctcactgcagcttccgcctcttgggttcaaacagttctcctgcctcagccttccgagtagctgggactacaggcacccgccaccacacccggctaatttttgtattttcagtagagacggcagttcgccatgttggccaggctggtcccaaactcctgaccttgtcatccactcactttggcctcccaaagtgctgaggttgcaggcatgaaccaccgcacccggctggacctactgttttattccatttatgtgacactctattaatagaaaaggcaggggtggggctggtggttatatggtgcacataactgccagaactcagtacacttaaaatgaacatcttaatgtgtgaaatttttttttttgagacggggtcttgctctgtcacccaggctagagtgcagtggtgcgatctccactcactgcaagctctgcctcctgggttcacgccattctcctgcctcagcctcccgagtagctgggactacaggc

SEQ ID NO: 27576 - DNA, 1017 bp, Homo sapiens; identical to SEQ ID NO: 27575

SEQ ID NO: 27577 - DNA, 1017 bp, Homo sapiens; identical to SEQ ID NO: 27575

SEQ ID NO: 27578 - DNA, 1015 bp, Homo sapiens
caaactgcactgtagagtgacggagctttgtgtctgggcctccatgccttctgacgtcacctgtgggggtgtgaaaggcagactctaccttgatttttcccagcacgccacaccggtggttctgtgcgctgaccgagcggctcggcttcccccaactccactgggcacctgccacacttttcctcatgtttttgttcactgtggttttgtcgtaagtcctggtgttggcctgaaccaatttctttttgtttgtttttgagacagagttttgctcttgttgcccaggctggagtgcagtggcgcgatctcggctcactgcaagctccgcctcccgggttcacgccattctcctgcctcagcctcccaaatacctgggattataggcacctgccaccacgcctggctaattttttgtatttttagtagagacgaggtttcaccgtgttagccaggatggtctcgatctcctgacctcgtgatccgcctcccaaagtgctgggattacaggcatgagccaccgtgcccagcctgatatttttagtagaaatggggttttgccatgttggccaggctggtctcgaactcctgacctcaggtgatcctctcaccttggcctcccagagtgctgggattacgggtgtgagccaccacgcccggcctcttgttcttttgaaacctgccctgacgttttttccatagtgcatcttggagtcagcgtgtctacttcctgtaaaaatcttactgtgattttgactagaatgtgttgaattcctgttttttttttgagtcagggtctctctgttgcccaggctggagtgcagtgggaccatcacagctcactgcagcctcaacctcctgggctcaggggatcctctcagctcaacctcccaagtagctgggaccacaggcacatgccaccatgcccggctaggtttttttttttttttttttggtgaacaccctggggttgcaccatgttgcccaggctggtctcgaactcctgggttcgggcagt

SEQ ID NO: 27579 - DNA, 1015 bp, Homo sapiens; identical to SEQ ID NO: 27578

SEQ ID NO: 27580 - DNA, 1015 bp, Homo sapiens; identical to SEQ ID NO: 27578

SEQ ID NO: 27581 - DNA, 1285 bp, Homo sapiens
gatgcagatgtacgggccacccctgccagggcctgagcaccggtgacacctctgacatcagcggggtggaagtggtgggggtccccatgagccgggtgctgggggtctcgggcctcgagggctaaaggggtgctggtgcacttccccactgtctgctccctctggccacgctcagccctttcccagtctgcctggagaacccacacatcatcgacaagcaccagatctgggtgggggtcgtccccagaggccccgatggagcccagttgagctccgcgtttgacagacggtgagggcctgtccctgggccctgctggggtgggaggtgggggagcactgaggcctgaggtcctgagcagtggcctctccggctctaggttttccgaggagtgcttatcctccctggggaaggctctgggtgagtgccctgaatgccccagctgtgcccatcctggatcctggacccctgctcccaagagctggtagggaaccctgcagacatcctgcccctgccttgaccccggcccctgcacttccaggcaacatcgcccgcgtggtgccctatgggctcctgatcttcttcccttcctatcctgtcatggagaagagcctggagttctggcgggtgcgtctcccctgtgttctgggcggggtgggtgagggcagggctggagcatgaagcaggcagtggtcacagctcctgcttgccctcatcggatcggcggcgtgaccagggctgccgtgtccctgcctcttcctcccacaggcccgcgacttggccaggaagatggaggcgctgaagccgctgtttgtggagcccaggagcaaaggcagcttctccgaggtcggcacttggccggggctctgggcctgctgccccctcgtgcctcccctgcctctcacagcttccccaaggctgaccactggccctgaccatgggctccggcggctcccgctgcctcttcagggctcctgcgtttccttcctggccctgagtgttgcctcttatcttacaaagcccccagcaccgggtgggtgtggtaacagtggccctcctgtctgagtagccctagtcggccaccctggccctggggttccccgtgttttctgggaagcactgagcaggcgtggggtcagcctgggatccgtgccaggaagaagcttccagaacccgattggccttcctggctaggacgatccttcatcttggagcatgagacctgggtctccctcatgggggaggaaggggctgggggggggctccaggctcagcctcaccaacttt

SEQ ID NO: 27582 - DNA, 1030 bp, Homo sapiens
cacctccccacacacccctgtaaatcccctgcctggcaggcaggcgggcaagcgggcgggggatcccagctgcctggctgtctgtgggtcctccaccccacctcacccacaggctgctggctcccaggtggtgcatgccctggccctccgcgggtgccccccacatcactttggttctctggcgggtcagcttggctcagtgcactcaaggtcgggtgcccctgccactggctgcgcttgaggctggcctttctccaggaatgtgctgcgggtggaacccaggttccttcttccttggggccttttgccccagaagcccataattcctcaggccaacccgaaattttctccctgcttcctgctgggagccattcccctcttcctgcccatccctgcccttcaggcccctggagtgagctccaggtgcaggcaccaggcacctgtgtccccttcctgccagcccctcgctgtggtcggactgtcttccctggacctgctcttacaagtcaccacctgcgagcctcatgagccgctggtgtgacttggacaggaccaagttgtggcactgtcaccggggtgtgctgtgcccccctcccccgacctccatcttggctcagggctccttgggaccatcttccctgtgcgtccaggtgctttgggaccccagagtgtgtggttggggtctgtgtgtggttgtgagctgtgtcctcctcaggcccacagctgctccaccctgtccctcctgtctgagaagaggccggcagaagaaccgcgaggagggaggaagaagatccggctggtcagccacccggtgcgtgagctgtccctgcacctgtgccgaccaccatagacacgcatgggaacgcagccgtgggtgcccccagccacggctggtcccgatgggaccagggaatccacccccaggagctgatgtccagggcagctgtgatgctgacggccaggggctcaagtgtgtggtttcttctgcagggggctcatgagtcccagctggaatcaggccccacccttg

SEQ ID NO: 27583 - DNA, 1035 bp, Homo sapiens
ttattagtgctaataggattttttatgcactatttaggattttcgatatatacaatcatatatattcaatatatacaattaatatatatgtgaatagagataattgtagtctttgtttctagtttgcatggcatttatttctttttcttgcttaactgccttagctagaacttcaagtacaatgttgaataaaagtgactagagcgggccgggggtggtggctcacacctgtgttcccagcactttgggaggtggaagtgggcagatcacttgagatcagcagtttgagaccagcctggccaacacggcgaaaccccatctctactaaaaatacaaaaattagctgggtgaggtgatgtgcacctgtagtcccagctacttgagagggtgagacatgagaattgcttgaacctggggggcggaggttgcagtgagccaagatcatgccactccactccagcctggacgacagagcaagaaccctgtctttaaaaaaaaaaaaaaaaaaagtggctagaacaaacatctttatcttgttcctgatcttaggtggaaaacttttttgttcctgatattaggtggaaaacttttagtctttcactgttgaatatgatgttacttgtaggttttctgtagattccctttatcgagttgaggaaattctcttatattcatagtgtgttgagtgttttttatcatgaaagggtgttgattttttttttaaagatagggtcttgttctgtcacccaggctggagggcagtggcatgatcatggctcactgcaacctcgaattcctgggctcaggggatcctcctacttcatcctcctgagtaggtgagactacaggcatgagccaccatgcccagctaattttttaatttttctgtagaggtagggtcctgctttgctgcccaggctggtcttaaactccagggctcaagcaatcctgcctcagcctcccaaagtgctgagattacaggggtgagtcactgcactgcacccagctgtgtgggatttttcaaatgcttttttc

SEQ ID NO: 27584 - DNA, 1129 bp, Homo sapiens
acacctggctaatttttgtattttagtcttaacgtgctggtcagactggtctcgaattcctgacctcaggtgatctgcccgccttggcctcccaaagcactgggattacaggcgtgaaacaccatgcccagcccccaattttttttttttaatagagagaaggtctcactcaagcccaggctggtcttgaactcctgagctcaagctgtcatccctcctcggcctcccaaggtgctgagattacaggtgtgagtcacagtacctggccttctttcaagactttaaaaatgccatcttggctgggcacggtggctcacgcctgtaatcccagcactttgggaggccgaggtgggcagatcacgaggtcaggagatcaagaccaccctggctaacatggtgaaaccctgtctctactaaaaatacaaaaaattaaccaggtgtggtggcaggtgcctgtagtcccagctactcgggaagctgaagcaggagaatggcgtgaacccgggaggtggagcttgcagtgagctgagatcacaccactgtactccagcctgggcaacagtgcgagactccatctcaaaaaaaaaaaaaaatgtcatctcactgccttctggtccaatagtttctgatgagaaattggctgttaatcttattgaggaacatttatatattgactagtcacttgtctcttgctgttttaggagattctctatctttgggtttcagcagtttgattataatgtatcagtgtggatccctcaatttataagctacttggagttcattggacttcttggatgtgtaaattcatgtctttcattaaatttgcaaagtttcagctactattctttgcatcttgaaatactagttttgtttctttctgtctgtttgccgcttatggaactttatgcatacattgatgtgcttcatggtgtagcacaggtcccttgggctctaggcatttttctttgttctttttttctttctgctcctcattttggataaattcagctgacctgtcctcaagttcactgtttctttcttcttccttctcaaatctgctgttgaaacttctggtgaaattttcactacagttactgtactttttagctccaaagtttctatttgg

SEQ ID NO: 27585 - DNA, 1033 bp, Homo sapiens
cctcggcctcccaaagtgctggaattacaggtgtgagccaccgcgcccagcctattttttattttttgagacaaagtctccctctctcacccaggctgtagtgcagtggcacaaccctggcacactgcagccttaaccgtccaggcttaagtgagtctcccaccttagtctcctgagtagctagaactacaagcatgtgccaccatgcctggctggttgtgttgttactgttttagacacagggtcttgctacatttctctgactggtcttgaactcctgggctcaagcagtcatcccaccttggcctcccaaggtgttgagattacaggtgtgagccaccgcacccggcctgttaatttctttatttccggtgaatgggccacactttcttgtttctttgcatgccttgtaattttttgttgaaacctgcacaatttgaagatgataatgtggttactttgaaaatcagatcctccgccctctgcagggttcattgttgctgtttgttgtggattgtcgtttctcgtttgtttagttactttcctgacctttttaaataaagattatattctgtcaggggtgcttgtttctgttcttttaggttagtggttagcttgtgctttgaaagagatttctttaaatatctagtggcaaaaaggataaagaggccgggcgcagtggctcacgcctgtaatgctaggactttgggaagtggaggcgggtggatcacttgaggtcaggagtttaagatcagcctggccagtatggtgaaaccctgtctctactaaaaatacaaaaattaaccgggcatggtggcacctgcctgtagtcccagctactgggaagactgaggcaggagaatcgcttcaacccagggggcggaggttgcagtgagctgagattgcgccattgcactccagcctgggcaacagagcgagactctgtctcaaataaaaaaaaaaaaaaaaaggataaagagtgtcttccatcctttccaggttgcctctgtactggggcaagtccttcagtgtc

SEQ ID NO: 27586 - DNA, 1027 bp, Homo sapiens
ggccaggcgcggtggctcatacctgttatcccagcactttgggaggccgaggcgggtgaattgcttgaggtcaggagttcgagaccagcctggccaacatggtgaagccccgtctctagtaaaaatacaaaaattagctgggcgtggtgggtgcctgtaatctcagctactcgggaggctgaagcaggagaattgcttgagcctgggaggcggaggttgcagtgagctgagatcgtgccattgcactccagcctgggcgacagagtgagactccatctcggggaaaaaaaaaaaaaaaaaatgccatcaacagcacgaccctggaggctgccccagccctgagagagttcgagggggtgaaacaaaggcaagcccttcagggagacactagaaagatccaaatgcataagcaggattccttgagaaaaggtctgtatcatcccttctgacaccagcaagccacatcagaaatacaggttgccttccccatggctacatgtgagctggtagtagtggctgagcagaaatagcccagctgtcctcctgaaatttagcagggtcttacttcattgagcagtcatctggttcgtagacaccagagttacagaaaagtttattgggaggttttgacagtttaatagaaaaaagtttattgtgacagttttgacagctgaatagaaaaaagtttattgtgacagttttgacagcagaatagttgctttgctggagagacggatctttggagctgccaactccatcattttggtgatatccagctctgttgctgaatttttagctatgctgttttaagttattttcttagtggttgctctagagatgacaatgtacatctttaacttaccacaatgtacttcagattattactaacttaacacttaaagtacagcatttttttttttatggagtttcactctgtcacccaggctggagtgcaatggtgtgatctcggctcactgcaacctccgcctcccaggttcacgccattctcctgcctcagcctcctgag

SEQ ID NO: 27587 - DNA, 1031 bp, Homo sapiens
atttttgtatttttagtagagacggggtttctcaatattggtcaggctggttttgaacgtttgacctcaggtgaggcacatggtgaaaccccatctctactaaaaatataaaagttagctgggcgtagtagctcacacctgtagtcccagctactccagagactgaggcctgagaattgcttgaacttgggaggtggaggtgcattgagctgagatcatgccactgcactccagcctgggtgagagagtgggactcggtctcaaaaaaaaaaaaaaaaaaaaaggattctctatttcctgaatcattgccatcatattttcatttaattatttgaacatacttatagtagctgctttgaagtctttgctaaactcaacatctgggcccactcagagtcagattatatcaactgctttttttcctaaatatggatcatggtttcctgtttacctgtcttataattttttttgttgaatactggacatttcagatgatctatgtctggattctgagttgttttcctgagtcttgtgttctgtttgttttagttaagttgtttggacttaaactgcaaaacttgcccacccacccctgcagcctctgatatctctgctcagatttttaaattcttttttttttttttttgagatggagtcttgctgtattgcctaggctggagtgccagtggtgccatctcagctcactgcaacctccacctcctgagttcaagcaattctcctgcctcagcctcccaagtagctgggattacagatgtgtgccaccatgcctggctaattttttgtttttttagtggagatgaggtttaaccgtgttagccaggatggtctcgatctcctgaccttgtgatccgcccacctcggcctctcaaagtgctcggattacaggtgtgagccaccacgcacggccttaaattctattttttagtctggcttcctagcagttgcttctgtgtttgcatatggtagtggtcagccagggatttgggcaagagggtgtgctcaaacactcc

SEQ ID NO: 27588 - DNA, 1070 bp, Homo sapiens
ggacacctgtcccagatgtcgctcagctctgaatttggggagtgctgctttctcacttggccctgtccacgtggcttctctgaaacatacccttcaaggttggggtggctgtggaatgtttcccagaagacatgttcctatacaaagacagaacaggtcacatttcataaatctcacatatgagaggcccatgtttttgtcctaggacatcgtaagttttgaatcccaagggtgttttggagctgtgggctgtgcccttccagtcccccacagcagtgctgttgcccaagaatctcctagcgagagaccaggggctactgccaggtgacagaaaagggaacatcagttccgctatacccacagctcacctggcggcctggggcctgcacagggcctggttgaggcagtggaccccatttttgggccgtctgtggagttgatgttcctgccagctggtccctctctgtcttccctggaacttcacctgcagtttgatgcctgagttaaaattgttcttctaaataattcactgtagactttctgtttttagctatgtgaaaacttctgagaaacttggagagtggaatgagaaagtgacccagtcagacctgtgagtgcctgtatcatcagcacctcctccttcctcctctccgcctcctgacactcagtcggggaagggggctgtgcacacttggcacaaagcttgttttggtatttgctggctattttttcttcctataacttttcttctctcaggtaaactatcctttaaacttttgtggaacagggaatagtagctgagagaaactcactcagccacctgaccacacttaaaactcccctctgcctgatatgcgtcccttatgtaagaggcctgcactggtcctggctgtatctctaactaatagagctccttggcttccggcagtgcacaagctggacaacaccacttggcctgggtttgttggtggcgaatttttgtttgttctaaccctaacccttttccctgcttagctccagctgttgggttctcagaattcctttcctcctttaggggtagttcttgagtg

SEQ ID NO: 27589 - DNA, 1033 bp, Homo sapiens
caggcctggatcacttgtccatcctgagtgggagtgggggcagcccccagagacagactcaggagagggggagtgcaaggatgtcccccagatgccctgtgctgcccaggggacagctcactggcagtgggacgaaaccgctgtctgtccagggctctcttcctagaaggtcttaggaactcccaaatgggtgctggctggggttgcccggcccggtgctctcaaggagagctgaagctagttattgggtgcagatgctggctctgacccctgccccttcctcccgggctcagcttccccatctgtcatggagtaataacaacccagccttctggtccactgaggaatgtgtgtgcctgtgtgtttgacgctctcagaacaggcctgcagcgctgtgagccttggaagggggcctcacagctgctgccgccaccttggaggcccaggatgggactgagaaggggaagggagaggtcagagccacagctgttgggcagggacctgctgtaggaagagaaggccagggaggcgctggtggtggcctcaggctatgcaggtgatgcccattgtttccagggccatcccagtttggaggttcctgtttctagaggaggttcccttgtgaccccctcatttccacacccgagcaatgctgagggctgtggggcccccaggggcttgagtgtggtttatggcacagcagggactgatcacagtggcaccgggtgtcagtggccagtggtcagtggccaggaaccctcaggaccctcctccttgtgtgggtggcatttacccacccacaggtcacgctcaggacccgcatctcattccgatcctccttgtgtgggtggtacttacccacccacaggtcacgctcaggaccccacatctcattctgaaggccgggcacaggcggttgttttctctccaacttcggtttccccatccccactcttagggcacaaatgcaggtgtagcttccccatgcccactctttaggcacaaatgcaggtgtagcttccccatccccact

SEQ ID NO: 27590 - DNA, 1551 bp, Homo sapiens
gtgtgatctcggctcactgcaacctccagctccctggttcaagcggttctcctgcctcaggctcctgagtagctgggattacaggcatgagccaccacgcctggctaatttttgtatttttagtagagacggggtttcaccatgttggccagcatggtctcgatctcctgacctcgtgatccacccgccttggcctcccaaagtgctgggattacaggcgtgagccactgcgccgggccctcaaaggagccttttcacgtgggagggctgtgccgactctcaccaccttcctgttcaacatctgtcctgtttccttgttttccttcagatggagttttgtcttgtttactacccgagagcccataggtgtgcctcccaaagggccctcctgcagaccagagcaagctcctctaggccaagccggggcgccgccagcacgtgcccttctgctggaaccgggaggtctagagccaggcccagaacaatctgtgatttcttgtgtttttacttgacttggtggtttctcttttgccaaaaggtccttacttgacttctgaaggctgtttgtaccaaatacttttcaaaagcccaagcctggtctcctcacagcttcctatggcagtgctctcccccctcccagtgctatgcgctgggcaacttggggtgccccccatgaggccaagggaggaccctggggtcgagtttccttcgggggcattgtgtggaggggcaggcagctcgctccaactgctgggagtgggggaatcccagctctgcccatccctgccaagttggggttgtgtgtggatcttggtgttaactcttgcttccttctctgcttctgccatgcttccaagcagcagctactccatccgccactcaataagtatgccagccatgaggtaatgtatgcctgctcgctgcggctccagagccgggtgtctctggtgggggttggggcagctcccgccggttacaccttgcccttcccatattcctggattaattgaggactccattcccttggcaacctctgatgactaagggccggtaaaaaccccctctaggctgacgaggaagagctggtagggggtcaggctcttcacctgcagcctccagaggagatccttgtgtcaaactgggccgtgtcctttccaagtcctgaccctggctgcctgcagtgggtggggtggggttcgaggggctcgcacacagatcctggcacttgccctggtgggctgtcactcaggacacttcacggtctcagccttcacggaaacacccagagctgtggtccttattctgtgcctgtcaggcaccaccctgattctcaggattctgtgcctgtgccgtgaggcactgccctgattctcaggagagcccagaactgtggtccctattctgtgcctgcgccgtcaggcaccgccctgattctcaggagagccctgttctccttgtggggactctggctgggtgtcgcagacgtgctggcctctagagtccccgggcctgggaggggtatctgtttgtgtgggagggactgagtgggat

SEQ ID NO: 27591 - DNA, 1046 bp, Homo sapiens
ggggatagcagagaggggccgacagccccccaactgcacagacttttcataacctcagtacgagagcccggggtatccctgtaggggacagcagagaggggccgacagccccccaactgcgcagacttttcataacctcagtacgagagcccggggtgtccctgtaggggacagcagagaggggccgacagccccccaactgcacagacttttcataacctcagtacgagagcccgggatgtccctgtagggtatgacagagaggggccgacatctccccagctgcacagtcaaggggtttccagttgccttgtgtgacgtctggacctgtccctgtggttgttgggcatggccgacctcacttttgacctggggagtctccggaatgacctggctgtctcacagttttgccatgagatcttgggatgttgttagggaccctttggaggctggccctaaccctgaggcccttccgagttaggagagcagcacaaccctctcctcttgacaccgacactcttccctctctctttaaaggaactctgcgaccttcaagtcgtttgaggaccgagttgggaccataaaggtaattgtacctggactgtttgatggtcttggcaaggtgtgacctgttacagcaacttgtttattattagtcatttagttatggtagactcacatacagttgtgggaagtaatgcagagaggttccttgtgccttttacacagttctctcctgtgacgacatcttggaaaatcctgtagtgcagcctccccaccaggacattggcactgactcaggacacagaacgcctccacactgcccttcctggtccccactgcccttcctggtccccactgcccttcctggtaccttcttggccatgctgaccttcctcccgccctacccccggcaacccctagtccactctccctttgtataattgtgtcatttcaagaatgtcacgtaaatggaacgatacagtgtgcagctttttggcattcactgtcttcatttggcatcgttctctggagacctgttgggg

SEQ ID NO: 27592 - DNA, 1051 bp, Homo sapiens
gagggcgggcgggcgggcggacgggcaggtgagctcgctgcgggtcgggcgggcggatcggcccacgtcaggcccgggcaggcgggcgggcgggcgcgggtggggggcgggggcggcactccagagccggaaatggcggcgacccccgggccggggctgcgcgggcgctcggggccggagctgctgcgacgccgcggcctgggccggggcgggggcgcgggaaggtcggcgccggggcctgcgggagccgggccgggccgggccgggggtctgagcaccgtggtgggggctggggcggcgctctccgcgggtctcttcgggcccggacgccccctccgctcccccaggtccccgcggccgcccccaaccccccggggtctcctctcctgcggggggactggagaagctgggccatcgctggtcttagggaggcagataatttagtccctgggtcgttgtgtttatagctcggggaattgaaaattgttctgtaacgcatcgtaaattaatctttccgacgttgtaaattccaaaaagcatttggtttgttagaaaaaacctgttttctccgctttataaaaacatttgaagccatgctttatattgaactcttaaggagagtattaggaactcgtccgttcaggttctaacttgttggtgttaagtgtctggattaaagactctctttttcgtgtgccgaagccatgatttctcaaattcattcagttgtgtcatacaggaaaaggaagcaaaaatttcagctttatttttgttttccggcttaggcttggttgggaagatttgatggtggttagacacgtctgcccttatttgcctgtttagaaaaacctattctaatgacaaaaacagttacattgctcccactattgtcatggttacctgaaggcaaaagtttactcaaagcttctgagattttatgttcgtttatttgcttctctttttaaaaaaatgtcagctgagtttcaggaatgagtagtctgtcaaacaagagatgaaattagaagcctggatctaagggctttggggaagt

SEQ ID NO: 27593 - DNA, 2269 bp, Homo sapiens
ccttggatcttcctggaatgcctggttccttaaccccctagcctggcgactgcctgcctgccttgccacccagttcccttcctcgcttaattttcccacagcgctgaatcctcctagtgtcctgcttaatgcatttatcatacttaatattttactgtgagttagtaaggtccgtggagagaatgttttgtgaaaaaaacagttgctggcacatgatcggggcccagtaaatatttgttcagtgaatgaacgtgaggagcttagcagcagctgtgcgtggtgctggccttgtcacccggaagtccttgtcggtgaggactgagcatgtagaggtaagggttcctggagtgttggccctcaggacagagagccaccatctctcacctgcccaatgaggaaagacagccaggtaaggggtggcttggaagggtgcatgggacccttgtaaatcttttcgcaactttgaatctataattattttgaagttaaaacgtttctaaaaagtcagatctgttgggggcacagtggctcatgcctgtaatctcagcactttaggaggctgaggcggacggatcacttggagtcaggagttcgagactagcctggccaacatggtgaaaccccatctctactaaaaatacaaaattagctgggtgtggtggcgtgtgcctgtaatcccagctactagggaggctgaggcaggagaatcacttgaacccaggaggcggaggttgcagtgagccgagatcgcgccactgcactccagcctgggcaaaaagagcaaaactccatcttataaaaaaaataaaaataaaaattagctggttgtggtggtgggcgtccgtaatcccagctactcaggaggctgaggcaggagaatcccttgaacctgggaggtggaggttgcagtgagcaaaggtcacgccacactgcactccagcctgggtggtagagcaagactcagtctcaaataaataaaaataaataaaaagtcagatctgccagtggtaataatgcttttagaaattttgtctttgattaccaggaaaaaccctacatgctagtccttatactccgtcgtgacatttggtaattaagtagagtgaggtggaatgatctccctggctcttaattcaggaggactgcctgagagtgactgtggctgatccccttagcatgaggcccttcagctgtggtgctgtgacagagccacagaggctgcttggtgacttgcagactctggagtcctttccacagcctccacctcatgcctacattaactcagagtgagtgggcttcagggccttcctgcatccctgaagatggttgtattaacgtggttcagagattgaacagacgctgcacgtttctcaggcatttttcctcagttccccttgcttggagggtggataccactgagcctggttgtacagctgcctccgtgaccagcacctttgcccaaggtctccctgttaacaatcgtcagagctggaacttgaactcgagtcttctctagaccaggtttcttctaagtatttggcatcaccaggaagagccctgtacaaggtgctggtggttttatccttagagcccagatgtgaggtgctcacgtgtgtgcctggggttagcagttggtgtttgttgaatgaatgactaaaatgcagtggggcggggagtcatgataaggtagaattttatctgaggtggagtttgcttctgaaatcaggcagtaaggtgaatgtgatacccagttaggagtatgtaatgctgcaggtaaactgtaacagcaaatgaaagcagtatttctccaggaaggaaacagacccctgggtcctcgggctgggttggaaaaagccatttgtagagaaatggaacatggtggctagccctgcacaagacatagagaagagacccttaacactccagttatctccaagtgggcagttagaatgagtgcttctaggccgggcacggtggctcacaccagtaatcccagcactttgggaggccgaggcgggcagatcttgagatcgagagatcgagaccatcctggccaacatggtgaaaccctgtctctactaaaaatacaaaaatagctgggtgtggtggcgggcacctgtaattccagctactagggaggctgaggcaggagaattgcttgaacccgggaggcagaggttgcagtgagctgagatagcaccactgcactccagcctgggcgacagagcgagactccctctcacaacaaacaaacaaacaaactgcagtg

SEQ ID NO: 27594 - DNA, 1027 bp, Homo sapiens
tgccattctcctgcctcagcctcccgagtagctgggactacaggcacccgccgccacgcccagctaatgttttttgtatttttagtagagacgggatttcatcgtgttagccaggatggtctcgatctcctgacctcgtgatctgcccacctcggcctcccaaagtgctgggattagaggcgtgagccaccgcgccctgccacatcctgttttttttacaacagggtgtcactctgtctctcacccaagttagagaggagtgacacagtcttagctcactgcattctcccaggcccaagcaatcctcctatctcagcctcccaagtagctgggactttaggtatgtgtcaccacagttgactaatgttttaatttttgtagagatggggcctccacatgttgcccaggttggccttcctgggctcgatcctcctgcctcagcctcccaaggtggtgcatgcctacagtctcagtagattagaatcaccctaaccctcagtaactgagattgtaggcacgcaccacctcactgactcacctcaaactctcttttttgagatggagtctctgtcaccagactggagagcagtggtgcgatcttggcacactgcaacctccgcctcctgggttcaagcgattctcctgcctcagcctctgtagcagctgggactacaggcatgcgccactacgcccggctgatttttgtattttttagtagagacggggtttcaccatgttggccaggatgatctcgatctcttgacctcatggtctgcgcaccttggcctcccaaagtgctgggattacaggtgtgagccactgcgctcggcccatctcaaacttttaataaggctcttcgtatagaaatttttaaaaaattaaaaacatttttggccaggcttagtggtttaagcctgtaatcccagtgctttgggaggccaaggcaagcagattacatgaggccaggagtttgagactagcctggccaacatggcgaaaccacgtctctactaaaaatacaaaaatt

SEQ ID NO: 27595 - DNA, 1049 bp, Homo sapiens
ggcttgttagggttaaattggtgcaccttatacttggttgcatactagactcactggaatgatttgactttcgtcatagttgcagaggcactctgaaaccctatgtatgtgcttcaccagggacagccccacgcatgggaggtggtggccagccatcaccccagggtgaatttctctaagagcagtcctaggccagggggtgagtgtgggaaagtcagggccgtttccatcagttaacgtttcagagcgggttcccgctggaagtgctggaaatacccagatgccatctgtagcattttatgaactgtggcggatccactctctgtgtcttgagcttctgctctgtggtctgctcagtggaagcatcctgtcagtccactgtacagtggggtggagccgcagccagggtgggtgtgccgtttgattggtcacggaatgaacagggcaaaggtcactaagtagatatgatactgcaagtaggattgtggtcataggtatttttatgaatttgtgttatgtgaagttgaggatttgaatgttgtgattattatatccagataaagttctagcctggcacagtgcaggcacgtgcctgtggtcccagctgcttgaagtgggaggagagcttcagctcaggatttccaggctatagggagctgtggtcccaccattgcaccccagcctgggtgacagagtgagaccccatctcaaaaagaaaagaaaagaggctaggcgcagtggctcaggcctgtaattcaagcactttgggaggctgaggcaggcggatcacttgaagtctggagttcgagaccagcctggccaacatggtgaaacccccccatctctattaaaaatacaaaaatcatacttacccggcaggggagataccatgatcgcgaaggtggttttcccagggcaaggcttagccattgcactccggatgtgctgagccctgcgttttccccaaatgtgggaaacttgactgcgtaatttgtggtagtggagggactgtgttcacactgtcccccccgcccaaaaaaataaaaata

SEQ ID NO: 27596 - DNA, 1125 bp, Homo sapiens
cgacagagcgagattccgtctcaaaaacaacaacaagaacaacaacaaaaaattagccgggagcagtgatgcgtgccgtagtcccagctactctggaggctgaggcaggagaatcacttgagcctgggaggcagaggctgcagtgagccgagattgtgccactgcactccagcctgggcgacagagcaagactccgtctcaaagaaagaaaaagaaagaaaaaagtcttccccgtgagagtagatttctactgaatcgattgctggttttatgccttttcttccgtgataggaagtatgtccagactcatctggctggggatcctcaggagagcctgcggggggcagcagaggcccgcctgggccagggcgtgcaccagaccagaatcctgcggatttagtattgtgagggtagaagaccagcaagcagcatgacctcgtggttactgatcttatgaagaacacttgtctttcatatttgggactgtgttaaggttttctggaatatttttggttgtagtaacgattctgctttaggagctttcttctctagtgttgcacagacctgagtgatttgaccagcagtgctgcggtaacggaagaccactcgtgtcttcagactcgttctgttcctgggggtgcttgcttgttctaggccccctttgtatggagaggttcaaaccttgattgaatagtcgctacccaggtgtcataacctgtggcctcattggtgtcacctggactttttgtctgctgtttgcaccatcgaaagtgatgtgcgctggccgggcgcggtggctcacgcctgtggtcccagcactttgggaggcgggggtgggcagatcacaaggtcaggagatggagaccatcctggctaacacggtgaaaccccatctctactaaaaatacaaaaattagctgggcatggttgcgagtgcctgtagtcccagctactcgggaggctgaggcaggagaatggcgtgaacctgggaggcagagcttgcagtgagtggagatcgcgccactgcactccagcctgggcaacagagcgagactccctctcgaaaaaaaaaagtgatgtgcgcttgggactgggagggcgaggcccgaggtacctgggtgcccg

SEQ ID NO: 27597 - DNA, 1050 bp, Homo sapiens
ccagggttcctaacagcctgttttttttctttctttttttttttttagtgagacagagtctcgctctgttgcccaggctggagtgcagtggtgcggtctcagctcactgcagcctctgcctcctgggttcaagtgattctcccgcctcagtcttctgagtagctgggactataggcgtgcactaccatacctggctgatttttgtatttttattttttatttattgttgagacagggtctctttgttgcccaagctggagtgcagtggtgccatcttggctcactgcaacctccacctcctgggttcaagtgattctcctgcctcagcctcccaagtagcttacagtagggattgcgggcacctacgaccacgcccagctaattttgtatttttagtacagatagggtttcaccatgttgaccacctggtctcaaactcctgacctcaggggatccgcccaccttggcctcccaaagtgctgggattgcaggcgtgagccaccgcgccaggccctaacagccaccttcttagcatctgtatattcagaccgtccattgcaggatgtgtgatctttgtggcctggaatgtctctctctgagcactccatcctcccacccctcaggcagtgtctcttgaggccacctgcccagccaccatcttggggggaccacaggaggctggggagagagcgaggcagtagtgagaagccgggacgctcaccgttggccgagtaccttagagcagccctgacgcctgcttctgtctcttggtgaaagtggcgcccagacttcagtccttacagcccagaactcagaaccgtggaggtgctgtgacccacagggtttaccttgtaattgttgttaaaacccttctgggcttcataatggaatgcttatgttgaaatattattttaagtactattatctatgatgtggttagaaatgccaaagaatttttagcttttttgagacggagtcttgctctgttgcccaggctggagtgtagtggcgcgatctccgctcactgcaagctccccctcctgggttcac

SEQ ID NO: 27598 - DNA, 1050 bp, Homo sapiens
ggaaatggcctcagataatttcagaggtttttaaataaagaacgctcaaaatggagcaaaatggagagcccctgataggcctcctgcgtggaggtttgcagtaagccagaggcacctgtgggtcccagggagagacgggctgctccatggatgctcctgggacctggggcactgggtgggcctcaggcagataggagctggtccgtatctcttgccaagcccaggccaactcctgatgaagcagattcctgtgggtgacaagtgtcagaagatagaataggaccttagggtcaggaaggatttcttgaacaaaaaaggggaaaaacagattgagagattcagaaagctgtaatatattctgtgacctcaaaggtgacttggaggagggctgttgttcagcgacgggcgtgtagtgaacactggggcatttaaacggttcagatgctgaatttaatgttatatgttttttactacaattggtaaaaaaaaaaaaaaaagcttgtgctcatcaaaagacacaccataataagtaaaaaaagaactgtgaactggaagatacttgtaacatttttaaccagtgaagggtcggtgtcctggatatgtccactgggcaccacagacagaacggccttgaaggtaggctggagacgcctacccttatcaggccaggcaagcactggggagcctggccgtaccagtcattgttgaggctgcaggaatggcagggagccctaagttccagtggccactggtgcagtcctcagagagcagttggcacaccgcctcaggctgagcctgcccattcttgggcacccagaagttccactcttaggtatacaccagaagaattcttcctcgactgtttgtgctgaaggacaaggtttaagtttttaaaatttccagtgtcacagactgatgatatttttgtaaactacaacaaaagtgactagctagtaaaggaaatcacagaacataaaatacaaacccatgtcattattattaatattttgaggcagagtctcgctttgtcactcagactggagggcagtg

SEQ ID NO: 27599 - DNA, 2003 bp, Homo sapiens
gtggctcacacctgtgatcccagcactttgggaggctgtagcaggcggattgcttgagtctgggagtttgagaccaacaagatcctgactctataaaaattttaaaaaatagctgggcgtggtattgcacacctgtagtcccagctactcaggaggctgaggtggggggatcagctgagcccaggaggtcaaggttgcagtgagctgaaatgtgaccactgcactccagcccgggcaataaagtcaggcggggaaaagaaagaatgagttaacattttctcagctttatgtgttgagtgattttggattctatcctgaaatggtaagaatgaaaagaaaatctgccaagtccatccgttcctacactctcactgcctccaagtcattctgcgctcttgagccagaacgacctggccgtttttaaaaatggagttttttgccttagtaattgacttgtgtaagagttctttattccacttgtgaattgttttttatacgtacataatgtaaatattttctccccttctgtgcctttcagtatgaatctatctgaactcgattctgctgttgtgtgtgtgtcttttcctcagtaccagatggtcttgattactgtagatatatagtatatgtcttgaaatcaatagggtaaattctctaacttttgttctttttattaatgttgctgtggctaatctgtctgctacatttccttatacatttaaaaaaatcagtatcagtttctgcaaaaaaaaatcctcttggattagggttaggcttctgtcaagtctacagatcagtttggggagaactgacttctttatatcgaggcttctaatccgtgaacatgaggaatctttttcttatctttagtatcttagcaatttgtggttttcaacgtacagatttcataggtcttgttatttctttttctttttttgaaacaaggtctcactgtgtcacccaggctacagtgtggtggcacgatcatggctcactgcagcctcgagcttctgggctcagccatcctcttatctcaacctcctgtgtcactaggaccacagacatgagccaccatgcctatttaacttaaaaacaaaaacaaaaaaccgggcacggtggctcatgcctgtaatcgcagcactttgggaggccgagggggggattgactgaggccaggagtccgtgaccagcctggacaacatggcaaaaccctgtctctaaaaatacaaaaattagctgggtgcagtggtgcgtgcctgtagtcccgtgcctgcggcatgggaatgggttgagcctgggaggcggaggttgcagtgagttgatgacttaggatttttcttctcggtcactttgcaagccggggacccctggccagtgatgccccacctgggccctgcttggccacactggcgtgccccaactcacctgtgttatagcttgtactgtgttcggccattcccgagctcatgtaccgcactcaagatcaaggatacactggacattgaagggtgaggagggcggagaagaactttattgagcagtgaaacagctttcagcggaccaggggatgcaggggtggttcccctacctgaaggcaggaaagtccgcctgtgtggctgggtctggggctttttatggactcaggatgcggagtgcttgcagagcttgctgatgggtttgtgagtatgcagaaaaggttaaagtgggcatgacagtgtagaaaaccaattataagaggccgggcacggtggctcacgcctgtaatcccagcactttaggaggctgaggcagacggatcacaaggtcaggagttcaagaccatcctggtcaatgtggtgaaaccccatctctactaaaaatacaaaaattacctgggcgtggttcgcgtgcctgtagtcccagtgacttgggaggctgaagcagaagaatcgcttgaacccgggaggcagagattgcagtgaactgaggtcacaccactgcactccagcctgggcaaacagagc

SEQ ID NO: 27600 - DNA, 1102 bp, Homo sapiens
aaaaccccatattgatgtcatttcctaaatatttggttaaaaaaaaaatctgggcctggaattttatctggttttttttttttttttttttgagacggagtctcgctgtgtcgcccaggctggagtgcagtggtgcgatctctgctcactgcaagctccgccttccgggttaacgtcattctcctgcctcagcctcccgagtagctgggactacaggtgcctgccaccacttccggctaatttttttgtatttttattagagatggggtttcactgtgttagccaggatggtctcaatctcctgatctcgtgatctgcccgccttggcctcccaaagtgctgggattacaggcgtgagccacggcgcctggccttctggggattttttattacaaatataactttattaacagatgcaggcctattcagattttctatttcatgtcagtcttggtaaattgtaattttcaagatatttgtccatttcatctaatttttctaatttcttggcatgaagttgttcgtattttatccttttcacgcctctaggatctgtagtgatgtctttcctcatgttgctcaaagaaccaactcttttggctttgttgaagttatctgtttgttttcatggatttctgttccttatgatttccttgcttgcatttatgttgggtttatcctgttactttgtagcttcctgaggcggagccttaggccttgattaacgtgttgtactagtcagcattctgcagaggaacgttgccattatctgtgtctctttctaaaggagatttgttatgaggaattggcccacgtcattatggagacggaatctcatgctctgccatttgctgaagattgaggaaagcagtgggataataacagtccaaggacaggaggagacacgtggccccgctcaggctggcaggcgagaaggaaaacccaggccaactcctcctcccacccctttctattcgggacccccgtggactgggacgacactcacctgcacagggcagcgcagttggcttcatggagcccccagctcaggtgctgctcttaccaagaaacaccctcccaggcacaccctgaagtcatgttt

SEQ ID NO: 27601 - DNA, 1066 bp, Homo sapiens
aatccacacgtggaccattgtgggtcccttgggaggccagcagccagactacggaatccacatgtggaccatgggaagtcagtctcttgcgtgtcctagaccttgtgggtggcgccctgcataggggagcagggggaacgggtctgatgtccctgtgctggctgagggctcagagctgcccgcactccgtagctcatgggatgtgctgggcctgcctttggcgccatgctgcagactccagtgggcctggtttctgcagaatgtccatggtggccgctgcagagttgcagaggtccctgtagagataaagctgaggaggaggctgtgtgtgatggctctggctcggaccaaccagatgagcctcctgaagcccccttccctgcctgcctgctgacccgtggccccagctcactcattgccctcagcagccacccgaggctgtgcagaagggtaggttcaggttgaccaggaagctgccaaaagggacatggatatgaggatacatctggacgtgcttaggaacagggtgctggttgagggcccccagctgacccctactgcagatccgcatgtggaccatgagccggctgccagcactaggtcctgggcagctttgtttgtcccacttttctttgtttcttctcactaaaatgatcacgaagacctttgacaagaggagagatatgcactgtgatattaaattagaaataatttatcaaaatcagacctctcctaaaagaataagaaattcattgtttggcccatcctgaaaggtgaggtggcgagacagtggggtgcctccgtgccgcttcgtgcagcagcaagttcagcctgagatgctggctgtactcagcctttgcaatttttgtagatgtagcttaggacgtgagttatttttccgcagactggccaagagccaggttctaagcttggacctaaggtagaaagctgcccatcgggggccctagctcagccccaccaggccctctgttgggcctgcacacagctctgtggctagaacactccaaggcccttcggtacccatcagagtgggccccttgccagg

SEQ ID NO: 27602 - DNA, 1050 bp, Homo sapiens
aaaaattacatcatggtcccgtggcatctgggacagctgttatcagctgaaaccccccagagcagctgtaaggtgggcacggaagagctcagtgtgggccaagttgggtttaagggcctggttggatgtggagggggagatgatcgaagccttagggtggagagagattgccttggtaacatcatcagggtaggctgaaactttcaggtaagcagagaagatcagaagtgtttgagactgcagttcattgtcaccaggatctttggaggtttcccaaaggtgttagaaaaagaggtgttagtaagtgataaccaggagtggagaagagcacaggaacagagttattcagacacccggtgtcttgggggtctcctgcagcgccactggcttcaccacgcggtcagacattgggcccgcccgtgatgcaaatgaccctgtggatgatcgccatgcacccccaggcaagagaaccgttggggaccagatgaagaaaaatcaggctgctgacgatgacgacgaggatctaaatgacaccaattacgatgaggtgagatgtgtccggctttcgtggctcctccagccagtctctgggagcagctgacctaaccagtgtgtgttggtgtctgtaatgaatggcttggagtggctcatgcatttaaattttagctattcatggaacatctttactgagagtgagagggagcaggaaaaacacggagaaatgtgcactttttgtccctcagaagagatgttcttgcaggtgttaggaccactgccttggcattttctattgcccagtcttttttttttttgagacggaatttcgctcttgtcggaagagatgttcttgcaggtgttaggaccactgccttggcatttcctattggccagtcttttttttttgagatggaatttcgctcttgtcggaagagatgttcttgcaggtgttaggaccactgccttggcatttcctattggccagtctttttttttttttttttttgagacggactttcgctcttgttggccaggctggagtgcagtggtgtg

SEQ ID NO: 27603 - DNA, 1128 bp, Homo sapiens
ccaaagtgctgggattaacaggcatgagccaccgtgcccggcctaaattgatttttctaagtgaagtagaaaactatttttggggctgggtacagtggctcacatctgtaatctcagcactttgggaggctgaggtgggaggatcacttgagcccaggagtttgagaccagccttggggagaacctgtctttacaaaaaataaaaacttagccaggcatggtggcccacgcttgtggtcccagcaacttgagaagctgaagtgggaggatcacttgagcctgggaggttgaggctgcagtgagctgtgattgtgccactgaatccagcctgggcaacagaatgagacccatctcaaaacaaaagtaaaaaacagttgctgcatccaaatcccttctaaagcttggtgatctggaggctaggggtgagagagggcatggtcctacctgggcacatgaaattctgtcagagaattaatgtttttgggggctggatatttccagaggaagttggcagaagtcacagaagaagagtggctgagcatccccgaggttggcgatgccagaaataaacgtcagcggaacccacgctatgagaagctgacccctgttcctgacagtttctttgccaaacatttacagaccggagagaaccatacctcagtggatccccgacaaactgtgagcttccaaaaaagggcacatgtggcccatttagtcctgttagatcagtggcaggaatggtgggtggtgttggattcaatgcttctgcaggtcatggctatgctgtggccgagtctgtctgcacagctgtgcatatgtcaggccactggggaagtatttcagagagtaaatttcttgggcatgcagtgcaaaccgttgttttattcttgcctttcctctcttcccctccagcaatttggaggtcttaacacaccctatccaggtggactaaacactccatacccaggtggaatgacgccaggactgatgacacctggcacaggtgagctggacatgaggaagattggccaagcgaggaacactctgatggacatgaggctgagccaggtgagtttgtcacacagcattttcctgtggacaggtttagacagtttaattttgttttgt

SEQ ID NO: 27604 - DNA, 1047 bp, Homo sapiens
tttttttgagacggagcctggcaccgtcacccgagctggagtgcagtggtgtgatctcggctcactgcaacctccacctcctgggttcaggtgattctcctgcctcagcctcccgagtagctggaactataggcgtgtgccaccatgtctggctaatttttgtatttttagtagagacggggtttcatcatgttggccaggatggtcttgatctcctgacctcgtgatccactcgcctcagcctcccaggatgctgggattagaagtgtgatttttttgtatttttagttagagatgggatttcaccatgttggccaggctggtctcgaactcctgacctccagtgatccacgtggctcggcctcccaaagtgctgggattacaggcatgagccccggcgccccggccagcatgttctcagtttaaggcaggatgagacttgactctttggtgtgtgtggaccgcattcgctcatctatgtagaccgcattcgctgacctgtttattcgctgacggacacttggaccactttcaccttttgactattgtgaataatgctgctgtgaatacgggtgtacagatatttgtcagagaccctgctttctattctttcttttttaataaaaattttatttatttttttttgagacggggtcttgctctgtcacccaggctggagggcagtggcgtgatctcggctcactgcagcctctgcttcccaggttcatgtgattctcctgcctcagcctcctgagtagctgggactacaggcatgtgccaccacgcctggctaatttttgtatttttagtagacacggggtttcaccatcctggccaggctggtctcgaactcctgatcttgtgatccacccaccttggcctcccaaagtgctgggtttacaggcgtgagccaccacgcctggtcaaaaattacacttttttttgtagagacagaatcttgggaggctgaggcaggaggattccttgagcccaggagctggaggctgcactgagctatgattgccactgcactcctgcttgggtgac

SEQ ID NO: 27605 - DNA, 1050 bp, Homo sapiens
atgggggagggatactgtggtgggcaagttcccatcctggaagggatgcttgggttgagccctcactcctgcctttttccagtgtgtgatcttggatgcttgggcggtcactctggtccaggcttccctcatctgcagggtgagaacaacggtagctcaaagcctgtgtcctggggctctggagatggtctgtgtgaagagctgagccggcacctggcacgtgcagacccgttgtgggtgttactcattttctctcctgagaaggcaccagagccacacgttgattgaactctttcctgctgctgacgaggctgtgccttctgctcccgcgatgcagcgtgtgccgtcagctcaggtcagataacgacagacggtgtgcctaccaggcaacctgattccatccagggattcctgccagggtagagcttttgtgggtagtttgtttatttttattactgtggattcataaaaggagcactgtttctcctgtcactggaagtgtgtagtagatgctgctcttgaactgggtccagaacgagtgctagtcagggggctgttctgaagctaatctgtgcaggtggcttcttttttttcattttttgttttttttttctggttttttttttttttttttttttgagatggagtctcgccctgtcgcccaggctggagtgcagtggcgtgatctcggctcactgcaagctccgcctcccgggttcacaccattctcctgcctcagcctcctgagtagctgggactacaggcgcctgccaccacgcctggctaatttctttttgtatttttagtagagatggggtttcactgtgttatccaggatggtctcgatctcttggccttgtgatctgcctgcctcggcctcccaaagtgctgggattccaggcgtgagccactgcacctggcctatgcaggtggcttctatccatttttttttttttagacagagtctcgctttgtcgcccaggctggagtacaggggcacgatcttggctcactgcagcctctgcctcccgggttcaagtgattctcctg

SEQ ID NO: 27606 - DNA, 1047 bp, Homo sapiens
aagtgcatgcacccctgtaacccacactcgaccaaggcatagagcatttccagggtgggcaccgtggctgacgcccataatcccagcactttgggaagccgaagcgggcggatcacttgagatcaggagtttgagaccagcctggccaatatggtgaaaccccgtccctactaaaaatacaaaaattagccaggcgtggtggtgcgcacctgtagtcccagctaccttagaggctgagacaggagaatctctgaacccaggaagcggaggtagcagtcagctgagatcgtgccattgtactccagcctgggcaatagaatgagactctgtctcaaaacaaaaacaaaaacatttccatccccgcagaaagtcccctggtgcctctcaatcaatccatactatccccattcgttggcagtcatgcttctgacttattttaccaagattagttttgcctcttttcagacgtcacataaagggagtcatatagtataaactgttttgggactggtttcttttgttcagcatgtttttgaggttcattcccgtggtcactggtttcctgagtcctgttgatatgaccctggcagtcttcagtcacttccttgctttctgctaccacaagatgctccgtttgtccttgtttgtgtctgccccagacctgaaggaagccacataaagggcaggtgtgtggtccctgactgtcaaccagggaagtccgtctcatcctgaccagcagcatgctcaccacatgagcctcctgtttttatctccttttctgtgacgtggtttctcgtttgacctttcctagccctcgagcatgttccaaactcggttcgcttgtggaaagcagccgttgagctggaagaacctgaagatgctagaatcatgctgagccgagctgtggagtgctgccccaccagcgtggaggtgagtctggcgggctcagggccaccagagcccaaagtggccaaggcctgagcccaggttcagtgtctggaagtgatgatacaagtggagcattgagctcactcaggctgcaatttc

SEQ ID NO: 27607 - DNA, 1050 bp, Homo sapiens
tatggctgcctttattcagaccgtggtgacttgggcttgggtctgtgggtgacctggtcctgtgcttatgtgagccccagtccatttgtggctctgtagaggcccagatggggctctcagtgtaccctgcaccgtggggcatgtgttagcacactccggtccccagggtccctggagggcagtgtccactctgactaccctgtcctgggctggcccagcctccttctcccctgccaggctggtaagtcgggagagggagaacatcctcaggggtcatctgtctcccagccacggaggggcactgcagggccggatgcctgaagctgtgtgtttctttttgttgcttgtcctggcattggtgacagccagctggggctgccacataggctggagggggcaggcctgtgttctgggggctcatccaccccttcttgctcagggacaggcaacatctatccatccatttgttattgagcacctgttgtgtagtagaccctgttttaggggttaggaatttggcagagaacaaaacagacaggtccctgcctgtgggaagcttccattatggtgagaagagacagacaatcaacaaatccacaaacaggtgtggtgactcatgcctgtaatcccagcactttgggaggctaaggtgggcggatcacctgaggtcaggagttcgagaccagcttggccaatatagtgaaacccctgcctctacttaaaaaaaaaaaaaaaaaatacaaaaattagccaggcgtggtggcgcatgtctgtaatcctagctaccctggaggctgaggcatgagaatcgcttgaacccaggaggcagaggttgcagtgagccaagatcgcaccactgcactccagcctgggtgacagagtgagactctgtttccagacaaaagcaaaaacaaaaaacaaaaattagctgggcgtggtggcacatgcttgtaatcccaggtagtagggaggctaaggcacacgaattgcttgagcccgggaggtggaggttgcagtgagccgagatcgcaccactgcactccagcctgg

SEQ ID NO: 27608 - DNA, 1030 bp, Homo sapiens
cagggttgagtctgggttcctgtgaccagcgttctggactggggtctgccctgggaaggggtgggctcccactcattcctgctgggtgcagcacccccatcattgcgttcacacacaccccggaaaactggtcagcacaaagtaggggtctgcgaaccattcatagctgtttccagagatgacccgagaatggagttgttccccttcttaaaggagacaaaacacaaacgataaaagctgtaggtgggagaagcaaagatgggtcatggagccaggggagggctgggtggggctgggcagaactgatggggggtttctggtggaagaacagcttgagtagaagccccaggggagaatgaggaggggaggcgggcgctgtgcagtggggagtgggagccagcagagcctcctgggggtcccagtgcctgaggtcccctcggggacctgggggccaggtgtgggggtttttttgcctctggacctgagcccactgagagccacgtaagcaggtgcagggctttcaggggacagtggccttggctctggctatcacctcaaggctggactctgtacagcccaagaggcagggcctgcctgggagggctcaggaggggctgcagcgtgagcagactatgccacccggattgctggggttgtgcgggcggtaggtgggacaagcccctcccatggcctgtgggtcgtgggactctgatcaggtcaccttagggcagagggaatgatacacacgtggaaacacatgcacgtgttacagaggagatggggtgttgcagggcacagttgcagttttaaacaggagaggccttgctgagaaggtgttgttgaaataaagcccgggagggagggagggagggagggagacgttgtgggaggccgccccaggcggtggagctgcaggtgcagagggcctcggtggcggctcagcgcccttggggagcactgagttgccgggcctggtgtggaaatgtgaccggtttgtgcctggcctcgtcagtgttgaggacctggagga

SEQ ID NO: 27609 - DNA, 1768 bp, Homo sapiens
cctgacccactggggacctcatggccctctccctcctggctgctgggcacaccccatggacatctgggctggactcaagataggcagggccacaggccactgttggactctggcagagtagaacaagcaggggttggtgggggattatgctgtggcacctgctgcttctaggaccagtgtctcgctggggtgcctgcagccttgagtctgaacccagctggccctggctctctgcagccgcaagaggccggagctgcccagggcaccgtcgactccgaggatcaccacatttcctccggtgcctgtcacctgtgatgccgtgcgcaacaagtgccgcgagatgctgaccgctgccctgcagacggaccgtgagtgcggccggccctggctcctgacacccgctgtggttcacagggtggcccgggcccctgcctgcccgcagaggcctgcttccagcggggtgactgtcctcccccagcccattgctgtggccctggcaggggctaggggcctgtgcctggatcgtgggcctcttgcagggacccggatgtgccctctaagctgccagggtgttttgcaggcagaaggggtggcaggtggagaaaccagtgggggaagctagtcagggctccctcttgcagatgaccacgtggccatcggtgcggactgcgagcgcctgtcggctcagatcgaggaatatatcctttgggtaggggctgtgggcctgggtttctggtggagtcaggaggctgcctggcctggtgccctctggtggctgctggatgccactgcccagctgtccaggggtcacctgcctgggtggtcacctgcctgggtggtcaggctgtctcacctcaggagggcccccggaccagctgaagggctgattctgtctgcttgtggggcctaggtcccctggggctgtagcctgaagctgggtctcagtcaggaatgggcctggggcaggcttggccctgcagcccttcacctctccaccaggtgtgggtgggcagaccgacccctgtgtggctgggcagaacctttccagcccccaccccaacatggcccccagcggggcaggtggtaggtggagggcagcgacgttgtcctcaggtgggtccttaaaacacttgcacgcatcttccgggacgttggaaacacagacatgaagtataagaaccgtgtacggagtcgtatctccaacctgaaggatgccaagaaccctgacctgcggcggaatgtgctgtgtggggccataacaccccagcagatcgctgtgatgacctcagaggtgagcccctgttggaggggctggagggctgctccctcggagcggtgggctaagccactggccccgtgctccaggagatggccagtgatgagctgaaggagatccgtaaggccatgaccaaggaggccatccgagagcaccagatggcccgcactggcggcacgcagacagacctgttcacctgcggcaagtgcaggaaaaagaactgcacctacacacaggtgagcggccgctgggcaccctcccccgggcccggtgtcttcagggcatctggtgcccctccttggagcccatgcctattcccgcctctgctgcatgaatttcccgagcctctcagtccctgagtaggctaaggcatgatggccaccttcagggaccactcccctctacccaggacctctgggctccacggggcggcgtcttgggtggtgggacccacttgttgcggatactcaagtcagagggcctggcctggcc

SEQ ID NO: 27610 - DNA, 1047 bp, Homo sapiens
tcctgttgagggcagggaggtacagtggctacacgcagccctgagggaggctgaggtattgccaccttcaatagccagagctgcatcccacacacggggctggactctcccggctgtggggtgaggctgggccgcatggcctatggcaaatgcccctcaaaccctaatgcatccacggtcaacctggtgagttctgactcagcctggccaggttcccctggagctggccccctgagcacgtgttgagttggggtgggggagctggagggcctttctcgagcagaacttcagagaggagcgctggccctgtctttcctgattctgaacgtgtccaagtcgtttcatcacgtgatggattaccaggctggttggttctaccgaaaggcagcagcacaagcttttcctggatttctcaccattgttcctttaaataatcagtcttaattaactccatccgaagaacatattttccccaagggtagggagtcccagtcaggtggagcaagttggaactgcaaactgcatttgatagctgtggtgttgggaggagccccctggctactgcgaggggtgtctccgtgatgggcgggcagatggatcagcaccaacccctgctggcactttctgacatttctgttgccctcatttgatagatcgggaaactgagtcacagaaaggtttggcaatctgccccaggtcacttcccctaagcacagacgtccttgtggacgaggagaagaggcagaactcacaggggaaaacccttcttccacacagcatctgctgtggccagctgcccccacctgcccctgtccccacctgtccctgtccccaacctgccccacctgtccccgtccccacctgctcctgtccccacctttcccatctgcccctgtccccatcctgtccccacctgccccacctgccccacccatccctgtgcccaacctgccccacctgcccctgtccccacctgttcctgtccctacctgccccacttgtccctgtcctcacctgccccacctacccctgcccccacctgcccct

SEQ ID NO: 27611 - DNA, 1032 bp, Homo sapiens
tagcgtatttacaaaggagcctcctccgccagcccgtgccaccgctgctaatgagagcagtcattaagtaaatgagacgtcgcctttagctggcttaggagttcgcacactaaggggagaagatatttaattgaaacccgcacgcaggcttccccacatgtgaccgctgtacgggaggcagctgccttccctctcctcccccagtccaccctgcaccccccatgtaaatttcatgattgctttccgtgatgtcattttgaaagaggacagacaatagctgtggggaaaggtaagtcaacgttacgttctttctgacaaaggcagatacccaacgcttggcttttcctcttggacagagacagggagagggcgcgcgggcagagttaatttctaagatgaaggctctgtttgcaggaaaagcaggtctgaggatggctttttgaaactgctctggaggacgggggctttcttctcctccctggcctgccgtgtgctgtttttctcctgtctctctgttgttcatgctcctctgagattccaggggacatgttgtgcgtctgacagaggagacattaggggaaggggagcgcatatcaaaaccagaaactttatgcgcatttctggaagaggaacaacggatatgtctgtggccgtgggacccagcagccccgtacctggggagagcactggccgcttaagcagaagacctctctgaagcagggtctcagagtctggggtgtgtcatgtgtgacccccacccaaggtactgaggagaggtgctcacgtgaacgttttgtctgcatgtcatgcatttctcaacttaaggatcaatatctagggtgcatgcgtctgtgggatagatgtgcagaagtaaatatcggccgctcctctcagccccttttttcgctacgtgtccgtgcagctgtggagtgtggttgtttatggtggtagtgtaactggatttttgtatttaaaactaaaaatcagggttagctaagaagttgaacaccctaatgccattgtctgtagttc

SEQ ID NO: 27612 - DNA, 1036 bp, Homo sapiens
tcaagggaatggctaaacagctcctatctgggcgtttgatagactgtcattcaagaatgagtgaagttgaggtgcctataagcaactcagaaattgttgtggccacgcttgggggaaatagagccctacactcaggtgatgagaggagacctcagaggtgaccgatccagggccttgctccctgcgccaccccagctcgtacctccagtggaacttggctgggcttatcaagagctcctttcattcattgcaacttcatttgttagaaagcttctctgtgtatttagtaggcattgtctccaacatgtaccactggtctggcttttgttaggcccattaatagtgtacatgtgacagcctttcaagtataggtgctccccggcttacggtggggtcgcatcccagtaaacacatcgttaaacctgaagtcgaaccatccgaagtcggagaccatctgtatttgaaaaaagtccctttgcattgcttgtaagagttctggttttcaaggtgagaaatctgtttgtgtgtttgtttgatcattctgcccaaaggagatgtggctttgggtccttttccccactcatcttccacaatgaattactttgtccatattaccctaaagaagtgacatccaagttggaatgtgatcttccgtatgtcgcctcccaaaaccccactaccatagcttcatgcttgtgttgacacagccacaatcacaactcaggtgtcagttctgagaccttcccatgcctgtcgccactcagcaagtgttcttcatgtgccctggcagttcgcattgtaaggagcagccaggttgttatggactgttgctagttaccacagagtagtgaattatattaaggattaattacagcagacaatgtgcacagtatcatcgagtgcagcgttctaaaaatgattctacacttttactttgaaaaattggatttgaccagattgtagaatctgggtgaaaatgataggatttggtttggcgaagagctttgttgtcggtgtttttggtgacatcatgact

SEQ ID NO: 27613 - DNA, 1616 bp, Homo sapiens
ggaaacattcacctctcagccccgtgcatctactcggaggtgatggaagccctagatctgcagcctggactctcgtttctgaacctgggcagtggcactgggtatctcagctccatggtgggcctcattctaggtaagtgtggaaggagagtctgaaaactcatctgtctcagggaaggaggcatctcctttgacagaaaatgtagtctgctaatggcctgcctgggtcgagaccgcagccttcccagtagttatctgacattgacacatcactgggtggtggatagagggatgagggaggaaggcctgcatgcatctcatgggccccggattctccagagggacctctcctgttctctgtcccctcttcctgtgctgccacagcctgtactgcgcacctgccctctggacagcggaggataaagacagttgtgtaaatcttgaccccactgtgatttctcgatttaattttatcactcattcttccttgtcactccttctctaaatcgatggtaattaacttgaaagtcctttcggagtacttctaagcagtttttgttttgttggtttttttttttttttttttttgacagttgtgccccatcgtctaggctggagtgccgtgacacgagcaaggcccactgtagccttgacctcctgggatccagcaaatcctcctgagtacctagggccacaggcacgcaccaccacccctggctgatgtttaaatgatttttagagacggggtctcgccatgtttcccaggctggtctcaaactcctgggcgccagctctccacctgcctcagcctcccaaagtgctgggattacaggcatgagccaccatgcctggcctacttttttgttttaatactaagagtaatacctgtagattttaaaattagtttcagggatggaagggatttcactatgaagctatttagcctattttccaaacaaatgagttgtgagactgcacatggaaatatggctatttttaataatagcagataactaaggaaaaacatcacttggtgccaaatgctgtgaggggcggggaaggcatctgtttttaactcagtagggtggaaaagttttgccggaggggtgataggagctgatctgtaaacaggaagcaggggccaggctgctgaggcaaagctggctgagaagacgctggatgaaaccagtgcagagaagctggagtctgtattttttctaaatcctgttagaactgacaggatttacgggtggactgtatatgcttgtgaaagaaacgtcaggaatgtggcttggcttggtggttcatgcctgtaatcccagccctttgggaagccgaggtcggaggatcgcttgatcgcttcaagattgcagtgagctatgattgcaccactgcactccagcctaggtgacagtgagactccgtctataattgatttttgtggatatggaatgataattttgttttttttttctaagtctgtataaattggaatttggtgaagttttgagaccgattattttggctttatgctatagattgctaccttcaggtgtaaaagtgtgtagatttttataatgctttttgaccgtaacttctcttcaattgagactgtt

SEQ ID NO: 27614 - DNA, 1028 bp, Homo sapiens
ccagccacagcaagatgcagagttgaatcagcaccccaaaaggctcccatgccccctcctcctcctagaaagttcaccagtgttgcatcttccagaaaggtgatgaccgttttgcctttgtcggcaaagatgaattttgcccgatttttaccttcatgtaagtggattcccgcaacagagagacccatttaagttgagtgtcaatactgtgttcccagttaacgtaggggcagttttatatcgggggagcactgtcatcattaagtggacttgtaacatttctcagttgtatttcaaattactgataaatatcctttgatataaaaatgtttcattgtgacttggaagcatagttttatcttaatgatgatgattgaaccctgttttgtgaatattataatgctcacatctgagtgttctgggcaacttttcagggaaaacagaatcgtcttaaatgttacctctggacaaacaggtgaggcctgtgtcagttccatttgcaaatacatgtttcttctttagttcattagtaagacctgaacacttggtttgtctccattttcaaatgattctttaaaagtttgtgagcagagaagcccaggcctcaagtatttacgatgtggtgagccgtgatactgtgatgagacttcaaaactttgtgaatgtctgtagttacacatgttaagtcagacgtgttacagttggtagaagtgaacagatgagcaagagttcttactctggttctacatgttttcttattcttaaaccttttaggtccttttggtgtgaaccatggggtggaacttcactcagatgtgatagagtatgcaaagcagaaactggacttcttcatcagaacaagtgatagttttgacaagtaagatgaaatactatccattggctcagatgatgtgaactgtaattttacaaagttttgatcagatagaaagaaatcatgtggtaggaaacataattaaactgtggtgggatgattctatgtgcctgttctaattttcagaaaagattct

SEQ ID NO: 27615 - DNA, 1123 bp, Homo sapiens
aagtagctggcactataggcacgtgctgccatgcccagataaatttattttttaaatatttatttatttatttatttatttagagacagagtctcgctctgtcgcccaggctggagtgcagtggcgcgatctcagcttagtgcaacctctgcctcctgggttcaagcgattcttctgcctcagcctcctgagtagctgggattacaggtgcgtgccaccacacccagctaatttttgtatttttagtagagacagggtttcaccatgttgttcaggctggtctcagagctcctgacctcatgatccgcccacctcggcctcccaaagtgctgggattacaggtgtgagccaccgtgcccggcctaattttatttttttagtgatgggctctcactgtgttgcctgggctgatcacaaactcctggcctcaagcaattgcctcacctcagcctccagagttgttggcatgagccatcacacctggcagaatattgttttaaatgtctttgcttatacaagtgatattacagatctttgttgctatacaaaatgcattggattttttattggaattgtatcatctcgataatttgaggattgtggccatctttacaatgtttcatctgcttatctagaatatgaaataggggtttatatagttttatttaaggttttatacatcatttattgattctattgaaatacttgtttttcattgtaactagaaattcttttaaaaatgtttaaataaacatatgttttgctggtatacaagaatgtttgttgatatttacttagtacgtggcgacttaatccttttagttataagattcatgacatagaatcttagtttttagaggatttactgacttagatatttttagaaaaggccagcatataatcatagcatgaaagaactgaccagaaatagttttgtgacctgtgtaggccacttggagactgacccagccacacagagtgcacagagggtcatgtctaattgtggtctctggtgctcgtaatactttaattcaaaagaaatgttttgatggcctacactggagtgtgttaagccaccagattccggtgctttcgtgggggtgatatcagggcaaggctcatt

SEQ ID NO: 27616 - DNA, 1050 bp, Homo sapiens
caaggttttgccatgttgtgcaggctggttgctctccaaatcctggggtcaagcaatctgcccacgtcggcttcctaaagtgctgggattataagcatgagccacgtctggactaaaaaccatgcccggcagtggtttttattttattatatttttatttttattttgtttatttttttgagacggagttttgctctcgttgcccaggctggagtgcagtggcgtgatctcagctcactgtaacctccgcctcttgggttcaagtgattctcctgcctcagcctcccaagtaactaggattacaggcacctgccaccacgcctggctaattttgtatttttagtggagacggggtttcgccatgttggtcaggctggtctcgaacgcctgacctcaggtgatccgctcgcctcgacttcccaaagtgctgggattacaggcatgagccaccacgcctggcctattttattttattttttatttatttattttatgagacagagtgtcactctgttgcccagtctggagtacagtggcatgatctcggcacactgtaacctccgcctcccgggttcaagcgattctcctgcctcatcctcctgagtagatgggactacaagcgtgcaccaccacacccggctaatttttatatttttagtagagacagggtttcaccatgttggtcaggctggtctcgatctcctgacttcaggtaatctgcccaccttggcctcccaaagtactgggattataggtgtgcccagaaggggttttatttttaatgatttctaggtaggtaaccatttaatttggcttccaaactgggacatatttgagaatacagggagcagaaagggtttgctgtgaacaattgtgccaggactctaggtataaaccaggaagatctcagacagatgaggacaaatggtcaccctactaggttaccaggaaacagcagtcaagccaggaggacaggtttaccgaggtgaaaagttactcctattatctttctgtcgcacttccaattgcacatggctccaaaccagctag

SEQ ID NO: 27617 - DNA, 1039 bp, Homo sapiens
tgtgaatttgtctttcagtggagacgctgctaactccctccctgtgtcgtctagcagttgatctcactctgtaattcatacatctttagctcacttgaattttctgtttcctcttccctttttatgtcacagtgagagcctatacatttagttggaataaagtatttgtcagagtggcacacgtgggagtgctttctccatctgccactgacatttaatcactaggctgtggggttgaggagggtggtgttggggcctgaaaaaaacagcagccgaaatccacgttgggacagcatcctcctctgggaaacaccggtagtgttagaaacaggccaaagagtctgcagatctgtttagagagttctgcagtgagcatcaccttaacagtatgggaaaaataatgtcatttactgcaagccagttttttccagaggaacaataactaaactaaatcacttactatattctgcacgtatttgttgcgttcccacagagtgccaaaaattttgaaatagtaagtaaattttgaaatgcaggattaaaagtagaattggaggccaggtatggtggctcaacgcctgtaatcccagcactttgggaggtcgaggtgggtggatcactagagcccaggagtttgagatcagcctgggcaacactttttttctctacaaaatatatatacgcaaaaattagctgggccagtggagcttgtctgtggtcccagctacctgggaggctaaggcaggaggatcacttgagcccagaaggttgaggctgcagtgagccatgatcgtgccactattctccagcctgggtgacagagtaagaccctgtctctaaaaaaaaaaaaaaaattggaacagagtcttaagagaaatgagttatgggaggtatgatttgaggatttgagttcagaattaagtaacattctggcaaatggtttgccaaaacctcatggaaattcagttgactgcatagtggtttttttccccaagatacaagatttcctttctcccagattgccgaatagcttatttag

SEQ ID NO: 27618 - DNA, 1030 bp, Homo sapiens
ttacccttgcccttctttttcctcagaacacctgaacttttgttgtattattttgtatctccccacttgcatgtaaactccctggtgaccttgcatgtcttatgcaatcctcattaaaaccttttgtttttttttttaagtgggttcgttttccctcaggatcgaagagtattgaatggaatggcacgaggaaaatatttaacaccctacttggcttgtaataataggtgcttaataaattgtagttccactctccactccattgccccctttctctccctacacacacacacccacccacccacacacacacacacacacacacaaagtaaatggaagtattgttgcataaagagcatctcaaaatcctaagaactttgcccttgagtttgcagctataattacaagccacaggccagactgaactaacatgacaagtaactttatttaatgagaccctgataaataggtatctgaagactaaggaatgatcctggccaatttagtagacttagatgctgcagtctccctgcttttcccctgctgtattacctgtgtgtaatataggttgaatatcccctatccaaaatggttgggaccagaagtgttttgaatttttttggatttttggaatatttgcggaatacataccagttcaatattcctaatctgaaatttgaaatattccaaatagcatttactttaggcatcatgttgatgcttaaaaaatttcagatttttgaggattttgtattttcaaattagaaatgctcaacgtgtaatacgaaattcagactattctccaagtaaaacatatgtagatggtgtcacaagatgttctggactcaatcctatgtaaataagtacttcctagactttatagctctcctttgattctgtgctaaatttaaccattagagaagcaatgtaatgttactgcaagtggtctacctctaacagagttctgtctggcagtgtgatttttttgatcagttaacctctctgaatcttttcttcacaggtgatttaa

SEQ ID NO: 27619 - DNA, 1063 bp, Homo sapiens
accccttaacaaatatttgtaatttctgtggcccctatgtaagttaatattaaattttcaaaactcgtgaaaacacctgacgtgctagcttctggtatactttatctcacttaagagtcagcaaataaaacagtaaactttaactcagttctcaaagggtaattgtcctaaggattgtgtaaatttctgcttatagatgctaattgaaaatttacttacatttctaaagtggggtcaccaaatatcttgttcccagtagccacaagatcagcttcctagaagagagaattgctaaaagttggctaagctttcttactaaacaagagttgacataaagcctgctgttggagccttagaaatcccctgaggagattgtgccagcagagatacttgatctttccattggctcatgcagtttgtggcaagcaaggctttagaaagttacagatatgattgcccagccctgggaactgtaggaacccaagttgcccttcaggaaggacaagaatttggccaacaacgtcggctgactgaaaggctgggattaacaaaccccaaagattatactactcagttccctttagtttgaggttggaaacatttcagattggatttgatgacctaaatcaggcattggcaaacttctttaaagggccaaatagtaaatattttaggctttgtgggccatgtagtgtttgtcacactattcaagtctgctgttgttgcacaagagcaaccataaacaatatgcaaacaaataggcatggctatgttgcaataaaacattatttacaaaagcagacatcaggccaaatttggcctgtggtctgccaacctctgttacagactcttaatggctaaagaattactgttcttagaataagaggtttgtagtaaagatctgttttctttctttgaggggtctgtggaaataatctaggatctggacaagacagaaaaatttgaagtggtgcaatttgggtatactttgggtcttttaggacagaaaacatgttgaaacaactgtgtcagaaaaagatctctaagctcagagagctgagtt

SEQ ID NO: 27620 - DNA, 1055 bp, Homo sapiens
tggattggtataagatgacatggagctttgatgtatgagaacaagcctttattctcttcctggtttcatcaaatatgagtcagaatggcaagttgtactcttagctttgccgccattctagaaccttttagcacccctacttaagttacagaaagctgctgaaaagaaagtatttttcttgccaataccttttgtagaatatataactagtggtaatgctgatgtatctatcctcaatgccatttttctcttccaggctgtcttacaaaaatcattcaaattttgcctgcagaggtaacaggatatttggcaaaatatgattaaagcaaatatcagtttactgtatttcttgggatttttcttctcatgttataggaagcactggttaacacagttgagctatatttattggctgtaggtaggagagccagaggtatatttcaggccattattatttgtaagattatttccttcccatataccttctgtaaatgattccttggactttgtgcattttgtttctgcagtttgaagaaaacaggtctgaaacaaggtcttacccccagctgcttctgaacacagtgactgccagatctccaaacatcaagtccagctttgtccgccaacctgtctgacatgtcgggacccgtgccaagcagggccagagtttacacagatgttaatacacacagacctcgagaatactgggattacgagtcacatgtggtggaatgggggtaattgtttttgttgacttcattatactcactcaaagggctgaatcttgtggatctgttgagtagtttttgtcagaaaacctccgtgactctgtatgtgtatacctcaggatcaaagcccaatttgtgttttcttttgagctgaaaatttggttttgcagtgaggaagcagagttgctttggcaagtgaacaattttaatgggcttaccatttaaaaatcattttagtttcttatccttttctatgatgtatatgcagtcgtgcaccacataacaaagtttgaattaatgacagaccacatgtaggacagtggttcc

SEQ ID NO: 27621 - DNA, 1050 bp, Homo sapiens
gtaagcactaagtaagacaatttaaaatggaacttaataagaaaggcagtgcattttgttagattgccttaagatatactagtattatgaacagtggagaggagaattgatcttccaaatatctaggactcaggcactttttccatcttccaaataagctgctataaaaattggtaaaatcaagtttcttcagtattctcttaatttgaattatcgaggggaaaaagacaaatcctagttgtagtcctgtgatttaatagaagctgtagtattgggaaagagagagagggaagggaacaattactcaagaacctttgacttggttttccagttctcctagttgcgtaccagatgacctgaagtatttaggaacaccctatactttggatgcaacttcattttcatttcatttttaaaaaataaaccaagattaatttgatcaccaaatagtgtttactgaacgtgctacaaaatgcaagccttaggctaggtactataaattaaaaaggtaaattaaacatggttcttaactttgtagaacttagggtccaattgagaaattaagatttgaagactggtgtgtgtgtgtgtgaatgtgcagtagaaagtgattgtgttctgtaggagtgagaagacttgaaccttggaggccaactcactgtctttgaatcccagctgtaactgtattggatattcttggtcaagctactgaacttaggctgttcttatttgtagattagagaaactaatgcttgcctcgtagagttgttggaagagttagatacttaaagctgagaaactcttagttccagacttgtaatatctaactgcctattcagaatcttcgtttgaatgattcaaagccattttaaccttaagtccaaaacctatcttgtgcactcttatctccatgaatggcaccaacagtctgtcaagcaagaaatccaagagtcacctcccacttcatacagcattttccagttcactcagagctattgattttacaccataaattttgttcctcatattagtccactgatctccacatgc

SEQ ID NO: 27622 - DNA, 1054 bp, Homo sapiens
tcttttgtataatcagtgtttgtttggagctgtctgtaaattttcctcttttttgctctttattttttctttcaactcagaccttccaaaatgggattatttttcttttttctttagagacatttgcttgataacagaattttaatttggcggctatttatttttttcagcacactgcaggtattaaactacttggcttcattgttggttttgaaaaatcagctgttctaatgttgctctttgaatataatctgcctttttctgtacttgcttgtctttagttttttgtttttgtttgagacaaggtcttgctgttttgcccaggctggcctccaactcctgggcacaagcaatcttcctgtatcagcctcccaaatagctgggactataggcctgtgccattacacccaactcatctttgttttttcctgctattttgtaattatatgtttggttttggatttctttttattgatcttgtttggaaattgtttgcttctggaatttgattgtgtctgattgcttctgggatattttcaactgtcttcagttactgcctttatcccattctcttttctgctagtaccaattaaaagtatatcaaactggctgggcacggtggcttacgcctataatcacagcactttgggaggccaagatgggcgggtcacttgaggtcagaagttcaagaccagcctggccaaaacatggcaaaaccccctcactactaaaaatacaaaaattagccgggcatggtggcatgcacctgtagtcccagctactctggaggctgaggcaggagaatcacttgaacctgggaggcagaggttgcaatgaactgagatcgtgccactgcactctaacctgggtggcagaacaagactttgtggcaaaaaaaaaaaaaaaaaaaagtatatccaacgatttcactatatttttcctcttgttttttgagatctgctaggacattgtatttaaaaataaataattggctgggtgcggtggctcacacctgtaatcccagcactttgggaggccaaggcgggtggatcac

SEQ ID NO: 27623 - DNA, 1008 bp, Homo sapiens
aggaaagtagaatgatgtctcaccaaatagataataacaataaagagatttaaaattagatttataaaaggaccaaatggaaattttggagttggaaatcacaataactaagattaaaaattcactagaggggcataacagcaaactggagcaggcaacaagaaagtcagcaaacttgaagttgggtcaattgagagtagtcagtctgaaggacacaaagaaaaatgaataaagaaaaataaacagagcctcaaagacctatgagacattatcaagcataatgccatatgcgtaacaggagttccggaagcaaaggagagaaagattcagaatatttgaagaaataatttgatggaaaaacatttacctacacatctaagcagcataacacactctaggataaactcagagacctacatgtagacacatcataatcaagctgttgaaagtgaaacacatggagagaatcttgaaggcagcaagaaaaaaaattgctcaccaggtacaagggatccccaataagattaacagctgatttctcattataaaccatggagaccagaaggtgatgaaatgacacattcaaagcactgaaagagattgtcaatcaagaattctatatccagcaaagctttccttaaaaaaaaagagagaaattaaaacattcccagataagcaaaaactaagagactttattgttagcaaatctgttctttaagaaatactaaagagaattcttcaggctgaataaaagcactctagacagcaacttgaattcacaagaagaaataaagaacaccagtaaaaggatacagtagaaatacatgttatgtaaatatttatatatttttataaacctttttcctcttatctgacttaaaagatgactgtgtaaagaaatggttatgaatctgtgttgatggtcatgcagtttatgtataataataacaatacaaaagaaataaaaggcatctatattggaaaggaaaagtaaaactatttctattt

SEQ ID NO: 27624 - DNA, 1033 bp, Homo sapiens
tgagaaactggatgttttcccccctaatattgggaacaaggcaaagatgtcccctttcgccactcctatttaatattgcactagaatttcttgctagtgcaataagacaagaaaagagaataaaaggcatgccaattgggaaagaagaaataaagctgtctttatttctgtgtacagtgtggcatgattgtctaacatagaaaatcccaaagattcaacaacaaaagactcctggaactaataagtgattataggaagttcacagaatataaagttaatatttaaaagtttagtgctttcctttatgccatcaatgaacagttggaagctgaaattagaaacataatgccatttacattaccaccaaaaataatgaaatacctaggcataaatccaacaaaatatgtacaggatcaatataaggaaacacagaaaactctgatgacaaaaatcaaagaaaatataaataaatggagagatattccatgtacatgaatagcaaaactcaataattttaagacgagaattctccccaaccctatctatagattcaacacaattccaataaaattcgaataagttattttgtgaatattgacagattctaaagttaatatgggaagtcaaatgacctagaatgaccaacacaatcctgaaaaggaacaaagtcagaggattaacactacctgactttatgacttactataaatctacattaggcaagactgtgtggtattggtgaaaaaacagacaaactgatcaacagcacagaatagagagcccagaaatacacccacataaatatagtcaaattatatttgtcaaagaagcaaaggcaattcagtgcaggaagagggaagaggagaatctttttaacaaatgggaaaatccagacagtccttccaccttttataaaagttagatcaaaatggatcttagacttaaatgtgaaacataaaactacaaaacttacagaagctaatataggaaccaatctatgtggtttgtggtttggcgatgagtttttaaattc

SEQ ID NO: 27625 - DNA, 1217 bp, Homo sapiens
cccagcactttgggaggccaagatggatggatcacctgaggtccggagttcgagaccagcctggccaacatggcgaaaccccatctccattaaaaatacaaaaattagccgggcgtggtggcaggtgcctgtaatcccagctacttgggaggccgaggcaggagaatcacttgaacccagcaggcggaggttgtagtgagccaagattgtgccattgcgctccagcctggatgacgagagcgaaactccatttcaaaaaagaaagaaaaaatgaggagtaagctctgttacagctgcctagtattcgtttatgtaagtgtgctataatttacttggctagtgccctattaatgagtatttgagtcatttccagtattttgctattataaacaatgctgcagtaactcaccttgtacagacttcattttccacgtgtgcacatgttgccataggacttactctcagaagtgggatgaggggctcaaaagctgtgtgtagtgtttttgagaggtcttgtcaagttaccatctctaggggttgcactctggactgccaccaccaggctataaaggtgcaatctcctcccagccccagcatcacagtatattgttaaatctttggcctctggacaataagagtaaaacatgatatcagtggttttaatttgtatttatctattacccatattgtgtgagaccacttctgagacgtcatacttatggagaaagtcatttcgtttgtcttgagtgtgtttcctaatctctttcctccccatttgtggaaacagcttttgttctgccaacactacaaaattcccaggagacaatagggacccagggttgccaaattttagttggattctgtctttccatcaaacctaggaattttttcttggctctaaccaggtaaagggatgtttttcagtgacctgagacccaaggaactttataattaggctctgcatgatgggtaattagtctgcttccctctcacccaggagaattagaaatttaaccaagatgaaaagacagatttctgtctctctcttttccagaatacacattgctctacttcctctataaaatatcactgatttatctccaaataaactgctcaactttcaggaacttgaagccatcccactcccaggtgtctgggtttctgttcctgcagggcagagggttggcagtgtgaggaagaggctttgtagtttactt

SEQ ID NO: 27626 - DNA, 1027 bp, Homo sapiens
aaggagaagtttgagaaagcatttccaatataaatattatttttctaaaaccatcgtaattgtaaagcttgacaaaatcctggctggtgggaatacacagaatatatactgaaaggaggcttgttcattgcattagtttttaaaaatgatccatagcgtgtgtgtgtgttttctcatctataaaatggagatacacccctctcagaggatggttgtggtgattcagcgaggtcgtggctgtgaaagcccctttagacaatacctgcacagagtcggtgtaaatgtcactcctgttttttctgctccccacccccttaactgatatcagctattttggcttaacagcttctttctcatcttaggcctgcctgaaaacgttatagttccctttctggcaggcggtggtttcaatgagtacgtatactttgaattattataaatagttgagggacaggctgcctaaagtctaattggagagttaacctaatgtctgtgaaactaatgaacaaaacgagatagtgtagatcaggaatgtccagtcttttggcttccctgggccactttggaagaattgctttgggccacacataaaatacactgatactaatgatagctgatgagctaacaacaacaaaaagcaaaaaaaaaaaaaaactcataacattttaagaaagtttacaaatttgtgttgggctgcattcaaaactgtcctgggtcgcatacggcccatgagccatgggtggttggacaagcttggtgcagagcttaggcatttacaggtatatgagatttacctattcactatttccaatcaactcttgtggcctatcgtagtgtcatttaaactgtgtgtcccagcccacactttttgagtcccacatgctttgaggctgatgcagagaagcagcttctctagtgctagtaatgtgggtgacattctcctctgagctctactttgtaattctgtaagtccatgtttttcacattcacagaaaagagtaagtttgcttttcagtcattctttaat

SEQ ID NO: 27627 - DNA, 1001 bp, Homo sapiens
atgcagttgccttctctcacttggattggacatgcttacattcaggtctagaagatgggagttgggcattcaagcttgatctttcccgacatgtggttttggatgggaagtctggtgctgagagttgtagcattaagggatttggtgtctgttatttcccactgtccttccccaagttggggaggagagtgggaagctgcattgtactgtactcttctaactctttcttcttatgtcctcttaggtgatgaccccacaaggaagaggtactgttgcagccgctgcagctgctgccacagccagtattgccggggctccaacccagtacccacctggccgtgggggtcctcccccacctatgggccgaggagcaccccctccaggtgaggagcccataaggagaccagtgctaattgatagaagatgccttagctggattaatgatgagatataaccttgactgaagctgatgatgagtttgtataattaagcaggattactctgagatccagcgtggctgactgatgagactaggtggacaagagccattgggagccctgggtgttaggctcaaatgtcagttttctgggagctgctgagagggtggaatggtccatctatctcagaacttggtggaaagctttgtagtttttttgctaccttttcaagatagacacttgagctatattcttggggcttttctcttgcaggcatgatgggcccacctcctggtatgagacctcctatgggtcccccaatggggatcccccctggaagagggactccaatgggcatgccccctccgggaatgcggcctcctccccctgggatgcgaggtaagtgcctgcagtggtgactttggcttctttccctagagcctagtgggataggaaatggagggaagattgcatttagatcatatcccatgggctttcaagccttaaatctagggaaatccagaaaggaaagagaagagggaacatttcttaaattgggcttac

SEQ ID NO: 27628 - DNA, 1079 bp, Homo sapiens
ggctggacgaccccctgcctctggtaccaagtgtgaccaaggctggcgccaccatggctctgctgccgtcacctcctccctttagcattgagcagccccggaggggctagccctgaggctgacctgcccagagtccccaccatcgcgctgcttagtggcctctccctgcagcctgtcgttgctggtggcggcatggtcttctgtctgtcgagcgaggagccgcgccgcccgctgcgaagcgacatggtccacttccaggcctcggaagtccagcagctgctacacaacaagttcgtggtcatcttgggggactccagtgagtgcctcttctagggtgacgcttccagtcccacaccttgcagcccgttcagtgtgtctggaccatttgtttccatctcacatctcttgtctgtcttctggtctgttccgtccagtaggttttctctttttatgtcccacacatcttccacaggagtcctgacaggtgtaataacctgtgcactttttagcccatccttgctcagcatttctcgccctgacagctccccataatttccatcacgaaagcgttgcattgtgtagtgtgtctcctgggtgacttggccgacttaatttctgccaggtgatcttgggtcactgtatactgctggccaggaggcacacagaacagaggcaatgccaggactttttaacctcatcttttctcctgcgtctaagtcaaccacagagctggtgtcgggcacctcagccctgggaaaatggggtcctggacttggaaggagctggggcaggctgaggtctgcctcagccttgggatctctgtctcctcccagttcagagggctgtgtacaaggacctggtgctcttgctccagaaagactcactgctcacagctgcccagctgaaagccaaggtgagggaagcttggtggccatgtcagtggtgggtgggcacagaccctggcctggcagggttctcctccctggcatgggtctgaccagtagggtggggggggtgggtagggggagctgagctttgaacaggaccagctggtggctgggggccagctgggcgagctg

SEQ ID NO: 27629 - DNA, 1068 bp, Homo sapiens
cccttctttggtgcctggtgcccgagtgtagatggcaggtccattcatcacatgtggatggagcacttgccctgtgaggtgctgcgccaggtcctgaggccggatgagaaacatggacatagtcctgaccctcaggacctgcaaagcctggggaggaagtaggcatcctaccttggaggctgagaagggctggtgggctctgaaagcacaggaaaggggcaatccggggtggcgtcatggaatgggtgtggtctaagccaggtctccagataagggcattctaggcagagggaacagcaagcacaaagtgaggaggccagcagcgcagagtgtgcaaagaagtgattggaagctgctggactctaaaagttgagactggtgtgaagagaggtgaggaggctgggtgggccgtgcagggagtcttgactgtcccgaaagttgggaagctcctaagaggtagaaagcagagttatggggtggtcaagttacataggtgggtcattggaggcagctttgaggacagattgagaagacaagcctggagcaggtgaatagttaggaagagatgtgtcgagcggcctggattatggtgatgaaatggacagagagaaggggggttaagaaacaattctgaagcaaattggtttgaggttcctttggggtcctccagagagtagtggctaggaatggagacatggaccacaaggaggacaggcaagcccatcccctgtcactctccagaggggccatgaggaaaggaagagccgtgggtgcagcctggtggggcatggccagagctgctcactgtgaccctcattcaaggatgccctgaaggagttgcggaagaagggagagcctgccgagagggccagggcagcacaggagggggactgaggagtcaggagcagggctgccagtagcagtgagggggctgcaggctgcagggctgaagggagcaggagctaggccccagtggcaggtgcactgcaggcctcagccttgtctctgctgacctcccttctcacacttccccaaccttggtgcactggaccatgtgctgcttttcct

SEQ ID NO: 27630 - DNA, 1034 bp, Homo sapiens
ggctaattttttgtatttttagtagagacggggtttcaccatgttgccaggctggtctcgaactcccgacctcgtgatccgcccgcctcggcctcgcaaagcgctgagattacaggagtgagccaccgcgcctggccttttttgttatttttttctcatctagccagtctgcagtctgacatccggggcactttatgtaaatgtgaagagaggtttggttgggtttgtcgtcctcatcccttcagattaacacttccgtcagtgtcttagaaagagcagtggcagcttatgggccaattttgcctaaaatgaaccttgacccccattgtatgccagaatctattaggatacaaagcaacagaaactgattgcaacgggaggcattttttacgagatggagctcctgctgtgcgaaacgccttctctcttggcttttaggctgttttgcttcttttctcctatcttcggtggtccctcttcagtttccattgccaattgccttctctaccagctctggccctggactctctaatctcaatattctctgttacccaagtgaaaactcacatctccggcaactgtccatgttcccctgtagctcctgcttctccttggaactcatcctgccgccctgacagcactcaacatcctctctcttttttctttttttaagatggagtcttgcccctgttgccctagctggagtgcgatggcgcgatttcagctcactgcaacttccgcctcctaggttcaagtgattctcctgcctcagcctcccaagtagctgggattacaggcacccgccaccacgcccagctaatttttgtatttttagtagagatggggtttcaccatgttggccaggctggttttgaactcctgacctcaggtgatccatctgcctcggcctcccaaagtgctgggaatacaggcatgagccatcatggccaggctcagcatcctctctaaaggaaacattcagactctgtactgctcacatctgccctccagagcttttccccctcactgccccc

SEQ ID NO: 27631 - DNA, 1047 bp, Homo sapiens
tcagcctcctgagtagctgggactacaggtgtgtaccaacatgcccagctcagttgctcatatttttaaggttgggcaatacttgggggccccgatctgggacaattgcccttggcctttgatctgatcttgggtgccctgatctgggacaattcagtttaatagaggaaattttaaaacgaggaacctcaggcttaagagttttcttacaagtgacaagttgtcttcatttggatcattgtatcttgtgttttttattaaatctagatatcagctgatggttacgaagtagaaaatctcatctctgaagatctcacaaagagaagtcatggtttcaggacagagtatttcattaagccaccagtctatgtgacagtttcatttccctttaatgtggaaatctgtaggatcaacatagacctcacagctgggggaggtcagaacgtcactggcctggaaatgtacacatctgcctcatctagcagagtgtcttggaatacgccccagtgccggaccctgggcccagctgagccatctgtcccagacaaggaggcgttcaccttggtaggcaaagtcttactgaaaaaccagagccaagtggtgtttagccacaggggcttcaaggccaggcccccttttggcgcgatggaagccacactcccctcccctgctgttgtggcccaggagctctggaataaaggggctctttcccttagccacgtggcccacttaaggatctgtatcacccatgtgacaggcggcggtatcccttgtatcaagcggttggaagtgtggggtcagccggccaagacctgctcccaggaagtgatagacagcatcctgctggtcacctcagagaacctgcctcaggatgtggctctgcaggctccagccttgcccatggaaagtgactgtgaccctggggaccagcctgagagccagcaggctccctccagcctgcagaagctggccgagatcattcaggatgtgcctgaggagttcctggatcccatcaccctggagatcatgccttgtcccatgctgctg

SEQ ID NO: 27632 - DNA, 1082 bp, Homo sapiens
cccacttctacctcctgagtagctaggaccacaggtgtgtgccaccaggcttggctaatttctaaatattttgtagaggtgggggtctcactacattgcccaggctggtctcaaactcccggcctcaagtgatcttctcactttggcctcccagagtactatgattacaggaatgggccattgcatcctgcctgtggtaacatattctatcttgtataacttttttgtcttccctggcattaataatttttgttactgtttttattagcatggctttttgtatccttatctcttgttcatgcccggattatccggtagaagtatgattctcctctcctgggtactgtctatgtcgtccagcatgagctggttgctctttatgtctgttcacagctcttgtcctgggatcttccttcacctttttcctgggatttccctttgcttctctgtattgaaccctagtttctggatcccatatctctactgccaactttcaggtcttcaattgtggtagctctccttactttgatcctggagcatcctgcgaactctttgcctcatgtagatttcagcctttgaggtcttctctttgttcttttttaaagtacaggttgagcattccaaacctgaaactccaaaatgcaaaatgctccaaaatctgaaactttttgagcaccaacatgatactcaaaggaaaaaaaaatgattggagtatttcagattttggatttttgaatttggaatgctcactggtcagtataaagcacatagtccaaaaactgaaaaagtttaaaatctgaaacacttctggtctcaagcattttggacaagggatactcaacttgcagtataaaccgtagtgatagaatcgtagactgttagaggtggaagggactttcaagcttacctagttctaaccctccagctccctggcacctggaaatcctagaagaccatagattgttcagccatcccaccccgtactgccccccgaacctgttttctgacatccattcttgtctctctagtacaccaataatgtgggctgaagagtcagacagtctttaatattaggctccact

SEQ ID NO: 27633 - DNA, 1452 bp, Homo sapiens
agcagagaggacctgccctaaagatagagtcttgatgcaccgtctaccttgtccccaaccaagagtgagtagtgcacagaagtctcctggcaccctgggaatcctgcatttttaatggacgaacaggcaggaaagaaaaaaaaaacccaaaccccatcactctgccagcccctgtgaccaaagcagcccaaatcagttaccttgacaactctcatgcacagactgcaccagcctgtgttgcaaacatcactgccccgcttctaacaggaagagatactcttttgggggtcttgcagggcccaggaccagagccccttctacccagggcccttccaaaggcaaagcacagagtcacatttgggcgtggcatgagagggaaataaagagatttggctgtagtgggagggaggtttcagtgctttttctggggacattggtgcctatctctattctgagagttgttctcctcataggacaccataaatcgcatccaggacctgctggctgaggggactataacaggtgagatgatgagagccaatcactgcagtcctggccttggagagtgtctagccacaggggctgcagggatgtgctgcagaggcaggatgaccacccaagatggggggaggggtgtgcaaggaggggcactgagtagctggatgcagttacaaggaggacatgccagggcctggaggtggcagcagtgggagaggacaggcagggcagcctgattcgactctcctagcaggactggatgcagccaggaaagtccaggcaggcaggaggccggaagggccctgagccagctgtgaaggagtaggtgggcattctcaggccagatggggaacgcccaggaggcctcagccccacaacctgcatgtccccacaggtgtgattgacgaccggggcaagttcatctacataaccccagaggaactggccgccgtggccaacttcatccgacagcggggccgggtgtccatcgccgagcttgcccaagccagcaactccctcatcgcctggggccgggagtcccctgcccaagccccagcctgaccccagtccttccctcttggactcagagttggtgtggcctacctggctatacatcttcatccctccccaccatcctggggaagtgatggtgtggccaggcagttatagattaaaggcctgtgagtactgctgagcttggtgtggcttggtgtggcagaaggcctggcctaggatcctagataagcaggtgaaatttaggcttcagaatatatccgagaggtggggagggtcccttggaagctggtgaagtcctgttcttattatgaatccattcattcaagaaaatagcctgttgcacatttactctgtttctttgtgccctgcaagccctgcccccaagacctagataagatctttctcttcttttgcccccactcaaattagaagtgggga

SEQ ID NO: 27634 - DNA, 1052 bp, Homo sapiens
ttgagcacttagtttctggcactgcaagatgccccagactcatcttgtatattacttgcctcagctttagctttctgattcttgtttttgtttttgagatggagtctcgctctgtcccccaggctggagtgcagtggcacagtctcggctcactgcaagctctgcctcccaggttcacgccattctcctgcctcagcctcccgagtagctgggactacaggcgcccaccaccacgcccggctaattttttttttgtatttttagtggagacagggtttcaccgtgttagccaggatggtctcgatctcctgacctcgtgatccgcccgccttggcctcccaaagtgctgggattacaggcgtgagccaccacgcccggctagctttccatttaaaaatttttctgagtgctctggaaaatgtgttgggttgagggaggctgttttaccaggcagtagtggtgatggagcaacatagacagaccagggagttttctggaagttagagaaagaaggggtcaataggacctcatttctgaccagttggctgtgttaattcacagagccagggacctaggaggaggtctaaacgtagaagagtaggtcccagggtctgtctgctgcctgtgagatggcccagtagctgtgtcacatggaccgttgtgtgtttgggagaagagattcgggtggggctacaagtgtggtagtcactggcaaggaaggggttgatgctttgggcatgggcgaggtggcccagagaatgtggaggagagagaagaggcagggctgaatgatgaaggaggcgggaagaatggcccaaggagcaggaggaaatccaggagagggtgggatctggaagccaagggaggaaagaaggatcactgagaggacagacatatgagacctgaaggttgtaccttgagtttggtgagtggagggcatgggtgagactgtggcaggagttgtttcatagaactgggaacacagaagccagactggagtgggctgactgggtgagtgggtggtgaggaaatgcagggttcacatttgctta

SEQ ID NO: 27635 - DNA, 1026 bp, Homo sapiens
ggcagagctgggctagtgacatttgcaggtgggtggaaggggatccccctgttaggggagggacgaggggttggggatccatcgtcatcagtcctctctggtcagaacctgaactgtctttctttgaccatacccagcccaggaggaggaaggtgtcgagaagccagcggaaactcacctgtcggggaaaattggagctaagaaactgcggaagctggaggagaaacaagcgcgaaaggcccagcgtgaggcaagccggagggatggggtgcagctctgggaagtgcgaaagggcactgccttcctttttccctaaggcagactgagggcttgttgcctgctgggctggtgtttgctgcttccctggctctgtctcctgccgcctgggtctgtgccctggcccaggcattgccttccctagtctgtctgggcggtgggcacactctagccgggggtgagggatgtgcccctatgaagacctctctccaggcagaggaggctgaacgtgaggagcggaaacgactcgagtcccagcgcgaagctgagtggaagaaggaggaggagcggcttcgcctggaggaggagcagaaggtgaggccagcccctaccctgacctctgacccttgaccaggcaaggcagccttgcttcttatgcagctccctggcacctccaacctagaaggtgggccatagacctggcacaagggcaggtcctggtttatttggtccctaggctccaccacagcctagaaaagccactgctgaaaagcagagcctggagtggggatttttgtgcacgtgactattgaactttcggggagcatgtgaggaacgcgaggcgaggaggatagctgggcagagaaagccaggagaggaggagaagatggcagagaggtgatgggggtctggatcctgaaggccttgaggctgaggaagatcattgtaagagatggttcttacatcgagggcctggcatacagaaggtgctcagggaatggggtccactgcagtagtgactaatgaaca

SEQ ID NO: 27636 - DNA, 1105 bp, Homo sapiens
aagtgcataccaccataccagactaatttttctatttttagtagtggcagggtttcaccatgttggccaggctggtgttgaactcctggcctcaagtgatccacccacctcggcctcccaaagatcaaatgttgatttgaattggagattcaatataaattcattatttttaaaaatgtatatttcctaccattttcctttgaaagggaccagaatagtaataccacagttgcagcaaatacccttacctctgtatcttggtttctaagtaccagtccccactacaaggtaccaggactccttggagaattagctgactgcatgcctaggtcaaggaaagtacaaggtgagcctggtccattttatgccaataaagcaaggaagtactcaaagattagtggagatgtgtcaaaaggatatgggaagtagcttaagaagttcctgctagtctaatttgggacaatttggggataagaaagaaccatgataatactggaactatgaattataacacatggaataaaatgtgtgtccacagtgatcctcaaaaacaaaggtggggccaggcacggtggctcacacctgtaatcccagcactttgggaggccgaggcaggcagatcacctgaggtcgggagttcgaaatcagcctgaccaatatggcaaaaccccatctctattaaaaatataaaattagccgggcatggtagtgcatgcctgtgattccagttactcaggaggctgaggcaggagaatggcttgaacccaggaggcggagcttgcagtgagccgagattgcgccattgcactctagcctaggcaacaagagcgaaactccatctcaaaaaaaaaaaaaaggtggaagggggcaggatagcaaagccctttatagaagaataccaagtaaataaggtttgatagaactagaaaataatcagccgagcatggtggctcaggccagtaatcccagcactttgggaggctgaggcgggcagatcacaaggtcaggagatcgagaccatcctggccaacacggtgaaaccccatctctactaaaaatacaaaaaataagccgggcatggtggcgggcacctgtagtcccagct

SEQ ID NO: 27637 - DNA, 1092 bp, Homo sapiens
agcttatcctttgtgaagacggtaagcagagctatcatgggtcagctggctgggaatggcctgtagagggacatctgtaagttgggaggtgggagtgggtgggggtcttgggcagcccaccccacctgaagaagctgatcttctctcagtcctatcccagccatagcaggggtgagcctgtgtttactgaaggtacccaggtagctgtgctaggcccacccacatctattctcccttgcctaggcttccccagtgtccagagtcttaactgaggtgttgggaggcacctctttctgggttatgaagccttcctacaggtagctgagattgctcttgtcgaaatgtgaatccaggacaagcttgccttgactaacagactaagtttttcagtggcatctttgagttccaagacttgcattgatgtccttaacaggaacctagagttgagaccagtcttgacagcgtagtgagaccccgtgtctaaaaaaaaaaatttttttaattaggcaggtgtggtggcatgcacctgtagcccgacctcctcaggaggctgaggcaggaggatcacttgagtccaggagtttgagactgcagtgaactgtgattgcaccactgcactccagcctggatgacagagtgagatttagtctcagaaaacaaacaaacaaaaacagggaacctgagaaaattaactacagtcctgtaccacaaaaggacatcttggtcaacagtggactgcagatacaacagtggtcccataatatcataatactgtatttttacccaccatttctatgtgtagatatgcctaaattcacaaatattaccatcatgttataattgcctacagtattcagtatagtaacatgctgtacgggtttgtagcctaggagcaatagactataccagctagcctaggtgtatagtaggctacaccatctaggtttaagtacactctacaatgttcacacagtgatgaaatcagctaatgatgcatttctcagaatgtatccctgtcattaagtgatacatgactataattatttaaatggccaataatcaacagggacctgggtctgccatgaagtagag

SEQ ID NO: 27638 - DNA, 1104 bp, Homo sapiens
gtgaaaccctgtcttcactaaaaatacaaaaattaacctggtgtgttggcgggcacctctaatcccagctacttaggaggctgagccaggagaatcacttgaaaccagaggcggacgttgtagtgagccaagatggcaccactgaacttgagcctgggtgacagagcaagactccatctcaaaaaaaaaaaaaaaaaagacatcacaagattgccaggcacagaggcttaaacaccaagttctttctcatgtcatcgtgtttcgtcggtgccgaggacatgaggggtgtagatcaggcctgtttcaaacacaaggccttttggccagagtgtaatggtgtgaggacttgggaagaccttacctacttaactgtctctctcaaaggacaaaggtatgagggggttaaaaaaaaaaaaaaaaaggcaaagctatgaagaacatgaagttcttaagcccctagacactcttccaaggtctggcctgtatcccagagtccactgctgaaaaggggcagagatgtgtgttatatgcgcacatacgtacgcatagtatagctagcatatggcattctggtggcctcgacggagctcacaggcaatataacagcattgactgctttcacagtttccacttgtctcaggaaaatagagaaaattcaagatgaaatacagtgagtttaggacaactcagtttcctaaatatggaagatcctgtcccttcccaagtattgaaagagatgaaaattttcccttagttttcaagctcaaagtctatcttatctttgactaaatagccctgatttggatactgttaacttgctcttaactactaatagtctagtgcttttactttattttattttatttattttctttgagacggagtctctgttgcccaggctggagtgcaatggcactatctcggctcactgcaacctccacctcctgggttcaagcgattctccttactgagcctcccgagtagctgggagtacaggcgcacaccaccatgcctggctaatttttgtacttttagtagagatggagttttgctacgttggccagggtggtctcgaactccaactcaggtgatccacccaccttg

SEQ ID NO: 27639 - DNA, 1017 bp, Homo sapiens
ttggatgatgaggtaacttatccagaagcacaaagcctaaagaatgacagagcttggactcctgagaagttcagctactgcccgccttatgataaccaaaagaaagcggccgggcgcagtggctcaactcctgtaatcccagcactttgggaggccgaggcgtgcgaatcacaaggtcaggagtccgagaccagcctggccaacacagggaaaccccgtctctactaaaaaaaacaaacacaaaaattagttgggcgtggtggtgggcacctgtaatcccagctacttgggaggctgaggcaggagagtcacttgaatccggtaggcggaggttgcagtgagccgagatcgtgccactgcactccagcctgggagacagtgagactccgtctctaaaaaaaaatgaataaataaataagaaggcacaccacaagttcgagaccacttctacaaaaaataaaaaataaaaaaaattaggccaggcacagtggctcatgcctgtaatccaagcactttgggaggctgaggcgggcggatcactggaggtcaggagtttcagaccagcctggcccaacatggtgaaaccctgtctctactaaaaatacaaaacttagctgggcgtagtggtgcgtgcctgtaatcccacttactccagaagctgaggcagaagaactgcttgaacctgggatgcagaggttgcagtgagctgagattgcaccactgcactccagcctgggcaacagagtgggactctgcctcaaaaaaaaaaaaaaaaagaaaatgaagatgaccaaatgggcttctagatggctaatgatattctgtttctttgatctgggtgggggttacatgggtgtgttccctttgtaatatgttatcaagacattttgtgcacttttttgggtattatactgaaagaaaacatttattttttaaaaagttgaaaaattgccttggagcagagtaaggtaaatctatgattaagcttagatttttttattttttattttttatttt

SEQ ID NO: 27640 - DNA, 1051 bp, Homo sapiens
atttgttaaacttgtctatatctacaaaaaaaaaatttgctgggatttttataggaattatgttaaacctatatatcaatttggagagaatatctttcctatgctgagtcttcaaatccatgaacatagtatgtctctgcatttatttagattttacttgattcctctaatcatcattttgtcatttttagcatataagtcctgtacatatctaatgtcttattaaatttaattctttgtatttctttttttgaacaattgtaaatgtcattgtatttataatttcagtgttcctatgttcattgctaatttataaaaacacagttgatttttatatgtatatctggtatcctgcaaccttgctgaactcatttattagttttagaaatttttttgaagattctttgggattttgttgttgtagatgttgatgtggcaaataggctcagtttaatttcttcctttctgatgtgtatgccttttattcccttttctaccttattgcactggctagaacttccagcactatgttgaataagagtggtgagagcagatatcctgccttgttcccggtcttaggggggtaagtattcagtctttcacaattaagaataatattagctgtacagtttttgttgttattgtttggttggtttttgccggtttgttttttgtagatgctttttaacatgttgaagaagttctcttccatttctatttctgggagttttttaatttctgggtgctgatgtttgtgaaatgtgttttttttaaatcagttaatatgatcatgtgatttttcttctttagccatttaatatggatagattacattgattttttttttttttaatattaagccagccccgcatctcttgaataaaccttacttggtcatggtgttgtaaaattctatttacatattgccaaattctacttgctaatattttgttaagaatttttctgtctgtatttgccagacactgtctttatctggttttgctatcaaggtcgcattggcttcaaaaaatgccttgagaaatgttccctc

SEQ ID NO: 27641 - DNA, 1039 bp, Homo sapiens
atgttcagggccttagttggccccagtaattctccttggaggacttgggagaagaatttccacaaagcaaactactaaccactagctcttactggacagcgatttctggcttataagagttctctttgatttgcactagcactacgatagtgttagatggggaaatactgcaacatgtccagttggccagatcactttccaagggagcgatactaaggcagactcagctttttaaagatgggaggtcaggaggtggaagtgagaggagatcccatctcacacaacacacttccacgtaatgcagaccacacttttccattttgtcctgccctcttgagaggtcatttctcacgtcctaagaacctgatcagaaattttggaagggttctttgaaatagcagcagttgaaacagagacactttgccacagtgtggagcagattttctcactggtatcacatggtcttgcagttttgaactcttcgaccgatttgtgggagtttatgtaattgcgtgcaatgaacctgaaattgtgtaaaggacaaaagaccagtttatagggttgggttttttttccaacttgtgaaaagcagtttagctgcatctgtctccccaccacccccaccccgggaggggcttatgttacaaggtgatcaagtgaaggaaaaacctgagcctatctggctgggatggtggaattaagcacaaggtcacattctctgtgatcacatgagagggaaggtgatgacttaaatggcagggggtggggattatcttggggagaggctgaaaagcacaaaagatagtcttccctgtacgtattggtgaagaacgtgcacaaggctggatggacttcaacttggagttgagttgaggcaagaggatttctggatattagtcacccatctgcaagaaaaatgctgaggcctcgggtcaagattttgatctgagacatgctgatgcttcaaggagaaatattttcacaatcctctcttccctcaccagaagagaacagtactctctcctagaaacctctaggt

SEQ ID NO: 27642 - DNA, 1972 bp, Homo sapiens
cattggcctgcgttgctggggctttgaaccaccaccccgtactttgttttgcctgtagagtgttgtaaaatattttggatgtgaatgtccttgcaggccggttagtctccagtttccacagagaccacctacccaccaccttcccaggtcacctgcctggtccctgaaagaaagcatttgtgtgggcaatcccaacatgaaatgtagacagcgtgaatacggacaggaggtgatgccatattcacagtgggggatggagggcccccacccctgcttcacagaataatgggaagtgactctagtctttgtaagcaattttcattctcattaggaagttaaatgtagattcacagatacatttactttcagaatcctcaagaggatttcaaatgctaacttttagtttcttgggattgatcaaggcaagagaagtggctttaaccatgccagccagaatgaagcatcatgggtcctgatggtttcccgttttcatggtaacaaattcgcacagaggttttgctttatgctgtagaataccgactttcatgatgacaacttggtttatgcatgaatattgcagtatttccatatagcaaaataacatttctacccaggataatagtcacagttttccagggagggaatgatataattttcatgacaatgtcatgtgatgatagaatttctccattgatgaatctctagtatgtgtgtatactttatttacccatacgtatattttatgaccatgagctaagttgttatttctttcattcatatccctgctgaaatattggtactagcaacttaaagttggcaagtctcatcttcagtaatacggatgccatgggagtggccaggccagattgaaggtgaatatggagcagtagcagaagcctcattccagaacccatctggccagagaagcagcagcatcctgggggatggccgtgcatggggtgtacactcgctataggcataggcccggcatggctgtcgctggacgccagctgtgcacacccagccacacctgctgcacgccgcgttagtgtgcggctccgggcctgagcattcgcaaagctcgcttctccagggagcctcctcttggctttggaaaagagcccagggacttaacgtgctgcctgttgtactctgtcccctcatgactttttagacacagggactaggacatcgaccaccctctgcccctcctgcagtcagaacccgagtagtgcaagaacggccacccggttttgccagcgttcagcgtctgcccatggacccataaggcacattagcgttgggggtctcttttcagcagcctcacagacattcccgtcctttctggttggtgttgactgtgtttcagcatcactctaccctcccatgtccttagcattgctgtgcgtgtttccaggcacttaggacacccttccccacgttgccatcttactgacagttcaaatgactctccttttttgttcgttagtaacaatcttcatttgacaccttaatacatttctgactgttcttaaaacagtggggatgcctatattttccttgagtttttgtgactgactttggctatatatacctttctggggttttgtttgttttttatttttattttgattaccgagggtatttggggtggggttgttttttgagatgtgtaattcttttatggagtttttaaaaagaattttcatattgtttttctaacatggcttcattaaacgtttaagtattttaaaaatatgtaatatttggaccagatgttgtgaataatagtagagataaagctattttattctgtatttttaaaactgttccgtacaaataaaagctctcctggacacagttttgctcttcacgtgcctccttcttgggctactctttaagaaaagagtcatccctcagaatctgtaggggattggttccaagacctcctcggataccaaaatccgagact

SEQ ID NO: 27643 - DNA, 1055 bp, Homo sapiens
ttgtgtgttttgttgtttgttttgttttgttttgttttgtttttaagacagagtcttgctctgttgcccaggctagagtgcaatggcatgatctcagctcactgcagtctctgcctctcgggttcaagcaattctcctgtctcagcctcctgagtagttaagattacaggcatgcaccaccacgcccagctaatttttgtattttgagtggggacgggatttcaccatgttggctaggctggtctcgaactcctgacttcatgtgatcctctcacctcggcctcccaaagtgcttggattacaggtgtgagccaccacacctggcctagagaggtagtttttgagcagacctggggcaggaggtgatgagccagaagactaggtaaccagatgggagaccgatagaatgaaccaggaaagcaataacatggcctgagctgggccctaacagtgaaaattgagaatatgggtcacatagaaggatagggaggtcagaaggtcattaggtgattgcttgaatgaggacatggaggggttagtgcttcttagacttctggtttgggcactggatagctgagcaccttcacctcctcaagtattctttgctgttatctaggcaggtttgatctgtgggaccatgtgtgtgtgtgtgtgtgtgtgtgtgtgtgtgtgtgtgtgtgtgtgtgtgtgtatgtgtttgacgacagtttcattttcagtagagctgctaaacgaagcattcctttgttctatcttgggatgtgtgacaggcactccagaggaaagaggaatccggaaatggaagaagggtgtgggcaaagggaacaaatcactcgacggcatggagtcgtacaatttgccatttggcatgaacattataaaaaaatacagatgcttcagctacttacccatcagcccaacctttgtgggctacacatggaaaggcctcaggaagagcgacaacagccggagttcagatgaagactcccaggccacgggatagcctttgctgtgccctgtggcctggccgcagtgaggcatgtatctgtagttcc

SEQ ID NO: 27644 - DNA, 1051 bp, Homo sapiens
attacaggcacatgcccccacgcctggctaatttttgtatttttagtagagatggggtttcaccttgttggccaggctggtctcgaactcctgacctcgtgatctgcctgcctcggcctcccaaagtgctgggattacaggcgtgagccaccgcatccggctacgatgttttcttttaattaaagacacagtgcacatcagtcctcattatggccgccttcatctgacttagcaactgtcccaggcatctggtgcttaagattttaaaatgaacagtttccatgagcttcagaatccaagtggatcttgtagagtcttgcagcgttcagaatgactttgggtaactggtcctggtcactttcgcctgcctctctaggagcattcatggttgttttcctcccacagttcagtggggactgcccaccgtgtctgcggccggtgtcatcggcatgctcagtgccgtggtcgccagcatcatcgagtctattggtgactactacgcctgtgcacggctgtcctgtgccccacccccccccatccacgcaataaacaggtacgttcctgagaagacaagttcctgattggtcccagcaccttgttactttgttcttaggtttacattaccttgaagacaaaaccaagagtttcagcaggagcccagccaagcagcaggactctagcgactgtttgatgcatcaccacctttgtttactttcgactgtctgatacaccactgcctttgtttactttcattttcctcgtccatgacgtggaacggaattcctacccttccttaattgcagtgacatcaaataacacactctctgcgaaaccactgtaagccttaaattcaaaaaccacatgccaagcactgcacttgttctttgctttttttggggtgtgtgtgtgtgtgtgtgtcatttggagattagatagataaaatcaaagtagctctgtctatatatatatatagagagagagagagagatagagagcactactttgattttctgttatcttgcctttccaactgttcttttttttttttttt

SEQ ID NO: 27645 - DNA, 1098 bp, Homo sapiens
cagaggtgggacatgatcttgaattatctagatgccttcctccactccacccttacttgtctctttctggaacctcttcctgaagcctcctggactcttcctgtttcctctcctgttttctatctctttgtcttttttctctattcgtgagaattctcctttgctttatctcttattccttctgccaagattgtcatttatgctctggtgttttttcagtttccaagagctcttctgtatccttgggctgtcagctctgtgagagcagggcctacgctctgggtgggtcacctctgcacccccagcacctgcccctcccgtggctgagctggtgctcagtgagcaggttgtgaactaataaaggaaggctcaggaagcccggtaaacccatgaccacaagagcagccgagatagttgctgaaggactctgattcctaaaagaagccctgggcccagatggttagacaatgagtgcattcagtcttcaaggaacagagactatatgcactaacttgcaaactgttccagagctctgtgaaaggagggaaactccccagccaatcttagcggcaaattctgactgaactaatacaaaaggagaaccatggaccattgttttctttcctggggttgtgttaaaaaacaaacaaatcctgagctgatggatgtattgcggcacattctaagcaacgagccctgagttcaaatgtcttcaggtagcgtgctaaagttcagcatcattctctactgtaagactccttccaatctttcaaaatgcaaatgcgcaaaagactctattcaccttcagaaaagggccttagtatccagccctgtccacccttaatttgttttttaaatgtcacacatctataagcatatcttgacagactattccttagaatgttgtttgggaagatgctgctacagataacacaatgaaagaacaaggcataatgcgtcatttcaagaattcacagatgatcaaatattagaaaatgtgttgaaatcgatcatggctccatggtaggtttttttttatttgttaaattttgagacaggatcccgctccatcacccaggctggagtgcagtggcacaa

SEQ ID NO: 27646 - DNA, 1028 bp, Homo sapiens
cagtcatttcctctcttggtgaatggcaccaccgccaccttcccctacccagttgtccaagctggaaactcagcctcactctccttcccctgcccccttggcaagtcatgctcgctccccagcacccctctgtgcccctattccttacgttcagaccagagtgtcccaccaggctccccgttggcttccctgcctccagggcactgctcttggactcactttgtgccccacacccagtgccatctttctacttccacaccctcctcagggtgagccacactgcagctctcctccctttttacacaccaggctgcacccagcatttaggcttgcccttgctctctgccccacttccatctccagccatgcctctgagccctgtctcctgccttccctggcctcactcccaagggcccgctgtctaccttcttgtgtgtcttccctcaacccgcctggcacacaacagctcatcctccaggcccagcttgtcctgccctcccgactctgtggagcccttcattgttctctgaattcccaccttgttttcatccttccagtgtggcctttattccagtttgtcctttttgtttctatgtctttttcccacggtgcttcctccttgatgccagggctttggcttgttcacttctgcatttccagccaccagcttaaatggacgtggagctggcacaggaaggaagagaaacatccttatctaccttcctacctcctcctgcaagcttgtcttttcctctcctttcctgctcctctcccctcttcgcagtgcagcctcttgctttaccccagggcactgctcaggaagtggagcctgctctggcaggactgtcctaagttcacggccagctgtctcttgctctgtcagagacaggctgagtaaggcctggccctccctgcggtgggaggtgggtgtgagctgaagtcagggactgcattctgatgagtcagaatccttcgggacctcagggttgccctaacgcggcacggggataggggagccttggagggcg

SEQ ID NO: 27647 - DNA, 1050 bp, Homo sapiens
gcagaacccgggacgatggtgtggccccttaccgaggagtgttctccagtgggctggtttacttaggtgaacagcaaagcttgagttcctccagctagaacatttccccttctaggtgcaggaagtcggcctcaggtggttatgtgggcagggatcttaaccgaggcagctcagggtactctcacctgttcagcctgggcctcgtccacaaacagcatgggcctctgagccaaacttcccttcccctgaaggatgtgggggtgcccctgctgaggttgccctgggattttatttcttttctccccggctgagccttctgctaaggcagcctccccatacggtacatggagtatgtttctccatcaaaaccatgcctggtcatgcactcaccaggagaattacaaatggctttcggggggaggaaaatgtggttcacgctgaaacagcctctaagtggattgtctctgcaggtggtgataaatggaggcgccacctccagcggtgagcaggacaatgaggacactgagctcatggcgatctacactacggaaaacggcattgcagaaaaggtaccccttccgtcaccccgtgtccccactcccaccgccatcccctcccacaagtgctgccccggatctggatccggatccctttcagacacttgcatgtccttcgtctggggcttggtctctgactcccaaggggctgtgttctcttcataagggaagtaggaggagccatagggaatagaagttactagtttttttttttttttttttttgattgttttaatggcatttaaggtgagaaccatagaggaggatccaggtatttaaaaaggcctcagccaagatggcagagggaagtggttaagagcttgaggtctggcatcaggtctgggtgcaaatatgagtcagactgaggaaattatagaagttctctgggcctcagttccctgtctctaaaatgggaataaaaatgtcaacatctggttgttttgtggattgaatgaaatgatatgtgaagttattagcatcgtgcctgttacag

SEQ ID NO: 27648 - DNA, 1010 bp, Homo sapiens
accctgtctccaaaatatatataaaataagaacaggaacacagtactgcccgtatttaatcactagtgaaattgctaccctaagtcaacttttaaagtagaagaccattttgaatgatttgcccattgacagggaaaaagtgaggggactaagttacagtgggtcgcttcccattgcctgatggatgggattagtgtgggggcagctggttggaggcaggggcagtggggtagcacaggaagaattggtgggtctgggagataccaaaggcatgggaatagtaagaacagaggtgaggctgatagaagaggtgataggaggttttgagggccaaagaaggagatgtttcggattctcatcaagattttatacagaagaacctgattgggtatatgttggctttggagaaaatatgaagtctagggaaaaccataagtttggagggtggggaagatggaagatgatgggttttatttgagaagttgtggatttgaactgcggtgctcctagagcctgcaggcagtgggggtgtgggacttgacacacatagagatcaggagagctgtaaagactcactgtgatggctcatgtgggtggtgactgacccgtgtgagagggtgctgctggcaggcagagctggcagaggaagatagggttgagggtctcaccgttgggtatacccacacatgagtgacagggaggatcatgccaggacattgctgcatgctagtgccttgtttcattctggcctttgcaaatgtaaatattgaagaatagccagcatggcagctctgggttttatctttttgtctggatctgtactgtccagcatcatggctgctagtcacatgtgacgtttacatttaaattaaatactattcaataaaacctgaaattcacttcgttagttgcactcgtcaagtactccatagccacacgtggctagtggctagcccatctctgcttgctggttagggccttgcgaggctgaaatgttggctcttattttc

SEQ ID NO: 27649 - DNA, 1324 bp, Homo sapiens
ttttgatggacccaccatgatttgcttacccgtccacctcttgatggctctttggatgtttctagtttggggctgttataaataaaacagtgtcaaatttttgtcttacatgtatttgtgtgaaagaaatctgtctttttttttttttttttgagacagagtctgactctgttgcctgggctggagtgtagtcgtgcagtctcagctcactgcaacctttaccttctggactcaagccatcctcccacctcagtctcctaaataactgggactacaggcggataccaccatgcctggctaatttttctgttttttttttttggtagaaatggggtttcgtcacgttgcccaggctggtcttgaactcctgggctcaagcgatccgcctgcctcagcctcccaaagtgctgggattgcaggtgtgatccaccgtgcctggcccagaagtgtatattttaaataagcttcccatgtgagtcttaagcacatgagccactgattcttattctggctcttcctctctctcgtatccttttggagaagtgtgggtttttgtctagagcaaatgatggatttgccatggatttatatttctgatatagtatttattcagtgccgtctacttggagtaaatgtaaatttcattagcatttatggaacatctatcttctccacaccgccccaccccccgccctgtgtacttccttgtaaagagcatctgtctattctgtactaggagctgggaatataaagatgaattttatgttttattttttgtagagtcagagtctcgctatgttgctcaggctgatctcgaactcttggcctcaagcaatcttcccaactaggcctcccaaagcgttgggagtcactgtgcccagccttaaagatgaattttacatagggggattctactctttgggcagactattagtgattaattcattcagccattggagggtttctgtgttacctgctcactctgctaggtgctgatcatgaaaggacaggtttttcttaggatttggtggttctttcgagaaacacagaaggttttggtatttaactccacgaatagctcagctctgaaaacttctggacagtgccatcacatttctccttcaggtggccctgctaagccacagtgagaggggtgactctgtttcctggacagggagagatggtcggataaaatgaagttcaaaagaaatcattacaggctgaatagctgatgaaacaagtactgattaaaagcttctgcatttgtgcgtgattgttggtgggtggagagctagtgattcagtccttagggaattggaagatt

SEQ ID NO: 27650 - DNA, 1038 bp, Homo sapiens
tataggtaaattatccttcagaaaagccgcaagtgtttcacatctgccgatacattctctcagatactctgcttctggatgtggtggtgcacgcctatagtcccagctactctggagactgaaacaggaggatcacttgagcccaggagttcaaggatttagtgagctctgattgtgccagcgcactctagcctgggtggcagagtgagaccctgcctcaagaaaaaaaaaaaaaaaaaaaggatgctgtcagatacattgacttgttaaaactaaatttattcagtatggtggatgtaaaatgttatgtcagtgttgttttaaaaaaattttatgtgcagtaaaatttactttctgtgtacacttataagagcttttacaaatacttagaggggatcactccttttaaaaaaattttaagacttctaataaaggctgggtgtagtggctcatgcctggaatcccagcactttgggaagctgaggcgggcggatcacctgaggtccggagttcaagaccagcctgtacaacatggagaaaccctgtctctattaaaagtacaaaaaattagccaggcatggtggcgcatacctgtaatcccagctattcgggaggctgaggtaggagaatcgcttgaacctgggaggcaggaggttgcagtgagccgagattgtgccattgtactccagcctgggtaacaagagggaaactctgtctcaaaacaaaacaatgacaacaacaaaaaaaaccaaaaaacacttctaataaagaagtctctacttactactaaaaacaaaacaaggccgggcacagtggctcacacctgtaatcccagcactttgggaggccaaggtgggtggatcatgaggtcaggagttcgagaccagcctggccaacatggctggtgaaaccccgtctctactaaaaatacaaaaattagccaggcatggtggcgcacacctgtattgctagctactctggaggctgaggcaggagaattgcatgacctcaggaggctgaggttgcagtgagccgaga

SEQ ID NO: 27651 - DNA, 1051 bp, Homo sapiens
gcagtggcatgatcacagctcattgcagccttgaactcctggctcaagcaatctttctgcctcaacgtccaaaagcactggaattacaggtgcgagcccccatgcctggctgtcatctgacttttttaaaggaccacttaggctgttgggtaagaaggcaagggtatcagagcagagcccaccaggagatgactgcaataatccagaggagagaagagggtgtcttgagtagggggatagcagtgataagatgcagataataagggggatcagatcctgaaatatatatatatacttttttttggagactgacagatatccgttgaggtcaggagttcgagaccagcctggccaacatggtgaaaccccatctctactaaaaatacaaaaattagctgggcatggtggtggccacctgtaatctcagctacttgggaggctgaggcaggagaatcacttgaacccaggaggcagaggttgcagtgagccaagatcatgtcactgcactctggcctgggggactgaggagactccatctcaaaatcccagctactcaggaagctgaggtgtgaggatcacttgagcccaggaggccaagacagcagtgaactgagattgcaccactgcatttcagtctgggtgacagaaggaggctctgtctcaaaacaaaaccaaataaaacacacacacacacacagacacacacacacacaaataaaggcaatgcgttaatctgcgtggaaatgagaggcatgttatttgggaatgtgaggtagccatccagtgatgtttaacagatgtttttacagccaactttccagaaaaaaaaatgcatatatattaatatacacgtttattataaatttttctgatataagggatatatggtatacaatttacagatgataaaatatatgtatttctccttttttccttttccttttttttttttttttgacgtaatgtctcactctgttgcctaggctgaaatgcagtggtacagtctcggttcactgcagtctttttttttgagacggagttttactcttgt

SEQ ID NO: 27652 - DNA, 1104 bp, Homo sapiens
ctcagaaggctgaggcaggaggattccttgaacccaggagatcaaggccagcctgggcaacatggcaagaccctgtctctaaaacaataaaataaaatggcattataaacctacagaaattaaaacagggtgattctgcataggcattgaaagaaaaatcaatggaacagaaacactatgcaaaaagagtcacaaatatcagcaaaattttgtatgtgataaatgggcaattaaaatcaccagagaaaggatagcttgtttaataaatagtgttggaataactaattaacaaatgtaggctgggcccattggtgcatgcttgtagtcccagctacttggaaggctgaggcaggaggattgctcgaggccaggaggttgaggctgcagggaaccatgatcacaccactgcagtccagcctgggcaacagagcaagagtctgtgtctcaaaaaaacacaccaaaagacaagtggcccagttctgtgggctcatgtttggattgaacttcctcatctcttaaaggagggcgtcgccacatgacttgccttggcgaggaaatgtgagttcaagcaatatgtgtcatttctgagtagcggctctaaccgccagtttcactttccctctgccacggtcctagagtgatcgtgatgcacaacagagccccgcgttgacccataatgaacacaaagtgcgagagtgaagtacacctttgttgtgttaagccactagatttgggggtttctgtcatgcagcatatcccagcctaccctggatgatacagtctctatctcatacttcacacctgttagaggaaaaacaagtcaccccaggaaattagaaacatgaatgattagcatttgctgggagtatctgtgcttccaaagagggtgatagggagaagccattgtttattcaacagagtgaaggaccggctacataacttgtaacttgtggggcccagtgccaaatgaaaatgcgcagtcccttgtttaaaaactgattaaaaacttcaagagggtgacagcagagcattaaatcaagcacagagtccctctaagcatgggtccctgggcgtctacacaggtcacacacccaggaaatcatg

SEQ ID NO: 27653 - DNA, 1105 bp, Homo sapiens
tccatctcacaaaggaaaaaggggaaaaaaaaagctcactgatcggatttgttgatcgctccaagtttcccctgttttgggatatcagagttatttctaagtattttacattttatatagctttgataaatgggaccttttaggctgggtgcagtgtcacatgcctgtaatcccagcactttgggaggccaaggcagtcacatcacttgaagccaggagctgaagaccagcctggccaacatggcaaaccctgtgtctctactaaaaatacaaaaatcagccaggcatggtggtgtactcctgtaatcccagctagtcgggtggctgaggcatgagaatcacttgaacccgggaggtggaggttgcagtgagccgagatggtgccactgcactccagcctgggcgacagagcaagactccatctctaaataaataaataaatcaggcgcagtggctcatgcctgtaaccccagcacgttgggaggctgaggcaggcagattgcgtgagcccaggagttcaagaccagcctgggcaacatggcaaaaccccatctctacaaaaaaattagccaggtatggtggcatgtgcctgtagtcccagttactcaggaggctgagatgggaggatagcttgagcccaggaggtggaggttgcagtgagccaaaattgcaccactgcactccagcctgggcgacatagaccctctctctacaaaataacaaaattaaaataaaataggaaataaaatggaggttttcttattcttttttttctttgaatagttcttcgttaatgtatagaaacactactgatttttatatgttaacgtttgtatcctacaactttatttagttctaacaggtttttggtggtgtctttagggttttctatatataagatcagccatctgtaaatagagacagttttacttcttcatttccaatttggaggcctgtcatttctttttctcacctaatgctctggctaggatttccattactatgtcaaatataagtggtgagagtggggatccttgtcttgttcctggtgttagtggaagagctttcagtatgttcactgcgaatttgtcatgcaaggtaaatt

SEQ ID NO: 27654 - DNA, 1021 bp, Homo sapiens
atttacttatttttgtttgttttattttgtgtagagacagggtttcactatgttgcccaggctgatctctaactcctgaggtcaagcagtctgcctgcctcagccttccaaagtgctgggattgcaggtgtgaaccattgcccctggccaattttttttccaatttttatgggtacatagtaggtgtatatacttaggggatacatgaggtattttgatacagccatgcattcataataatcacatcaggctaaatggggtatccatcccctcaagcattcatcatttgtattacattccaattatacttttatttatttatttattttgagacagagtcaggctggagtgcagtggcataatatcggctaactgcaacctccgcctcccaggttcatgctattcttgtgcctcagcctcccgagtagctggaattacagacgtgcgccaccgcacccggctaatgttggtatttttagtagagatggggtttcgccatgttgcccaggctggcctcccaaagtgttgggattacaggcatgaaccactgtgcctggcctatttttagttatatatatacatatacacatacatacatacatacatatatatatattttggagacagagtcttgttctgtcacccaggctggagtgcagtggcaggatctcagctcactgcaaactccggctcgtgggttcaagtgattctcctgcctcagcctcctgagttagctgggactatggtggcaagccagcacacttggcttatttttgtatttttagtagagatgggtttttgccatgttggccaggctggtcatgaactcctgacctcaagcggcctgcccgcgtgggcctcctaaagtgctgggattacaggcgtgagctaccacgtccagccttagttattatatttttaaatgtacaataaattattctctagtcactttgtgctatcaaatactagagcttattcattctatgtaactatattttgtacccgttaaccttccccattc

SEQ ID NO: 27655 - DNA, 1034 bp, Homo sapiens
ttgtaatgcgagagccttgtagttacaggttttatttactttattcagaaactaatcagattgtgttttgttaagtggagttttttgttgttgtttctttttttaaggaactttaaaatttttgttaggtggaattttttttatcactgtttatttacactttagtcaaagcccgttcaccttttaagggagaaacttattactaaagccagcagattgtgggaatcttccttctttcctgatgtcatgagatccaatttattaaaggtattctttgtgataaatagtaagtaaaacacagtatttattaagtttgtatcctaccctaaccatttataaactagtcaatactacagcatctccttttgcacacttccccttacaatagaatgttctacgtggaactagggccaacgaggaagtagcaggaaaccatcctttataaataaataaattactctttggacccacatttgaaggagagataaaaatagatctggaaagatctgggaagcttccagccacttaggtcagatacaacgatgagccaaaccttggaaaatttgtctctgaatcttaaccttgaattgaatttgttcataaggcaggtttacttgctatgtggaacaaacaactaatcatttggaataagctgaaattgccttcttttccttttttttttttttttttggagacggagttttagtcttgtttcccaggctggagtgcagtggcacaacctcggctcactgcaacctctgcctcccaggttcaagcgattctcctgcctcagcctcccaagtagctgggattacgggcatgcgccaccacgcccagctaattttgtatttttagtagagacagtgtttctccatgttggtcaggctggtcttgaactcctgacctcaggtgatcatcctgcctcggcctcgcaaagtgctgggattataggcgtgagccaccttgcccagcctcttgttttgttttgttttgtttttaagatgtagtcttgctctgttgcccaggctggactg

SEQ ID NO: 27656 - DNA, 1385 bp, Homo sapiens
gtgcgggcggcctggcgcggcgctccggtaaggcgtgtgtgcggcagggcggggacagaaccgtcctctcgggctctgggcgtgtccgagaccgcgctccccgccgaaatcaagctccgagtcatccgtgtggggcattcgtcccccctggcacagttggcctctttccagaagcccgttttgtttgttttacgtctaaattcgcgtcggttcttatttctctccctggcaaggtctgaagacgggtaggagaataacgtatgtagaggcgcgtaatgccaggcactgtgtgccaaacgttttatgatgcttttagaactctcgtaacattcaggtgctgagggagtttgggggtagcggtgagctggtaaaaagcctgttggcaacgaagactgatactttgaaaatgctcgtttttatttttcccgtcttttagaatcctctttgccaagagtaaacattcgtctcccctctccctcacgcccctgcgatgtattgttttgatgcggatgtatgaacagttaatgtcaggggacgtactttaaaaaaaagtctaattgcaagttagatgtggttaaatgccctcaaaaaccacacatactggtagtttgaactttgttttatagaattaaatgcagccgggatcacaacactaaaaacctactatttgacacagtttgatccaatcttttttgaaaagtatagagattaacattatgctaatttttaaatacttgatttctagaccaggatgtaatcaataaaaacggatattaatatttagcaccaattatttaattatgctagttattttacattgactgcaagccacgtaaaacagttaggccgggcgcgctggctcacgcctgtaatcccagcactttgggaggccgaggcggacggatcaaaaggtcaggagtttgagaccagcctggccaatatggtgaagcccgtctctactaaaaatagaaaaattagccgggcgtggtagcaggctcctgtagtcccagccacttgggaggcagatgcaggagaatcgtttgaaccctggaggcggaggttgcagtgagctgagatcgggtccctaaactctagcctgggtgacagagcgagactccgtctcaaaaaaaagaaaacaccaaaaaaaaagaaaaacaatttgttattttttggaattaggtatgtacaaagtacttagaacagctggcatctaacaaagactaggtaagtactaaccaccattattgtgatgatgataatgatgaattttaaaaatgccatcccagagaaaaactagtcctttttttatgttgcccttatgcccttattgaaatactgaattttttttttttttttttttttttttttttttttttttttagatg

SEQ ID NO: 27657 - DNA, 1063 bp, Homo sapiens
tgtatcagtcttcaaaattttcatagctccctccaaagtgaccaatacaagtgtttgtgggtttttataaatatataatgagctaatagattgcaactttcttgatgtttttcaatgatgaatcttttgttttgtaggttaccatagagatgaatgaaccagttcaactaacttttgcactgaggtacctgaacttctttacaaaagccactccactctcttcaacggtgacactcagtatgtctgcagatgtaccccttggtaagataataaatttgaaccttgttttgtaggtagtcatatgtgatacatactcctcagtaattaaccatcttcctgtctttcagttgtagagtataaaattgcggatatgggacacttaaaatactacttggctcccaagatcgaggatgaagaaggatcttaggcattcttaaaattcaagaaaataaaactaagctctttgagaactgcttctaagatgccagcatatactgaagtcttttctgtcaccaaatttgtacctctaagtacatatgtagatattgttttctgtaaataacctatttttttctctattctctgcaatttgtttaaagaataaagtccaaagtcagatctggtctagttaacctagaagtatttttgtctcttagaaatacttgtgatttttataatacaaaagggtcttgactctaaatgcagttttaagaattgtttttgaatttaaataaagttacttgaatttcaaacatcacagggcagtgtcttcattttgaccaggactgttggaagtatcctactgaattcccagctacagctaccctttcgtttaaatggtttttcagtttagagcagcctgatggagatcaaaaggatttcaaatacagtaggttactagatattttaggggattcacttgtcaaacttgttattccaatttgagctcaaggaacaagtgagagagtagtacaaatcctgtgtatttcattttacttggcaaaaattaatactcttcagaagcttaatgtaccgaaagtcgtgtgggctttataagatgtta

SEQ ID NO: 27658 - DNA, 1070 bp, Homo sapiens
tacctggcctgaaaaggcaacgcatgttaatggtggttttagctgagaaatgggaatatgtttctttgttttctttctttcttttttttttaaatctatttatttatttgagacagagtcttgttctgttgcccaggctggagtgcagtggtgtgatctcggctcactgcaacctctgccttcaggtttcaagtgatctggtgccccagcctcctcggtagctgggattacaagcctgtgcatgatactcggctaatttttgtatttttagtagagatgggatttcgccatgttgtccaggctggtcttgaactcatgaccgcaagtgctctgcccgccttggcctcccaaagtgttgggattacaggtgtgagccaccatgcccggcctcgtttgttttctttatactttcagtgttttctaaaattccaaaaaggaatattacagttaccccccattgaaaggtatttttaaaattgtttcttttcagggttcggcaaaagcagaacaaatatccgatactatttttaactcaaggaaaatctgagatttatcctgaactcatggacctcagatctcggacaacccccattgcaatgagctttgcacagtttgaaaatctactggtaagttatgtttgaatttttatctttttaatgttctgttttctattttggagtagtagtaaagatttcatattactttacccatctaatgttaacgttttgactaaactgtagcaaacaagtggctctacttaaaaacgaggatattagatctcaggatgaaaaacaattacattaagtacaaaatttgttataggcatacgttaaattttttagtttaactttctgaatagattttatgaataatctaaaaatgttcagactgtatgccttttaaaaatattattcccattttacagatgaacgtgaacttgttttggtagagcattccattagtacattttttgactgcacattcaatatgtatgcttatacattatgtatatattaatatattgtgaatatatttatgtatgaagtgtccattaaaaagaataagttaaa

SEQ ID NO: 27659 - DNA, 1021 bp, Homo sapiens
gagtgttgctctgttgtccaggctggagtgcagtggtacgatctcagcttaccacagcctccacctcccgggttcaagtgtttctcctgcattagcctcccgagtagctgggactactggcatgcgccaccatccccggctaattttttgtatttttagtagaaacggggtttcactatgttagccagactagtatcaaactcctgaccttgtgatctgcctgcgtcagcatcccaaagtgctgggattacagacgtgagccactgaccccggccgaaaatactgaagtttttatgaaaaaaaaaatatatatatacacatttcatatataggagatatgtgtgtgtgtgtctgtgtgtgtgtgtgtgtgtgtatatgtatgtatgtaatgtagaagtttaaaaattaagattattttaaatctcattttttcaggaagatctcagtgagcacgtagttcagggtgatgcccttcctggacatgtgggtacagcttgtctcttatcatccaccattgctgagagtggaaagagtgctggaattcttactcttcccatcatgagcagaaattcccggaaaacaataggcaaagtgagaggtaaggttgaagacactgccaaataacccaaggttaagttagaattttaattagtttcaaattaagtatttgataatgataaagatgaaattaataatttgctttagtatcaatttaaggagcatgtctgttacattttgaatcttgtttttttttccgtttgacagaaactgataaagctgacttgagtggtatttaaatataatgtagctcataatggcccttttaatcatttttatttttgttcctccctcttttttcctatgaaagttgactatataattattaagccattaccaggatacagttgtgacatgaaatcttcattttccaagtattggaagccaagaataccattggatgttggccatcgaggtgcaggaaactctacaacaactgcccagtaagttgaatatttgagta

SEQ ID NO: 27660 - DNA, 1032 bp, Homo sapiens
ctccctagttcaagggattctcctgcctcagcctcccaggtagctgggattacaggcatgtgccaccatgcctggctaattttgtatttttagtagagacggggtttcgccatgttggtcagactggtcttgaactcctgacctcaggtgatccgcccgcctcagcctcccaacgtgctgggattacaggtgtgagccaccgtacctggcagaaaatgtactttctttctcagaaatacttttaaaaaaaattgaagggtgaggagaaaaacatcttggagaagaggacccattaaaactttaaatatctgtgggaaccatttttcctgattttcccttttttaacatcatggcaaagatgggtttttttccaacaaaatttaatttaatatctttccacttgaagattttaggtttgttttcaatacttaatgaatataaaactaaaggagaaaagccaacctgaaataatttaaactttatatgaacatttcgataagagtttgtggattttttctgtagataatatatttgatccggaactcaagtgcatggaaacatgattttgatttttaaaatctaaaaaaaaaaaaaattaaaatcatgcttccctctattgcagtatcagttatttagtcacagaatggtattttatgtaaattaaaattaggtgaatgcaatgcaggtaactggttttggaatgggaatgtgcagtgctttatgtttggggagttggagcagggtatcttttcatcaattagaaggaaagtttgaaacttctgattacctttatgttggtttctcttattatttgtctcttgctagatctgctaaaccaacccagcttgctcagagatctcatattgaagcaacatacaggcaatccacatctttctttccctttgaagtatagtcattggatgggatgagggacagggcctgttgggttcacagggccttgcactgcatgggcacatacttaaaagctcttgtgcatggaatccctgtctgttagccacaggcctctttagc

SEQ ID NO: 27661 - DNA, 1024 bp, Homo sapiens
gaggaaaaagatgattcaaatgaagaagaaaacaaagacagccttgtagatgatgaagaagagaaagaagatcttggcgatgaggatgaagcagaggaagaagaggaggaggacaacttggctgctggtgtggatgaggagagaagtgaggccaatgatcaggggcccccaggagaggacggtgtgacccgggaggaagtagagcctgaggaggctgaagaaggcatctctgagcaaccctgcccagctgacacagaggtggtggaagactccttgaggcagcgtaaaagtcagcatgctgacaagggactgtagatttaatgatgcgttttcaagaatacacaccaaaacaatatgtcagcttccctttggcctgcagtttgtaccaaatccttaatttttcctgaatgagcaagcttctcttaaaagatgctctctagtcatttggtctcatggcagtaagcctcatgtatactaaggagagtcttccaggtgtgacaatcaggatatagaaaaacaaacgtagtgttgggatctgtttggagactgggatgggaacaagttcatttacttaggggtcagagagtctcgaccagaggaggccattcccagtcctaatcagcaccttccagagacaaggctgcaggccctgtgaaatgaaagccaagcaggagccttggctcctgagcatccccaaagtgtaacgtagaagccttgcatccttttcttgtgtaaagtatttatttttgtcaaattgcaggaaacatcaggcaccacagtgcatgaaaaatctttcacagctagaaattgaaagggccttgggtatagagagcagctcagaagtcatcccagccctctgaatctcctgtgctatgttttatttcttacctttaatttttccagcatttccaccatgggcattcaggctctccacactcttcactattatctcttggtcagaggactccaataacagccaggtttacatgaactgtgtttgttcattctgacctaaggggtttag

SEQ ID NO: 27662 - DNA, 1026 bp, Homo sapiens
tattctttgggcatgaaaatcagtatgcagtatatatctccccaggtattttctccccaggtatttcaggcaagagttgaataataaatttatttatctaactacataggcaactataaatgttcagcatgttgtacttcttgttattttttatttctcttaacctaatcttgattagtttgattgcattttaaaccctaattaaaccaaaaagtttttaaaaacctttatattgtatactaaacacatagttcctaaacactataatgggaataattgatgattactaaaaatttatgtcaaagaacagactttaaggtaagattatcttaaagtctgtccttatattttataatgaattttggctctttagcaagttctttttaaaaatgttaacaattgacttatagtaagtcacaaccccaagaggccaaggaggctcgatttgacttttctatgaacatgcttaatacatatcatggcttatctttgaaacttggctcctgatgttaacttcagggataagaatgggacttacttagatatctgtatatgtccttcattaggtcctgggtatgttctgttctgttgcattaatctttttgctaattaacatgtccccattgctcccgtctaaagggatttgacaccggatataaatagaatgtgattgtctgtgcttctcccatctgttgtctggtgcgagatttttctagcagtgtattttggggctaccatagtgtgaggttcttgtagggggaaacagtatgaggtcccaggcgagtcaatgatggagttatagggaatgtaggttgtgtgtgaccctgttggaagactagtgaaaatgcttagagttttagaatattatttttgatgttgactttaagtccatgaaattgagtcaggcctgcctgcctatgccttagattcctttggaaacctagattcagataatcagtgtagaaaggttattggaggcttggcctgaagaaaggagagagtgattctagcctgttcaagtgatta

SEQ ID NO: 27663 - DNA, 1021 bp, Homo sapiens
ttctagggaagtcattgtcattacctctcttgctgatgatatttggagccatatcatcctgtgtccagtagttacttgaattttaatggccatttttgaagctgtcagggtcttgaacaaatgactaagtgattgtgaggaagcatggctcctgcaactctacatctaagtaggttttgactttgaaatagcaagttcatatctgttaatttctttatgatttagcatgtaaatactttctagctgtgattatgtcccttcactcatttttagagtgtttgtcatcaaatagagtcttagggaacagtaagcatgaagggatatacactctattcaaagactgctggaatctcatttgctcataataaattaatcagaaaaactttcttctgtctactgttacattttatgttttctggtaatttaccaaactttgaaaggatgaataggtgtagagcaatgagagtctaattaggaaaaagaggtatggagacattttaaatgattgacgttctgtaagtcgtaatttagttttactaaaaagtcagaggcccaaaaagtttaattttttcatgaatgccctattataagtaaacattgagatgtatataattattaggggaggagggccaaaagcatccatcatgatggaagaaaggactatcaaaacgattctaccagaattctatccagattatgaactctaagcaagtataactttttttttagtaatgaccttaattactactctcagtttcccaatattataaaattgacttgttctttaagaatcatttagatacataaagctttgtgggaacctatgtatgtagaaacaacagctagagagagagattgaaatatttttggttctcttaaaaattaatgttttattttttttcttctgattccagcatcttcacaactatttcacagtgactcttggaattcctgcttggtgttcttatgtctttttcgtcatagccaccttggtttttggcctttttatgggtctggtaag

SEQ ID NO: 27664 - DNA, 1050 bp, Homo sapiens
gactgctgatgttagagatatatttatatagagatttgtgcatgtgtgtgtttccactgcagtatgtatgtgagatggtaattttcaattcatggatttctccactctgagactgagttgtgtcaattgaatagcagctctattctacagttttccctagccactttcattgtactcctgggtctgtgttgcaagtgtggagctcgcccaaatcaccaggtgcagcagattttactgtgaagtttaacaggctaatattagcatctcaagctcctcagaggcagaatggaaacttttgtagttcattttcacagctaagtaatactacactgtgttaatatatcacaatctatctgttcttttatagattgatatttctgttgtttccattatctgctattatgaaaaatggtagtatgatcattttttatatctctcctggtgcctgtgcaagagtgtttcaaggaagtatatgtagaagtggattcctaggatataagatgtataggtaaccaaccatctcggtttgcctagaactgaggagttttccaggatgcaagatttttggtgctaaaaccaggacagtctcgatcaaaatggtataagtggtcaccctgaatacacatatgatcgattttacaacataatacatattaacctctttcccacagaattggtagcaatttacactcccaacaagtggtatatgactattccctttgaacaccattctcctcatgcctggtgttcttgatatcttaatttttgccaatcaattgagtgtgaaatggaatcttgctgtaatttgattttccctggttactaatgaggtttggcatcttttcatgtttagttttccctttgtgtgttctgttctgtgaaatgccttccatatctttcatcttttttccattttttttttaattagacacatctcatttatctcttcagattttcttgatttttccagtacttaggttagggtctctcaacagcagcagtgatggcattttggactgcataattcccatgggatactgtcctgtgcct

SEQ ID NO: 27665 - DNA, 1029 bp, Homo sapiens
aattcagcacagtcaaaaccaaactcaggatcttctcttgccaaaagcagtcccttcccagggccccttctgggtgtctggcaccgatatttgaacactcattgccataagccagaaatatagaaggcgatctgtgtaccccctctctgttagcatccatacctagtccacctccaagttctgaaaaatctctccagctcttcacttgaatctgcctgccttctgccactgccctggtccaagtcaccatctgctcatgactgaacttagagtagccttcgtctggtccacctttatctgctctgactcacctctagtgctttctccattcttctgccatcctggtcttttcagagccataacatttgcttgtcacccttattatgaaaaaccaaccacttggtggccttctgttgctcttgggacagatcttcatgtggcccacaaggctctgtgcagcccagctttgtctccctgccagccttgtcttacacaccgtgttgtccatcgtatctgtagcctggccataccctagcagttgccttcctatcctcaactacatcacatgctttctggcctcaggacctttgcacatgctgtttatgctacttggagtgttttgttcctttcttcaccctcagccactccctctggactgcactccacagggcagaagctgaggatgttcagaagcccaaacggagttggctgccctgtgggacccaagcgagttgtaaacattctggcttcagatgtaaatcaaaggcagagccctgagttttagggcagagaattccttctatcagctctgcagtgagccctcacaggcagactcgggcccaaatatagcctaggtgctgtttatgtatttgaaagtatttaaggctggtccttctgtcatcggtcctccaaagtcttttattacattttgggactgtggtatatagagttccaaatttctttctcccctagagcaaatggtttcagtttactgtaatgcataataaacatgtaaacataaataggcac

SEQ ID NO: 27666 - DNA, 1028 bp, Homo sapiens
tctttatgggacaattctgaggcatgttcacagcctctggagagatcccaatgggactgtggctctgttgccctcagtagtaaccctcttataaaaacacccattattaagttttcctcccttcctggttttacttatccatgcttcctgaaaataccccccaataaactacttgcacctaaatccttgtctcagagtctgtttgtgggaacccaaattagggcaaccaagtccatattagcccatcagatcttattgatcagagatcaaattggatcttttgaatgatcaatattagactgttctgaagattgagagagatatcatgtagaaaaacttaatacattcatttgggtaaaacctcataaattctagagacagacagaaaatgtgtactcttgtgtctcccatagggaagatttgtggaatttatataagaagagggtgtctacaatttagttggggaagaaaagtcattaactttgagttataatatcataaaaacaccacatattttgaatgagaaacaggctctagaaagtcttttagaatgtgctttatctgcagaaaaattaaaactagcttattctttagttaatgctttgatgcaaagaacacttttatgtttctagctagcatgggatgataaacggaaattaaatgcttagcattcttattcattttctattgctactgtaagaaattatcacagacttagtggctgaaacaacacaaatgtatcatattagagttctgcagatcaggagtctgacgtgggtctcactaggctaaaatcaaggtgtcagcagtgctgatttctctttggaggctgtaggggagaacctctttccttggcttttccagatactagaggtgtccacattcctttattaatgcccccttcccccatcttcaaagtcagcaatgctgaatgcctgtgacctttcttccatcatacatctctgtatatatatgggactacggccaggaaatgttctctgattttaagaaatcatatgatagattgt

SEQ ID NO: 27667 - DNA, 1081 bp, Homo sapiens
gttgcaactattcaactctgctattgtaaagtgaaagcagtcagacaatacacaaaatagtgggtgtggctgtgatccaacaaagatttatggacactgaaatttgaacttcatataatattcatgtgtcacaagtcttattcttatttttattattccaattatttaaaactgtacaaaaacagggggcagctgtattggtttagtgacctctgatcttgatggttttcagtttttgctatgagcagtatagggcagtacaaatggctctccagtgggactcaagagaactgatgtctagtcttctcgacctacagactgtggaaacattgactggcaagtcattaaaaatctctggggcttcatgtgtctcatcttatggtatttatgtgggaagatggaaggtggtagatctacaaattctgaaattctatgagtttcaacattgtttgatcatcccagatatcactttgctggcaagtattatacttatgtaaaattactgtcatatcttgttgaattgtgcttggctttgttgaacctataggactaaattctacacttgcagaaatatgcctgctagttgaaattgagctgtgctataatttctatcacggtcaggagaagggcaattatgttgtcagaactctactaggtctcaggaaattgccaaaaggctttaagaaacaaagatatgctttcatttttctcctcccaaacaattcctccaagagtcccattctcctgaaacatactcttaaaagaaaattaaaaggcttgagagaaatgcaataaaatctcattaattggaatctataataatttggtttgagaggaattggcactattcatgaagaaaggttttgtggtgtctattaaccaattggagttgggacgttcattgctaatttaatcaaatccactgcttgaaaatgtgtttgttacattgatttacgtaaaaatatgttaattaaaatttctttttaaaagaaagttaagatctctacttggtagcaattttttagaaactgctcgttcttaaggcaacttaaaaggccataagaatatatttatttaaaat

SEQ ID NO: 27668 - DNA, 1049 bp, Homo sapiens
ctctgagaagttgcagatgggaactcaggagcccaaaattatgactgctttgttaaactgtcattgaagatgaattctgacccatgtctagggctgcaattatataatcagcaatatcatgacaagatttgctggactaagctggcatacttattcaaaaataccaatatccaatcagtttctcctacgaaaagaaccttctcagccatacttcttctttttttctttttttttttttgagacagagtctcactctgtcaccaggctagagtgcagtggcccgatctcggctcattgcaacctccacttcctgggttcaagcaattctcctgccttagcctcccaagtagctgggactacaggtgcgtgccaccatgcccaggtaacttttttatttttagtagagacggggtttcactatgttggccaggatgatctaggtctcttgacctcgtgatccgcccgccttgggctcccaaagtgctaggattacaggcgtgaaccaccgtgcccatctcagccatacttctaacaaggacctactcagagttacagttcttaggagtaatacagtagaagacaattaggttaacaattctcacctttccaactaatgctgggatattcattgagttagttgcgaatcccatcccaaagaccatagctgcttccacattcaggaacttagccacaaggtcctccaactccttgtgcttatccaaggtgcctgcacataaaattacatgagaagtgagccttctcttttcaacaaggccaagattgaaaactcaaattccagtacgtacacatcaccaaaagacctatacaagagtgcttgtagcaggaagatttgccattgccctaatctagaaacagcccaaatattcaactattgtagaatggaaaaatacaatgtggggtatttatacagtggaattcaatacagcaatgagaaagaatgaactactgctccacacaacattgtggataaatctcacaaatctgttgttgagtgaaaaaagtcagacatctaaaaaagtacaggctgt

SEQ ID NO: 27669 - DNA, 1050 bp, Homo sapiens
acctttgcagtgtgattccaactttcttgccttgctccgcctgagtcattgtgtttccagtaagtgacctcccttcctttggaccagtccctagtcttctcaagcccctgtcttttcttcaacacatttcttcaatgtgtttctcctgctttacaaggacataccccaaccctaccgactctcttattctttgtagcaagtaatatttggggactgtagctctgttctcttgccctccctattccatgttgtggtctgattgctcttagttcctatttttcctccgagacgctgtgacacaatgcctgggtggtgtcttcccccagagtatgcacccaattgttctggaagtcaggaaggactgtggcgttttctgccttgctttgtcaaatgttgtctcttcctacagtaatcccagggactctttttaacccaggattttattctaaatggaatgttaagagagttcagatgctgagagacaggtcagggcagcgggggtggggagaggtgtgagcttatccagatctgtggctttgccaggactgttttcaagttgacacagtgctaaataaaaagccccttgctttgatctcggggacttcctgagtagactgtctgattagataaagatcacatattccacccccatcctttaggaagtaatctaagctttgcagctattccttatcctgtctccttctcaaagtctgtctgtctgtatcactgggtccctccctgggtcttgggcttttctttctgtttgagcaggaaaagggatcctgagaaaatagagcacgtcttcctctttgaaatcttcttaagttgtttagaaacaaagcaaaagctttgtttgagaacctcatatggacctcgtctggtccagggcatcaaaggaaactgatctgtttgcaatatggtcagctgctgagatgctatgaagcaagcgagttggcaggtggaagagttggagagagaaatacagtcagtggctgcactgggttccttagccaagaaaagagggtgggagtgtgtcttttctcttagaac

SEQ ID NO: 27670 - DNA, 1003 bp, Homo sapiens
ctggaaatcttctcatggattcccttggaaacatctagtcctatctgaaactgttttatttcatcagaaatcattgctggctggatgcctgatgccagcattcaaatccagtagacagagtgtggctcagaagagactcattgaaactgggaatcccccaactgggaggcccagggttcacactggaaccattctggtgtagttatacatcaaccaatgttaggagtacctgctctttttatctttagtgatactcatagttgagatttttgagatacaaaaaaaaaatctcactttttaggcagaaaacattgacatcagggctgggtacataatttgtagagcccaatgcaaaataaatacttaaaagtcttttttacaaagaacaggaaaaaagctttttcctttctaggatggtctctctcaaactttcatgatgtgtctaatttcctagttaatgttatactgcctcaggctctggcatacttgaggggtgagtgtagaccttcataggcatcagagtcctgacttgcagctaagtgtgtaggatgtgctggcccaacctcaattcttccactgcgggcacagggcagcagtgatctctgggtggcgttaggggaggaggtagccaagaacccatccctgggagataagaggaggcagggggcaggacggggcatgagccaagactgctcagggcatgcactactgtgctattggtctttacttacaaaacaaattcaaagataaaagtattaagaatttcaaaatggcagccacaccattaaagccaagtgtgaggcccccttctgaatgcggggccctatgtgatgtcagtggtagcacacccaggaagcagccctggttgaaactcattctcctttgggccccctggaaacttactgttattgagaagccttttggatttgtattcttttctatgtaatgtgtttttttccttcctggaagcgtttaagatcttctttttaactgtgttctgaga

SEQ ID NO: 27671 - DNA, 1062 bp, Homo sapiens
ctttatatattatgatgataagttgtcagatatgtgatttgcaaatatttatctcagtctgtagcttgcctttcattcttttttcatagagcgtaagttttaaattgtgatggttctcattattattgctttaaagtaagccttaaaattgtataatgtgatttcttcaagtttatttttttcaacatttttcgcctcttttaagtttctttgcttttccacgtaaattttagagtcagagtcagtgttactatgtgtacaaaagattgttaactgggatggcaattgaaatttagttaaatccttaaatcatcttgtgggaaaattaacaccttaatattgttgagtcttccagtccatggatgcagtatgtctctccgtttatttagatcttctttctttcattagtttttggagtttttattatacagattctgcatatattttaaaatgtatacataattacatcttgtttttgtttttgttttgtttttttgagacaggactttgctctgtcacccaggctgaagtgcagaggcaccattacggctcactgcagcctcagcctcctgggctctgcctcctgagtagctggaactataggtgcatgccaccatacctggctaatgtttaaatttcttatagagacagggtctccctatgttgcccagtcaggtctcaaactcctgggctcaagagatcttcctgcctttgcctctgaaagtactaggattacaggtgtgagctaccatgtccagactatgtaatttttaaaccgtattattttttaaaattttgatttccagtagttgattgctaatgtatagacatatgattgatttttaaatgctgatcttgtatcccgtgaccttgataaactcatgtattaattctggtgcttttttgtagatttcttgcaaatttctacatagactatcatgttatatgtgaatggatagagacttctttctaatatcaggattttggtaacaatctactgagagatcagataaaatttcagatcacgtaaaacaaaactggatatgctggtcctcttctttt

SEQ ID NO: 27672 - DNA, 1029 bp, Homo sapiens
tccatttatatttaaacatttgagcttgttaaggaccccttttattaagagttcaaaaactggccagtataaaagagcacagcgtctccaagaacagtttgtcaagactttactcttcaattttctacattttttttttaaggaatattgtgaagccaagagggggaacatagtgatattcagaatcatggaggcaaaaatgtaacaggtaatataagttccttccttatcagatcggatattaaagatcagctactggaaccagagaatactgagagatgtaaaatcaacttcatttcacactaaagtagaaaaagtagaaacagatgagaaaataacctcattctctaatctggcttatatcaccaagaatctgaagctgtattttaaggtgcccacttttaacatggatgcttttaactgtgtgcctatatttgatttctttgtaaggtctgagtgttggatatctggttctcttgagtagaattaagcctggtctggattcctcaaggtggtcactgtgacctagctctggatttggaaacaggggcatcttcagggcttggtgaggagacaagagcatgtgattttgcttaaggcacctggagtgcctgtgctgattggactgtcttgtcagctctgccactgttttctctgccttcagtatgtctgcctatggcaggccctttcttaccttctaattaccatgtctaaatgtgaacttgatgtggagaaaggaaaacaattatactctgctggtggcaatgtaaattacgtcagccactgtggaaagcagcctggagatttctcaaagaacttaaaatggaactaccattcaacccaataatcccattactaggtatatacctaaagaaatacaaggcattctactgtaaagacacatgcatgcatatgtttactgcagcactattcacaatagcaaagacatggaatcaacctagatgcccatcagcagtgaactagataaagaaaatgtggtacatatacaccatggaatactatgcagcc

SEQ ID NO: 27673 - DNA, 1055 bp, Homo sapiens
ttctcatttcctctcctactttaggctattgaattatctgagtttttgtaagctactgaaattctttaaggaataaatttgggatataaacatgaattaagtatccttagttactctgtttagaagacaaaacatatacaaattactagttttcacataatgactatactcaatagagctggcattaaaactgctactcttgtgaatataattaaactatacattctgtgcggtcaggggtcttggctaacttggtcacctctgtatctcaagttgctagtgctgtgcttggcatgtagcagatgctcagtaaatatttcctgagcgatttgaacaaacgatctttcagtaactaaagtttaccagtggtacagtctgtggatgctcagaagcaaaatgaaggcctaatgctctggtgtttcctccaccttttttggacacgggtaggggtgtggcaagggacaccgctgacccctctgatgctctgctgtctctctctctctgcagactcacatttcaagacttcctcctggtgcggtggcaggacagtctgtggcaatcgaaggtggggtgtgccgcctggagagcccagtgaactgacccttcaggctgagtgtgaagcgtctcagaggcatttcagaacctgagcttttgggggtttttaactgaagttggttgttttatctttcttgttttataattcctattgcaacctcgtgcactgctcgagacacaagtgctgctgtagttagcgcttagtgacacgcgggcctttggtgggtgagcgggactgtgtgtgagtgtgtgcgcgtatgtgcgcacatatgtgtatgtgtggagtatgtgtgtttgcttctccgtggatgaaatagaaactcctcattgtgtgaccaggaatggttaaatcatctttacaaaatgtgtgctttaactgtttacaagtaaaacctaaagttgcaggaaacattttttatttcgtaaagaggtaccaactgtcgctgatgtgatatgtcagaactgaagagtaaatctacttgtttaaatgacttgacagt

SEQ ID NO: 27674 - DNA, 1072 bp, Homo sapiens
aaaaaaaaaagaaaaaaccctcaaaatatgagatatccaaggaaaattcctcaatgtgattaagggcgtcatctatcaaaaacctacagctaaaatcatactaattggtgaaacactgaacactttctttctaacactgacaacagacaaagagggcatccactcatcacttctattcagtattttattggatgctccactagtacaataaagcaaataaaagataaaacttggaaaagaaatagtaaaagccatagttattctcagaggacatgaaatgaatctaacgaatgatgtgcaagacgtgttccctgaaaactataaaaccttgctgagagaaataaaagacaatctaaatagagaaacatgccatattcatggattggaaaacacagtaagatagccattctttccacattcagctatagattcaaagcaatctcaataaaaattccagcagacatttttaaataagaaattgacaagttggttttataatttgtgtgggaatttaaaggacctagaactgcaaaaatcaactttaaaaaagatcagagttagaggacttacagtaccagactttaagacctactgttaagctactataatcaaggcagtgttcctccacagaagaggcaaccctaaaaatcaatgaatcagctttggaatcagcaggaataccgtccagctctgcagtttcacagcattctgagggaagggaattgccagattggttgatgcagcagggtccaccagacactgcagaaattattaaatattgtctcagaattatagacggaaatttgtgtctcaggaggaaactggctgggcatggtggctcatgcctgtaatctcagcactttcggaggctgaggcgggcagatcacaaggtcaggagatcaagactatcctggctaacatggtggaatcccgtctctactaaaaatacaaaaaaaaaaaaaaaattagctgggcatggtggcacacacctgtagtcccagctgctcgggaggctgaggcaggagaatcacttgaacccaggaggcggaggttgcagtgagccgagatcacg

SEQ ID NO: 27675 - DNA, 1130 bp, Homo sapiens
attgaacctctctgaaactcaggttcttcatctgtaaatgataataaaatgtctcatggcaggtggttctgaaaattaaacttctctcagtgtattatatttctccctctttttttttttttagcttatcagtatgagagtttatatttgtttactctagctattcacatcctaactacatagtatactgtgattccatttcatttcttgtacaagtcttattatttttttggtaatagtcactctttcatctccaaactttcctcaaaatctgaaacattttctctcaataatttcaaaccaacatgtattcagtcagtttatttttccctccccttagaattacctttcctggcctcttctggcttcatgctccaatttggacagtttgctctctcagcttgatgcatagctgtgtcatctggaatcccattatcttctcttgttttggatcctctgtatccagatcttattttcttcctcattatttacctcccttcttcattctgtcaaggaacattcatcctgtagctttctgagaaagaatgcatgggaggtaatctctttgagactttgtagagctttattccactttcatactttattgaccttttggctgaatatagaattctaggttggaaataatttttcctcagcattttgaagatagtgcctcatcatcttttagcttcaggtgttgctgttgttgagaaatctgatgccactgtaataccattgctttccatgtgatcttttcttcccatttgaaagtttttagacccttctctcctttcttagtattttaatatttcatagtgttaaatcttcgtggggcccctttttcatgagttgtacggggaggttgatggaccttttcagtttgaacactcatcttcaattcttggaaatgtttttgaattatttctttgaaattttactccttttattttttctagtctctctttctaaaactcctgttattcacatattggataattctggcctagctttatgattttcttatatttttgactcatttttcatctttttaatttttttgttcttgttttgttttacttttcttctgctcaggacacttgcccaaattttccctgtgttactcttttgtt

SEQ ID NO: 27676 - DNA, 1065 bp, Homo sapiens
tctcgctcacctgacctccaaactgtctgtgtgtcaatatatttatttttctccatagatatgtaattcctcaaagagagaatggcattcaagtgatttggcgcataggaattaaaaagaaaaaagcaatgcacagaaattcattgaaaggacagaaattctttattaaatgtaatgggaaggtggaacactagcagctaccttctagctacagaatgcctctcttgataaattcccacatgttgaagaggaagctgtgtgtccggttttgcaaaaggaactctgatgttttggcttgtctagtgtcaggtaatgctggttgtgcttgtgggtagagatgaatctctaatactgaaaatactcctaacactatacatgcacatcagagactactagtccagtgtctaatttttcagatgaaggaaaaaaagcacggttcagagagatagagtgtcttgttcaagaatacagcaccaaatctggaactctgatttcctggttccttggctctttgttctgtccatttgtgtgttgtggacatctgtggatttgtttgtctaatcctaactctactccactggccttgtggttccagttgatcataccagggttaacccctttggtttttttcctcttagattttatgagctggcaaattcccctttctgctttagatttttctaattaggaatctgttactagcaaccaaaataatatgcattcaaattcttgttaactgctctgttttaatattcattgtggttctcctctcaaatttcttcagtgttttcgtccttaaagattatagcacaaatacaataagtgggtctgtaatttgtgtatagtctggatttacaacctaagtgaatgtccagattacatacatttaatcacagtgagtgtgtctcaccatctgtaattacagtttcattccatagcagttacagacttaggtatttaagggatctagttgagattattatagtgaataaagtttgatcttctttcttacttctttactaatccacttgttttttgcagctgcttgcacatatgttaatggaa

SEQ ID NO: 27677 - DNA, 1099 bp, Homo sapiens
cttgtagtttgtgtgtgtgcatgtgtgtatgtgtatttagttctatgcagttttatcatgtgtgagttcatgtattcaccacaagtcatgatacagaaccccttaatcatcacaagaatccctcacgttccccctttataaccacatcacctgactatcactcacccacccacccaccctgactttaatccctggcaaccaatagtctcctgtctctataattttgtcatttcaaaaatgttatatagatggaatcattcagtatgtgaccttttaggattgtctctttatactcagcaaaattccgtggagattcatccatgttttggtgtgtatcagtagttcatttctttttattactgagtggtattccctggtgtggacacaccataatttgttgaaccttttactcactgaagtacatctgggttgtttctatttttttagtattataaataaatttattttcagtattataaataaattaattactgtgagtgctagtgtacagatttttgtgttcgcatgagttttcatttcttgacaataaatgcccaaaagtatgtttgctgggtctttgggtgtttaaggaaccacagagttgttttccggagtcatattcccagtagcaaggtacgagtgattcagtttctccacatctttgctaggtttgtcactatttcttatttaactattctgatagatctgtaatgatactgtttttgttcctagtcatctgctttttaaaaaaattgtggtaaaatacacatggcatgaaatttaccattttaacctttttttttcctttcctttttttttttttttttttttgggagagagaaagggggtcttgctctgtcacctaggctggaatgcagtggcaccatcatggctcactacagctttgacctcctgggcttaagcgatcctcccaccccagcctcccaagtaacttggactacaggcatgagcagccatgcctggctacttttttatttattatttattttttagagatggaatctctctatattgccccggctggtcttgaattcctggcctcaagcaatcttcctgtctcggctttcccaagtgttgg

SEQ ID NO: 27678 - DNA, 1061 bp, Homo sapiens
ccagggcattgtgtttttataagactttgcttcatatttgataagcatatttctctttttcaaacactaaaatcttttttctttgtagccatctggagcttgagggattcctaagaaaatgtattcttttttgtctattagaaaaatcaaagatgtttctccttcactgttataaatgctgtgatatttagctggttatactcacatgtccaaactgcaaaataaggaaaatataaattaagcgtatctctttgggcaatatttgccactaattcttgggctctaggctttatattttcagaattttatttatctttttatttaacaattattcattgacagctatgcatatacaagatactttgctggttactatgagagattcacagataaataaaacagccttgctatcaaaaaaacttgcattccagcggaaaagaaaaaaacaaatgcacagtaaataaaatataaggtgaataagcactgtactaaagttcaggaaatataggaacttgcattctgggcaattttgtgaaatggagatcctggaatcttctgactacaaataatctaaaaatgctagacaaaatatttaaaaaggcaaaaatcacactttcaaatgaatggatgaaaatttttgtgtaaggtagtcctagatgtatgaaactcccaggagtttgggagaaataagtgaagatcctttctgaaggagtacactgtcagctcagatctcaaagaaatctcatatatgaatctaaaatagaaggataaaataaagtaaaacacgtaaaagagagttaccatgagagagagcatgtaggtcaacagaaactttaaccagactaccaaagactttatttatttgtttgtttgtttatttatttatttgagatggagtttcactcctgttgcccaggctggagtacagtggcgtgatctcggcacactgcagtctccgcctcctggattcaagtgattctcctccctcagcctcccaagtagctgggattacaagtgtctgccaccttgcccagctaattttttgtatttttagtagagac

SEQ ID NO: 27679 - DNA, 1580 bp, Homo sapiens
tctcatttctcctgccagaaagaaccactgctaacagattggtatgtatatttatggctttccctcactcctttcctgccatcctcccttttctttctttcttccatcattttaaaaattatatagaagagatttttaatgtattgttttgcaatatgctttccacttaacatagcttaatgctcttaatatatcagtatatatagttttatagccaaatatttcatggttccataatttattcattcctctactgaaagagatttgtctgtaatttttgtctgtatcattttactgcatataagtgcttacttctctatattcttttaactaaacattttatatgatttcatttcctctcttttttagcatgtaagttattttttttagtggttgctctagagtttggaacatacatttacaattaacctaagttcacttttttttggtaaaaatttaaggggttcaagtgcagttttgctacatggatgtattgtgtagtggtgaagtctgggctttcagtgtaaccatcacctgaataatgtacattgtacccattacgtaatttctcatccctcattccctgactctcccacccttttgagtctccactgtctactattgtagactctatgtccatgtgtacacattatttagctcccatctataagtgagaacatttggtatttgacttcctgtttgtgagttatttcagttaagataatggcctccagctccatccatgttgcttcagaagacatgatttcattcttttttgtggctgaatagtattcgtgtgtgtgtgtgtgtgtgtgtgtgtgtatcatattttctttagtcatctgttgatggacacttcagttgattccatgtctttgctattgtgaatagtgctgtggtacacatacgagtgcagttttttgtgtaatgattttccttgagtggacacctattaggttggtgcaaaaataattgcggttccagactgtgaattttaaatcattataactaggctcaaccattattgcttatgggtctaataatttgtttttatgtatttttcctaaagtagctagtaacttactaaaataaagatttttttctcttactgcaatttgaaaaaactccgccaccatcttaagtgtagggtttgtttaaatctatttttgataaacaagactttaatgtgatagaccaaatggaggaaaattgaaaggcatttcagagattgaaatgtttttgtttccacttgcattaccttatgccaagatcagggctttggtttgacttaatattggaagcataaaagagaataaccagtctgcacatttctttgaaaaccactcttcatgtaacatacaaaactcataaaaatgggtactgtaaaaatagtgccttaataatacttcatgctaaccagctgattatagactgaatgcttagttaagtgggggaagaaataagtagtttcctttttagttgttctttttaaaagattacacacatatacacatataaaacctctttcagtgattcagatgtgacttttcctcttcatggttatttttaaaccaacttgg

SEQ ID NO: 27680 - DNA, 1029 bp, Homo sapiens
cttgtccatattctcagatttttggggctttggattttctttgtttatatctcctttattcatgtgatgatattagcctggtttctgcagtgactgttatggaatgagcatgttactaggagtcacaatacttggatcttagaatcttagttcttccaaatcacttttcttgtttgtcagatgagatgatagtactttccttgcaagataattctaaagccccagatatacagtagttgattatttaatcagtgagtcagtgagtcagtgaccctttctccctaaaaaaattaagttttctataattgaatttaatctaagtatattttttcattaattaacagcttttaaaaagggttttctcaagtcatctgcctattgcaagcctcttaactatattttaaccagcaagttattaaagttctaaaactacattcagtggtaaatattttgtcttgtgaggaatataaaactattaaagctaagccatttagtttttcaaatgaggaagctgaagcatagatgtcataagtgactcatttcaggttctacagccagagctggttctcctcatatgtgatccttctctctgatggaacaggaatccagatagaagattgacaagagcatcaactgaacattacaaacagtgttgcttcttttatggctactttcctaatgaagttctcaggtgtggataaatctaatgcttatacatatactctgtttcccagataaatacaatatagtgatacaatcttagcagcaccaccatagataagaataccacttttactggtgatggttgcctctgattttttttcctccttccctgggttcatttgtccctgatgctctaattagagtgttataatttaggtaactaaatttaaataatttagaacagaaagcaaggttctgctttatctcctgtattaacactcaaaatgaatattgggtaaatttctacattgagatgtgtattagggttctccagagggacagaacttataggatatttatgtatat

SEQ ID NO: 27681 - DNA, 1040 bp, Homo sapiens
aatgattctctttttcaagtaaagctgtagttcagagaggtcaaacagggcctgaatgcccgaggaatatagtgtgtcttccctcaatgaaggtagaataatgtgagaaggaagaagaaaggctaaatttaaatttaattagctatttttatttttactagaaaagttatagattaggtatttagagagttaaaaaaatcatgtaattttcatttaaatctgttcttaccaaaaccatgcatcttttatttttggctaacagagagctggccatagaaaatggatgtttttgttttgaaaaatcaaatatagtagataaaaaaatgccaccacaaagtttgtttatatcttcatttcacttaaattgagtagaagaagtggaatctggcctttttcatattgtttatgttctgctttgcttcttggttctggggcaagattcctagttgtgtttgaatttgttttcctctcaagtatcatttgcaaaattagtgtggaaattaataaactctttctgttcaataagtgttgtaactgtcctaatatgacatagtataatgctgtttcattagcatagtaaaattcaaatatgtgctcatttagcctcattctactgttttttttttaagtctagaaaagaaggaaggtgctttgcataagtaaccaatataatctttatttattaactttcattttaggttcaggggtacacgtaaaggtttgttatataggtaaattgcaggggtttggtgtacagattatttcatcacccaggtaataagcatagtacccagtaggtagttttttgaccaggaaggtgaaagatctctacaacaagaattacaaggccagacgtggtggctcacgcctgtaatcccagcactttgggaggccaaggtgggtggatcacaaggtcaggagtttgagaccagcctgtccaatatggtgaaaccctgtctctactaaaaaatacaaaaattagccgggcgtgatggtgcgcgcctgtagtctcagctagtcaggaggctgaggcaggagaa

SEQ ID NO: 27682 - DNA, 1051 bp, Homo sapiens
aacagaggtagaaaactggccctgacattgggatggcattgcatgttactcactattgggcatgttttgtaccaccagggatacagacatcctgcatcctaattaaaaaataaatatgtcctgagtgtctgttgcattcagtgtgatgtggagtggatcaaacctttccttagggagttcaggccaggaagtattcttgaagggcacatgccttgagcagaactatgtcattctgagatatgaccatgtggatccattggctagactttccctagctgtggttaaaagagggattaggaatatagcattcatttcagccagttcagcatttcctatcaaactaagtactgtcatagtgtatcagtatatttaagggaagttagaatttagagcaagaaatataaattctagatgtaagtaccttttcctaacagacttgatgtaaaattttgttgtggcacactctacttctgagttttccagtttgctttagggaaacatctcttgtttgaattctgcttccactatttagaaactcttcaatgttgctaaacttctgagatgggcccgggagctcattgacttttctggtgatggctttagtgtgtcattttgcttcttagggatctctcagtaccaaccaagtcctgctcagtaatgtgagcaataaatcacacaggatgaggagctgttcatgttgaacccggcgttgggcctggctcttacatgcatactggtggtgggggtaagggtggggtctagggttgtagggcaaggtttgaaaaccaatgccctagcataagaacaccaccatgactactattaacctaaaaacctaccgtaacccccctttttaatatatgagacttctttttccatgaatttttttcttgcctcccttaatcattgtttctatccagtagtgtagtgtttgtctctcttgcacaggtgacccataaactttggaggtaggagacagcggctcatagtcagtaaatatcactatgtgccttaaacatgtgggacctgggacaaaacattgaaacacaaa

SEQ ID NO: 27683 - DNA, 1050 bp, Homo sapiens
cacttataagtgagagcatgcggtattttttgttcctgtgttagtttgctaaggataatggccatctccatccatgctcgtgctaaagacatgatcttactcttttttatggctgcatagtattccatggtgtatatgtaccatattttctttatccagtctaccattgatgggcatttaggttgattccatgtatttgctgttgtgaatagtgctgcagtgaacagatgcatgcatgtgtctttatgacagaacaacttgtattcctttgggtatatactcagtaacggggttgctaggtcaaatggtagttctgtttttagctctttgatgaattaccacactgctttccacaatggctgaactaatttacacttccaccagcagtgtgtaagcactttttctccgcaacctcaccagtgtcttatcttttgactttttaataatagccattctgactggtgtgagatagtatctcattgtggttttgatttgcagttctctaataatcagtgatgttatcttctttcccaccttaaccccgatagccactaatatattttacatttgtataattttgtcatttcaagaatgtaatataaatggtatcatacagactgtaaccttttggtatttgcttttttttttttccttcctcactataactctctggagataacatccaggttgtgtttatcaatagcttgtttttttttcattcctgagtattcatggtatggaggtactactactgtttagccatttacccatttatgtctgggttgtttccaatttttggctattatgaataaagcttctgtaaacattcttgtactttttttgtagttctttttaaaattatggtaaaatacacataacataaaatttaccatcttaaatatttttaatggtatagttcagtagctttaaatattttcttattgttatggaactaacagtaccatcaactatagaaccctcttcatctcgtaacaccaaagctgtacccattaagcagtaactccccatgtgccttccatttagtccctg

SEQ ID NO: 27684 - DNA, 1048 bp, Homo sapiens
tacaatttggcatgtttttgcagtgcctggtactggttgttcctttccatgtttagtgcttccttcaggagttcttgtaaggcaggcctggtggtgacaaaatctctcagcatttgcttgtctgtaaaggattttatttctccttcacttaggaagcttagtttggctggatatgaaattctgagttgaaaattcttttctttaagaatgttgaatattggcccccactctcttctggcttgtagggtttccaccaagaaatcagctgttagtctgatgggcttccctttgtgggtaacctgacatttctttctggctgcccttaacattttttccttcatttcaaccttggtgaatctgacaattatgtgtcttggagttgctcttctcgaggagtatctttgtggtgttctctgtatttcctggatttgaatgttggcctgccttgctaggttggggaagttctcctggatgatatcctgaagagtgttttccaagttggttccattctgcctgtcactttgaggtataccaatcagacgtagatttggtcttttcacatagtcccatatttcttgaaggctttgtttgtttctttttactcttttttctctattcttgtcttctcactttatttcattaatttaatcttcaatcactgatatccttttttccacttgattgaatcagctattgaagattgtgcgtgtgtcacaaagttctcatgccatggttttcagctccatcaggtcatttaaggtcttttctacactgtttattctagttagccatttgtctaaccttttttcaaggtttttagctttttgcgatgtgttagaacatgctcctttagctcggagaagtttgttattaccgaccttctgaagcctacttctgtcatctcctcaaagtcattctccatccagctttgttccattgctggcgaagagctgtgatcctttggagaagaggcgctctggtttttagaatattcagtttttctgctctggtttctcctcatctttgtggttttatctaccttttgtct

SEQ ID NO: 27685 - DNA, 1074 bp, Homo sapiens
ggtttaaaaaagtctaatgagtaataataggtgaaatatgaacgacagacttttggaaggtaatttataatcttttgtgagaaaactgatgaatttggcagaggttttgaagatcttgttgtaacctttgagaaagtttggttaattcattctgaaaactgattattttggtaggtagaatactgtgtattaagaatagtgataggggccgggcacggtggctcatgcctgtaatcccagcactttgggaggccgaagtggacggatctttgggaggccgaagcggatggatcatgaggtcaggagttcaagaccagcctggccaatatggtgaaaccccgtctctaataaaaatacaaaatttagctgggcattgtggcgcgttcctgtaatcccagctagttgggaggctgaggcaggagaattacttgaaccaggacccaggaggcagaggttggcagtgagccgagactgtgccactgcactccagcctgggctacggagtgagactctgtctaaaaaaaaaaaaagaatagtgataggaatagcttttacattttatatagtaaaaggcaaattatacaggttcctttgttaaaaatcttttgttgaacttctgttattaaaaatggactgtgaagttttttattcacttgattcatgctttaaagctccctatggtcaggggagatgctaattcatggttaaaactcgtttcttgtccaaatgctttagtgtttataggggagattatattgggccaagtttttagtcattctgttaaaaacagttcattgtcttggatctctgtgtaatacaaatattgcttgcttgtaaactctagggaagtcctttaagaataacttattcaggtgactgatattttggtatgtaagagaaagaaagtaggtattttcattatatatttatattattatgtataatactgttatacatttgtctgtatctctacattttttttgctgttgttcagacagattcttgctctgtcgcctaggctggagtgcagtggtatgatcttggctcactgcaatctccacctcccgggttcaa

SEQ ID NO: 27686 - DNA, 1046 bp, Homo sapiens
ggttacatagcataccagtggccaagctgagaccagaatccacagttactcagaccagtgttctttcttctgttccccactatactgtttctatactgtgtgttcttataatgcttttggtatagctttgacttttagtgctgtgacgggtagagagatgcaaagctgaatgatgcagtggagtaatttttatacttctattgtagtcagtgtttgtggaaatggatagtaaaatggagaaattgggtgttttgggaaaaactctttctgactttgtttttcctctgctgtcacactacaactatcaacacagaagaagacttctgtgaccaaatgggtagggagttttctccacacactaaccagtggacaccggctgggtgacctccaattccaacactacctggagatagtgtcagatcccatagattgggggctcggtccccaagactgcctccaccctttcagacaccagtctgaagtctggacatccagaacttctgattgactggcttcaagttggggttcccacgaccccctctttaggttcaattaatttgctggagtggccacagaccttagggaaacatttacacacatttgctggtttatcataaaggatattacaaaggatacagaggaaatagggtaaggtatgggggaagggctgtggagcttccatgcctccctgggcgctccaccctccaggaacctccatgtgtccagctatccagaagctctgtgaactcgtttctcgggtttttatggaagcttcatgatgccagcattccttccccacaactacagggcaggaccctctctggggaaggtcttaagatgcacaattagaaaggtgagggaagagtacagtcctgcccttaagaccgaacacaaaagactatagcaagggctaaggaacttatgagccagaaaccatgtatgaaaataatatatatgtaacaccacgtggggtaagagccctgctcccattgatgtgctaactaactctcttcttccctagaactccttttcaaactcagtaggca

SEQ ID NO: 27687 - DNA, 1034 bp, Homo sapiens
tgtaaggtttgggacatttaagtccttgagttgttttttttaatatgaggtagggacctgattttatcttgtgccatatagaaaatcttttttatcttgttccatttgttgaataatctctcctttcctctagtaatgtgacatgtcacctctcatgtaccagagtttcagaactgtgggtttgttgcttggctctgtgttttactggtcagttcgtctgcctatccctagaccagtaccacacttcagaaaactggatgaagaacattaacgaccaccacatctagcccacctgtaggccagcttgtatgggggttctgtgaagaaaatgaactaaaatgcaaaccaaaagcaacaattgaaaggactgtagtatgtggtatccttggtggagagccaggtttcagttagaacaagataaagaaaatgctcagagatataatgagattctgctgatgatgtactgtgagttccacagaatttagtgatagagagttggcagggaatggggcagaagaattgatgtattgttaccttctggggatgagaacatgggatattagggggacaagatgattaggggctttttgcagtgaccaaaatgaatagggagaaaaggcataaatagattattcctggtgggatgattcctgggggcagattgtgatagtgaggctgtgaatattgaggattagggagggaagggtattggctattatcttggatgcaccaagccagtccccgtcttagcctctttctgggaaggggcaattttactgtgagctcacaagacttcctcttgactcctgtgcaagtcaggaagccagtgtgactaaagaacaagtattttaatacctcagggcccacttttgaatcctgtcaggagagatgtggtcttgctctacagtgttgtcttgggtacctggcttttaacatattttaggtgttctagagttgcactctgatgtaggtcattttttgcttgttagctttaatcttgcttggaattaaatacccaaaatactgaagattat

SEQ ID NO: 27688 - DNA, 1022 bp, Homo sapiens
cagtgctttgtgtggaaccttaaaaaaaaaaaaaaaaaaaagaatgtgttgtagttaagcaaaatcaaacttatagactcttaagcaaacattttgcaagatcaggaatgtcttttagctaatggttttctagcatattttataatagaattatctttattggttttacttgagaaggcagtgtgtaatagcaaagtaactattctgtgagttaaattatagataaacacacgaattcccacacactcctttcctagataccaaattccaatccaaatatctgtaccttgtgagaataataagttgagcttaagtatttaatgtttataaaggcaaagtcatgaaggaaagatggtttggtatgaaggccagcttgtaatatgtttttcttgaaagaattacatttattttttaaagggaaatttttgtgtttctgtataagtatgcttaataagtttttcccactttaggacgtctagagaaaaattgagagattatcaattcaaacgactgaagtactattatgcagtagtagactgtgattctccggaaacagctagtaaaatttatgaggattgtgatggcctggaatttgaaagtagttgttctttcatagatctaaggtaatccagtgtatgtattaccaatttaatcttttagtacaacatgattataagaagtaaaatatttgaactggtagtgatctctgttttatattctaaaatgatttttttgcttttcggttaactctatcccatggaacatcactcctaagaaagaaaacaaacaagacagtgctaaagtattatgtatgaatcatccccacatctttgtcctttcagacatattggctctgtttttaagatggtgtaccttacacaataatatttccttgcaactgcttttagagctaggaaccagatgaagttaacttttaaaaatgcatggaggaaggggcagaggaatttgaaaacagattgttatctctagatccatgctatccagtatagtagccactagtc

SEQ ID NO: 27689 - DNA, 1024 bp, Homo sapiens
gtgagcagcaaggtgaggaagagttggatgctaaaaaaatgagctcatcggagtcactggtaaatatcagaacagaaggaaacaatggactgggatatttttaccacaagttctcagacctttataaagataccagcagtcacctgcttcaggctggcacaaaggtgatcagccaagccaggcttgtggggaatctgtgtgccccgagggggctcccctcccaggtaacaacattcgtcagaagcctgccatttctgaagcacttagccccacacatgcccttgaagactgacatgcagtcaacagaatctcattctccggaagctcgggttggcagcagcgagagcgaagctgcagggagcctgaggccagcagagggtgcggcgccttaccgggcctctgtctttgcagctacaggtttaccaggttcctcgccaagctcagtttttcgccttgaatatgaagatgctagaaagagctctgcatttaagcagagccttgtgcaattcccggaccaaatgctgaaactgcaagagtgccctttaaaagaccttcttaggcatgtgacttgttctctaccagaacctttgggcaacatgaaggaagtcaaaggcatttactggcttgctgttgctgcctgcacagcacctgaccctcaaccagcgtgtttgctcctgcttcagtcaactttatatgctttggtcctgtcagataatctcggctcaatgagcatttttcatgctctacctctctctggtctacaggagattcagattggctttggtggacagagtgttcgattcctgagctctgcagagggtcttctgctcactgtattcagttacaacaaatacctctctcaacagctgtgtcgtgacctcctgtgtgtcctgatgccagagcctgatgccgctgcctgcgctaatcatcccttgctccagcaagatctggttcagctttctcttgattggaaaacagaaatccctgatttagttttgccaaatggagttcaggtgtcatccaa

SEQ ID NO: 27690 - DNA, 1116 bp, Homo sapiens
cttcttcctgtcccaatgaaaaaactccccttttgcctttctcagactaactgcccctacctgtactatggatgctataggattaatagctagtatttattaactaagttaacagtggttgtgagtaccctcattggatcctctcacccactgaggactaggattatttttgagcctgtgttcagatgaggtaattgaggtgtaggaaggttgagagattgtcccttggtcatataggagccagaatttggtctgggctgcacccatgcctgaacccttgctctcagctatggcgctaccctttcctttcctgcccgctcagagacctctctgtctatcagatattcccagcctcttcccattttttcactcaatctctctgtctcctgcttgttgatacaaggatttaaataggcacaagtctatttcatctgttaaaatgagcacccattctcccaaaaccaccacctcccctttacaactaaacctaccaagaaagcgctctactgtatttacattcaccatctccaggttcctctcactcactcatcagacctctgcagtccagccccagccccagcccagcaaaggtctctccaagatgaacctccacgtcatgaaggtcattgggtgctccttgggctctgcattttacttggcattcctgggttattccatgctactgatctctttctctttctttagataccctcttccctctgccctttccagatttttctctgagtctctaactgctcactcccagcctcattagagggccatttatctctgcccgtcactgtgaagtctgtaatctttctgactttgcagcaagctcctttattctccttctacacgtgtgtcctgggtaacctcacccactcttggggcttcagttcttgtcaacatgccagtgaaggccaagtccataccttcagccttgataagggcctgcataccagctcgttgaatgtttcgtgctgcctgctggacgtctcagttggatgaccctttgtaaacattggattctataagtgtaaaactgagcttagcttgaaagcaggacagagaagagattaaaattgtgggctctagaatcaaacctgattctgccag

SEQ ID NO: 27691 - DNA, 1009 bp, Homo sapiens
ccccactgtaccttcaaattggaggaacagaattgattttcctattgttactgaagagtagtagtgatggccagtggtggtaactggaatgaagtgagagctgagctgactctctcttgtaagtgaaggcctggggaaacattaagaagctcgagggcatcctgccccttccctccccctgggaagaggaccccttcccaatcattagggagcccaggaagagagggctgggcctcaaacaaagcctgtggtgcctcaggtgagacctcctagccctctgtcattccatctggctagagaaaagtgggtggactgcagactactcagtcaactagaaacgtcacagatatggccaggcaagcatcaaggagtttcccatcctatgttagggcacatggaatatttgcacagatacgcctaagcatatacgagatgaaaaaaatgtagaacaattatataaacataactatagctatgggtggctgcatagatgggcagatgggctggtagagaacaagaaagaagaggaatatagcacgcaaaagataaaagatcccaatatagatgaaatcacacttcatgggagagaagggaattccttacaattgtttcattcggtagaacaaatgaatgagaaacatgaattcaataaacaaagcaagatggtaataaaaagcaaagtgagatgaaaaaagaaagattgtagaataaagaaagcctttgaggcccaaaacaacatcattgcaggactaatacataattttagaaaatatcaaggaaaagaatagaccccactgaaaatcaaattactaagagaataaaggcttgttaggcccattgaacacaaatggaatgatcaagatagtaaagcaatcagaaactgaaagaaatagaagacaaagaccagtgtaatataaggacaattggtgttcttgaagtagacggtcaacaaatgaaatagaaaatggaaaataaaacaagacaagctttgtgaaatgaaaaataagta

SEQ ID NO: 27692 - DNA, 1074 bp, Homo sapiens
tgatccacatgttatgtagaagtgtgttgtttaatctacaaacattttaggattttccatttatctttctgttgttgatttctagtttaattctatcgtggtctgaaaggagaccattttttttttttttttttttttttttaagacacagggtcctgctctgtcacccaggctggagtgcagtggcaccatcataagctcacggcagcctccaactcctgggctcaagcagtcctcctgcctcagcttcccaagtagctggtactacatacatgcaccaccacacccagttaattttttattttttgtggagatagggtcacactatgttgcccaggctgctctcaagtttctagcctcaggcgattctcacacctcagcctcccagagtgctgggattataggtatgaaccactgtgcccatgttcctttacatttgttaagatgttttatggcccagaatatggtctgtcttggtgaatgttccatgtgacagtgaaaagaatgtgtaatttgctgttgttggatgaagtagtctataggtgttaatcagattcccttaattgacagtactgttgaatttaagtatgtctttactggttttctgcctactggatgtgtgcatttctcatagaggagtgttggaaatcttcaactctctaatagtagatttgtttatttgttctttcagctctgtcagtttttacctcacgtatatttactctctattgttatgccatacacattaatgtttgtagttttggagtattgatccctttattgttatataattttccttttttttttttttttttttttttgagacggagtcttgctctgtcacccaagctggagtgcagtggcttgatctcagctcactgcaatctcctcccccagggttccagcaattctcctacctcagcctcccaagtagctgggattacaggcacccaccaccatgcccggctaatttttttgtgtatttgtgatagagacggagtttcgccatgttggccaggctggtctcgaactcttgacctcaggtgatccatctgcatcagcctcccaaagtgc

SEQ ID NO: 27693 - DNA, 1027 bp, Homo sapiens
cctgccttcgttcacaggaggacggcagcagctcaaaggagggcacctctgtctgagtttcctctttggaaaaagaagttactgttcaacttaccaaaatgccttacacattccttacaaataaaccaaccaacctacacagcgttatccaggcccaacttccggtagctccgagagaagccatgagagacaagtctcttagagccacagaagtagaccttccagagccccagtttgtaaatgaacctgtgtcacatttgataaacactatcctgggcgcagccccgggccaccgccgagtgacgccaaagccctggttgactctgacagccccgtgggtgtgtgggaggccgggcgctctggggtctgtctgtcagtgcaatcgtttagtgttttttcagtggggcggggcgggaagcgggtgggaccgggcagccagttctcaaaggctgtggggccgactggaggccacagcccctcacccctagacgttgccaaccagaactgacgtgtgacctcctgggtgttgatgccattaaaaccaacgttggtgcccggtgctgcggtctcgtctggtcttctgctggggctcccccacccgctgttgggcccaagatgaagaaccaaggggtgggggcgcactcgggaagagagtaagcgtgggcctcagctgctttgaaggcagaggctctgcagctccgcgtagcgtggggtggggctgagactcgctgcttccggggcccccagcagttttccttgtcacctcccagacctcagtgccctccgggcaggataagggagcagggcctgcgacacctgagagccagatacatttactgctgccccgcatcccggaggggctgaggtttgtgagcgcggctggtggcccgggctgttgcgtgatggaggtccgggaatgaacaaggggtctctgtcctggctggggcttagacacccacaccccaggagggtgggccagggctggagcagcccactgcctgccctcgggaggtggagtttcacctgc

SEQ ID NO: 27694 - DNA, 1034 bp, Homo sapiens
gccggccaacacctgggtggggtggctcgagtcaggggccggagtccttgtgaccatcacttctggggctcgcctcctgtagcacatgcccacagtctggggaggcaggtcctggccgccgtggctaggggtccatgcagcagtaggtgggggaggcatggagggtgtcctgcattccctcgcacacggtcagatgtgtcctaggccatcagttcacaaagttcccttgtcctgaccctcgtcaccaaagaagcacctccctgtgtgcctctcagcagaggcagctccccaggccacagcccatgttccctggcatttgggctctgcggcttggggactgggaaaggaagccagctgccctgagggcccagaatgacccacaaccaaaccttgtccaccttcctttcccaaaaagcatgggcaaactttgtttctcctggtggtgtttgttggggtagagaggttgttgttttgctcttgtgttttaagatcagattcttgggccacacagcatattactaggataatgaactcatgttgtagttaggattaatctgaattttcttgcatcatgtagatgtgtctggcagaaattggtgcttttatttccttctcaaacagttgatctgaaagttatgtgtaggctgggccatcctgctctggagtagagaggagcgattcagccccagatattctagaattcgggcagtggctgccaagggtgtgattgtcagtgtgtccttgccactggcctgctgacacctcttcctcggagtctcattcttttggggacgctcttggggtgatttgccggcggaggctgtcacatgatgcagggaaaagctgtgagggccccaggagagctctgagggcagggtcacgattccacctctcctggaaacccagctctccggtgtcaccaactgggactctggtgacagctctggggtcagtgctctggatggcggggggaggggagggtgttgggggctgctcaggcttccctgggagctcacgctgggtgaggtgggggc

SEQ ID NO: 27695 - DNA, 1031 bp, Homo sapiens
ggggtgtgcctgcccatgattgtgttttaaaggctcctggacggttgtggtccatctgggcctggaactgggcttggtctgtcaccatcacgtgtcattcctacgaaggatctagccagggcccccaggctcccagtatctcctgtcctctccagactcagggtccttgtccacagcctggggctgggcagaggattccctgctctccagtctgacaccaaagattctgtgcctgtcaagtctgtgattgacagtgaggcctttggcgccagctgtcgggttcaggtcctggctctgccacttcctagcaagttatttcagagcctcagttttcccatctgtactatggacaggatagtaggagctgtcctgcagggtgactgtgggagttaaccatgctattacacccagagtgcctaggactagatcagtgcttttcagaaaaagagctcaatgtgaactctacaaaattttattcaagatatctccaagtcagactggcggttgaggttgtagaaaatgtctcttttttgctgaggtgaaaatggggctctttccatattgtgactgtcctgccttcacctgaggccccttcactgccagccagctctgcaggaatgagggcgggggtggcctgtgctgaccttcggtcctggagcactggcatcagggaggtgccctgcccctcattgcctgtctctccccggacggcctcttggggcctgcttggaagaaagtacccattgaaggtgctgatgacatccttctagaagaactgaatcttagaaatccaggagggccttatgaaagtccccagctgggcccacccagccacgggacccgcttctgaaattgttcagtgtgattggctgtgctaacaacattctcttcaaggcaaagacagttgtcacctgaggtcttaagatggaggcccgtggtttccatcaaagattttaagtttggggttcctgaaggtgggtgggtttttgtttgcttgttgctggaatcagagttctaatcaatgttagtaa

SEQ ID NO: 27696 - DNA, 1035 bp, Homo sapiens
aagacattctcttgtatggttacagtatggttgtttgctgtgataaacttaactttgggtctacaatctgctctctgtattttcatgtttgtcttgatgtcctctacaagatccagtctaggattgcatctggttgtcttagctattagtctcctttactctggaatagttcttagtttttaacagtatcagtctttttagagaatctctttacaaatcctgtatttctgacttttggtaggtttcctcatgtttagatctggttatgggctcctggcagaatagaagtaatatgcccttattggggtgtcacttctgattggacagtgtgtctctccttcattcgtggtggtaattttgattactcaattagatagtatccaaatccagtttctccactgtgtagttactattttaacccccatcaatctgtggtgaggcaatttaagaccatgcaaataccttggtcttcatcaaacttcctccctaggtttagcatgtattaatgattcttgcctaaaccagctgttactctgacgattgcagaaagacgatttccctcatctctagctctagctttcctacccaagttggcacttgtcatcctactacaaaaaagccttcccttttctcagaaatttcctttatctttattagagtcatggactcccagtttttaaaatggtttagaattcattattgtattaccaagttatttttgatgcctgtccagactttgccaataggagcacctttaagctggcatgtggttgtaacagcctaacccgtcttttttagagtgataggccatgctaatcttactctctgctccagccttgaaactggccattttttcaaggagccagggttctttttctttgggaacagttaccagcatctgagtatgctcatcgtttcggggtatctctgcttctgtgcccttcagtggactgagctaggaaatgtatgtgtgtgtgcacacatatgccgttgcacacacatgcaggtttcagggatcacaagtccggtccatgt

SEQ ID NO: 27697 - DNA, 1050 bp, Homo sapiens
gccaccatgcccagctaatttttgtatttttggtagagacggggtttcaccgtgttggccaagatgttctcgatctcctgaccttgtgatctagctgcctccacctcccaaagtgctgggattacaggcgtgagccaccgtgcctggccactttttgtatttttagtagagacggggtttcaccatgttggtcaggctggtctcgatctcctgacctcaagtgatctgcctaccttggcatcccaaattgctgggattgcaggcgtgagccaccacacccagccagaagtcagttttaaaacttaaattatttgagagtaggtatattttcaatttgattcttacaagtgacctaagggatctggaaaagaggtaaaactttgcatggtaaaggtccggcatgcccaaggctggacttggttctaaagcctgctttgttaactgttgtaaacggccactgtaagcattgtaacatctgtggcctaagtcagagactcaagtgttggccagcagggctaaggagtactctgagcccttcaagcttaaggggggatggaggcagaggcaagtgagaggggaagagtggagcctggcaattatttagcaagttctgtagcactgtggagtgggtttgttgactaagcagaaggaatgctgaacttttggtcacacttgatgcttcccgagtgagagtacaaatgctgacttagaagctctagtcatttcacaagtttctacccatgtttgtctcatctggagggttatatgctataatatgagaaagttcatttaacttgcgcctgggggacattgagttaatgatggcctggatgctgaggggttttgccaatactctcttttagacagttctttaaggcccaaatacaacattgcattatttgcttatttggtggttaggactgtcatgtcaagtgattggagttttgcttgaatcccttcctagggcgaaatgtctgggcaaaatggctgctagtgaacctcggatgtttgatatgctgtggttgcagtcactcataacctagtggtttt

SEQ ID NO: 27698 - DNA, 1201 bp, Homo sapiens
tcactgcagactcaaaatcctgagctcaagtgatcttcccacctcagcctcccagagtgttaggagtaaaggcataggccaccgagcctaggtgattttttttaaggctttgctgtgttgcccaggcttgtctcaaactcctggccgcgggcgatcctcctgcctcagcctcccaaagtgctgggattacagacaagaacctctctgcctggctgggtttcttttattcatttgttggacctgctttcttggtagcagtggtgtattgattcccagtaggatttatctgccaggagatccttacagatcattagttcagctgttttgctttgtgaattcatttgaaagtattataatttcggtacttagtaattagatggatttcttgacatgcattagatatttaaggcagtaatttaactctggttccatgttgattccattagtacatgggcttgcagccttgtgaaatgatgattcagtttatccattcgctgagtgcgctgcactgaccttcttccaagcctcagttcctgttctaggaacttgaggctatgtagcctgaaaatgccctgcagtctgcagtgttctactgtgaactgcttgtgtgttggcaggctaccggtaagaatggttggtgtcagcagggacggggccctctgagacccatctcacaaagatgagtggtgaaaatctgatcacttgctgcagccctttagttttttattaagccgatgcctgagtagctttaatagctattagctatgttagtagactgagatcttctgttagaagtctttagttctgttttccttgggggactaagaaattatattgcaggcctgaattacaggaaggggagaaccaatggctagggaatgagagccaatacctgtaaaagcagagttgggctgggcgcggtggctcacgcctataatcccaggactttgggaggctgaggcgggcagatcacgaggtcaggagttagagaccagcctgaccaacatggtgaaaccctgtctctactaaaaatacaaaaattagctgggtggggtggtgggcgcctgtaatcccagctactcaggaggctgaggcaggagtatctgggagaattgaaccccgggggtggaggtcgcggtgagctgagactgtgccactgcactccagcctgggcaacagagtgagactccgtctcaaaaaa

SEQ ID NO: 27699 - DNA, 2106 bp, Homo sapiens
cctaatttttgtattttttggtagagatggggtttcaccatccagttcaacatgccgggattacaggcatgagccattgtgcttggccaaggctgttaagttttctagatttgtttctgagctgtaaactcctcattcggtgagacctagtggtcatctaaactagaggttgagtttaaaattcagtttctcaacctggggagcactgttgacattttagcctgatcacttttgttgaggagtgccctctgggttgtaggatgtgaagcaactgtttttggcctctgctaggacgcggcctcctcccctcccatggtgataagaagtcaaaattgcctgtttgagaatcactggtttaaacggacttccttctaaaatggtgtgatatgggtggggtcaggttgtgttacagaagctagtctttgtgtgcttgttgcgaatttttcaggttttctattaatcttgcctaaggaaataacatgccatgtaaaaattagcattgttggatatctttgtgagaataaagcttttccactaatactgaggaaccttaacaaaaggtggtgaaagatggttttcttcagcaggttctgggtacttgagggttgcaaagggagggcttcgtgtttgtgtttgtgagtgtaggctttggacactggaaacttacctgagtttcttgtgctgcagaggggaacttggtttaaaattctgctgtttcagcatttttctgtctttattatcagggtcttgatgctcgagcaaattaggtgagaacagatctataggttagtaccctgaatgtcttaaatagcccgtggtcacaacagtgtgtagtgaagttaaatagtatttaaggaaacagtctaacttttaatgatcccaatagtgagaaacggctattaaagtgtaaattaagtttctctgcatgatctaactttccaaaaagtggcttcttcacccttaatacctgttttctgattggccattgaggtactctgacaagatctcctaaaagagatcttcacaccttcacatgctgcctaaaggcaaaccatagtaccccaggaggagtaagttgcagtttgaggggcagccaacacttaagtttaaaaatgggggtccttggcttgactcttctttttacattttggcataacttttttaggcattcctatatggtctggagagaaaactaattttctgcctgaaaagctcagtttctgaagggcacactcctaagcattctagtcatggtaaatggtgaggaatacaaatccagatggctcccttgtcagggttttcactttttctttcaagagcaccgcagagctaggacattgtgctgttagatacttggtagctggtgggtgataaaatgttggacttcttccctcacccttcctatatctttcatgaattttgttttgaattcttgtatttattttgtttagaattctttttctcaagacagtcttgctgtgttgcccaagctggtatcgaactcctgagctcaggccatcttcctgcactcagcctcctgaatgggcccctggtctgagtattggaatatttacatctgaatgatttgggaaatttgctgtacctcaaactcaagagtgaaagaaatgtccaaccaaaaagcgggcagcctgctctccatgctgccatttgtatttcaaactgagatgaccaaggttaagttcaaacaggcagctctaccactgttgctgaatcgtctttcttggtaaaggtaaattgtcaaacctatttcctgtgcatcttggtttgatcatgaagtgagaccatgaaggaaggcagtaaatgtccttcaacaccctcatccacatgagtaatatggaccatcttagctttgttgaagagggcttgttccagccttggcaacagagtgagaccctgctacaaaaaagggggcttgctgacttgatatggtatgccagtgaacttttgggagggagccatgatgggattgggtagtaggtgaaggcttttagctctgagtaaaggaaactggcatttctgttttttactttttgagacagggtctcagggtctcggcctgctcccaggctcgagttcagtggtctg

SEQ ID NO: 27700 - DNA, 2776 bp, Homo sapiens
ctcagactcctgggcgggcggccctgcgagctccggggtcgctgcattctttcccttgcgcgtccataggccgtggctgctcgccgccatccccagcgcgggaagcacccgtgagacccgggcggcccctctccctggtcttcactgaaggctgccccggggaatccctgtggatgtcccggattctattaggacagaaccagagacgcgggaccttagccccagctcaggcgccggtgccgagcggacttggagagatgatctctggagaccccggaatgttctttttaaaactttcctcggcttcgtggtgaccagtaggtgaacgtgaaattgacttaacatgcgacagaccagtttggtttgttgcccccaaaataccctccttccccccaccttttactgagaagacttttttggggggggggcccaaacaacttgggaaattgcatcaagcgtccgaacatgctgcttacaactttagaaacgcaaaatgcgttgttgtgggagttgtgtaatttttagtaggtgctcaaatacttgctgaacttggtgtctatttttaagtcttgcccattgatgtaaactgtccctaggtcacgtgtatcttgaggtctaaaagattatttatgcaataaattgaaattcccatagccaattaaagattcagacgagcctccactctttttcattggttctttaaatttgcctcggtagctttgcgatgcatggtttgcgagcaacctttcttgcagaatcgtcaacgtaagtttttctgaccgatgaaaaagaacctctaaaaatacaaggctctcttaaaatgtaatttggagccgtcttaacttacacatttcttgagaagttaaaggcacctccatagagaaacttgttcatctagtaagtaaataccagagtttcaaagcggctggattgttccaacaagggtatcattgcattaattattaaaatagagctttctatacaggagggtgttgtttagagtggttttttttttgaaagttctttattactaaaacaaagtggaaacttgagaccacgattctttgtaaaacattataaaggtacttttctccataaagggtagataatggattgggattttggtagcattttattttttctttctttctggtacattcttttagctgtcttgattcggagtcagctaggtaaaaggactcaattgcttcaccccactctctggtagtacagtatattgcagctggtttttaaaatgacttccaccaccctgatcctccagcaaaattggagaatggttatgaaggccatttcctgcctgttttagaggctacagaaactgtccgtatctgtagcgaagagagttacatgacattgttttcctttttacattacaggaataaagagacaataaaaataaataattaccctgacgcgtggctttatttttgttttctgatctctgctgatgctgataacctgctgtggtctggcctagatggtgttatggttaactgaaagggagtttggggcaagtatgaaataatgggaaactaagtcttgggcaactttttgccataatacaatttcggtagtcaactgaaatgttttgtgtgttacctgaaatgtgtgttacttaaattgtttaaatgccctcctgataatttactttggtttggaattctccctaaggatggagttaattaagactcactaaggtagggggacatacttgattcttcaggattttgaattctagcccaatactcattttggccaattcagcaaaactgaaagggaatactgtgtcagtcgtgtctggtagccagacactggcattttgttacattctttagccgagggtgttggggtttgccttcttcctcagaaaatagttcaggggaagagatgcatggttaatttggttcctaactggtcctctatttactggtttttgattttttttttttttttgagacggagtctcgctctgtcgtccaggctggagcgcaatggctcgatctcagctcactgcaacttccgctttctgggttcaagcgattctcctgcctcagcctctcaagtagctgggattacagtcgctcaccgccatgcccggctaatttttgtatttttgtggagaccgggtttcaccatgttggccaggctggtatttgaactcgaccttcgcagcctagtgctatttttaactagggggttctccttccttgacagtaacaacttggccttaacttactgcttggttacagggactttggtgaatgatatctgtcctcttacctactcaggagtgtttgtagactaagtactgctgctctggtttcgtgtttaactggtgtggaagctgcctctaggggtatttttgttctccattagctagaatggagtgcagttggttagtataggaacaatcctgaactttgaccaataccatagcaagtccaaacttacaaactttgtggactgaagctttatgctacccttgcaactattttctaagttgaggaagtatgacgtatcaagcttcccacgccttagttctagttcagtaacttgtactcggtgtcttaagatccccatttgtgaatactctaaaaggtcattatctgttcacattattttggccataggtagaaatggccaagaggcttttttttttttttttttgagacagggtctggctctgtcacccaggcgggagtgcagtgtcacgatcacaactcactgcagcctcgacctggggagctcaggtgat

SEQ ID NO: 27701 - DNA, 1050 bp, Homo sapiens
agttaattaagatacctccaagcaaaggactaagtctgttattaaatgtggtggtaggttagcaagatatgttaaagatgaattgctattaattggaaaggcaagtttaacaattgtgagcatgatacgattctgttgttacagacataatgatacatagtcacatatttaagcaaatgcattggcaagaataggcatctaattattgactgtcgtgagagtgatggctatagatgaaggagtccttgctgtgggacacctggccagtaatctatcctctgtattcctgtttcttttctatttatgcagtctcagggatggtgtttttaaaatgaaagaacatgtaacatttagaagaaaaggtgctaaaatatagaaagtcagcctgatgccttttttcagcttgcttaacctggcaagtgcagctcttggttttgttttttatttattaaactggttgtctttctaggcgaatccacacaattatgatgcatggtttgattacttgcgcttggtagaaagtgacgcagaagctgaagccgtgagagaagtctatgaaagggccattgccaatgtcccacccattcaggagaagaggcactggaagcgctacatttatctttggatcaactatgcactctatgaagaattggaggcaaaggtgaaaaaacagaattatgtgtcagctgataatggtttcctgtcttctgtattcacagctcacctattgtggatgtttgtaattcttgaaagaaggaaatttagttttaaatttttataggcttctgttcatccatacagttatatattcgctctgcaacattttaaaccctctgtgcttgttgtggccacacgtgaggggcttttttaactttggtttgatttttacttgaggcacaacaagatatcacttggagcttgaaagagaacagtgaaccagcccttaatttagtgaaatatagtttcctggatttgctcattaataggagtaattctggctagattatgcatttttgcttttagcaaaaatcaagtggcattttcagaaat

SEQ ID NO: 27702 - DNA, 1050 bp, Homo sapiens
gaaaaaagaggaattgaggatcacctgaaggttttggcttgagcaagtgactgtaggttaggccttgcctactaaaattgggaagatggggagagtcccagtttgagtggggaggaaacagaagctcagttttggacctgtttgagatgtgcagtagacatccagttggcagtgttaggtagacagtattaaatatggagctcaaagcagagtaccggtccatcctgacagagataaccttcaacaagagggagaaaagcatcttactctggatattatgaggcctcaaaatctaacttataagtaatattttgttatatttactctcctagttgtgactggcatgagaatattgtgttatagaaggtaatcatcctgtctgcatttagtttgaaagggtacgagtgatttacaagtatgccctggacagaatttcaaaacaagatgcccaagaactctttaaaaattataccatctttgagaagaagtttggtgataggcggggtattgaagatatcattgtgagcaaacggagattccagtacgaagaagaagtgaaggtgagcactggtgtggatggtcaactctgcagataacccaagatgtgctcatcaatactagcaacactaaaatgaataatagcaagtagcactactagtgattactctcgtgatgatgtgcccgtgatccaattggcagctatttcagacaagtaggaataaacaaggctgatagaaaaggcaagcaaacaacacttggatttgctctgccacttacatgttgtaagtcgttttgttgattgttgactgtatgtagaactggagcaaaagaaatgtggaatccattcgagctcattgttggaagaaggtggaagagtcagagattggtccaaaaacctgttttgcacatcacctttgagcttaactgcctgaacaaaagatgtatgctagacagggttccatcggcatctctttttctgtaatgtactattttgatttcaattcaaagagagtgtcattttccttcagtattctgttgtgtatttaaaaa

SEQ ID NO: 27703 - DNA, 1035 bp, Homo sapiens
tctccccgcatacctccttcccccactgtgcctgtgtatgtgccactccctgaatatatcatgtctccttatcgtgaggcttgactgttctccttgcctggaatgagcaccccctcctcaccaaacttagtttcctggtaaatcggaacgttcctcaagttctcatttctacaattacctactacttagccttttccaccaaacattttcatttcttcctctctgtttcccgtgcagatcttgactataacataaatcacattgcattataattgcatgcatgtctttttataagactttgtaaggtacttgagagcattatatcttttcatttttttatgcccagaacttggctcatggtagacacctaataaaacatcagtgcattccagatagtttgaaataactgctacatgtgttgaatgctctatttttgatgccctgcaaatcttgcttcttaagggctcgatccatatacgagcgtgctttagatgtagactaccgaaatattacactctggctgaaatacgcagaaatggaaatgaagaatcgccaagtcaaccatgctcgaaatatctgggaccgggccataacaacgctgcctcgagttaatcagttctggtaagtttctgatctaacaaaacagccttttatagactagcaaagttccacatcttctgtatttattttatttacatgatgatagtttaatttgatatcctactttttcttcagacataaatgctgttatgtcccatagtctattaagtcataatcgtaatgttctatagctatgtaatcaaaactaaaattttgattgcaatcttttattcataagcttcttgttgaactaggcaacttttaagaaaaaaaaatctttttttccaatggttcatcctttttcagatttacatacaaatgacaaaacatgtttgatttaacctttaagaaaggtaaaatcttcaatcttcttcccattcaacaatggaagaactaaaccacagcagatattttcgggtgattttgttacaggta

SEQ ID NO: 27704 - DNA, 1025 bp, Homo sapiens
tgatgggccctacactccctccccacttattgcacctgacatcaggcagctgtgggagtttactctggatgctgtgctaagatgacaactaaagaaacgagccagtggaattactttggagtagtttttcttatctctctgtcctctccccagctaatgactgatacttactgccttaaaatcgtgtcagttgggctttagtttttataatatttaactagaagtggaaatgtgggcagttacatattaattttgttcgctatgtttaagaaaatgaaacatttctaattaagctaaggatgggggcattgctggagcaaattttccctttgggggtctttttgagaagtaaatgcagttagaatcaatatcaaagcagttcttatttgggagcccttggctgagttaacagttggaactctgcagcaaaggcacatagaagactgaaaaataccattgtcttatatgattaaaaaaaaatgtaagcacagtaggggtatctttggaaagcaccctcaggaacggttcatcgcagcccctttgtccctcctgggttctcctgtgatgtcctctgcaggctaaatcaaatttgtcaagtggagccttcatcttgtggccactgcttttctgagtgatgagggccaactcacctgccatctgctttttctatccctcatgggcaatcaaagagcctattcctgtgcctagagggttgtaaatgggaagcttgccacatgttatgtttaccattcccaagccgactaaagattccaaaatcaaaccgtggtcaactgatagacgtttccacaaccatttgagccaaggttttcattcttctcatcaaataacttgtttcagggaaaaggttgccacacaatatgcagtgtgcccgttaggaggagttcaccctgaatcaaacagatggtggctttttaaaataaacgtccacttcaatagaacaatagtctcaatggcattcaccatctctactcgctgtaactatcagcatttgatggagagaactg

SEQ ID NO: 27705 - DNA, 1026 bp, Homo sapiens
actccctcagtgttctactagcagcaccaggtttagatccaggcagtctgcacgcagaacccagatctgccgcaggccataagctttcccacctggctttcgggtagtgcccctcctgtctgcccatgaggcagatgtgtctgcagtgcacttccctgccccccccgccccactcccattggttctggtcaaaggagtttatccctgctcgagattatatcacgaaattcagttaggagcatctttcaccctgcaacccctttctgagctagttgactggcttccccaaggtcccctgtgagatatattcaggtatggcttccctcggttcatgctggagactgagaatgcctgcaaggcatttcctgctgctgcttctacttttatgtttctcatcactcccttaagcagttccagctctgggtagggttaaggccttctcccatgacctggattttcagattccctcatagggatgtgtattctgaaggtagtctcccccgactgacactctgaggatttatagttttttacctgtctcatggagtagacttcagctttctgcttctttcaaaggatctgtggattcttgcagttttcctgttgagttcctgtattgctccttggaaaaaagttcacagtgtgaatctctacacactattctgtccttcccagtgggagacgcatgctaacactgcctccaatctgccatcttctggatttgcttctatagccctatgcacttctgtcggcaggttttatatggggctgtgcgatttgacctacaagccagtagatggtgtttatgggtaaaagctggctgtgggcaaggtggctaggtatatacttgatccttgtttaccagcagaagctctctattgcctcaggcaatggagtggtccatggaatgcacagtggtctgagctcactgcttagccctgggtgggcagggggcaaaatgggttgagccagactggacaggctcatttacagctcccctggtgttgggcacaagtagcagtgctg

SEQ ID NO: 27706 - DNA, 1060 bp, Homo sapiens
gcaatcaatggaagcatccagcccttgttggtgacttgagatgcacgccagcctcaggaaacatactcaaaataattgagtataccataattcattagttatcttctcctacactctaattttacacattcttagtatgttatacatgtaggtcaagttttatttcataggatagaaagccatttgatcaatccctgtttctccatgtgtaaaatgaaaataacatctaccttgcagagctgtcagtgaagatttatcagtgagagaatgagtaaaatccttgtaaaaggttcagtgtatgggggtacattttaattttctctagttgtcaaaaatatgatttatgtgagctgaataagaaatttgaattatggttttaatttccaaatgagtaaatgaaagctccttgttcctgtagaacgttatgtaaattaacacagtgaggctagagaagagacagttttaaaatggtgatgtgacgatgtctaaactctgtggtaataggacatatttttcatcaatttgaggcaaaacagataaatgtaatctataaggaactgagaagaaataactattttgtccttaagaacgatacacctgttaagttatgtgtctgctttgggattcggtttccttttatagtttcccaacaaaatcgtggcccaggtagcttgcgatgtccttcagttgctggtttcctactgggagaagcttcagatgtttgaaacctctctgcctcggaaaatggcagaagtaagtctttttttctgtaatactaaaacataagcatttcctttttactgtatttgatatttaattaattatagatattcaaataattgttagagaaccaactattaaattgccacaagtcactcgttttaagattaagttagactggttcttctcagctgtgatttcaggcactatgtaaagaagccagcagtattccagacagaggcttatacttggggagtttgaaaggcaggcacgaccacaacaaagagaccttttgtagattgggcttcattcatcaagagcaatttggatggtgccaaca

SEQ ID NO: 27707 - DNA, 1050 bp, Homo sapiens
catcatggttgtttgcattattaatcttcaaatgcatggcattctgctaccttgctagccaggtttgcacgaatcctttcattgcaacatatgtcaacagaaatgtgcttccatctgctgccggatagcttgatgcctgatattccgagacaagtcccagcacaatgagtacctctgtgagtaattacaggtgtgtgctgaggagcctagggcattaatcagaggcttaattatgaaaaaggtggatcttttgttccactcttggatcctgagtttaccacacactttctaaactgcagcatccatctgctcggtcccttagaatgtttgccttgactgatatggaccttaaagtgtatcaaaggacgtgattaaagcaggcttaaacattaacctggaagaagcatggttcatgtttttttttcttccttccttcctttttcacttatctatttatctgtttatttctgatgtaggaaaaaagtctgctgaaatgctaaaactttaaattagtacttgctaaactatttaccatatgtgaactctactgaattaagcattatacagtaattttaagaatgtaaatatcaagatttgtagaaactaagacccatgtaaagaaaaaaaagtcttaggaaaaatggtttgtgaacacatacaaagttttttaggaagataagttgttaaatgaggtaatttttattatgacagactgaacatgttagaatttagcatgttactactgctttgctctaatgtgatactgatagaattaaatcaggattatttttaaggattttttagataaccatactgaaatctaagaaaagaaactaggattttgtgtgtgtgtgtgtgtgtgtgtgtggagattttgcttcttactcttatattgagactataataggttgtataactataagtcacgttactatagtatagtcatgtaacatttcagtcagtggcagaccacatatatgatggtggtcctataagattatagtgctgtgtttttactgaaccttttctgtgctagatgtggtttgatat

SEQ ID NO: 27708 - DNA, 1046 bp, Homo sapiens
gtggtgcgaccttgactcactgcaacctccacctcctgggttcaagtgattctcttgcctcagcctcctgagtagctgggattacaggcacacgccaccacgcacagctaatttttgtatttttagtagagatggggtttcaccatgttggccaggttggtcccgaactcctgacctcatgatccgcctgccttggcctcccaaagtgttaggattacaggcgtgagccactgcgcccggcctataaaagttatttttaacgccattttttagggctctcttatgagaatgtctttcttgctgctggtaagtttggtgtgcacaaagatttgtggccctgtgtagtatatttataagctgtgtgttccaaggaaagtgaaatgggtgatgctcattgggaatgtccgtgatgctgccctatactgatctgagtgtgtttgtagttaaagggagttttctcttttcctttcaggcatttttgttgccttcctgtgagatagctgtaacaagaaaagtagttcaagtgtacagaaagtggattctccaggacaaacctgtgttcatggaggagccagatagaaaagatgttgcccaagaagatgctgaaaaattaggattttccgagactgatagcaaggaggtaatttttttcacttgtcttttgagttgagggtaaatatattttagtaaagtatacttgctcagtcaagagtcttgtcaatgggacaaaggcaggtggatctcttttttatcccatctgatgcttctgagttgctgagttctgtgaggatctaccaaggagagtagcttctgtactcccattctagattggcagtcatctcctgcaactctagccagggccatctgcgtgttgcatctttgttggtcactgttgcaggagagttgtttaataagccatcatattttacatgtctatttgtgagactaaaaaaatcactaccttctccttgacttgtttaaataaatatcttttggagaaactaaattgagaatgtttgggtagacttttgttgtgcagtggcctg

SEQ ID NO: 27709 - DNA, 1034 bp, Homo sapiens
cattgtcatcttttaatgtaaaaatctctgcatttcctgaagtctttccttgtgggtggtggggtatggcgacctcaggctttgctcagtgactggaggccagcccaaggcaaacagctgccattgtatgccttttattttatgctgggtcctgcatccagcagctactactgacaggtgcttatggagaaccaaattttaggtgattggacaagctatggacagtaagccccagaggactaggaaacagaaaggaatttccaatttggctcctaatgtttttttcttctgtaagcaatgaggactcacaggacagaagcatcccttagagtggtaaaggtgggggtcaaatcttcctctccctattatttaaaacaggtaaaactagttcaaatgaataattaaaaacagttttggaggggaagtggtgacacgagatgttacttttttggggaacatggtcacctgattcagttgtctgtactctgtgtgtttctatgtatgcgtacacacacacacacacacacacacatacacacacacacacacacggggagagaagccaaaacttggtgagttttgaaagatgtagaattactgacttttaggtgcactgggacatgtatttctttagctatatatatgtgaatattttttcaaaatttgtttctgattttatatgtagtctaaattcattttaaaaacatggtatattgttaatattcctagattaaaagttatttgttgatcatttttctgcctcatacaggtattccagatatacaaaaattattaagatagagagttgaacttatggcaagtagtatctcaaatccaataccatataattttcatattgattatggaatttaaagaatgagaaactgacttcttattaagtctttggaaaaggtagcatttgatgcctcaaaggtgaaatgtgactttcttaattcttttaaatataaagtagatgatattgattctgtttcattggattcatctaaagggaaaaggatataaacctctaaagt

SEQ ID NO: 27710 - DNA, 1035 bp, Homo sapiens
tgcagtctcccttttgcatcaagacttataggtgagaaacttgggattgacccaacgggatataccaaattactcagttcaccttggaggaagggacactggagataagatgttcgtggaagtctgaaattacattcttgttgttatctgttgcagtccaggtgccctgagcttcctggcatgctggcctctttcacatagtgtgccacttgatgtgttggtaactgacactcttaagaggagatcctgtggaaggcaatactagcaaaaatgcttccaagaatcttttaagggcagatggtagaaactgcattagggctaaagatatgggaaattcacactgaaacctgagcatgtttatttattgttaggatagcaggagacatgtagagagcttttttctctttaattaaaattaatctgttaatgcagttttggtaagttgattttttttaaattaatatatacctttaggagagagttgtacaaaaacttgctattataagtctattacttgttttctgtttggatatgtagtgtggtggctgttacagagtgacatctagtgtttgatgtggtttgtgacactgtacaggttggaagggtctggcttgaagcctttgtgcactggcttttcctgcaggccttgggcacttgctgaatgaatttgacagggtggccagtcccaagacaacctgcaggtgtacaatgctttctaattgtgctgaggcaggagtttaaatcctctgaatttatggggtggtgggaaccaagtagtggcatctcactggggttttgttattctctactcatcactcctatagaaactgtcttggagtgattttttcccctaaaacatggcataaaacggatggccaactagtgctagtaccaaaactgaagagatcggaaaaatgcagtagttttcaggcagaaaatagaaacttgcatgaaatgaagaatagcatggcagatttggttgtgactgagatctcctgtgtaagatacttttgtgagaagaagactccttttgaa

SEQ ID NO: 27711 - DNA, 1074 bp, Homo sapiens
gatctcccagtagctttctgtgccagcttgctgcatcagcacacccacctcctccatgctagagaaattgtttgccagcttatggcattctgaggcacgttcactgcagagcctaccaagagagagggccggggggaggaggaaatgtggagtgacacatgggggcacttgcaggtttctttgaggaagtcatgtgtgacccaggttctgaaagaggagacctgttgattaaaaaaattaaagttagttttattcagaagtcttgctgaggttcgcaaccagggagagtcagagagtgtctgttagactgttccaaagtagtgctttagcccacagtttatatacaggtggcgcactctgcatgtgctcagaagttacattaagtgtgctcagaagttacattagagcaaaatcttaccaaggtttgggtgtgagggtccatctggttatagattatagaggcgtagtcattaatcctgtcagatattatcttatatacaggaagaggcaagggctaagacgagtgtatcttttttgaaaatgtggtgattcaggcaggagatgtgggaaccggtgctgtatcctgcttatcatcttcagggcattcttctcaagggctgcgccgagtctttgagtcaggggctttgtaaaattctgctggcaaggggttttgtgcaattctgctgttatgtaagcaggatgaacagacatagtgtctacatttgctactttgtctcatacactgaaccagctgcatgaagatctgggagtgggggtagcatcctgcaggggccccaagtgaagaatatgttcgggaagtttggggaatggaaagaatccacagtggttagaggatagggagtgaaggggagagtggtgtgcagtgaagttcgtgttgagtgggggaaatcaggcagggccttgcccggccatggtaaagagttcggattttaagtactactggaggcagatggaaggttttgagtggaggagtggtctgatttgactgactctattaaatattcgagttggccgctatggggaatggaagaagagtggaagcagggaacccag

SEQ ID NO: 27712 - DNA, 1048 bp, Homo sapiens
tcagacttctatcaacacagatgttgtgttcaatctccattcggctagcgactgtttactttcaatttaaagcaaatcagagactcaatcctgttcactaaatgcaagcatcttccatagacttgctttgttaactccattgaatactgatgattttaaaagactttttagaataaatttgtgagccataattatataaagacctatcaattggatttttagatgtgaatttgtgctgaagagaaaataatgcattatgtgatggcaacacaaattgcagacacagttcaaagcatggataatactccctcactgcttaccataacactaatgtgtggatgaaaccctgtatgttaattatttgagtacagttttttgaaacactattattatcctgcaacccagtgagacagagaacgatgatacatttttaaaaatataaataccctttcactactagtgagatttggtgaacatctggggaagtttcaaagaagatgcctagactggggaactgcattcacatcccatcaggaatttgcgctctccagtaagtattgagataactttgtgatttcaggatcacttttgtttttattatttttaactttagaggtaatggaagtttctgggagaggtgggtttggttttgtttttgctttagaatgtttacttgcaattgaatgaaatgcctttcgttttttgaaattccatgtaaccttcagtaattgtttaggtgacttctaaaaaagtttaactaggaactaggaacattgcctaaatttaagttgtgcaaactattttgcagtagtgaacagctatattcctatttcatacacatcaattcaagcctgttctcttttggccctcattccataaataaggcgtggagaaacaagccacaggaggattctgctttactgagtggaggagaaatccatcgagaatgggccgtttgctagttcattcgtttggtgactttttcctgatgggaaatagcagagcagtggatcaccaggaatagagtctggcgagatcgcagctccag

SEQ ID NO: 27713 - DNA, 2350 bp, Homo sapiens
acccgatcttataatcaagccagtgttctgacaaagaaaagcattctgggagtggaggtgggatctaccagggcgtcctctcctattccagaagagtgggcaggggtgggggaggacaaagatgccctcccactctgcagaaggcagttaggtgacttctccacagggcagggttctgccagttctcctctggcagccagtgcccaggtcccatcctggttggtgggggctgggccaaccccttgtcatcctcggggaagcctgtatgtacaccagcacctccactgggtgccaagtggccatctcggccagcgagtgtcccctgagaactgagggggagtaggctgagggtgcacctgaggggcacgctccggagcctgttctcactcctgggcctgggcctgggccttccatggtttcgatgacatgagcaactcccctctccccccaggatgataatgtgtaccaaaaaatagatttttcagtagccaattgatcttactgctttaattaaatgattacttttttgcctaatgtggggaaaaggtaaaataagttaacttgttcttctgtgcatagtgttgggctccctaatctgagagatttgcaactttttgctttgttttgtttcattttttttctgagacaggatctcgctctgacacccaggatgtagttcattgatgctatcatagctcattgcagccttgaactcctgggctcaaaagagcctcctgtctcagccttcccaagagctgggaccacgggcaggcaccaccgtgcccagctattttttatttttgtgtagagatgtggtctcactgtgtttccaaggttggtctcaaactcctggcctcaagctatcctcccaccttggcctcccaaagcactgggattacaaatgtgagccactgtgtctaaccacaagaattattaaaaggaattttacttaagtatctacttccagatctctccatgtttctttactagctacaaaataaaagaattaccccatcagcctctgtagggtaagatgaattgtgtggaatgggtatgaaatgaaggatagttagatgtagaaggtaaaacaaaaggaatcagctttttgtgtctgtgacagaggatctgatacttgatggtctgaccacaaggcatcgctcagaaatcagcagtccttttcacccagtgaacagccagctgctttgagcagagagagctgtggttggaactcctgctctgtgactcaggggaggaggcagagcttgccgcagaatgcagccactgcccacagcccctgtgcactcccttttcccttgtgctggcttcccgctgccagcatctgcaagtctctgcctggaggtgagcaggagggtgctgggcccattagacaggtggctagggctggggagttcatggtcttcacgcagtttcaggtggaggttgcaggatatatggcccagcttcctggccccaggtggaacaaccctgagacatgttcgccatttcccacaggcccccagtgggactgagccctagttgtcttcagtggcaatcttctcattaccacctctcgtgttgattctttttcccttcactttctcatttttccatttccttgttggtccccattaactacttgcacatgaatctttgtctcagggtctgcatctgggggaccccaaagacacagacacttgagctgttactctgcctttatcttagacctagcattggtctccagaggtcactcatgacttcagggcctattttaatggcctctttccccatgtgttccttgggaatgtccattgttgatgcgtccttctgtactaagtagagtttttgggctgcaaggaggcagttagcacagggaactacgtagtgagggacatggagactaaacagcagctggcccatctctctggcttctcatggccaagcctgggacacacagctgccctcgtgcaggtccagaactatggcacttgttccctcaggacccatcctcaaagccagtgacttggtcttttcctatgacaaaggagctcccagaatgtggcagtcccccttcctagagggagaatctgactgggtcagggaggcacccccggtttgcagagcccccattggtcaggttcagtgtccaaaacacctgaggggcaagtggcttctcgaagtccagcccatatggttacttttgacttggacactcaaggcacagggacacatgacacaggcacagggtgtgacaactgcatgcagaaagagccactctcattcctcagaagaggctgtggagatgagtggctgagccatgtgccccaaaattcatgttgaagtcctaaccccc

SEQ ID NO: 27714 - DNA, 1026 bp, Homo sapiens
cttcttccacaggcacaagaaaggctcccctccgtagggtgtgccgaggcctcgcctgctctcctgtatcttcctttcttgcctggtttgctgttgtttagagcgcacccccacaacagggggcgtaaagctgaggcgtgggagggcagaagccgggaaagcagggtgcctctgggcggcccccgtgccctggagcgcagaaaaggcgctcgtgtttgagctacctgggaaagtaaacaggtaaacactgagccgacttagagggccacttgtcctggagtggggccacttagcctgtgtacattcgcctcccctcctgggcctccggcgattgttcagcctccccgcgcccgctccagccgcctgaacccgaactcaattcgttgcggaacccagagcagcagagagagcgaggctctcctctagcttccaggggcacaggttctcttcctcccctctcctgcctttcccccgggcgtaggactcccaatgcgtccgttctcaacctaggaagaatgaatagagctagagatgtgtacggaatctggagccccaatgctgataataaagatcgagttgaggggtccagctgttcaggttaccccagcaggggcgcgcggtgttcgggacgctaaggagacaccaagcaaatctcctccggcccggggcatgctgggttcagaacttccagcacccagctcaacttcctccccaagcatgcagcagaacgaggcatcttgcagagtgcctacgaggtctccagaccacggcagctgagcccaaagctcaaacccaaacttgacggaacggaggacattgaactcgcttgggtgcaagacggtacctggaaagaatttactaaagaatgccgagtgggggagaccaggagctgaaactggtgcaggcagacgctgacagggtgggagtggtgggcccttactgaagaaccctccggagggggaagggagcggggcagggcctctcagcctgcgggtgtgcgggatcgcagagaaccaaagctcctgg

SEQ ID NO: 27715 - DNA, 1029 bp, Homo sapiens
ttttctagtattctgttcttctattgtactttttgccttgttcctttttatatataaggaatgcaattacctctcaaaatttatgagaacaaactcaagtccatagaaacctctggagctgagaatcctcagttcaaatgctggctctgccacttaccagctgcatgatcttgggcaagttaatctgcctcaaggctttggcaagatcaaagggttgctatgacctgatgcacacatggtacctgacttcaggtaggtactgagtgcatgtcactggtggcagattgcattgcccaaaggcgtctgaacaattaaagatgtcccagacctcctgctctaacaacatgactgacattgctctcactgagaggtggcgtctatgttcctcccgtttaatctgggaagagaggagttcccaggctaggtcatagaaggtgatgcaggttccactcagctcacctgtgctcactccctcttcttttttttcctctctctctctctctccctccaactccccatacctctgtctctctctgctcacccttgaatgcagctaccatgctgtgaggaaacctggactaggccagctggaaagaggacatggacaggcctatttggggaggagctgagtgaggccccagtgacagcaaacatcagttgtcagatgtgcaatggatgagccttcagcaggctctgctgtgcccttttcaaatgcatatttattatgcagccagagttggcagcaagcactaagctgtgacagtgcatgaagtaatttaattggtgaggcccattcttgcaactacctctgtgactagtggagacaactcagatcccagataaaggatggggtgctgggtcagcatgccaaacccaagctaccccagggggctcagaggaagaataatgtgctggaaagtgctctgtggcatgtaaaaatgggtgtcttctcaggatctagcagtgggactagatttgggtagaagtgccaaatgagagaaagcaaagaccctaaggatgagatttaat

SEQ ID NO: 27716 - DNA, 1216 bp, Homo sapiens
ctgaggctggctttgtcctgatttctgaaaatgggtccattggctaggaccagtcacaggaggaagctcacaaggctgcactccagagcaggtgttggttggttcatctacagccagaaccaacttcccagggactaagcagcatgtgttcatgtgctctctatgtgagcaggtgcaggtggctataagagcatgggtcagaacaaggaaacacagtagatggcatgatcccagtggccaagggcacaagttgacagggcctgaaggatctatgttctcaggaaggaacatggtcaccagggagaccagataccccacagtgagtctggtgaccacattcccttctcaccagccctgcccacatttgcccctgtgaattaccctacccctttttttgggcgtttccacattctggtggtggatattttaatttgttcacctcatgggctgggaatctcttttctcttaaaggtgacattgcataggtatgttccaagtcttattgacttttaactctcagggacactgttatttctctgcttctaagccagttttataaattactgtgtaggaagtgcttagcacatggtacatgtcttagtttggattccccgagaagctgatccgaagcaagtattttggtgcaagtcattggtttgctaggcaaaggggtgtagggaattgggatgggtgaggagtagattacccaggctgctaccactgtgggtgactggatcctcatcacgctgtgcagctcctcatagaacagcatagaacatatgcttcagaattattccccctggagggccaggagcgtgtgggaactgtggaatttacacacaactcctgagagtgagggctgccggggaggtgtcgttttcttgtctggcaagagggacagagaagcttttcttccactggcctggaaaaaaagcccttaggcatttggaaatcagctagagccccctgaaaagggaagtaccaggcctcagacaggcactgaaggtgtcaatcatagcaggcattttaagtggctccacaagcagcttctggaggacccagcacattcagtgtacttcacaagcaaccccgtggtgaccttgggcatagcctcggaggtggctattcctattgacccaaccatgtaggccaactgtagatctgagtggaaaggggctgtgaacctcattaagccatgggtgctcaaagctgatga

SEQ ID NO: 27717 - DNA, 1029 bp, Homo sapiens
gaatcatagcatttcacaagcacgtggcacatactcaaggccctagaaccaaatgtcaacgtttaacaaatacagcagaatcgtcttttcattgtgaatttttaaaagcaataattaagtcctgcatgaaacagccaaagaagcatttgggacaaagttactggttcttcacaatcaactctttaaggcataatcggaggtaagtgtgctgagacttttggtccctactgctatgttctcacatgctcccaaggaaatagacatgtcagttacttgcctgtttccatctctaggtgtggaaatgagaagtctgggtttctggaaattacagaaatcaagtcagaaaaacctggcaaaagtaataatactctgtgttctataatttgccacagtcacctcattttgcaaataaaatgactacacaactttcaagtactctaaagcgtcttaatttttcatgcctctgcaaaaaaatactatattgttttgctagactctttggtaggacagcttttacctaatctgatttttttaagacaaactgaacagcctcatctcatttctaagttgattttatgacaaacttcctagctgcgtatgtgctgagattacgctagcagttttgcaggtgttcaatctgtcagtcatactttgtttactgcctacaaatggggggtggggaggaatgaatgcaacaatctatttcttcagttgcatttgagggtccccacagaaaatctgatttgcttcaattcaacagggaagaaatgactgaaaatatgtggccccagttttatttcagcttggaagaaaaataccttgaaagtagttatgagagaagtaaacccacatggaaatataaggcagagtgagaagccaggaagactgctaactacaatatcaggagctggttcagttctctgtactctgcaattaagaccagcagttatctataaactaggtaatcaagaattagaacgattagcacatacaccctacaccagaattaagtgaggttatgttcactgc

SEQ ID NO: 27718 - DNA, 1357 bp, Homo sapiens
gcttttatgaggagaaattatgttaaatttatactggctgtttactttatagcatcatttaattaaactcttatttatattgcattttagagaattttttggaaattacctttaattttatctaagacttcttatatcttaattttgtgaaaatgtatattgttcataaaaggaaactcttatgttcccttactcctaaatacctaaggagttttcagatccagttaatgggagattgtaatattcaatcgttaaaaagtctgattcatacagtattcatttggttttttaaaaagtttttcaaagtatttgttttgaggaaagaatgcaattggatatttaatgtggtaaaattttgcaaagattatttctttttagttagaagagtgtaattaaaagtattaatttcttaccttccacacgcgtgcacagcggaaattttgtgtttttcctttttcttttagcagtccattttgtttaacacacagatcccaaattttgagaataaatatgtcataaagaaatagggtatcttcaatacctttggtataagggttaatcacagtttatttcccaaagtgacaaactggacacaggttaaataagctgttagagtggtaacattgtaatgcatcagtactttagaatatggtgcaggcattaaaatccctggtttcagagaatcttcagtgacctggtaaatgtttacatgtcaattaaagaagcacatgagactgaatgttgtataatctcattttcagaaaaaagtttgtgcatatagaaatgtgtctaataaacgcaaaaggaaagtacatctgagtactaacaacggatttgagcgggattattgatagattatttttctctttatattctgtattttaaaaggtgtaacagggatccacattttttatgtagtttagagggaaattgttttaatttttgttcatctgcttacctttctaattttgtagtcaggcctttctactttgctgcctctttaaaccaaacgtaataaacttggagctgtcactgtatgccagcatcataaacaccatcattttatgatagggaaaattttttggctcacttgtttagaaaattagtaaaatttattagcattattatttattagatttgtttcttcattttgttagtatgctacaatttagcatctttgaacattatacagaatgttgactttgcttaagggttgtttgaataggcatttcaaagtgcttttgcttttggctgcatggagagtagaatctattgaggtgattgttcttgtgatgtggtgccatgttccaaaattaatatatatgcatggtattaatgaggaatatgtttgcattca

SEQ ID NO: 27719 - DNA, 1051 bp, Homo sapiens
tgataggagatgagcggtttgtgtgacttcatgggtttcttagtttaaatgctgcgttgtgtaggtacagttaagtgcggtttctttaatgaatggtgctgtggaggggtaggtttgtgtgacttctaattctgtgatactcttttgtttcaagaacgtatttccatcacttgccttctttcctttcactgccaaacctccatagagctgcccccaccttctaagttgccttctcccagaagcagtgtcttctggaaactgcagcctgtggcaaagcccttctattcagttcccaactgcagtgctctaacctgccaggtcttccacctggtctggggtgtttgcccaccctggtagggcacttccttgctgagagttcttccctggacaatgattgccaggttaaactcccctctcctgtcgacagacgcccctctgactggcagcagaggcagtgttgctagctctggtagttttggattttttatttcctaaattatatttaatggaggcttgctgaatactgcctccttttgctgtaggcacggattatgggtggttgtgtatgctttttgttgatctataaggtttttggaggatgtgtggatatatttatctaagcagccaccatgattttttgggaatcacatgtctcatcagtattttctgaagactgaaattcagcttaaatttttataaagactgaaattcaatttaaaaactgctcttggtaaatcaggttgtatgtaacagtcatttctgaattaatctagcagttaccattatctttcttaagtatttaaatatgtttgttttgttttataaataggtccagtgtatacctatttcttctctataaagatgactactccccatataaagttgaggcattagaaaactattgtcaaaataaagtctaactagttttctttgttatacttgttctcataagctttatttcaggaaattgtgcttaaacacaaatactttggtcacaggccttaaatgtctctgattattttctctgtttgagaatctatgatttttgtcc

SEQ ID NO: 27720 - DNA, 1015 bp, Homo sapiens
tgggattagctgagccatcagttactggccagagcgcatcatggccggggtggggtgggcatggaaatgggatcgacagaaatcagaggcagcagcgcaccttctgcatggcatgttaaagaaaattcaagggtgcgctttctttctcccattgcgagtcgcagtccggaagagtgtcttaaggctgactggtgcagcccgggccccattcccctgctggcagggccttggtcctcccctgacctacttcccctctgttcatactgggccctgtgcacaaaggtttcttctcagcagctgagcctttgttcatgatggtcatagagcactttccatatatatatttggaccaagaccagtttggtgcttggctaaaattttttttctgaaattgaggggctatggttcactctctgcttgggtgaatttttcagagtctacgtttctggcctgatgaagggcggggctgatctgtttgtggagaacatgcctggatttccagacaacatccggcccagcagctctggggggtactgggtgggcatgtcgaccatccgccctaaccctgggttttccatgctggatttcttatctgagagaccctggattaaaaggatgatttttaaggtaactgtgaaaactgttattccaagaaagaaaatggaaatgaattgaatcatatttttttgacccttatagcttaaaaatctagttctgcttgtagtatttggctctgaatgacacttagaaacacatttcattcttcatcctgaaatgcagatttaaacatttggaccctttggttcttatggttttcctttttctgggtgtttttattgtcaccctcaccatcgtggctttgggcatctgcctgcctgtcagtctctggttccctgtttctgggtgttttgattgccaccctcaccatcgtggctctgggcatctgcgtgcctgtcagtcttgctcctccatctgccatggctttgccaggccttctgtgctctccacccccctc

SEQ ID NO: 27721 - DNA, 1027 bp, Homo sapiens
aactttgtatttctcttaaaaagacattggcatttatttgtgtaaattttaaaagctttagctttttttggtgaaaaatcaaatcttgctctttaaaactgaaacttaacagcagttgaagtgcaaaccaatgatcttacctcccaaagagagcactttcctgtctttttctttttcactgggttacttctcattgtactttgtcaccaggtcccagctttttctctttctttgatgagctggtgacatttcttggccaggcacagtggggtcctctctggtgggtgtgagccgcagggacctgccactgctgtctctgccacctcatttggaagctgtcctgggggctggctggcaggttgctgacagtggaaggaggtactagctctggggagtgctgggagagagtaaccaccaactatagcaggctttattttatttgtttttaagtagactttatttttaagagcagttttaggttcacagcaaaattgagcagaaggtacagagattttctgaaaaagagtttttattacgattgggtgttgcatttcgtcaaatactttttctgcacacatgccatgcacagcctcccacatgatcaacatcccccaccacaagggtaagtttgttacaagtgatgtactcacatcaatacgtcaatagtactcggagtctgtagtttacggtagggttcactcttggttttatacattctatgggtttggacaaatgccatgtatccactgttatggtatcttacagggtgttttcactgccctgaaaatcctctttgctctgcctgttcattccacccttttcttttaacccatggcaaccactgatctttttgccatctccatagttttgccttttccagaatgttatgtagctggactcatacagtatgtagccttttcagattggcatctttcacttagtagtatgcatttatttaaaattcctccatgtctttccatgggttgatagctcatttctttttagcactgagtaatattccattgta

SEQ ID NO: 27722 - DNA, 1045 bp, Homo sapiens
taatgcattgccatttgcagtgaatgggctgtagttgtttgagcatgctccatgttagcttttcaaacactaagacaaaatttttctcttaagtagttctcacctctgatgtaagacaaaacctgccaagtcccaggccagagaatggagatgaggcacccagtgggtgcttggatctgctgccacctgggtgcctgcacgtggcacagtggcaggacagacggacggcagtacggggtgaacccggcctgggtggaccctgcctggcggagagcatcggggtggatttcagcttaggtccagacagtaggaggataaagccaagacctcgggcctcaccgttctctggggtggaggcttagacatccactgtggatccccgggagggcatcccccctgagcagagcccttctgatcttaatgcagtccacgctagcacagaggctgggcaccatccacgctctaacactgtgcctgttccttgccaggtggtgaaacgtcttccaaaaaccaggtctgggaaggtcatgcggcggctcctgaggaagatcatcactagtgaggcccaggagctgggagacactaccaccttggaggaccccagcatcatcgcagagatcctgagtgtctaccagaagtgcaaggacaagcaggctgctgctaagtgagctggcaccttgtggggctcttgggatgggcgggcacccaagccctggcttgtccttcccagaaggtacccctgaggttggcgtcttcctacgtcccagaagcagcccccaccccacacatgacccacaccgccctcacgtgaagctgggctgagagccctttctcccatccattggaggtcccaggagtgtcacccatggagaggctatgcgacatggctagggctggttctgccatctgagtttggtttcctggaatgaaaaggcattgccatctccattcctctgccctcttgagccagcacaggaaggtgaggccctgggatagcgcgcctgctcagataacacagagctagttagctagtagcaaccgtgtt

SEQ ID NO: 27723 - DNA, 1106 bp, Homo sapiens
ggagtttgaatactattaataagagcaaatatgtattaaatgcctttatcttcacatcagtcctttgagcaaacagcagatgttgtttcacattacagagaaggaagaggaggcacagagaggtcagagaaccggcctgaggtcactcagcaagtagggcagcctgtgttgaacgcagcacttggttctagagtctgtaaaactcactctgccccccacctgattgatgggctctgtgcccccaccctgtaccctcaacaggtcccttgccatactgtcccctccacctctcagaaagagtatggggttcctttctagatggtgaatcttagtttgctttgtgctgctgtaatagaataccctgaaactgggtgatttataatgaacagaaatttattggttcacatttctggaggctgggaagtccacatcaaggtgttggcatctggtgagggccttcttgctgcatcgtcccatggtggaagggcaaagagaaggcaagagagagcaagaggaggttgaactcacccttttataatggcaccaatcccactcatgagggtggaaacctcttggcataatcacctcataaaggttccacctcttaatactgttacaatggcaattacatttcagcgtgagatttggaggggacaaacattcaaaccataataagtggtgagtttgggtggtctctcttggcatgctggagctgggcttgagaggcccgtgtgattctgactgcctgggccatgtagtgcttgtggactgggaacaaacagcggggtggccagggccatagaaactcgcccagatcctctaggtgttgtcagcagggccacctgagtgggccctaggcattaggtggggacagggctgaagggcaagatttggttttccagatacactcatgggatttgtctcctgaaggaaggttcacggggtccaatgacaaggggtaccgccctaagtgcatttcaggaaggggtgtgctctggcagctgcattagagtgggatgtgtatcccagcagcctctgcctcacctaggggtccccacagacttggaacacctctgagccagggggccagcccccagcagaggctc

SEQ ID NO: 27724 - DNA, 1057 bp, Homo sapiens
tgtgtctttgctgtattatttgagaaaacattgccaaatctaatgctgtgaagattttttcctatgttttcttttttttttctttttgagatggattctcgctctgttgccaggctggagtgcaggggcatgatctcagctcactgcaacctccgcctcctgggttcaagtgattctcctacctcagcctcccgagtagctgggattacaggcacgtgccactgcatcgagctaatttttgtagttttagtagaaacaggatttcaccatgttgaccaggatggtctcgatctcttgacctcgtgatccgcccgcctcggcctccctgttcgtatgttttcttcaaagaatttaagttttacctttttacatttagatctttaattttgagttgatttttgtacagggtgtgaggtaagggtccagtttcattctttgtcctatggctatccagtggtcccagcgccatttgctaaagaggctgttcttttccctgttaaatggacttggtactcttgttgaaaataatttgaccatatatgtgagggattatttctgggctctctatcctattccatttatccatatgattacctatgtatctattattatctcagtatcaaactgttttgacactgtagctttgtaagttttaaaaccaggaagcgtgagtctcccaactttgttcttcttttttcaagattgttttggctcttcttgctttcttgtattttcataggaattttaggattagcttttccatttctgcaaaaaaagatgttgggattttgattgcattcaatctgtagaaaaattggaaggtattgccatattgacaatattaatccacaaacatgggatatctttccatttatttaagtattttaaaatttctttcaacaatattttgtggtattcagtgtacaagtcttgcatatcctaggctaaatttattcctaagtatcttattcttttatgaatttttataaatggaattgttttcctaatttcctttacagattgttcattgctaatatgtagagatacagcaattttt

SEQ ID NO: 27725 - DNA, 1051 bp, Homo sapiens
ggcagatgacctggtagatgcaggacttctgctgggccattgcactgacttcattctgctctgcatgggtcctatggattcatccccctcgctgccccacacctcaccttctgctgtcttttctgtgttaggcagcagtcctggaaactttggaatcccctttaccttgtttgccacccaacgttccgttggtcatcaggtcctgcagcgccatcccctttcctgctgtccttcccactccaccaggcacctgagttattcgcaggctcagcctccccagcctccctcctggctggcccatccttcagacctgttggggatctttccttccctcatttgcatcttctcacacctagaatgaccttagaccttagcgttccagtctctacacagaccttgccctcactgcagtctctgtccctgcccatgctggctggcctcagcccataccctgcctgaggctgggcctgcaggtctggcaccattgtaagattgcacaggaaaaggacttggtgctttctgagagcttctgcagtgtgtgcatgtgggtgtgcatgtgtgtgtgtgcacgtgtggatgcatatctgtgcacgtgtgtgagtatgcatgtttgtgtgtacatgtgtgtattcatccaccagtaatcctaatttccatctctttatttcctacagtaagagttccctatttcattgatttgaaaaaaccacaggatcaaggtttgaatcacacgtgtaactactacctgcagccagaggaagacgtgaccattggagtctggtgagtgccagtgagctctgcagcccctccagcagcaggaaaggaccctacatgactgagctggtgctgtctttgacattggcctctgaaatgttgttcatttttatcttcacctcttcctttcctaaaggaaagatctcagtacatttgatccatcctaatgttgagggattcaatggctttaaactctattcccagcctttcaaaacagcaaaggctttgtgaacagattattatttttagagagacttgtttctaggaaaaacgaaaa

SEQ ID NO: 27726 - DNA, 1025 bp, Homo sapiens
tagtttacatacagtgaagggtacatatcttaagtgtacagtttatatacctatatctttagagatagataggtagagctaccacccagattgagaactagaatgcttttattacccaaaaaggtccctgtgccccttcccagctggaggactttctgtgctagtgttgctccccagcactggatttctgtccacagaagactacactgccctgggggaccagcgtatctgtcttcagctgaggtgagtaaaaatgttgacaacatgagaagtcagctgaagccatcatgttggagatgccttgtcagttgtgcattccaggagcctagctgcccttggaaaagatgaccactgaaaaatatagtacctttaaaaaaaaatgaggccttttttcttttttaaaacaaattagttttttatacccttaaaaaaatccagatacacagtactttggtttctgtggaattttgtgctggccttgtaggtattgtagtctccttgagtgaacttggaccttgtgtgttttttcacgctgtgtatttacttttggagatgtgggaggagaaaggtgcagaagtatcaagcccatgaggtcaaaggcagaggctctgggcacatggccctgggaacagtcctacaagcgaggctccaaggaaagggccgcatctgtgggttcgaggtttgagaacaacggggctcgcacacggtgggtgttctgtgaaggacagcctgagaggcaggtgctgacagcattagaacaggatgaggcaggggctctggggtcactctgtggctagattggtttgcacatagtgagtctggccttatgcgtttgggagtttgaggcttggaaagctgggcctgatattgctgaggcagcaggtaagctggtggagtgggaggaggaggaaaggaggaggccgcagaggaacacaggaggtactgagaggtgccggactccctctgcaggcatctgggcttatgagtttgggtgttcagtctataatagacttaatcacagaaac

SEQ ID NO: 27727 - DNA, 1050 bp, Homo sapiens
actatttttttatcttccagtttttatggttatactttgtattttctcttgccttattgttttaacttgcacttccagaatagtgttaataacagtgatgctagtgaatatcctatctctgtctagtattttactgctatgttttgctttggtttgattactggtttgaagcaggtataaacttgatcatcctaagggaatgtcctgtattcctatttcactaggggttttattattgggactacatgttgaattttactaactttgtaagcccctcttttatcctcactattgatgcagctgatatgtttgctcctgaaataaaacctatttggtgatattatgttagcctttcattatgttccctagatttcattttttattgggatgaaatatatataacataaaacttaccattttaaccattttgaggtgtataatttagtggcattaaatactttcacattgttgtgcaaacatcaccaccattcatttccagaacttttcaccatcccaaatagaaactctgaaaccgttaagcaatacctccccattttccccttcccacaactcctggtaagcactgttagactttctgtctgtatgaatttgcctattctaggtacatcacataaatggaatcatataatatttatcctttgtgtctggcttatttcacttagcataatgttttaaaagttcatccatgttgtagcatgcatccaaatttcattctttttatggctacataatactccattgcatgtgtatccattcatctgttcatttgtcaatttattcatctgctgatggacacttgggttacttccaccttttgactattatgaataatgctgctatgaacattggtctacaagtatctatttcagtccttgatatcagttctttggagtatatatcgaggagtggaattgctagattatatagtaattctaggcttaactttttgaggaatggccaaactgttttccatagcagctggactattttatattcctacctgattcgtttttatactcccagcatgtg

SEQ ID NO: 27728 - DNA, 1059 bp, Homo sapiens
acacttggtgctgtaccagcagccagccacatgaggccttactcacgttgcataggtgagaactacttacctggctacacctgcctccatgttgagctgggaaatgtagcccccagctaggcagccattcccatgcccaactctacactccgtagggaagggacagtacaaggttttggtggtctcctagccatctccacctcaggacttgggcccctgatctgtatggtcacctcttcagagggccagagagcagctcccattggcggtgtgagagtgtttgcccagagttactcttttgatattgtcagtattcttatattcttattctttgccagtgatttaggtgaaaatggaacctcatggtttaatttgcatttctatgtgtcatcttaatttagtgacgtatgttttgggaacaggaaatataacaaaatagctctgtaggccgttaggtatggtttagatatggtttgtttggccctgccaagtctcatgttgaaatttgatctggcaggaggtaggaggtgtctgggtcacccagggggaagattccttatgaatggctgggtccactcttatgggaatgagtgagttctgactctgagttcctgtaaaaggagcctggcaccttccctcccctctgctctgcgatctctgcccaccacatccccttgctttccaccctgagtggaagcaacctgaagccatcaccagatgtggatgtgggcaccatgcttcttgtctagcctgcagaactgtgagccaaataaacctcttttctttataaattacctagcctcaggtattcctaatatagcaacacaaaaatggactaaggcacctttgtcatctgaagataaatttctagaatattgtcttatcatgagtttttgttttgtttgaataaaaagtgaaggcgaatgattttgagagctagtttaggagagtcttagtatggccttgacccggaaggctgaaaggcagggtcctggggcctgtgacctgtcctgatgatcaggcctgtgggatacagtagtggggaggaggttttcctgc

SEQ ID NO: 27729 - DNA, 1048 bp, Homo sapiens
tctggataattgctgtgaacagtgtggcctgtgttgagagtattgctcctgtgttcttccatccatttagcaagtatgtctttttcgttgacctagccttcactgaaggctagagtggataaaatgctgcacaagagtgggacaaatcccagtccttgtgggacttctgttctcatgaaggagaaacacggcaacaaagatagcacataagtatacagtaaaatttcaaagggtgataaagtgctataaagaaaaataaagcaaggtaaggttatgtggctgtgtgtaaagcacctgaaaacatgccgtaccacagtggtgaaatatttttgtttctgccaggaaaataaggccttctcacagtaggatacccagttgttcagttctgccgactgaatcctcatgattttttgttttcttctttgggaacaaagagacatttatggactgctcttgtgtgttttattaaggccttaaagttttcaattcagtagagtgaaattgctctcaacactgactgcttttgaatatgattatggagattgttgttaagatttccgcctaaaagctaagaagaatttaatctgttagtcttggggaatgagatttggcgttactctcttgttccttctaagagaataccatggaattaaatgataaaacacttttcctcaacaattttgatggttacattaatgaaggagttgatgaaaactaattgtagacattattattattattattattttttgagacagagtctcactctgtcgcccaggctggagtgcagtggtgcgatctgggctcactacaatctccgcctcccagctcatgccattctcctgcctcagcctcccaagtggctgggactacaggcgcccaccaccacgcccagctaatatttttgtatttttagtagagacggggtttcaccgtgttagccaggatggtctcgatctcctgacctcgtgatccacctgccttggcctcccaaagtgctgggattacaggtgtgagccactgcacccagctaattatagacatattt

SEQ ID NO: 27730 - DNA, 1118 bp, Homo sapiens
ctttcaagtgctgggtctgaagccatcaccatgcagagggggacagcttctgtgctgctatgacacgagtgtttgattgtattttcagtgtcaactgttgatgactgggtttatattgaggagccccgagcgtgcagaacaaggcatgtcccctgtctccccggcccagccccttgctgctgctaggcggggctcacctgggtctgctagctggcatgcagggcagccccaaggtgggggtgggcttttcctctgagggattgactccatactcagccatcccccacttccccaaacatcctgctctatttgttcccggtgctccgtccccagcagcaccccctggaactcacagccttctctctgcatctttctacagagtcccaagtcagatgaagaggccgagagcactaaagaagctcagaatgaattatttgaagcacaaggtaaagcctcagcctcgcattcagtgctctctgcctttgcccagagctttgaaagctgaacagccgggtcattgggcagtgtgcaaccacaagtttaatttcctgggaaatgcatggggtgggttgtgtcccgctggattcttcctcctgcaggagtggtcagaatgtcatcatcacagcagtgaggccgtcactcggtcctcatcctcccaaggtcagacccaggggcagaggcccgtggccgagggagcatcgtggttcgtcacactttatggtctgcaagtactgatgtgaccccagctggcaggtgtggccctgtggtttcaggcaggagggccttgcttggccctgtcacctcagactgcccctgcacctccttcctggcacgctgggctagatacagcctctcccttgctgtgcaggggcagtctcagcacccaccagggttttatctgtctcacaaatggagtgtaatacctggtcctggagctcagagccttacatagcagccagaaggccagcagctggtacacataagcaaatcatagcatgcagcctcacagcgctgtgcagcgtgcaaggggaggctgaccatccatgctgccgtggtgccctctgcaagatctggcattttgggaagataagctacatgcaggagcatgattgagactt

SEQ ID NO: 27731 - DNA, 1045 bp, Homo sapiens
atccactttatttcattcttgtggctctaaaagttttccccttttagaaggatgtttgcagacgtgtgtatggcaggtttagctagaaccttgtaaatattctacctggagttctgagattttcctgacttttgacttttcctgtgtggaaacattttttaaaaaacatgttagggacattgtggagttggttggaaagagtggctcaaaccgggctgaatgggcgtgtctggagatccaaggtccgagtgggctttccgtgctgacactgctcagctgagtgcattgtgctgcacgacctcaggccacgacattgatttagttccactcgtgcatgatgagctgccagcttttgtttggatgtaaaataaaaactcacattgcctttttcctagcacagagcaggagagggagaggggaagtgagactcagcagacattgatggagggtccattaagagccaggtccatgctgagcaacggccagagagacagtgtctgggacgagcttggattctggatgaggctgggtgtgggagctgtggccatgggtgccggggccagccctgggtgaggctgggtgtgggagctgtggccatgggtgccggggtcagccctggatgaagctgggtatgggagctgtggccatgtgtgctggggtcagccctgggtgaggctgggtgtgggaggtgtggctgtgggtcccggggtcagccctgggtgaggctgggtgtgggaggtttggccgtgggtgccggggtcaggcctgggtgaggctgggtgtgggaggtgtggccgtgggtgccggggtcaggcctgggtgaggctgggtgtgggaggtgtggccgtgggtgccggggtcaggcctgggtgaggctgggtgtgggaggtgtggccgtgggtgccggggtcaggcctgggtgaggctgggtgtgggaggtgtggctgtgggtactggggtcagccctgggtgaggctgggcgtaggaggtttggccgtgggtgctggggtcaggcctgggtgaggctgggtgtgggaggtgtggc

SEQ ID NO: 27732 - DNA, 1889 bp, Homo sapiens
aacagagactgagaaaatggtctggtttaaagggacaggaaaaccgtgtacagtgcttgtctctgaattggaaactggactggggtgaaaaagatagctgtaaaggacattgttggcaccatggacagaatttgatctgaatggtggattgtataaatgtcaaatttccctagtttgttgtactgtgactgtctccttgagcttagtgaatacattttgaactatttagggatacaggggcacaaagtctgatacccgatttcaaatggagaaggagaggagcaggggtagatagatgatatggagggagggaggaagtgagggagagaaaatgacaaaatggttgtggtaaaggggaaaagtggaaacaggtggtgaagccagccgagtgagggagtattggagaattttttgtactattcttacaagtttttttttttgttgttttgtgttttttttgagactgagtacttgctctgtcgcccaggctggatggcgcgatctcggctcactgcaacctttgcctcctgggttccaacaattctcctgcctcagcctcctgagtaactgggattacaggcccacgccaccatgcccagctaattttttactttttagtagagacggggtttcaccatgttggccgagctggtctcgaattcctgacctcatgatccatccaccttgccctcccaaagtgctgggattacaggcgcaagccaccacacctggcctattctttttttttttttttttttgagacggagtctcgctctgttgcccaggctggagtgtagtggcgcaatctcggctcactgcaagctccgccttctgggttcatgccattctcctgcctcaacctctggagtagctgggactacaggcgcctgccaccacgcccagctaatttttgtatttttagtagagacggggtttcaccatgttagccaggatggtctcgatctcctgacctcatgatccgcccgcctcggcctcccaaagtgctgggattacaggtgtgagccaccgcacctggcctattcttttaaattttctatacatttgaaagtttttcagaataacaagttaaaaagctagtcctatattcactgccatctaaagacctccaaccaataaaaagtttactatatttcatctattctaagataaacctttttttttctttgcttgatagtatttttgacttgggggtacatttaaaaactgatgccatcttagcactgggtcacattttgacagcagtttttcgtcatcatttgtcttagaattagtggcatctcaaatttgatgaaatactgtatttttctctggctctgttatgtgaggaggtgggaaaaaagaagactcctaggagctttgcatgtgacattttttcagcccctcatgcccacatctacactcaaggattccacccccataccatgtagctacattaaactcaacatattccagactggatttctgtctgcacctctatctaccatgccaatctgtgcttcctctgtttcctccctcaaggaacagaaacctgatatttagccaccgatggccccagaaggtccaacaggaggagctccaggacctgtctaggaggggagatgtggacacttcctgtaaagtggggcatgcatgaggaggaggtggcctggatccttccctttctgggtaaagggtggaagcggtgtggattctttacttcgtgtgttctgatagccatgtgtcactgtgtacttgttctttgggtcttcacatctcctcctgttgcattttaaagcatttcaatggcatttttatgcctaataaagcattctcctagaaaaaaaaaaaagacggtggtgggcacaaggcccttgcccagccatgccatg

SEQ ID NO: 27733 - DNA, 1033 bp, Homo sapiens
aaatagactggtcagatttggcctcatcgagtaggtgatgtttgtgcacagacttgaaataaaaataacagaagcgctgcttgaattgctaggctgagtgcaggcctcattttgtgagcgtgttttaaaattgttaatagttttatttggaattcatccccttctgtcgtgctggatccctattgatttcagtagggatagcaccatgttcaagaggctgaagatgagacccggagccagcaaatgaggaacggtttttgagggaacttatatacaagacggtccattggcggcgggctggacagaactgcagccacttgtaaaaagaatgcagtttatatagcattttcacttagcaccctccctgcagcaacctcctcctggctaccttcatttaatggaaaaaaaaaaaaggggggcctctatcccctctgcaacctgagttccgcaggatgggatgggccatggttcagatcctcctcataaataaggaatgaatctctggattggacactcctggactccttatcttggaacccgaatacacattcctcatagaccacagggtcattctaagggtgtgcgtaagttagtgctgtcaggtgcacctgctatacgcttcatatccaaatgattagtattcagaatacacttttcttaaagtgttgtaaagtattagatggttccaaactaagccctcaaaaagtcttttaaaatcagttagctaaactaaagtattgatgatactaactttagttctgggtctagggagcagacagaagaatagagtttcctttttcgtatacgttcagagagagccttaaaatagagttttgaagtgggtgaagtttgagttcatattgatctactaacggatagcccttctgtcagagcagggcccctttcttcaggccagcgagcaccttgtgggctctttataccaaaatctttttcagccctgccttaccagtcagacacaaagtatcatcacgcctccaagttagagagctttttccttcacctccaattcaat

SEQ ID NO: 27734 - DNA, 1077 bp, Homo sapiens
aacacctgtcgatctgccacctacagtcagcatttagctttgtgctccgtattctttatcgcttacttacccagctgtgcattgctctctccatccataagtccatcttccttttgatgctctttaatattgtggacatcattatcctttacgcataaacacttcagcatgcatatcaataagtagtattataatgtttctttgtggttctttttaggatttatataagatgcataaatcttaagtgtaacattcagtgagctttgacatatgcataactttgtgtaatctggacccctatgacaacacaaaagaattactctcaccccagaagtgcttttgtgcctttttccagtcatttcctgcccccacgtccaccagagaaaatcactattcggattttgttcaatatgccttaatttcacccatcttagaacttcatgtaagtggaattacacagtatactctctatcagaaaattagcaggttgatttttttttatggttattgttgttgactttgtcctattgtctgcaaaaaaagcaggttcatacagactgtggagttctttcccattccttgcttcccaccaccccataaaaaatgtgggggcatccactgagaaatttggagctggcctgagttttcacgtgcataaggtctctgcttttggatcggggccactccctcagtttacataggtgggaagggactcctctgtcatcttgagtatcgtagaaatgacgaaatatcatagactgggaggcttaaacaacagacatttatttcgtacagttctagaatctgggaattccaagatgaaggtgctggcacctttgcttcattgtgagggtccccatcctggctcacaggctgccgcctccttactgtgtcctctcatgggctcaccccacgatctcaactaaacctgtttatctcccaacaactccacctccaaataccatcacattgggggttaaggcatcaacatatgaatttgggggggatgctaatgttcagcccattatcaactcccttctctcgcccccatatcaattgcttgctgatttgtctgtc

SEQ ID NO: 27735 - DNA, 1047 bp, Homo sapiens
atatttatactaccatcaaaaacaacatatttaaacttctaagagtaaatgtaggggaatatctttgtgactttggaataggtaaagatagcacagatgggacatgaaaggtaaactatttatgtaagtatatagaaagaaataacaaaaatgttttaaatcacctttcaactgccgtcagaggaagaaatttcactgtttttcttctccaactacatgtaaaccaaaaagtatcagagtcaagtaccaatttagatgtttattttgccacagttgaggacatgccacagaaagaggccagtggctttccccaaagatgagtttgagagcctcattgtttaaaaaggaaaagtaggctggaggggaaagaggaaaggtgtggtaatccacctgtgacaagagaaaaggagcaggtaggaaaatagttatgcattcatctcacactcagtaaatcagcactttacataagatacggtgtgcatagagtagctactatggagatatttaacgttttatctgtagctatctccttaagaacaaaaggaaaggcagcttcttgcatgacttagctttcagcttaatgtttttccttttggcagagtggactggggtccctagttttattttcttttcataacaccatagtatttgttcacttctgtctcaaagttactggctagtggatgtatgctgtgttcatcataatcaccacatgatagcatctttgttccttcacatttccttcttttcacccctatatgtctgtgtttttaattttatttttttagtcaaaacattcacttaaaagtatagtgaatactctaatgaaatcattacacccaccactttaatttacagttcttttcctgtatttctactggaatttttttcaaaaaattcggagaaaataatataatgaacccagtacacattattcagttctaaaaattatgaagtgtggccagtaatgctcaattgacttttgagggtgagaaggggtgtttaagcacatccagacatcattttcactcatgaatgttccaaaag

SEQ ID NO: 27736 - DNA, 2822 bp, Homo sapiens
aaaaaataataatttttactttatgtaacatatctgggatcaagtggactgggttgtggagcaagctgggattttgggggtttctgttaagaattagcttcattgaggtataattgagacaataaaattatctcccattttaagttctagttgatgagttttgagaaatgtatatagtgaagtcttgatcatcaaatcaacatatgaacatttttcatctcccaaaaatgtaggagctgtttttttatcttaggagaattttaatgaaatatacgtggaggagctaaatgtttcaagtttgcctcatattcatatctaatttattggtaactaatttaaaccactttcttacggctctcagtttctgttcctacaggatattaactcccacagatggcaacagatggcaggagtgagaccaaacagtttgcagtgttctccattcacaccctggaaatgaaagttttctctatttttcctctccaaattatcttggaagggatattcaatttttttcaaatttactatgaaaaatattgaagtaggaactaaagtagagagaatatataacagatctctctgttcccttgttgcaccttaacactttgctcttcttatttcatccaaccccctccccaccccatgctttctgttttcaggctagagcatcttgaagccaatccaagacaccattttatctgtaaatttactgcagctacttctctgaggactatttttgttgttactgtcttgccttttaacgtaactagagtaccagaatcatactcaacaaaattagcaatgtattaatttcactcattacccagtttatgcagaaattttccaggtctcaaaaatttctccttacaattcagatttcacactcaggttcattaagatgggaagcatgagagaagaaatatctagaaaccagctcagtagtgccccttgtctgttttacttctctcgttgtgatctaggtaaaggaagtttccctaccttggcaaacttcccatttgcttgcttaggtgctgaggcttgttcattctttccttgccatagctttttccttcccttccttccttctgcctgccaggctcatctcctaattctacttctacccataaggacaaataatgatcacaccacttacctaattgcctggccctagttctggtcccaactataatcagaaatgtggattctggaatggcagtgaggagcgacgtggactgtatctccagtaaaacaccataactggtaatttagaaaaccaaaaacaaccatttaaactacacggaatttgtcttaagaccactcaggaatttagagaaacatttattcagaaaaatcaactgagcctttctgagaacagtgagagtctgtaacatttgacacacaaactgctaccctccccacccccattttggtccactctgagagaaactccactgtgggctgtgaaaatcacaagatggaaccctgtccctctccagttctcagtctatggtgacagcttttccctgagagaggcacgatgccactattcttaacttctctccccctgccagtcctgtgttcctgaagctggtttcatgtaagtatagttgagaagtgtgtttgggtgtggacctccttgaatttattcttggagtttgttgagtgtgctggccttgtagattcatgtctgtcttcaaattttgaagttttggccattatttcttcagtaatctatcagcatcttctagacacccatatatatgtccagttaatggcaccttataactcttttggctctgtttatttcattcttttctcttctgcttctctgtctctgaaatttcaaattcttctctttatgtttactgattatttcttctgcctgctcatctgccgttaaatccctctactgaatttttcaattactgtgttttcgggtccagaatttttgtttgcttcctttttgtaatctctgttggtattttgttcatatatattttcctgatttccttttctctacccgtgtttcatgagtttttgagaatattttagacagtctaaaatctgtctagtttgcctgaagcttatgtttctccggggaaggtttccgtcactttattttcttccacttattgggccatgttttctgagtttttgttgttgttgttagaaattaggcattgtggaaaaaacaacctccttttccggtttttgcagactgactcttttccagggaggatttttgctattatcttggtattcgttctaagctttgggatcaatctgaggagaaggtttaagattttctcaggcctttttggagcatggatcttacctttgcttgtggctttttccattttctcataggcaactgcttttaaatatttatttgtcccaagagtctctcctctgggcctttgatggtctgttgtatgtctccacccataatatcttgccccaggcatctgctcttcaatctgtctgcatctttgccaagcatgatccagtgcttttcttccctaaggtgtgagatcctcaaaacagagcagtccctcaggcagcctccaacagcttagaaccttgtaagaaaggtctactgtgctttctcaggtttgagggaaggaagtggaaactgagatgctgctttagaagctctgttgtattctgcacctgtaattttttgccccagggatctataggcaagttcaccatgagatttttccattagacaacacttggacaggatagaacattgggaataaggtgtattgggctgcaaatatgactgtctcctgttttgtttttgttgttgttgttgtttt

SEQ ID NO: 27737 - DNA, 1078 bp, Homo sapiens
ggactacaggcgcccgccaccacgcctggctaatttttgtatttttagtagagatggggtttcaccatgttgctgaggctggtcttgacttcctgacctcaggtgatccacccacctctacctcccaaagtgctgggattacaggcgtgagccaccgcgcgtcaggctggctgtctcttccagacctaagaaaggcttagaacaaaggaggtctggctacattaatggagattcgctgcagatgcaaattttcccactaaagatagctttgcggggctatccatttcaatctgttgcccctgtggcagccacttcaaaacatgtcaaagaagtatattttggggtaaaataatttccttcagcatctgctgtcatgtgatgctgtaccagagtcaggttggaaagtgagcctcattatataagagtaataaaactcatctgatgagattttatggtttctcgggcaggattccccaagcctcatacataggcatttgggcaagggaaaaaaggtgaatttagtcctcaccaggttggtagggcttcctcggttattggagtgggagtaacagcaaccattgggcccagcagtttttttaaatgtctctggggctgtggactgaccatccaaataactgattttaatcatttcattatggaaaaattgtcagcagaacccccaagtagagagacccatcagtcaagatatacctcatgaccttgcaagctaatctagcttgacccagatcccctcctaatctgtgcagattcattgaggaatgtcatagccatgcctactggttaagacatagtcctttacagtgagagttgaaacccaagctctatcactttcttggctgtgttgctttgagaaaggcatttaaatgttttgtgcctgtttcctcatctgaaattggtgggtaatagtcacttcataggacagttgtgaagattgaatgcagaaaaatttgtgccacgcctggaaccgtccctggcatatattaaattctaaaaaagtgttaaatattataatgaatatcaacacttccttattctggaagcaccgacaggatatgct

SEQ ID NO: 27738 - DNA, 1035 bp, Homo sapiens
aactatgggatttataattaaaaatgagtctatttgaaacaccacattataaaaagctattaactgaatctttaaagtgacagtaaatgatgacttaacattttaaagagatacagtcacatcgcatgtgtgaattcagtcatctgtataaaatggcatcattaccttgatcatttcttcttctcctgctgttttactttttgcttctatgtcccctgcttcattgcatctaataaagcagctatttgaggccaacaaagccattttcccctaagtgaaacaaaataacaaaatagccatgaggatacttcttgtggaagaaacattaagtgcttagactgaattaatttttcctccctgatttaaaagtcacagaaaagaactgagagaaaaacctcaaaaatataatacaagaacatatagaaaaggaaaccaaaatcacctttcattttactattcaaagattaccacaataaacatttgtagtgtatcttcctagtaggattgcttcctttctaaaagatctactgaagataaaactgatttagttctgcttggaaaattaactttaaagacaagaacataattatgaatgcatactttattcagatattaacattttaagtaaaatttattttcttcacaattagaaaacatgaaaaggtacatacaatgcctttggtgttttgaatttaagaatcaatgtctgagggacttttgtgtgtgaaaataaatattcatatacatttttagttgtttaatgtttgatgtattacactggtttctattaaacaaaactgtaaaacctgattttcttgtgtatttaaatctgggttataaatttggttagcttaactcccgtaacaaatataacgtttatttataacttgtatttggttgattcttttggaaaacttggaataccataacatttagacaaaatatttataaatacaatgattacaaaatatgttaaccttatatcacatccagttaaaaatgtgctgataacatggatttaatttcttagtcaag

SEQ ID NO: 27739 - DNA, 1053 bp, Homo sapiens
tttattttttcttattgcttgaggccctttctggaaggtaagtctggattatctacttcacactgttttagagaagacttgtggtttccatttaccccttactccctccgctccatggcctttcagggagaacactgtgggtatcatgctgggtggcctggagggtccaagtaacaggaatctagaaggatggaccagatgtgaacaaaagaaagcctgagtaggacacaaaacagagaagtggggctgtaacatctctaagatattacagcttgctacttccactctctttgcaaatgtggtgaaacccaggctggagtcataaaataatagcataggatcattaactaaagtttgtctagtgcttccttgtgttcacacattatctcattgaacctctgacgatgctaggaggaggtaaatagggttttcctcttaccttgggtgaactgaggtcttctgactaagtctcaggtcctttctaccatttgtgctgcatccacatctctactgggaagaacacaggctctgcagtcagacacacctgggtttgaaccacctccattttgtgtgtgttggatcttgagcaagtgaattcacctttgtgaccatccatgtcttcataaaataagaattttaaacacacatgagggcctggcatatacaaaacattgaataaatagcagtgatctttttattgacatcagaagggggttggggacccagaggctatttgggctcctatggcatagctcttggaacgtgttaattttcaaggacaggggtttgcaagtcagagcaatgtcaagtaaagaacaggttctttgggaggccaggatatgctaatgggtgaacaatgtaagggaggcataataataatgccaaaggcctcctagagtacctgttcactgcacttttgggtctttggtttatatatgaagaaaatgaggtgcccccagaggggaagtgggttgccattgttacacagtaagttaataaatggcattgctgagattagaactcagtcttttgtctgccaagaaagcttacttt

SEQ ID NO: 27740 - DNA, 1081 bp, Homo sapiens
ggggaatggaatttttagggtaaatggcatgcatattaattatttttttttcctgaagctctttctctcccttcagaatcttatcttggctttggatcttagaagagaatcactaaccagagacgagactcagtgagtgagcaggtgttttggacaatggactggttgagcccatccctattataaaaatgtctcagagcaaccgggagctggtggttgactttctctcctacaagctttcccagaaaggatacagctggagtcagtttagtgatgtggaagagaacaggactgaggccccagaagggactgaatcggagatggagacccccagtgccatcaatggcaacccatcctggcacctggcagacagccccgcggtgaatggagccactggccacagcagcagtttggatgcccgggaggtgatccccatggcagcagtaaagcaagcgctgagggaggcaggcgacgagtttgaactgcggtaccggcgggcattcagtgacctgacatcccagctccacatcaccccagggacagcatatcagagctttgaacaggtagtgaatgaactcttccgggatggggtaaactggggtcgcattgtggcctttttctccttcggcggggcactgtgcgtggaaagcgtagacaaggagatgcaggtattggtgagtcggatcgcagcttggatggccacttacctgaatgaccacctagagccttggatccaggagaacggcggctgggtaagaaccaagccccttgtgtgtcccttttctttggcctctggtcagagatccccaacagcccttcttctgtatctctttctgttgtgttgggtgattgttggagacgttgatagttgaggaaacctgactggcctcatttcaccacaagaggttaactccttggaaatacaaatgaccctgtgcttcagagatcaggcatctttcaccctggtcacccccatgactccactattccatacttgtgttccagtttctcagcaaagaaaactgtagcctatgtgttcattaagtcccaaacctgtgagggtaggaagttagttcggtgt

SEQ ID NO: 27741 - DNA, 1062 bp, Homo sapiens
tgtgtgtgtgtgtgtgtgtgtgtgtgtgtgtgtgtgtgtgtatgtgtgtatgtgcaagacagtctcgctttgtcacccaagctggagtatattggcgtgatcttggctcactgaagcattgacctcctgggttcaggctgccccctagtaggtgggactacagacgcatgccaccatgcccagctaatttttttttggtatttgttgtagagatggggtttcaccatgttgcccaggctggtctcaaactcctggactcaagtgatcctcttgcctcggcctcccaaggtactgggattacaggtgtgaaccaccacacccagcctggattcaatttttaccagtttatactccagaacatctccatattcccactatagtccttaaatcatataggcaggggcgtagcctgcagagcctactactcaaatgccataaatttttacggaaagaaaaatagcaactgtcaccctaacagaactgaaaataaagtaggcaggttcgtggaactcttcctcagatactgccagtgggacttactgttgcaatttctcgagctcctcagcctccagctctgctgtacttttgcaggtcacagcccgtgcacggtgtttggtttgcagtacaggagtctgtgggtctctgcaaatcttggtcacagaagatttggagggtaacaggtctgtaaacagagatgacagatgttcatctagatccgcaagacccagtttacttgtaagtggtgattcacctatgtagcccagagagggataaaccaaccacagagtggtgggcccacaacagtcagctcagcttacattggtcaaaccaaccaacattcagttacttctcccctattcctcttttattgaggggtatgactaaggtagcctttgggtaaactctactgtcatcttctgaactgaaaatccatccatgtctgacaggttccttatcactgcacgggcctagactgactttcttttttttgagacagggtctcactctgttgcccaggctagagtgcaggggcataaaggctcactacaaatccaacctccc

SEQ ID NO: 27742 - DNA, 1035 bp, Homo sapiens
cacagccgagacctcagagaaggcactgcatgtattcagagcacacattttgtatcagccactttcaagagtattatttcatttaatcctctatacgaatcttacaggtaaggaaaataaatccgtattttagaaattgaggaaactgaggttcagagaaataaagtaacctgcctatggtttcccagccagtaagtggcagctcttctgatagcaagtccaaggttctttcccctttcagatcaggcactagaaagaatcttaggctgaaaatatactgagttgtgccagtaactgggaaggattgtgtttgttttatggaaacaggttctgtcagcttctctatagtctatagttgttaagattaaaatgtgagaccagaagagcagctttgaaagagaagtagaattctttcacagttttgctgaggaaggacaagtctgaaggaacaggccttctgcttatgtaagacaaacccaggaatctttctggatcagaggagttttcagacaaagggcagagagagactagatccccaaaagggttcctaggtaacactagcagctttggttatccaagaggctgctggtgactgtaggtagggacttcctgtgccttttgaaaagtgtaggagagtaggatcagggtgttggctcttttctttgtgaagacatagccccattaaaagcagatcaaggtgagcacatggctgctgctttcctcctttggttctatcagtacaagctccttagccaccaccagcctctttcctagaagcccattactcactctttcagtagcagcctactaaactattgtgtcttgtttgtgcttgttcaggagaacagatgaggtggacgtgtgggaggtggggacgtaatgttctctttctgagtttgtgtggagtttccagggctaggctcctctctcacatcagccaaattgatgtgacttgtttccttctggctgccattcccaactttccagaggctgaggtgcatgatttcaaattgaagggggagtagaatttgactt

SEQ ID NO: 27743 - DNA, 1049 bp, Homo sapiens
cgagagatccctttatccaggagtgggcagggcctacacagccctggccttgtctgggatgctggggaggacaagctctggggcctgaggagccgagaggttcacctactgagaaagtgggtgaaccaggcgtggtggctcatgcccataatcccagcactttgggaggctaaggcaggcagatcacttgaggtcaggagtttgagaccagcctggccaacatggcaaaaccccacttctactaaaaatacaaaaattagctgggcgtggtgatgggcacctgtaatcccagctactcaggaagctaaggcaggagaatcgcttgaacccaggaggtggaggttgcagtgagccaagatcacaccactgggctacagagtgactccatctcaaaaaaaaaaaaaaaaaaagaatggaggtgaaggtgagcctggcccagtggggccacgtggggatcagtgcccttgcccttcgccaccacccctcagcccaggacacatacagagctccatcctgcaggctcctgtgtcagggacaggccctcctgaggcacctccaccgggagcctgttcaagggtgactttcccaggaaccaggaagtgaccaggccgcgttggcgtcatcactccgacctaaggactgcaatgcaccgaacccagactggcttccgggagggctggaggagggcctgcaggggctttggggccagggccctgccccgtgaatcattcacacatggtggcctggagtggctctgtttgctctgagaacacggggagcaggctgtgtgtctcggctcgatctttgcacactgaattagtgtttatttctcaccgcctgtgcttggcctggaggacggggccagggagaacacccacacacaggcagttcatcctgggagcgcttccccggggcatcagtggccagtaggtgttgggggaggggctctaggaagtggagcagtctggtagcaggggtagggaattgtcccacagtacagatgggcaaatcaaggctggccttggaggctcccagaatgtctgagagca

SEQ ID NO: 27744 - DNA, 1026 bp, Homo sapiens
gcctcagcctccccagtagctgggattacaggcatgcgtcacaccacacccagctaatttttgtatttttagtagaggtggagtttcaccgtgttcgccaggatggtctcaatctcctgacctcgtggtccacctgcctgggcctcccaaagtactgggattacaggcgtgagccaccgcacctggccaggttgttttttctatgtaagagtagattatatcctcactcccatttacaatagttcagagcccattatgaactccagaactactacagttcctttgctggattggaattttgtcacgaatatactctgttgaataaggggcattgatcaggctctgcagactgtcaagggggattttgctgcaatgctgggggatttgggcaggatttttcttactgttagcactgcacctttgcattgattcactgttcttccaattctgtttagaaatctgctgtctggtaatctcacttttgattgcagtttatttgcttttggagtatagtgttcattaggatggtaatagtctggcccaagaggagatgagccagaaatacctgtattctttccctggagggaagaggactggcttggctgggatgggaagatcaagtggggggagggggtgttgattgttcagttctttttttttttctttcattttttcactttttggcctatcattcttgtttcctataactgttcagttctgacactattgtttatttttactatagtggcattaaaaaaagaacctgggggccgggcacggtggcttacgcttgtaatcccagcactttgggaggccgaggcaggtggatcacaaggtcaggagatcgagagcatcctggctaacacaggtgaaaccccgtctctactaaaaatataaaaaattagccgggcgtggtggcaggtgcctgtagtcccagttacttgggaggctgaggcaggagaatggcgtgaacccaggaggcggagcttgcagtgagcagagatcacaccactgtgctgcagcctg

SEQ ID NO: 27745 - DNA, 1804 bp, Homo sapiens
agatggagttttgctcttgttgcccagtctggagtgcaaaggtgccatcttggctcactgccagctccgcctcccaggttcaagcaattctcctgcctcagcctcctgagtagctgggattacaggcacccgccaccatgcctggctaattttttgtatttttattagagacggggtttcaccttgttggccaggctggtctcgaactcctgacctcaggtgatccaccccaccttggcctcccaaagtgctgggattacaggtgtgagccactgctcccggccttcctgtccccttcttatcctttgtccttgtgcatcccttctttctagtcccaaaggctgccatcccagaacagtttcttagccctacatgcctagttatggcagttacatctccacctccattctcccatccagactccagtttgccctggagcacacttaactacagcacaacttggatcatcctgcttctctcaactgtttaccttgcgtaatgaagtctgtaggcctcagtttggcattcaaggcctttcctaatctaatctgcaacgtaagagcctccaggccctcatcagtgtcctcttcctttgacctggtcctgcctgtgcaagaagctcttattgtagaagtacagtttgttagagctgaagtggccttaagaaaccaccagatcagtcttcctcaaattggtgtgtccagagtcagaaatactctccccgcaaccccagccttggaaccctggagattcaagcacacattgacacatctcaggttctgaaaagtcctacagtaaagaaacttgcttaaccagtatctgtgaagcacagttaatgatggaactttttggtttctttttttttttttggcagggggagagtcaagtaaaagctttgtaaagtactgatcttttttggcattttattttattttattaatgtatttatttgagacagagtctcgctctgtcacccaggctggagtgcaatggcacagtctctgctcactgcaacctccgcctcctgagttcaagcgattctcctgtctcagcctcccaagtagctgggattacaggcccatgccgtcacgcccagctgattttttgtattttagtagaaacggggtttcactgtgttgcccaggctggtctcgaactcctgagctcaggcagtccacccgccttggcctctcaaagtgctgtgattacaggcgtgagccactgcgtccggccccccttttttttttagatggagtttcgctctgtagcccaggctggagtgcagtggcgcaaactcggttcactgcaagctctgcctcccgggttcacgccattctcctggctcaacctcccgagtagctgggaccacaggcgcccgccaccacgcccggccaattttttgtatttttagtagagacggggtttcaccgtgttagccaggatggtctcgatctcctgaccttgtgatctgcccgcctcagcctcccaaagtgctgggattacaggcgtgagccaccgcacccggctcccctttttattttattgatttttttttttttttgagaggcagtctcgctctgtcgccgaggctcgagtgcagtggcacgatctcggctcgctgcaacctccacctcctgggttcaaatgattctcctgcctcagcttcctgagtagctgggattacaggcacacactaccacgccaggctctttttttttttcttttttggtcaagagggggttttaccatgtcagccagggtggtctcaaactcctgacaaagtgctgagattacaagcatgagc

SEQ ID NO: 27746 - DNA, 1054 bp, Homo sapiens
ccttgatatgaatcttggttctgctgcctcctggctgtgtggccttgggatattatctaatatttttgttccttagtttcctcatctataaagtggggatgaaatcatgcctatcatagggttgctgtgaggattaaacaagatgaaatatgtcaccctgcctaggatatgtgagtctccataatctactatcatcatcattatctactattgcatcagccacgctcaggtctttgattttatgccattctcctatctacagaatctagattttcacaactatttacaccttgtttgaaacagtaaaatatggattttggggggttatgtttctttatctcctcccaaaaatggatcatttagaatgattttactagacagaaagccggtatagagacattttaacctcactctgaagtttcttcttttttgagacagggtctcactctgtcacccaggctgaagtgcagtggcatgatcttggctcactgcaacctctgcctcctgggctcacgtgatcctcccacctcatccccccaagtagctgggactataggccaccaagcccggctaatttttgtattttttgtagagacaaggtttcactatatttcccaggctggtctcgaattcctgacctcaggtgatccaccctcctcggccttccaaagtgccgggattacaggcatgagccgtcgtgcctggcctgaagtttcattttcaatgggggtataaagttttctgggcacatgctcccaaagtagatatgtgaacaaaccttgtcacaaatgtgtaagaggtttcaaagcgaagtactgtatttaagacgtgtttgcagatgtttcagttttggctgtttcttttcaatccacttgctcacagatgtcaatactcagggttaggcctgtggtttctgctttgtaagtcaaaattgagtgtgtctgtcccaagagggctttcccttccttcccagaggacgtgtggcttatgggcactctggttctgctgcttctcctctgagcaccccctgcctctttgcacccactgggtacac

SEQ ID NO: 27747 - DNA, 1028 bp, Homo sapiens
tgcagcattggaagtggaaataccttttctagtgcttaggggaaatgtaggccaagaagctgatctctgtcatggaatgctgtgggtgaacaggcctatcccgccttactctgtactattttgttttacttatgaatagtcctagggaggaccttacagttgctatccctcccttgtaatccacatatgctgaaggcctcccttgaaggtaaacagcaggcagtcacctgtcatcctttgctgtgtatcacaggtgtgagcctcagcagcgatttcattgctggcttttgtggtgagacggaggaagatcacgtccagacagtctctttgctccgggaagttcagtacaacatgggcttcctctttgcctacagcatgagacaggtgagccctggggttggggaggactgacatcattcctgaccagtttgggggtggtgactgtagagaacagggcagaaaagagagtggcggcaaggcagtccttgagaaaccacaggctcttacgattcacttccgttcatttttctagtacactctgtctactctgaaacggttcagcaatttgatgatacatgattactgtgccagtattcctcattaaaatattttaaaattatgtttagattgtttgcaatttgaatatggaaggagaaaaccttttctttacgagaaacctaaaattgtttcttaacatgcagaactcctttttggtctgcagatgtgatttattttaccggggcccctggtcatcttcccagccatcctcagtgattcctaacttctgttttcctaggcaagtgaactcacttggaggcttcccaggaaacaaagcagattcccaggcaaagcagaaggagattaggaaagaaggagagattagtgcacttttcctgaagagaaggatagtcctggttggctgtcattttcttgattgtaggcatggatttgcacggttcactcctcattccctcagtcacctttgtggcaatgtgcttgtgtttgggcaggaggttgaaggccccctg

SEQ ID NO: 27748 - DNA, 1063 bp, Homo sapiens
tttcactctgtcacccaagctggagtacagtggtgtggtcagagctcactgcagcatcacctgcctggactcaagcaattctcccacttcagcctcccaagtagctgggactacaggtaggtgccaccacgcccagtgaattttttaattatttgtagagatgaggtctcactatgctgcccaggctggtctagaactcctgggatcaagtaatcctactgtcttggcctcccaaagtgctgggattacagtcatgagccactgtgcctggcctccctgctctagttctaagtcaccagtttgctatcatcctcacattctggcagtgctgtcttctcttgccctacccccagataatcagttccttgatttggcccctagctgctcccctgctctgtgaggcattttccataccccacctctccaagtgcttcctggtctaaagttgtctccttcctctccccttccagctctccctcagtaccaaaactcactccttcaggatagagacattctgtttaaatagactgagatggtgacaaaactccccaacctttctaggccatttgcctataaaagaaggaacttaataacattaaagtgaatcttagtgaattcaaggccatagacttgtggaaaattaagattttacttgtattttaaagtatctgttagtcacttaataattttgcttgtttagtaatttttaaagattttttttctttcatttagattttttagactacagttgcaaagagtatagaatattgtacctttaacagaatgtccgtttattcattcaaacaatggttatctattggaagtcttctaaataagcaacttttataaaaagtctttttaatctttttatatgaaaaatacttaaatatactgaaaagagggaatagtataatgacccctctgccccagctaacaatcacctaaatttaacaattgttgcattttgccatatttgtttcatttacttttattttttatttttttttggctggagtgtagtggtatgatctcggctcactgcagcctccacctcccagattca

SEQ ID NO: 27749 - DNA, 1052 bp, Homo sapiens
gcagatgtggcaggtcatctcattggaaaggtaatgggccacatctgctctttacacgtgtatagcagggttcccctaaccctaggtggtagaatggtacctgtctgtggcctgtgaggaaccgggttgcacagcaggaggtgagcagcaaagctggcattactgcctgagctctgcctcccgtcagattggccacggaattagtttctcaggaacacaaaccctattgtgaactgcgtatatgcaaggcatctagtttgtgcattccatttccttttttttgagacaagttctctctctctctgttgcccaggctggagtgtggtggcgcaatctcagctcactgcaatctctgcctccctggctcaagtgatcctcctacctcagcttcccaagttgctgggattacaggcacataccacaatggctggctaattttttattttttaatttgttgtagagacaacaaataaacatggtcttgccatgttgcccaggctggtctcgaactcctgagctcaaacaatccgcctgcctcggcctcccaaagtgctgggattatagatgtcagccaccgcactggctcaagattgcatgctccttgtaagaatctaaatgcctgaggtggaacagtttcaacacacccctgcttccatgtctgtggaaaaattgtcttccatgaaaccaattcctagtaccaaaaaggttgggaaccactgatgtttagcacctgccgtgaggcagctaccacaatgggagatggtgaaggtgtagaaatgaatgatacttgttccctgcttgcaggaacctgccagtttactagggctggcagaagtgtcagtaataattaacagcaaagtgtgatgagtcttgtgatggagagatagaatagagctttgggaacccagaggaggaccccacctagacttcgggggtgatggccagagcaggcttcccagaggaagaaagctgaaagtaccataggccactagagagaagataaataccagccagagaacagcatgtgtaaaatcctataagctagtgaagat

SEQ ID NO: 27750 - DNA, 1061 bp, Homo sapiens
ctatgtcaggggctttcagcacctcccacccccgcctggtccagggcttctgctcatttgagagggagacagggaagttctgagcctaggagctgaagagaggacactagggaattccccctgcctctagctccagtagtaccaactagaactgattctccgtgttgggatctccacccgttcgtccagggttgggagagaatcccactcatgctcaccccccggggctctcaagtctcatccactttctggttctggaatctctgccctcccttctgggctttttttgtttaagactgagtcaaacagggtcttgctgtgtcctacaggctggagcagtggtgctgtcaacggctcactgcatccctgacctcctgggctcacgtagtccacctcagtcttctgagtagctgggactgcgggcattcaccaccacaaccagctaagttttaatttttgtagagatggggcctccctatgttgcccaggccaatctcaaactcctgggctgaagttatccacccaccttggcctaccaacgtgttgggattacaggcgtgagccaccttgaaaggacccccatccacacccatatgggctcctgggatcctcatccttgggagagattttcgaattcctccctcaccccctaggacttctgcatacaaggcctagactcccagcatcccttcccacccacttgtccagctttctctgccccccagctgcctccccagccctgctccccatcccccgccctcacagccggcttcttccgagtgaggtggttgaggaacgatttccaccaggccttgtccatgtcagccggcctctccttgcgggcctgcttgggtgctttggtccttttgtgggaactatagtttcccatggcagggctggtcaccactggggacgatggcccacactccgtctgctctgccccctgggccctggcaacattgtgacctcacgggctgacctcaccaattgcaggctctgagcaccgccttccagggcccacaggtgaatctgggctccactcagtcacttctagccttggt

SEQ ID NO: 27751 - DNA, 2494 bp, Homo sapiens
ggacactgacagccagcgatatccttggattggccgtagggtgtggaaggcaggcttagcaggcaggggctccacccaagtgggactagagaggcttggatttaagagagagctctgattttggttgcaagtcctggctcagcattttctcactgttgtgacactggataaattgcttaacctcttggcctcagttttatctataaaaggggaataataatatccaattctgaaattgtacagattaaaaaagaaaagtggctaggtgcggtggttcatgcctgtaatcctagtgcttcaagaggctgaggtgggaggatcacttgagcccaggagtttgaggctgcagtgagctctggttgagccacatcactccagcctgggtgacatagcgagaccctgcctctaaaaaataaattcccagcaccaggcctggagttgtgttgaacattttacatggaatcgttcccggtagccattattaccttgggattcaatgggtagagtgatttcattatacagatgtggaacttgaaactcaggcgtgaggtaggttttgagtgggtaggaggttgggaggacaggagtgactaggcaggtgtgagccctgccttgtgagctgttggagtgagtgaccccctagaagtcaaaggtcatgtggtccttgactctgccaaccctggcctacgtgacgtgtcaggaccttcgtagcattgcagaccctgcagagcagatggttatggtgatcaaagcccctcctgagacccagctccaagccgtggactcttcggaggtgagatctgggaactccgggcccaactgggctgggctgggctgggctggtggtcacctgggcctcagtttaccctgcctgctgcttccacccagaactttcagatctcccttaagagcaaacaaggcccgatcgatgttttcctgtgccctgaggagaccgtaggtgggatcagccctgggaagaccccatcccaggaggtcacttctgaggaggagaacagggccactgactctgccaccatagtgtcaccaccaccatcatctcccccctcatccctcaccacagatcccagccagtctctactcagcctggagcaaggtgggtgatgggtaggtgggtggggtggggcagggcccctcttctggggggtgggcaggcacgacagcccctgccttcctccctgctggggcatccccggcctgtgatgctccccgtctccccagaaccgctgttgtcccggatgggcagcctgcgggctcccgtggacgaggaccgcctgtccccgctggtggcggccgactcgctcctggagcatgtgcgggaggacttctccggcctcctccctgaggagttcatcagcctttccccaccccacgaggccctcgactaccacttcggcctcgaggagggcgagggcatcagagacctcttcgactgtgactttggggacctcacccccctggatttctgacagggcttggagggaccagggtttccagagatgctcaccttgtctctgcagccctggagccccctgtccctggccgtcctcccagcctgtttggaaacatttaatttatacccctctcctctgtctccagaagcttctagctctggggtctggctaccgctaggaggctgagcaagccaggaagggaaggagtctgtgtggtgtgtatgtgcatgcagcctacacccacacgtgtgtaccgggggtgaatgtgtgtgagcatgtgtgtgtgcatgtaccggggaatgaaggtgaacatacacctctgtgtgtgcactgcagacacgccccagtgtgtccacatgtgtgtgcatgagtccatgtgtgcgcgtgggggggctctaactgcactttcggcccttttgctctgggggtcccacaaggcccagggcagtgcctgctcccagaatctggtgctctgaccaggccaggtggggaggctttggctggctgggcgtgtaggacggtgagagcacttctgtcttaaaggttttttctgattgaagctttaatggagcgttatttatttatcgaggcctctttggtgagcctggggaatcagcaaaggggaggaggggtgtggggttgataccccaactccctctacccttgagcaagggcaggggtccctgagctgttcttctgccccatactgaaggaactgaggcctgggtgatttatttattgggaaagtgagggagggagacagactgactgacagccatgggtggtcagatggtggggtgggccctctccagggggccagttcagggccccagctgccccccaggatggatatgagatgggagaggtgagtgggggaccttcactgatgtgggcaggaggggtggtgaaggcctcccccagcccagaccctgtggtccctcctgcagtgtctgaagcgcctgcctccccactgctctgccccaccctccaatctgcactttgatttgcttcctaacagctct

SEQ ID NO: 27752 - DNA, 1056 bp, Homo sapiens
cttgaactcctgagttcagacaatctgactgtctcagcctctcaaagtgctgggattacaggtgtgagtcaccatgcccagctgaaaacttaactcttaactcttttttttttttttttttttgagatgaagtctcgctctgtcacctaggttggagtacagtggcgccatctcggctcaccgcaacctctacctcctgggttcaagcgattcttctgcctcagcctcccgagtagctgggactacagacgtgcaccaccatacccggctaatttttgtatttttggtagagatgaggtttcaccatattggtcaggctggtcttgaactcctgacctcaagtgatctgcccgcctcggcctcccaaagtgccaggattacaggcgtgagccactgcgcctggccaaaaacttaactcttaagaaactagaaagttgacggcaggatcccagccctattcatttttttcctttttttccctaaggctatttttgtttgtggtggttgtgacagtttttgttttttaaagttttaaaaattgtagtttttcctgtatcattcacaccattcagatatggcactggtctcccacagtccttccagaggctgccccgaaatgtattctataataatataaactgaaccagagaaaagtttcatgagctttttaatccaaaagggatcatataaatatatcgccctgtgacagtgttttgcttgtctgtatgtgtgaggggattcttgtcaacctgcctcggtccttgacagctgcgtggtgttcaaggggctaaacaaagcacagctttcgtgacccccttcatggatgggtgttcgagtcatccagattttttcagcagtgaatgtcttcacccctgcgtttcggggcccctctgccagtgtttatctagggagaagtggcagaaatggcatccactcaagcctttgttttagggcgtggcactgacctgccttcaggggtggacaagggtggggatcccagggagaaggcaaggggtgcagatggcagaagcatgctagggtttgggccccaggggc

SEQ ID NO: 27753 - DNA, 1046 bp, Homo sapiens
ctgaagctgcagaagggattctagtgacagtgtttccttccacattgttcacttttacctctccatgagtgcatttggggtgtataagaatcagactttgaacgtggctctctcctaaaccagaacaccatgctgtactcaacctctcaaaacgaagcccacgtcaccacaatttgtgacttcagatgggttgctttctatgacaaatttgaggatctttataaaaataaattttttttcctccgcttgtctcgttccagattcacagggggagagtttgtcttagttcagccttgaagggcatttggggtgagcaagttttgattttcagcagagggtgccctgtagagtgggacccactctcgtgctgcccagatagaagacagagggagatgatgatcatgtaatcctttagataaaaaataaaaatgaaattaattaaaaaataaagaagacagagggagagctgagctctcttctgagtgttgttctgagaaagggcttctgaacggaggggacctgttttctgtgctgggactctgtgctcaaagctgctgcagatgtcataatttaataaacaagacagaagccaggcggaatgcaagtgtgggtcccagtgtctgcgacagaaacctcattctcattgctcttctggcctctccctccagcttctccttgtgggctggatgtcagctgggagaaggatcagggccagaccacatcagctcctttaggacactcctttttatttttatttatttatttttgagatggagtcttactctgttgccaggctggagtgcagtggtgcgattgaggctcattgcaaccttcgcctcccaggttcaagcgattctcctgcctcagcctcccaactagctgggactacaggcgtgtgccaccacgcccagctaatttttgtattttaagtagagacggggtttcaccatgttggccaggctggtcttgatttcttgacctcttgattcgctgcctcagcctcccaaagtgctgggattacaggcatgagccaccgtgcccggcca

SEQ ID NO: 27754 - DNA, 1078 bp, Homo sapiens
tgggagacggagctggcagtgagtggagattgcaccaccacactttagcctgggtgacagagcaagactccatctcaaaaaaaaaaaaaaaaaagaaaagaaaataggcaaaaatgacctcattcatgcagaaaagagttaatatagcagcctaatgttgctatcttaagaagggcttccctttccatcttggacccagcagaatggctcccagaaagaagggtggcgagaagaaaaagggtcattcggccatcaatgaggtggtgacctgagaatacaccatcaacattcacaagtgcatccatggagtggcttcaagaagcgtgctcctcaggcactcaaagagattcggaaacttgccatgaaggagatgggaactccagatgtgtgcattgataccagcctcaacaaagctgtctgagacaaaggaataaagaatgtcccatactgcatccgtgtgcggttgtccagaaaatgttatgaggatgaagatccaccaaataagctctatactttggttacctatgtacctgttaccactttcaaaaatctacagacagtcaatgtggatgagaactaatcgctgatcatcaaatacctcaaataaagttataaaattaaaaaaaaaggggggggggcttgcttgcagcactagctcgtgactgggatctgagaatctggtttgtgggacatctcctttgttgataaggcttattttgcccacctggggcactgttctattgtaccagattatgtagactgcttggacaaaatatgtgattcatggtgaacacttccttctcttctgggagtctggaattttggtcatggtggctggtcacctacatgaccaatccctaacagaaaccctggccttgggcttggtgcagcggctaacacctgtaatctcaacactttgggaggctgaggcgggtggagtccaggagtttgagaccagcctgggcaacatggcaaaaccccatctctactaaaaatacaaaaacattagccaggcatagtggtgcacacctgtagtcccagctacttgggaggctgaggtgggagaatcacctgagcc

SEQ ID NO: 27755 - DNA, 1041 bp, Homo sapiens
ggcatgtctgtcaacatgtttgagtggctctcctctagacagaaacgagaataagcaagctggcaggcttccttgcatcctggggcattgagtatcagcccatgtttagtgccggaagcgccacagcagacagcttgtgttttcttacccctcgaatagctgcgcttccctggtctgggtgcccagctaaattctcagcctgggcttgtggagttctttgtagatgtatttaagaaggcagaaacttctctacctcactgcagccaccaggtaattctgtgtgttgctttatttgcagaggaatatgtcacttgtcacacatgccgatcaccggacacaatcctgcagaaggacacacgactctatttcctacagtgcgaaacttgtcattctagatgttctgttgccagtatcaaaaccggcttccaggctgtcacgggcaagcgagcacagctccgtgccaaagctaactaatttgctaatcactgattttgcaaagcttgttgtggagatgtggctggacaggtttgccatcagagtggatataccgttgtattaaaaacaagataaaaaagctgccaagatttttggcgagtggttggtctgaagtccttgcaagacgctgatgctcaagctgttgacatactcattgcctactttaacacctgtcagagaaacgtgatatggggtaaggaggtgcttttttaaaatcgttcatagacttctgtaaaatgcaagataaattaaagttattataacagtgattctttcaatttggtttgtccttcagttttcttttctataaatgtgcttggtgaaatcagcaagaaaccaaccatataaaacagtgtgtgccgggctctgactgagaaactgaacaatggcaggcgcttcatctgggcagccatttttcttctctgcttctcttgagatacatagttaaagtagacacggcctcccacgcgagtgtggtgggaccttgagacttaggaggattgcctgttttcagtgtccagggaatgactccatagatttgaattc

SEQ ID NO: 27756 - DNA, 1324 bp, Homo sapiens
tgagaccccatctctacacaaaaactaaagaattagacaggcatggtggcacacacctgtagtcctagctacttgggaggctgagatgggaggatggcttgagctcaggagtttgaggttacagtgagctatgatcatcactgcactccagcctgggcaataaaacaagaccctgtctcttaacaataaaaaaagtggtgtcatatactgtatctttatttcaaagtttaaataaatggtgcagtgaaattcacttaatagctaaataatcacagatcaaaacaatgaacagattttttagaagtttggtgagatttccatgagagataaggtttatatattttgattttctttttagattacatcgtcagcccaaacatctccttgcatttttgttggctgaattgggtacaaggtaagaaactgtatacatttacatacagtactgctggacatttcataagaacctttcttgaaaaggatatgtaacacacttagagaaaatgttcacctgattattagagaaacttttaggccagtggaggagtgaaatcacttcatttctgtgggagagcttggctgcttaggaatagggcacagagttgacatctgaacaggcctgctggtgtaccaaccagaggaccacagaactgccatgtttagactttcctgttactaactgaaactcttgagtctttttatggagcaaatattagatttttagaggaattggttttcttaaagtcagacttttttttcctaaattggtaacaggctgttgaagaaatacagctagtaagttgatgagtggcactggagaaaccattgaaaccaggatctgtgatgaaataggtacttacctgtcttcagggctcaccttttgaaggcactgagcaagtcattcccattcaggaaggccaagatctcatggaccccatgccaatgagtttgactactatctggaagcctaatgtccctttaaaaataagtaatgtagagtaggtcatgataatgatgactaatgcatattgagcacctcttttgtgccaagtgcttttttgggtgccatctcaattaatcttcacaatagttctatgaagtagaaagtaatattcctatcttcacgttcggaaacaggttcagtaaagtgaagttgtagttggtcacatagctagttagtggcacagtcaagatagatacaatcaggtctatctgtccctgcagcttgatcacctaacaggcttgacacctgtgcgtcactggcagtacagagataattaaggtgttctcttcctactctctttaaactgttgggatttgctac

SEQ ID NO: 27757 - DNA, 1034 bp, Homo sapiens
ctggtaagatttctgaaatgactgtagccattgtcccaggtcaggatgtaggcacacacaaaatagatattaatgaatgagtaaggttgacagcacagttcaggatagggagctggataagctggtagaaggaaggagaaatcagaaagctggaaactgagactggccttttctgctcttctgggatgtttatgactcatttctaggttttaatatgccctgtttacatccatgcctctggcaactaatcttggggtcaagctttactttgtttccattccattccatcacttgatcctaattccccatggcttctgcctttccctctttgataatgtcatctattggagtgatgcccaaagaccacgccacagactggtgccaggctgactgtcatataataaaaaataaatatttgttctttacgttcttggctcacaactgctaaaatccttggaatctccgaagtgataacagggtctttggtacgctaatgagatttctgaaatgactgtagccattgtcccagttcaggatgtaggcacacacaaaatagatactaattaatgagtaagggatcccttatctggggatctctagatagctttaggatgggggctggtcaccagaaggacaaagctatgattttagagggttggaactttcagtggtccccctgccacctccagagagggaaggtgtggagattgagctcagtcaccagtggttaataatgtaatcagttggccaggtgcagtggctcacacctataatcccagcactttgggaggcccgggccggtggatcacctgaggtcaggagtttgagaccagcctggccaatatggtaaaaccccgtttctaccaaaaatacaaaaattagctaggtgtggtggcgtgcgcctctagtcccagctactcaggaggctgaggtagaagaaccacttgaacccgagaggcggaggttgcagtgagccgagatcatgccactgcactccagcctgagttacagagtgatactcagtctcaaaataa

SEQ ID NO: 27758 - DNA, 1774 bp, Homo sapiens
ggagaccccgtctctacaaaataaaaaaattagctgggcatggtagcacatgcttgtggtcccagctacttggggagctaagatggtaggatcacttgagtccaggaggttgaggttgcagtgagctgtgatcatgccactgcactccatcctgggcaacagtgagaccctgtttcaaagaaaaaacaatacaaaaaaatttacaccccgcttaggtattgttttcctatatctgtaaagtgaggggcatagcataggttgttgccaaagtcccttccctaaattccatgattcattcaaatgtccaaatttgctcatgaaagtgaaagtgaagtatctgtgatactttacaaattgaaagatgtgtacatgtttcagttcacctgatgtttaatagtaacaagaaggttgggtggacaatttattttattttttggtaaactcccctttggtgttttaatgtatcacatactcttttaagagtatgccttttgaggataaagcatatttggaatgtgagcatcattaaaaacaatcatttggtccctttttgttttttgtcttttaaacagatgatttttgatcctactatgagcaagaagaaaaagaagaagaagaagccttttatgttagatgaggaaggggatacccaaacagaggaaacccagccttcagaaacaaaagaagtggagccagagccaactgaggacaaggatttggaagctgatgaagaggacactaggaaaaaaggtgcgtggttgatgtgagagagttactgttgtcatagaagccctggttctatgagcgttttggcttttggatatgcagcgacctctcagcctgacaaggctgttccagtgaagtcaaggccatcagtagtctgtatgcagtggacctttttagatttctgataggcttgttgcagggatgtttccatttaattcacaagttgcaaagatgaaaccttgctgttccagagctggttttccagttgaacccatcaggtctcttctctgactttttaatggtagttgtatttgagtgtgggcagaaagaaatggtactaagataggcagttttgtgtcttagcaagtctgaaaatgtatatgagagattaaaattatagcctaaagtatttggggttagacaccagctttagttacttacccctgtgctgtaacatagacataatttgactgttagagagaaatgtttctataaacattgtatgtgtctgttgaatataacactgtgccaggatagagacaactgacattcactgagcatctgccctgtgctaagtgtcttctacatgtttaaaacaaatttggaaagtaactcattcctgttgtaataagataaaatggatttgtaaatagtttcttgaaaaactttgtagcagaaggatcctaaaatatttctagtttataacatggcaggtcaaatggaaaacttgttgaacagaacctattattactcattaatggtaggtaaaatttcactgataacttgtatttactgcacagctgtattttaatgaatgtgaaataatttgttaggccttttgatgattagttgattcaataaaatgttgagctagacagtagaatttaggtgaacaaggcatatactcttagtattgagtagggagatagataagcaagctggtaataagtacctcagttggagtaagcagaagatactatccaatcactctggggatacctaacccagttgtggggaaagatggataagcttagagaaggctttggtg

SEQ ID NO: 27759 - DNA, 1030 bp, Homo sapiens
tttggttttttaatttttgagacacagcctggaatgcagtggtgtgatcatgaatcactgcagcctcgacctcctgggctcaagcgatcctcctgcctcagcctcttgagtagctgggactagaggcttgtgccaccatgcctggctaattttattatttatagagatggggtctcactctgttgaccaagctggtcttgaactcctggacttaaacgatcctcccaccttggcttcccaaagtgctgggattacaggtgtgagctactgcacctggccttgcttccctgtgttctgtgagcctctccaacaaattaattgagcccaaagagggttgtggaaaccccaacttaaagccagttgtcaaaagttctagaggctccacttttgactggtgtctgaagtgagggcagtcttggggactgagccctcagactgtgggatctgatgccatctccaagtagatagtgttggaattgaattggaggacacctagctggtgtccactgcagaactgattgtttgcctgctggtggggggaaatcccctctcattttggggtcacacaagtctgttgtgtgttgatgactgttgtggtggtgtgaaagcagagggaaacatggtttgagaattttttcctgaacaatgggactgtcagtcaaggtggaccaccctttcttggccccacatcaggtgaatcagcctctcctgggaattactttgaatggtccagtgcaaggactgaagaggttggagctgacattcctgtggctttgcttggaagacattgtccgcttggctcctctagcacccctcaggggctatttttttttttttggaggcacgttgtataatctttcctttgaggtccccaagtctccccaggagactaaccctctacctttttttctctcaagctagctagagttctttctgttgtttgcacctaaaatactctgactgatttacttctcactttgtaaacgtggaaatggtagcatcaaaagtgacttgttcaggctgggtgtgg

SEQ ID NO: 27760 - DNA, 1774 bp, Homo sapiens
acctcccttcttccaggagttctggtttctgttatgccagcctcttcctttcctgttcggaggtgtcctgtcagttcccagaaccttttgtttcagaaaacacagcccctcttttcacatctggtctcagacttacctctgatttcaggtctgctaatctgtcacatgtgtgacactgaccgggtacccacaatgaaagatgatgtgtctcctgctccacccccaataccccaatactccactcctgatatctgggctgcccccatcaaagcttcatggagaaagaaggaattggccaagggtcctgcagtatccaggcctagccctggttggattttttccaggaaagagatgggaagatgaggcctgtggttggtggaaagtggctgtttatggagcagtggactgaactttggaaagaggagccctgggtctgctgctgactcactgtgttccccgcagggacagaaatacctacttcagatggctgtcttgacgctcgaatgatagaacattagtgaggagtttttatgctgagtttttttttttttttttttttttttgagatggagtcttgctctgtcgcccaggctggagtgcagtggcgcgatctcggctcactgcaagctccgcctcccaggttcacgccattctcctgcctcagcctcccgagtagctgggactacaggcgcccgccaccgtgtccggctaattttttatatttttagtagagatggggtttcaccgtggtttcgatctcctgacctcgtgatctgcctgctttggcctcccaaagtgctgggattacaggcatgagccactgtgcccggcctttatgctgagttttaagggctgtatgagacaccaggtggtgggagggagctgttttgagagcagggaatttaggatacttaggaaattagaaaattagagaagtcataggatcttggaactaagggagaaccttagagtcctgtggagcagaacccagcatttgtatgtggagaaacggaggcccagagaagttgtgacttatccgggtcactctgcaggtctgggtgtcccacccgagtccatgtcagggctctttctgcacaccaagccccatgcccacctctgtgtgactggctgtggtgggaggggcctcctaggctagaggtgctgggatcccttttcagtccagaaataatgagcttagagggtctggaagtagcatggactaaaacccaggaaggatccacagggactgttgatgccagtgaggactccaggaagccggatcacggggactgttgatgccagtgaggactccaggaagctgctgttgggacagccctgctttgggagtctgaggttccaggaaaccccaggaatccggattctcatccctgagacctactcaggactagcccaggggaccgagctaggaaacctgcttgaggtggtagaggcagccaggggtgtgcagtggtccgggcgggcttcgatcagttccaggttggttgcttctccaaactggctccaagacaggcatgtggctcaagttggtctggactcaatcccgggactttaggacttttgctagaaatctggtgtggtgcaggagcgactccaggattcactctgtgggctgcttggactcagactcccccaggactagaggctgcttctccctggtgggaggagttacaaccttgcaagggttctaaagacccccgggtgctgggtggtgggcttttcctgacaacttccataagttattggaacctaaatt

SEQ ID NO: 27761 - DNA, 1061 bp, Homo sapiens
cctggaagtcagtagtggagtcacaaagcccatgtgttttgccatctaggccttcacctggtctgtggacttatacctgtgtgcttggtttacaggtccagtggttcttcagcccatgacagatgagaaggggctatattgaagggcaaagaggaactgttgtttgaattttcctgagagcctggcttagtgctgggccttctcttaaacctcattacaatgaggttagtacttttagtccctgttttacaggggttagaatagactgttaaggggcaactgagaaagaacagagaagtgacagctaggggttgagaggggccagaaaaacatgaatgcaggcagatttcgtgaaatctgccaccactttataaccagatggttcctttcacaaccctgggtcaaaaagagaataatttggcctataatgttaaaagaaagcaggaaggtgggtaaataaaaatcttggtgcctggaagaattttgagcctttattttatagataatcctctgccaacaatgtatgccatgaatagggggttatagttgtgctgatgaagcattcacggggtactctgcagtggaacggctgtctgtggtccttaggcttgaaagaatgggtaaagtgaagagggaactctttcgtttttttttgagacagagtctcgctccgtcacccaggctggagtgcagtgatgcaatctcagctcaatgcaaccttcgcctcctgggttcaagcgatcctcctgcctcagcctcctgagtagttgagatcacacccagctaatttttttttggtatttttagtagagacggggttttaccatgttagccaggctgatcttgaactcctgacctcaagtgatctgcctgggattataggcgtgagccactgtgcccggctgtttgcagtatttttaaaagtgcactaagtggggactcacattaagttctaaagatacaatgtcaagtaaaacccttaagtcacactcaatggcccatgatcagtgaggcatgaggggctgaaaactgctcactctggcttagatgctcatcagtgt

SEQ ID NO: 27762 - DNA, 1050 bp, Homo sapiens
tgagatatgataaggaagatacagacacagagttggccaaagccctgacacccacccagtcacagccacaccagaagcccaagtcccagagaggcagacaggcagctctatgaacccacatcccctacactgctcctcttgggtgctctgctcctgcgtgggagttctccttggctaggtcctgcactagtctagggtgtcagttcccggctaggcagagggcacctccatctctgcctagaaggcctggcactcatcacagtgtgggggtggccagggcgtgcttctgtggcagccacacccctgacagccatctgtctagacctcctttttgcaaaggcatcacaggtgaaacctgctacattggggtgatgggcacctttctgccaagctgccctccaaagctggactctatgcccaccctcaacatccttgacagtcttgccaaccttctgcccaacattatctcttgtccgtcctctcaagggcctctgtactcaggccataattgaccactccctgaatacccactgcagctcctacttctgctcatctgtccagacagctgcatttgtctggaacagaacacatgcccttctccttgttcatcttctcagcccagctcaagagacccccttctggccaggcacggtggcacacacctgtaattccagcactttgggaggccgaggcaggcggatcacttgaggtcaggagtttgagaccagcctggccaacatggtcaaaccctgtctctactaaaaatacaaaaaattagctgggcatggtggctcatgcgtatagtcccagctactctggaggctgaggcaggagaatcgcttgaacccaggaggtggaggttgcagtgagctgagatcacaccactgtactccagcctggatgacagagtaagactccgtctcagaaaaaaaaaaaaaaaaaaaattaataaaataaaaaagagacccccttcctggccagctcctctggcagaggcaatgcccacactcttagtacagacccctagtgcagcatccatcactggctttg

SEQ ID NO: 27763 - DNA, 1049 bp, Homo sapiens
tgtcaaatccaaaatgttagatagtatttataagtgttgaatcaccgagagtgatgactgagagaggaagatggagaaccagcagctaacatctttagggagtctttagggagtgaggagtggcctggaggttggtaggtgtcagcagaaaggcagggtagtgggaagtatcatgtgagctatttttcaaagggacgcttctttatgttgtaatttttgtgtccctgtgtgattaaatgtgttctcccacaagtcagaaaggtgcaggtaggcagggaccgtgtctttcttgagtactctggcttcataaatacttgttgcatgagtgagagaatgcggtgacagagtgctaagccctagtgtgttgagtccacacgtggatcggggtccatgcagtgaccgcccctcttggttggtgggatgaggggactcacggaactcccacctgtttcctcccgtagccgacatcggcctggctgcctggggacgcaaggccctggacattgctgagaacgagatgccgggcctgatgcgtatgcgggagcggtactcggcctccaagccactgaagggcgcccgcatcgctggctgcctgcacatgaccgtggagacggccgtcctcattgagaccctcgtcaccctgggtgctgaggtgaggcccacagctgtatcaccccagagtccttgccctccctgggttcagccagggaagaagacgactgtgccagggtggggaccttccaggtgtggagctgaccgcgggcctggaggggttcctccctctcactcggtttcctccgtttcccagtgctgccaccccttgtggtgagtgttctgcagattttctccctggctgggaaggtcactgttggctaccctcaaggcatcctcctgatggatgctctggcaggaaaaattcaacacccatgtcctacttagtctcttaagggccagcttgccttggcccttcgggggtcacaggcctaccctggacccatcatggctgctggatgatggcagctctgattggttcagcctgggtcatgtgt

SEQ ID NO: 27764 - DNA, 1050 bp, Homo sapiens
aagtggaggtgctgtggaggcagttggatcacatcgagtctcaagttcaggggagtagtttgggctggatataaatacgtgggagtcatccccgtagagaaggtatgtaaagccataagactggatgagcttaattggtaaacataagagaactgggagatgatggagccctgagggcccccaaaccctaaagtctgttagctaaagaggaaccaggaaggtaggtggaaaagcacaggacagtcacagaagccaagtaaagaaagggtttcaggaaggagggcaagtcattcatgcaatctgtgctgctggtagaaacatggtcttaggtaattttgcatcaggtatggagatcaggctggtctttggacggaagagcagttttagtggagtatggaagtccttaaggaggagaggggatatggaatcaggccccatggagcagggatagtgtagtgaccagccccatagggtcggtgggtctctccctgtgtgcggcgacgagagagtgtagaaataaagatacaagacaaagagacaagagaaaaggcagctgggcccgggggaccactaccatcaatgcgcggagaccggtagtggccccgaatgttgggctgcgctgttatttattgcatataaggcagaaggggcagggtaaagaatgtgagtcacctccaaggataggtaaggtcatgtgggtcacgtgtccactggacagggggcccttccctgcctggcagccgaggcagggagggagaggagacagagagaaagacagcttacgcaattatttctgcatatcagggactattagtatttttactaatttactactgctatctagaaggcatagccaggtgtacaggatggaacatgaaggcagactaggagtgtgaccactgaagcacagcatcacagggagatggttaggcctctggataactgtgggcgagcctggctgatgtcaggccctctacaagaggtggaggagcagagtcttttctaaactcccctggggaaagggagacacccccccccctcccgccgccg

SEQ ID NO: 27765 - DNA, 1039 bp, Homo sapiens
cctgaggagggcctctccagtgattgtgatccagagccaggcaggggcgttcctgtcttccaacaacacctgccagcagttcagggatcctgggtttagggggaggtacccagcagcgcctcacaccctctctctccccccagatcctgctcatctctgattacttctatgccttcctgcggcgggagtactacctcacacatggcctctacttgaccgccaaggatggcacagaggccatgctcgtgctcaagtaggcctggctggcacagggctgcatggacctcagggggctgtggggccagaagctgggccaagccctccagccagagttgccagcaggcgagtgcttgggcagaagaggttcgagtccagggtcacaagtctctggtaccaaaagggacccatggctgactgacagcaaggcctatggggaagaactgggagctccccaacttggacccccaccttgtggctctgcacaccaaggagccccctcccagacaggaaggagaagaggcaggtgagcagggcttgttagattgtggctacttaataaatgttttttgttatgaagtctaccctgagaccacatctgcattgcactcctagagggggtggcccctaataatgttctggaacactacacacaggtgtgggtttccagagcgagcaccgcggccacagaacacaagtctgtgcgccagagcccggggatggtgcgggcagccccaccagcaccctccccactcccaagcaagcggctggaggcacagggccaggcaggcctgagcaatctttattctgcagagggacaatgaccacagatccatacaccacgtggagaccgaggggcggggagccaggggccagtctttcaggggtgggcaggtccaggcggtgggcagagcctcgggtgggtgaggggcagatgggcagacaggcaggggcctaaaaaaaagatgaaccacacagcaggggtgctgggagctgctccccaccctcccccatcccaccagccagcacccagagggacaac

SEQ ID NO: 27766 - DNA, 1092 bp, Homo sapiens
aggcccagagctggcagaggcagagggggactgttgatgggaaatgtctctgtgggctgtttccctagtgtttgccaggccctcctcaccacctctgggtatttctgggtccctgcagttttctgctctgctactggggcctggcccatgccttgtggatagcagagccagccccttcctgaagtcccctgaggattatttttggttcaaaggatggagtcaggagtctctagggtaggcctggtccctgactcatctctctctctctttcccctgccctgccccagggagcaccccatcttcttcatgtttatccagatcgctgtcatcgccatctttaagtcctacccgacagtgggggacgtggcgctctacatggccttcttccccgtgtggaaccatctctacagatgtgagtactcccgcctctgccacagatttgtgtcagcctgggcctggatgagactgctgcagggaaaaggaattcataggcatttaccaggcacctgttatgctggcagcactaggaggggagcagaggcatgaagcacaatatctgcttccaggtgccgcggacttgtgatgataaaaataattgccatttattgagcacttactgtgtacctggccactgtggctctcacagtgttacatgcattaattagctcatttgatcttcacaccagcctttgaggtaagtatccacgttttgcagatgagaaaactgaggtacagaaaggtagagccactcattcaaagtcacgtgacttctaattagaagagccgggattggaatccagatctgtgaacccctacccagtgctgtccagcagggctttatgatgatgaaaaagtcctctgtctgcacagttcaatagggtaactagccacttgtgtgcctgagaacctgaatttttaatttaaatttcagaagccacatgtagctaggctaccatactagacagcagaactctatgccctgggctttgaaccattccccagcgctgcacccaaaggttactagaaggcagaggggcaaagttagacttccctgcccactgtgacaacccctctaagctctaaccatcccct

SEQ ID NO: 27767 - DNA, 1045 bp, Homo sapiens
ctagtgtttataaacaacaagccatcaggggattgctggagtttcttttttaggaattttagatgtgcctcactgtgtaactggaatagtcctgcaagattaagtgcaagttcagtttttataaatagatgcagtacatacttcaaattactttatcgttttagggccctgttccccaagcaaaccttgactccaaaaccatgtcttcaaaacagaattatacttaaaatttattgcacatcttgtaaccacaagtttgccaagaaaaaaaatcattttccagtctaacactgagagcactttaggtcgaataaaacactgagaaaaatggtagcaaacagaaacttgggggccactaatgggatttgcaaagagtgaaacctcatttcctgagtgtgtgttcaggacttgcctaagagaactgctttttttttttttcttttttgagacagagtttcgttctttttgcccaggctggagtgcaatggcaccatctcggctcactgcaacctccacctcctgggttcaagcaattttcctgccttagcctcccgaatagctgggattacaggcatgtgccaccacgtctggctaattttgtatttttagtagagacggggtttctccatgtttgtcaggctggtctcgaactcccaacctcaggtgatctacctgcctcagcctcccaaagtgctgggattataggtgtgagccaccgtgcccggccaataactgcttttaacagcctacttgattcagtttttcatggccttgttgttttattccctggcatacttctttttaaatatcagtagggtggaatgggaagacaaaacaatatttttactttagagggtattttttttttctctcctgggctgttttcttcctcttttttttcttcctcccttctttgctaaatggcagtctttttcaggaggaagatcaagatgatcaaggaattaactcagaacctaaatactttcttcattgaatttatctatggatgccttctctttgttgaattcttttcttctcttttctc

SEQ ID NO: 27768 - DNA, 1049 bp, Homo sapiens
cttctctctttctctgcctcccttctactttctgtcaactagggttgttctagctggtgagtttccttggtttgaagaataaagcacacaaagttcttttctctccactctctcgtctgtgacattgtcacatttataaccgtctgtcctccaaggtagtttttagatgtttcaagtatacagaccactttggtggtgaaagatctcatcaataatctcttcctgtttgtctctagagctggattagcagaggggtaaaactccttggactggagtgactagttcctccttttatgaaacaccattgagaggatgtgttatttttatttttttatttgaaacagggtcttactctgtcacccaggctggagtgcagtggttcagtcttagctcactgcagcctcaacctctagggcttaagtgatcctcccacctcagcctcctaagtagctgggaccacaggtgtgtaacaccacacccagcttatttttttatttttatttttgtagagatggggttttactatgttgcccaagctagtctgtaactcctgggttcaaacagtcctcccacctttgcctttcaaagtgctgggattacatttgtgaaccaccatgccccgcctgttattttcagtaaatagttgaccccacactaatgagagtgagcatgggtattgtcattttaaaaaacatcattacaagacacctgttgggctttatatcttggaccatcagttgcatcctactgatttctgggccacttggaaactcctgttgtaaactagggctctctatccttagttttagagtatcctgttgtcttaagccatctgaaagggaatagctattttttcaaagaaattagcttttttctaatgacaaaaacaaagcatgttcattttagaaagtttaaaaaatgcagtgaagcaaaaatgaaaaattgttcataattccactacccagagataaccactataaactttgtggccttaggttttagtcttctatttatttattttattttttttggtagtccgagactgggca

SEQ ID NO: 27769 - DNA, 1046 bp, Homo sapiens
aaggggcttctgtgcttttactttgaaaatatgagaaattggccaggcacggtggctcatgcctgtaatctcagcatgttgagaggccgaggctggtggatcacttgagcccaggagtttgagaccatgccgggcaatgaggcgaaaccctgtctctacaaaaaaaatatgtaaaaattagctgggcatggtggcatgcacctgtggtcccagctactcagaaggctgaggtgggaggattgcttgagcccaggaggcggaggttgtggtgaaccgagatcctgccattgcactacagcctgggcaacagagcaaggctctgtctcaggagaaaaagaaaaggaaatttgagaaatgaacactaaagttaaaagtagaagttaagatatagttttaagctttatcagataagcatccaaaataaattcttaaacacaaatgcataatttactgctttgctaagcagggagggaaatatacaaaattcagtttccacaagagagtaaaacatgttgttgcagagtttatctaggattttagactgagatgtcaagatgtgactgtggcatatccatgccataatctttatcttccaggatggttcccttctagagggcattacatattttattccattccttaagggcctaagttctctgtgtcctttgaagcctgattctgatgtttctccctttaatgtaccttcagatttctcaacctagaattgctaactcttgctttggacttttgtagtattttatactttgtgactccttcatatgacatcagagtgcactcaagtgcactacatgtatatatcttatctttaatactagactgagttcctgatgtgcaagaggatatagtttggtctctcagggtacctggcacagtgccttgcccctagtaagttctttgcaactatttgttagataagtaaataacatatcaaatttatttatttattatgtatgaattgaatgcctgctttatgcccatcacttttgctaagtgctatagaaaagtacaaaattatgtgaccattt

SEQ ID NO: 27770 - DNA, 1023 bp, Homo sapiens
aacaaggagagcttgaatgtgcctcaggacagtgattgccagaattcccagagtaggaaggaacaggtaaacattgaactaaaagcagtccctgcccaagaagttaaaatggttgtccctgaagatcagtccaaaaaggatgggcagccttcggatcctaacaaacttcccagtgtcgaagagaacaaaaatttggtgtctcctgctatgagggaagcaccaacatcgttaagtcaacttcttgacaactctggagctcccaatgtgacaattaaaccccctgggcttacagatctggaagtaacacctccagtagtttctggggaggacctcaaaaaagcatctgtcattcccacactgcaggatctgtcttcttctaaagaaccttctaattccctaaacttacctcacagtaatgagctgtgttcatcccttgtgcatcccgaattgagtgaggtcagttctaacgttgcaccaagcatccctccagtaatgtcaagacctgttagctcttcctccatttccactcccttgcccccaaatcaaataactgtatttgtcacttccaatcccatcacaacttcagctaacacatcagcagctttgccaactcacttgcagtctgcattgatgtcaacagttgtcacaatgcccaatgcgggtagcaaggttatggtttctgagggacagtcagctgctcagtctaatgcccggcctcagttcattacacctgtctttatcaattcatcctcaataattcaggttatgaaaggatcacagccaagcacaattcctgcagccccactgacaaccaactctggcctgatgcctccctctgttgcagttgttggccctttacacatacctcagaacataaaattttcttctgctcctgtaccgcctaatgccctctccagtagtcctgctccaaacatccagacaggtcgacctttggtccttagctcacgagccacccctgttcagcttccttcccctccttgtacgtcttctccagttgtccct

SEQ ID NO: 27771 - DNA, 1045 bp, Homo sapiens
atgatcatgccactgcactccagcctgggaccctgtctcaaaaaaaaaaaaaaaaaccatgaaatgtgaagtgcctctttattcttgtcaatgtcaagattctagttggcatcagaacaggataagattaaatggagagatgatttcactctaatcctgcttgcctgcctttcctgcagcgtttcttcctggggcttctcaaagcagggaactaccagggtttaaaacaagatgatcttttttatagaagtttcattaatgagtctttaaaatataaagaagatataaagaataaaagagacacccatgtatctaccacataggttaataatttataataaataggaccaatattggaagccccctttgttgtatcctctctgattataaaataatactatcctttaaatgttgaaaaattatgtcaaagatggaaaagctcctaaaattaattcattcaaacctagatattatagaaccaaggccagctgccacaatatctctatacctggttatcttggcctgagcaatgacttgtaactttattcccctatgacacggttgaagatacacaacccttcacacttaggccactctcccctgtgtgtacagagggtatgttttgtttcttcctcactagttatttcaacttctttttggcatgaaaatgagagcgacattattttaggagtaacctttaatctacccctaatttatgtattttaaaattgaatccaaacaaaaagctaaatccatcatgatatcaatactttgtgttatttattacaaattatttgggcatatcacacttcccgtcagtgagatgcagcagcatagctgagactgggaggtcatcagtctttggggagtatgtccagaaggcattgagagcaggaacatgcctgcttgcctcagacacatctgaactcttcttataagaatcccaggggtctttgtatacatttattgccttctttctgcaaactgggggcctgcaggctgaatttggcctataatggttttgagttgctatgcagtgtcttaa

SEQ ID NO: 27772 - DNA, 1014 bp, Homo sapiens
gcctgatgttagcattcaacaaaccaacatggtcccccctcatgtgcaggccatgcagggaaacagtgcctcgggaaaccacttctcaggccatgggatgtctttcaatgcacctttcagtggagctcccaatggaaatcagatgtcctgtggtcaaaatccaggcttcccagtcaataaggatgtcacgctaacgagcccattgttggtcaacttattgcagagtgacatatctgcaggccattttggggtaaacaataagcaaaataataccaacgcaaataaaccgaagaagaagaaaccccctcggaagaagaaaaatagtcagcaagatctaaagtaggttgtgatggttttgcctcaaattttattcatttgttttctgtgtggataacttttttgatggaaaattttacagaatataaaactagaatagtataatgaaatccccctgcttcaataattatcaactcatagtctgtcttgccttcatctgtactctcttccattacccttttgagtatttcaaagcaaattcgctgggtaaatatttcagtgtgtgtctctaaaagataaggacactttttaatatgcccgcacaatattgttagcacacctagaaaactaatacttccttagtactctcatatccagtgttcaaacttccctgattatctcaaatttttttcttacaatttgttcaaataaggatccaaacaagattcatatgttgcaattggctggtatatctcttaattttacagtgtcggggggttttggcaatcagagcctgaaaagtaaccagtgctaccatatggcaactccacaaagcactgactttaggcttatgatggctattggggaaccagagaggccaaatgtgttttggaaattaaaactactgctgtctctcaaatagaaatggtttttttgcacaggtgcctttcctttaaaggctctttatcatccctagaagcttaaaaccccacgctaagatgattggaccttttaaat

SEQ ID NO: 27773 - DNA, 1031 bp, Homo sapiens
tgagcattgtgtcgtagacttgatagacaacaggagtatacagataagtaataagtcttggtctctccccttaatttcaagcccataaataattattctttcagggcagtaacttttgtcaatatatcaaaagtaggtaaaatgtcacaggaactcagaaacatctaagaggagatggaacttgagttagagcaggaatcagcagtattttttttctctgaaggggcagatagtaaatattcttggcttttcaggttatatagtctcttgttggagctactcaactttgttatgatagcacagaaagtagccatagacaatacataaacaaacaagcatggtagcattccaaacacttgtttatttacagaccagcagagggccatagtttgctgacccctgagttagagcttgctcaggtagtaaaaggcaaaaaggcatttctggcaaatgaaaaccacagacacaaaggcatggaggcatgtttggacaactgcaactttttaaatctctacgtggtacatgttaagctttgtttatgctgagtgtctgaattctggtttacagtgtgatatttttcaaacttcatcagttcacgtttactaccaacagtgtactgcaaaaagaagaaattttggagaggaaataagatacaggggaatggctaaaaagtatttgcaaagcagtaatgtataagctcaaacttcatgtttctggttgcttaaggaccacatgactaatcctcttaccctttctcattgaagcagtttggactgagatagtgcaactagtttctgaattcccatccctcctggagttaatttagtaatgtgactccaactttaattgtaaatcactaaggaatgagacaaaaatctgacttttacaaaaaaagttcacactatttctggcagggtaacagaagggtagtgcaaactgcttgaatttctctatctgctaatgcaaaactgcattcctgagttatatgaattcatgtttgttttttttttattttgttttgttttttgaga

SEQ ID NO: 27774 - DNA, 1049 bp, Homo sapiens
taaggtagtggtgagctatatgactgtgccactgcactgcagcctgggtgacaaagtgagaccccatctcagaaaacaaaaacctataaaagtattggtcctgtcattaggtgtctcagaaagtagatttgtagcaacctatctcctcttcattgcatgatttttttcctgctggaaatatgtttatattgcagttattgaatggaattggtattttgttcacaagtgttagtgtccccacaccagtataggttctttcttctttaaacctacttatatttagtgtctaccttctgatcataaattaccaaaaggaagtctaggattttgagagtttttgagaacattttcttccattacacacacacacaccccacacacacacacaattggtaagatggttgaaaataaatattcagagttccaggatctctgttgatactaagcatcattcatggtcaccctgcttccctattacaagtaagaattggttatatctccttgtgcttcatgaaacctgcttagatgggttgaagaaagacccatctacattgaacccaccatttttctggtggtaaactaaccataattcttcaaaagcacagaaaactaaagcacttatatagctgtctataaacaaaatttgcattttattctaatgatttcctttttatcacttgactcattttcaggggaaggtgctattaacctggctttggctcagaaccgaagccaagatgtgagaatgaatggacccatgggagctggaaattcagttaggatggaggcgggatttcctatggcaagtggtccaggtaagacctcccactcaattgtatgacattttactagtttccttttttggcttatttgatcatttgagccctgcaagataggtgggggttcatggcatacttaacatctctatttgctgaatcaggaaagctagacatgagtccttcccggaggctagaggtcacagcatgaagcatctttgcaatcttttggtctcgtgcttaaaggttgatgaacactgagccatgcagcaa

SEQ ID NO: 27775 - DNA, 1055 bp, Homo sapiens
gttattgtcagtatgagatttgataaatgtgaggttttccaggaagtaatttgtcatatagaaaaatgcttataattctttataaggttataagatgaccattatatttaataaatagctaatgagcatctgccacgtaccaggcactattttatgtataaatgatgtattatagatagtcatataatttatcatctaaattaggacactttttttttttttttgagacaaagtctcactgtgttgcctaggttggagggcagtggtacaaacacaactcactgtagccccggcctcctgggcttaagcaatcctcccatctcagcctcctgagtagctaggaccacaggtgcgtgccaccacggacctgactaattttttatagagacggggtctcaccatgtcgctagtcttgaactcctggtctgaagcaatcctcccaccttggcctcccaaagtgctgggattaacaaatgtgagtcaccatgcctagcctaaattaggacatttctgaaagtgaaagagaatgctattaattatgctggaacaacagatgtgaaggaacaaggacagacttgtaattaaccctgtatagtgatgggggaggcaagcaagaaaacgagtgagtgaatgattacatggaatgtgctctgcagaaataacaagatgttctgataaaagttacctaaccttggataagatggttggtagaggcctttttgggcatgtgacacttaagattacatgaaaattgagaagctagctatgcgaagagtgcagagaactgttctaggcagaggaaaccgcatgagcaaaggccttggggtgagaagcagccttgtgtgcctaagaaactaaaaggaaacactggggctgaatccttgctattgaaggagaaaaatagcatgagatgagtttaaagaggtagacagggctaaatatgggcagtccaatattggtagccacagactgtatgttgcttttaggcactgaaaatgtggctagttaaaactgacgtgcgctgtaagtataaaatacatattacattttgaaga

SEQ ID NO: 27776 - DNA, 1050 bp, Homo sapiens
ttcgcttagcgtaagatgctcaaagcccattcatgtggcaggatatccttcctttttaaggcttaataatattccattgtggctgggcgcagtggctcacgcctgtaatcccagcacttcgggaggccgaggcgggcgatcatgaggtcaggagatcaagaccatcctggccaacatggtgaaaccctgtgtctactaaaaatacaaaaattagctgggcgtggtggcatgcacctgtagtcccagctcaggatgctgaggcaggagaattgctcgaacctgggaggcggaggttgcagtgagccaagatcatgccattgcactccagcctggtgacagagcaagattccgtctcaaataataatataataatattccattgtatgtatataccatattttactgattcattcatctgtcagtagacattgggttgcttccatatcttagctattgtgggtaatgctgctatgaatatggtgtacaaatatctctttgagactctgctttcagttcatttgagtgtgtactccgaggtagaattgctgcatcatgtggtaattctatttttaattttttttgagaaactgtcgttttccgcagcagcttgtatccttttacattcccactgacagtgcgcaagggttccagtttcttttttttttttgagacggagtcttgttctgtcacccaggctggagtgcagtagtgcattctgggctcacagcaacctccgcctcctgggttcaagcgattctctggcctcagcctcctgagtagctgggactacaggtgtgcaccaccatgcctggctaatttttgtatttttagtagagacggggttttgccatgttggccaggctgatctcgaactcctgtcctcaagtgatccaccagcctcagcctcccaaagtgctgggattattgggattataggtgtgagccaccgtgccccgcaggttctatttctccgtatcttcaccattgtttattttctgtggttttgatagtagccatggtaatggtggtgaggtggtatcttatcattat

SEQ ID NO: 27777 - DNA, 1034 bp, Homo sapiens
caggcttccacgtaacctatagtatatacttttttgtaagttgtaacttgaaattttcagatgctttgaacttgacacataatctagcaattcattggcacaccaaggcaaaacatcaacctgctaaagagatttatttatttatttatttatttttgagacggagtttcactcttgttacccaggctggaatgcaatggcgctatgttcaccgcaacctcggcctcccaggttcaagtgattctcctgccttagcctcccagtagctgggattacaggcatgtgccaccatgcccggctaattttgtatttttagtagagacggggtttctccatgttggtcaggctggtcttgaactcctgacctcaggtgatccgcctgcttcggcctctcaaagtgctggaattacaggctgtttacttaatcttcaactttaaaacctatatgtccttcagttaagcctaaatatgaggtaggaggtggaaattgactccagaggcagggcttgaacaccagaccaaattgaggactgctaaaacagggatggggcaggagcagctttccataagacacatccaccagtgtgccatgtcagtttaccattaccatgacaacacccaagacttaccacccctctccgtggcaatgacctgactacccaaaagttaccatacttctgctagcaatttctgcataaaccacctgttaatctacatgcttaaaagtaggtataggccaggcacgatggctcacgcctgtaatcccaacactttgggaggccgaggcgggtggatcacctgaggtcaggagttcaagaccagcctgggcaacacggtgaaaccccatctctactaaaatgtgtcactgcactccagcctgggcgagacagagctagactccatctcaaaaaaattaaaataaatgaaatacataaaagtagatataaatataactgctggccaggtacagtaggaggccaaggtgggcggattgcttgagctcaggagttcgagaccagcctgggcaacacggt

SEQ ID NO: 27778 - DNA, 1034 bp, Homo sapiens
ttgttgtttttttgacttacaatgttttttgctttgcagaattgatttttttttgcatttgaacttatcaatcttttctcttatggctttattattattttttttagagacaggatctagctttcttgcccagactggattgcagtggcatgatcatagctcactgtaacctcaaactcttgacctcaagtgatcctcctgctttagtcacctgaatagctgggaccaccggcatgcaccaccatgcaagttccatgcataagttttatatctacagtaaatatttcaagacttaaactgaaaatttaatgaaaaatataatgtatagatattatggataaaataggaaaaaaacttacacctaaaactttgtcaagtttaaaaagctaaatttgaaatcctgttagaaaagcgggtcttgtattttgtatgtgtacaaaatattttgttttgggctctaagcatatgcagatagtgtgacctgatgttaattaatctggacagaattaagaatgaaggtatagagagggctctaaggcttaaagtgacagttttatgattcttaagtgatgcttgtataagtctgtgagttttgcttctacaatctttgaatgcttgctgatgagtggcctaaaatctcaaaaaaggctgggggcagtggctcatgcttgtaatctcagcactttgggaggctcaggcgggtggatcgcttgagcccagaagttcaagactagcctgggcaacatggtgaaaccccatctctaccaaaaaaaatacaaaaaaattatccagatgtggtggcatgcgcctgtggtcccagctacttgggagcctgaggtgggaggattgcttgagcctaggaggttgagctgcagtgagctatgatctgttactgcactccagcctgggtgacagagtgagaccctgtctcaaaaaaaaaaaaaaaaaaaaatcagaaaagataatctttgtagacttaatgaaaaccctgttttaacattctctaaagatgccaatgctgacttgataacttg

SEQ ID NO: 27779 - DNA, 1028 bp, Homo sapiens
tattggccttgtagaatgagtttggaactattctcttcactattttttggaataggtcgagtaggattggaattagttcttccttaaatgtttggtagaattcagcagtgaagccattggatcccaggcttcttttttattgtggcttttacttatggctttgatcttgttttttgttttgttttgttttgtttttgagatggagtctctgtcgccgaggctggagtgcattgatgcaatctcggctcattgcaacctccacctcctgggttcaagtgattctcctgcctcagcctcccgagtagataggactgtaggcacgtgccaccatgcctggctaatttttgtatttttagtagagacagggtttcacctgatcttgttacttgttactggtctgttcaggttttggattttttcatggttaatcttggtagattgtatgtgtctaagaatttgtttcttctaggttttccaatttattggcatatagttgcttatagtagcctctaacgatcctttgaatttctgaagtatcagttgtaatgtctcctttttcatctctgattttatttatttgggtcttctctctttttttgttagtctggttaaaggttgtcaattttgtttatcttttcaaaaaggcagcttttcatttcactgatcttgtgtattctttcaatttcatttatttctgctctcatctttatttcttttcttctactaattttgagtttggtttgctcttgcttttctaattctttaagatacattgttaggttgtttatttgaaatttttctacttttttaatgtaaatgcctatagccataaacttccctcttagtcctgctttcactgtatctcacaggttttggtatgttgtgttttcattataatttatttcaagaaattttccaatttcctccttaatttcctcatggacccactggtcattgaggagcatagtgtttaatttccatgtgtttgtatagtttccaaaatttcacttgttattgatttttagttt

SEQ ID NO: 27780 - DNA, 1027 bp, Homo sapiens
atggcactgcggaattttgaaatggtagataattgattcaagctttgagtaactgagtcaagttttagagacattctaatatgatcaggtgatcatggataagtaaacaccctgtagaaaaacagatggtcaatgacaacacacccagcctccctcattttcctatgccagtaacttttgccagcacaataaagaaatctctcttctgtaaaacaacaaactttgagggttttgttagccctctcttcttggtgagtcatctgtgggcattgagagatacatcagcttttcagggtctccattcaaaagcctccccatggatatttcagtgttaatagtcatgtcacacttcatttgatttcaaaccattcttcaaaattacctcttttccatcctattctttacctcttggtttttctttgaaacttcttcagtttttccataatttaaaaaaatattggaaagaattgaggaaaactgagtattgttttaaaataacaaatagaattgaggaagactgggtactgtccaggctaatgatatgctctttttctgtgtctttttatttttaaattattatttaaaaaaaaaatagagtctcgctttgtcacccaggctggagtgcagtggtgtgatcatggctcactgctgcctcaacctcccaggctcaagcgatcctcttacctcagtctcctgagtgaacacgtgggactacaggtgttcaccacctcacctggctttttttttttttggggtagagaatgggtcttcctatgttgcccaggccagtctcaacctcctgggtttaagcgatactcttgcctcccaaaatgctgggattacaggcgtgtgccactgtgctcagcctgtgtctttttaatggtagcaatgttggccttgcccaggatagtactgtatttaaattgtgaatactcatttgaattgtggtcagtaatagccctcaggtgctttctttatttgtgcccaggcagttcttcctgattttatatttgcattgtttatactt

SEQ ID NO: 27781 - DNA, 1067 bp, Homo sapiens
ttgacctgtataagtattttgtttggtttacacaatatttttaatgtcttaaaaatgtacacagacctctgagtttctgacttaaccttgaaaaattggaagatctgtcaacagcaagcccatattcatttatagcggtaaccagctgaaacttttaggtgagatgtgtttcctagttctccatagtctgccttgctgtcttgctttgctctttatttttatggccctgcagacatttaattttctgattcttactttattgaggtattgaatattgtctcccccaaaccagtaaatgacatattgggatggtgggggggatggccagaaattgacagatgagtttgtgggcaagtaaatactaaaacctatttctaaggatgagccatacttgatcataatgaatagaatgataaatgaaattaaaagatgaggtgaaattcagcttagctccttgaatatttaggcatctactatgtattaagtactgtattagaaattaccacattggtgatagaaaattagctggccagctttatgaaatactgtagaagaactctttttacttgtattgtggagctgttgtctaagagagtggttggacgagaaaggaaatataggtattattttctcaaacatttgttgagccctaccatgtattctggaaactggctagaactctgcaagataccaagatgaatctagccaaggtttctatgctgaggaatgtctgtaatgtgttatggagctgggatactagagaatggtacctgaaagaggtggtctgtgaacgaagctgccaagaatagttagtatcttaatacttggagatgagacagtgctgtattttccaggctgagtgaaagcataaacacagaggtgggtatttaggagatggtaaagagtccactttgcttggagaagaggattgttataagggtgttgttggaattaagggtggaaatggagatgaacaatagtaacaataatagataaaacctaaaataaataaaacttaaaaaaattaatagtagtagtggcttttctttccccccagtgttctttgg

SEQ ID NO: 27782 - DNA, 1067 bp, Homo sapiens
tgggctctgtagcttcagaagtttttaaggcagagtcacttcactttgggtatgcagccccatgagtgaagtagacatgtgaacaatcatagttcaggatggtcgatgccaaagaagagttattaaacgctataaggacacggagatgggtgtgtctgctcaaagaatcagggaaggtgttgcgaaggggtgacatttgagatgtgtcctaaaagatacaggaatttgccagtgaaatggagagaagggcctttcaggtaaagacacgttttcagggaatgtattaataactgaatgtggctggagcatagaatgtgtgtgaaagcatggccagagatgagactaggaagaccatgttaggaacctggttgtgaaggaccttgctaaggagtttggactgaatccttagctgagagaggcattcaagatcttcgagaaggggagtatgtggtggaggtttaatttctaggagataaatggatgttctttggaaggagggtagactgaagaccagagaggtaatgaggatctgaactaaggcagagactgtgggcactgagcagagttagaagtaatgaggatctgaactaaggcagagactgtgggcactgagcagagttagaagtaatgaggatctgaactaaggcagaggctgtgggcattgagtggagttagaatttgcaggtgttgattattgacattgtgagtggcttagggggagttttttaaatttctggtttggggtggtgtctgtcaaagaggtttaaaaaagtgaaaggaagtctgggcgtgttggctcacgcctgtaatcccagcactttgggaggccgaggcgggcggatcacgaggtcaggagatcgagaccatcctggctaacatggtgaaaccccatctctactaaaaatacaaaaaattagccgggcgtggtggcgggcgcctgtagtcgcagctactcgggaggctgaggcaggagaatggtgtgaacccgggaggcggagcttgcagtgagccgagatcgcaccactgcactccagcccaggcaacagagcgtgactccgtctcaaaaa

SEQ ID NO: 27783 - DNA, 1036 bp, Homo sapiens
gctatgactatgccactgtactccagcctgggtaacaggaaaaaaaaaaaaaaaaaaaaaaaaaggcaggggttggtgaaatccaatgtagacaggtgtctttctacactggttatgtcctggctcttaaaagagttttgcttaatttataaatcccccaactacggcagctaaaagaggcctttctgcatttgctgataggaagtcagggagatgggaggggtgcctgcttgggaaagcttgtccctcccctgggatacttggcctgtgtctctcccctgtgccagccatccctggcttggggctctgcggagttcagcccagcaccccccttccagtgacctggtctcctctctccctcgcctacccgccttgcccagcctgggctcttggtgggggttcccggaatggtgaaggggctacatgaagctcaccagctctatggcaggtaacaaccctccccctggggaccagggacccccgtttgcatctctccttgggtggccttctcctacttccctggattcttcctttcccaactccccctcctaatatccccttcccttgccaggactctccttcccaggaacccccctccccccggacccctcctcattcccccaggacctcctccaccccctgctctccggcccccccaggctgccatggtcccaagtcctggcctttgcagcagctgtggcccaagatggcttcaacgtgactcatgatctaggtcagtggggcctggggatttgggagagacatgaggttgatggagaagggtagaatctttgagatttggagcccaagccagagaggccctctcttccagtttgctcctcagaccccctccccaccttatcccaccctcacctggaggcggcctcaaacgagggggtctgggaagggcccttagacatccctgcctcgcacttaacaggctcctgggggtcagggcacttagggtgggccactcagcccccatctaccccatctattgcgcgtctcatccggtccagtcctggcgtcccgccct

SEQ ID NO: 27784 - DNA, 1059 bp, Homo sapiens
aaaaacgctgaggcctggcatgttggcgcacacctgtaatccctgcactttaggaagccaagaagggtggattgcttgagctcaggagttcaagaccagcctggggaatgtggcaaaaccccatctctttgaaaaaaaaaaaaaaaaaaaaaaaaagttaaccaggggtagtagtgcacacctgtaatcccagctactcaggagactgagatgggacaatcacctcaacccaggaggatgaggctgtagtgagctgcaatcacagcctgggtgacagagcgagaccctgcctccaaaaagaaaaaaaaaaaatcctgaaagataagaaaatcttgaaagtagtaagagaaaaatggctcatcatgcccaaggatattccaataagattagtggctgactgctcatcaggaataatggaaggcagaaggcagtagggtgacatattcagaatgctgaaagaaaacagtcaaccaagaatcttgtattttacaaaactatgtttcaaagatgaagttgaaataaaaacattcttagaaaagaaaaactgaaagaactcattagtaacagacaaacatctggaaattaagcagcataccgacttatgagaaataccaaaggaagttcttcaggttgaaagcaggtgacttcagacagtaatttgactccacatgaaaaacaaagagcaccttaagtaaaggtaattctgtaattgtaagagattgtgtaaatgcatatttcttctccttttcttcagttaaaaaacttacacaaaccatctaattatattgttgaacctataacatatggaaacatattttgcaataactgtacaaagaaaacgggtggtaccaaagttgtaatggagtatcatgacaccaaattgcaacttgaatccctaggaatcggtgaggagaaccaaaatggtaataagagggtaaatataaaaactccataaatgtatacttgctcttcattccttttctcagtttctctaacataaaattatttaaagtaacaattagaacaagtattgttgggcttttaacatacatagataca

SEQ ID NO: 27785 - DNA, 1026 bp, Homo sapiens
tcacagcaccacttattgaaaaaactactctttcatcattgaattgtcttggcaaccttgtcaaaaatcaactgatcatagacacgggtttatttttgtatttacagatcaagattgttttggctgttatgcatcccttatatttgcatgtgaatttcaggatcagcttgccaatttctgcaaagaagccagctgagattttgatagtgattgcattgaatttgtaggtcaatttagggagtattatcatcttaacaatattaaatcttctgatccatgaactacaagatagctttccatttttttagattgtctttaatttctttcaaaaatgttttgttgtacaagtcttgcacttgttaaacttatttctaagtgtttttactgtttttgatgctcctttaaatggaattgttttcataattccagttttttttgcttcttgctacaattttagaaatacagttgatttatgtatattgatcacatatcgtgaaatcttgctgaactcttgcttattggctctaatagtttttttgagtggattctttaggaattttctgtattctagattgtgacatctgtaaatagttagttttacttattcctttccaatttgggtgcctttaatttctttttttatttttctctagttgccttagaacactcagtacaatgttaaattgaagtggcgagagtggacatctttgtctttttcctcatcttaatgggaaagcatttagtcttcactgttaagcgtgatgctagctgtgggttttttaataaaagccctttatcaggctgaagaagttctcttctattccttgttgattgttttatcatgaaagtgttttgggtttttttttccaaacgctttttctgcatctgttgagatgaccgtgtggcttttggcttttgtcctttattctattgatatggtgtattatattgattttcatatgttgaaccaaccttacattcctgggataaattccactttgtcatagtgtcatggtgtataatcct

SEQ ID NO: 27786 - DNA, 1033 bp, Homo sapiens
tgaagtccccttttgcccctgtctccagctattcggtttctctccttagaaccactctgtcagcttcttggtggatgttcttattgagttaatttatggaaatacgtaaagcacgtctgtgtcttcagatagtggaatcacatgctgggtgctgagaaatcagacagattgcggcaacagcaaattctcatctcccatctcacactcactctaggcaggacataaacactccaaatcatttttctttttcattttttgctcaatgtgtataattaagtcctcataaatgtgcatgagatgcatctctactatgcagatgtacaggaaggctggccatgatccagcattgcccttccctctcagggtctgcatgtttcccaagaagcactggggcacctgccctgcatctccctgggcagtcagggttgggggtgagtagatccttctttggccatcggccttcccgttgggaccgtgtgtctttctctctctcaggtcggcaaccacattgatgtgctcactggcaagtgggtggcccaggacgcaggcatcggggctggcgtggactcctactttgagtacttggtgaaaggagccatcctgcttcaggataagaagctcatggccatgttcctaggtaaaaatggcagagtaagggagcttttcccctcatttttcttgctgatgtgtgatttgtttaaaaacttttttttgagacagagtcttgctccatctcccaggctggagtgcagtggcacaatctaggctcactgcaacctctgcctcccaggttcaagtgattctcatgcctcagcctcctgagtagctgggcatgtgatggtgtggactacaggcgcacaccatcacatccagctaatttttgtatttttagtagaaacggggtttcaccatgttggccaggctggtctcaaactccggacctcaggtgatctgcccgccttggcctcccaaagtgttgggatcacaggtgtgagccaccacgcctggcctgagtgcctgcagaatcagttct

SEQ ID NO: 27787 - DNA, 1035 bp, Homo sapiens
acctcacataccagtgtgaacagaactgggagagaggtgtgtaggaggcctttcatatcttacctagatagcagtagcttctcatctttcaccttttctttctttttttttttttttttttttttttttttttgagacggagtctcgccctgttgcccaggctggagtgcagtggtgcgatctcagctcactgcaacctctgcctcctgggttcaagtgattctcctgcctcagcctcccaagtagctgagatttcacttgcccaccaccacacctggctaatttttttgtttgtttgttttaatatttttggtagagatggggtttcaccatgttggccagactggtctcaaactcctgacctcaagtgacctgcctgcctcagcctcccaaagtgctgggatttcaggcaagagccaccacgcctggccctcgttttttctttttaaagaacaaagctctggttatagtccccatcacgctgtatcaccgttactcctgcagatgtgtgaacctgcctggctagaggtggaatctatgggagcactcagtcaccatctggtgtgggagggagggagagaagcatgaagggacggggaagagtgtggaaggggaggggtaaaggagagggaatgggtggccctcacctcacttttgtccctctcagttacagctcagaccctcccctaggtttcccaggtgtgccaggggaagccttgccctctggccaggcaaagccattggaagtctgtaaaggtcacacacagagaaacagcagcagtgctgatgatagcaacgtccccctccctcgtcccctgccccatgacaggtaggcagtcacagcccagccccgaggaaggagcagtcccccctctccctgccacacaccatagatcttctggatgccctggagatcgtcctggggcagcttgaagttgtgcgtctccatgtactggtagaagggcgccatgatggcgctggggtcgctggagtgctccagtcccagcgcgtggcccagctcatgcacagccacca

SEQ ID NO: 27788 - DNA, 1799 bp, Homo sapiens
ggaggccgagaggggcggggtcgcggcggggcctgagggacggaggccgggatacttgggaaaggatccgccggccttgaactcccgcctccgccgcccctaggcctcatggcggtccgagcttcgttcgagaacaactgtgagatcggctgctttgccaagctcaccaacacctactgtctggtagcgatcggaggctcagagaacttctacaggtgcggcgggagccccggggcttacggtggcggggaggcgtgcgcaggagtcaagagctccggcagtgggagggtgccggcccctctgccccgccaccaccgagtccatgtccctacagtgtgttcgagggcgagctctccgataccatccccgtggtgcacgcgtctatcgccggctgccgcatcatcgggcgcatgtgtgtgggtaaggcaggtggaggacgccgagggagggagtggtctccaagcaccattaattacacccccggagggaacccggagtgacctagggattcccagggtatcatctgttatctctgggcactatagaatctctcaggccaagcgtcaggagatcggggcaaccctctagcaaaggctgctggataatagtaataacaaataatgtaaagtgctttcactcctgttctcattccttcgtcacaaagacactagaaggtaggagttactggcctaacttgactgatgaggaagttgagacttgacctaagtgactcagtaagttccacacctagttcctagtgttggagaaggatttttctcttttttttttttttttgaggccagatttttgctctttcgcccaggctggagtgcagtggcaagatcacagctgtctgcatcctcaacttcttaggctcaagtgatcctcccacctcagcctaccaggtagctagggccacaggcacgtgccaccacacctggctaatttttacatttttggtagagacgcggcctccctgtgttgcccagcctggccttgatctcctgggctcaagtgatcttcttaccttggtctcttaaagtgttgggattataggcgagagccactatacccagccgaggatttgtatctcatctctccctgccactgactgggcaaggtgctttctctttctaagcatccatttctgtctctgtaaagattagctaagatatgcggtcttcctgctcagttacgttggaatcttaaattccctttaccacatctctaccctaccttcctacctgtcagcactgttaattctggtcgttggtcctttcctttttattattattattatttttttttgagatggagttttcgctcttgttgcccaggctggagtgcaatggcacgatcttggctcactgcaacactctcttcaagtgattctcctgcctcagcctcccaagtagctgggattacaggcgcatcccgccacacccggctaatttttttgtatttttagtagagatggagtttcaccatgttggccaggctggtcttgaactcctgacctcaggtgatcctcccacctcggcctcccaaagtgctgggattacaggcgtgagccactgcgcccggccggtcctttcattaagctggatctgtcttccattactgctgcccattgtttcttagttctgctcattgaggtcacttttagaagtctgtttattttatttttttacttttactttaatttttaaaaatcttaagcctgcttgggaggtcgaggcaggtggatcacctgaggtcagcagttcgagactaacctgaccaacatggagaaaccccgt

SEQ ID NO: 27789 - DNA, 1079 bp, Homo sapiens
gagctaggtaatctctgagggcccttcctgctccaaagcttaatggtgtgatacatgacataaactagctctgctaggcaggttcagtgaatgttttcctctgagagatgctcctgccttactgtttgacacctctgatatcatccgtttgtggctgtgattattcctaacacaattaggagaacaactcatgtgggagtagggagatcctccaagtatgggtatcaggaggtctgagttgtagtctcatcctcacatgacagaaggaatgaactctagctctggcctgtttcttgactcttccctttacccctttctggaagatgggacagtagaagtttggcagtatatgtttctgaaattccagaaacacagaaggtattcaacagggggaaagaaaggcgaagaagaagaaaatcccctaaaacactagttggatagaacatgctatgcatggcgtagtacacaggcccttgtaaaaattcagttaccagcaagcctgtcttagcccctgctctgggttaggctctggaccagatgatgggggtgccgagattaatcagacatggttcctatgacccttgagtagctcccagactaatgggagagacaggtgcataagcagctctaaaccacgtgtgtacccaggcagaaaatatgcccagagagctgtgagaacaccaaggatggatggctaatgtagccctggttgaaggtgtgtgggataggtcatggtttgcactcctagttacatccagtctacattttccagccttgagcttcacaatcctttcatttttgaaaattatccatggctgtaaagcattggaactggttttggttttatgtaaacaaaccagaagttattacttataattccttacatttgcagagcattctgcagtttaccaaggctttcagcatacatacattattaaattaatgaatgaatgcatgctaactcacgtgctcttccaaatagccctgtgtgtaggaaaggggccgggcgcagtggctcacgcctgtaatcccagcactttaggaggtcgaggcgggctgatcgcctgaggtcaggagtt

SEQ ID NO: 27790 - DNA, 1026 bp, Homo sapiens
aaaaaaacttggactaggagccagaagaccttgtctctgtgaacctcttgaccatttattagccaagtgataattgggtgagtcacttgacctttctgagcctttgcttcctcatgtcttcagcagggaacagcctctttctcagataaccattgggtcagtattttggcaattgtacagctctgaacagtgagcagttaggacacagcagtgaaagacaaacattctgtgacctgtgtgaaacaatgtaaatgtctgctttactgttttgagctttagactttggtctgacccattgtgcccaggtggagttagcagttaactcctgtgattcagttcattagggtgaccccgcccctttcactcttcattgctgtggagaagaagaaggcagggctgttggatgaagggtcaggaacctcaagatcagtaaggggctaaattttgggtcctctgagaaaatgttgccatctgggcaatatgatatctattttaggatcgctgggaaaggactcgggtcagtgatctcagtgttgcctttagatcctctaggttgttcagggcctcagcatccatgacaagtgacagtggctcagctctattagcaaagaactgaccaacttgttgatctatattcacctgtttgccttttgtgtctgtgcagttgacatggttggtagtgatgtggaacaagcatcctgtagttttccactgtacccagtctgcctaaatttaatagaaaataattaaaaaagccaagtagtgcctgcagcttttctgcgctcataaatgcagtcatgaggctcagggtgcaattagcagcctccaagtgtctctggaaacctgagtgtgtcagcgtcttcttgctgacggtaatcagacctcatggctgcagtcagaatgcagagggcccggagtaatgataccgacctacatgtagtgaacaaattactggaaaaggggctcaggctcctaggccctggtgtgttatgcctgtgctccactggagacgcctgccgggctcaa

SEQ ID NO: 27791 - DNA, 1046 bp, Homo sapiens
tctcttgccctgtagcactggaagaactggctccgtccctaatagcctcagttcaaagggaccagaagagactagggtagttggggacaaatgtggggttcataacgtactaggggtatctcgtctgatgaagtggttgggtatggatgtcagaagaatctcacttggtgatgatcctcaggaactatgtaaaggaattttagattgccctggctgatggcaggaagccccacccagggctagccctagctggtcagaattgccaagcagtcagtgtttttattttatgccatctcctaatcatttcagtggccgccaagctcctagaagcttgacagccacaaagatgatcctaattcaaccctttccaagtgaggacactcagtcctggtcaggaaaaaggcttggtcagtgtcatatagtagcggtagtagcagagactaaaactcacttctcttgattgattctgttgctcttttcgttacttgatactatcatctttgctgttctctagagccactacacacaccctgcattttgtgttgctgggaaaagcctccaatcaaagacctcctgatccttttctcttaaggtcagcattccagtgtctagcacagtgcttagcacatggtaagcctccatccaatattggttgaatggtgaatgagtgagtgaactcacagagtctattcctaaccctatcttcttagaatcaattctatacttacactgcagtttacctgattaaattcatgccaaatcgttaagggttgccaacaggatctgttttaatggtcccagataactcttgcattttaaccagagttttctgtaaatagcgtctttggaaaaagcagtggttgcagtagtaagacatacaggcactgtgacgagctcttggggttgactatgcctctcactccatgtcctaccacaagactcttttctcctgtgggcttaacccctgcattgggtaccaccagagggcagtagctccgccaggatctgggtggggctatgtaaaaaagttctggaggctctgaggt

SEQ ID NO: 27792 - DNA, 1962 bp, Homo sapiens
aagaagcagctcccctgtacagagacagagggaggaggctccaaggctgagagagggaacccctgatattttctattccatttgaattcattttaaacagacattgataatgtcacccactaaattgatttcactgagttgcaaccaacagtacttgaaaagtggtctttggcctctagcttccctatccccattccattggccttctcagtacaaatggggtcagtacacaaacagacacacacacacgcacacacatgcactcactccttaatgttctccattgttctcagaataaaatacaagttttggccgggcccagtggctcacggttgtaatcccagcactttgggaggctgaggtgggcagatcacctgaggttaggagttcaagaccagcttggccaacatggtgaaaccctgtctctaataaaaatacaaaaaaattatccaggcatggtggcgggcacctgtagtcccagctactcaggaggctaaagcatgagaatcgcttgaacctgggaagctgaggttgctgtgagccgagatggcgccacgcactccggcctagacgacagagcgagacttcatctcggaaaataaaataaaataaaagtttcatatcatggcattcacatctgatcaaatgtgacctatggtgcctttactagtctcatttgttgctattttaggcactattaccatcactactcccttctctgcaagaaaaagcaaaactatgtagtagaaatatcaagtcttctgcacaaagtttcttctgcctagaaggcccttcccccgcctctccacttgacaaattcctgtttttccttcagtatccaattcaggtattatctctgctttgaaaccttcccttctgggcagggagatttatgtagttggaatttgtgttggcattgtaagtgttaacagatttgtagagactccccttttcaaattgtcatggagcactagtaccttctcagtgcagaaattaattttacaaaatggaatggaacaaataaaattggaacatacctatgatggaggtacgatggagagggagtaaaatgtagtctgtttttaaagattattttaaagtcaggtatttcataaatacaattactactaggtgttttatgtatattatcatttatttatttacatacattatttcacacatgctcacaactactttattctcattttacatatgagggatcaggggcttagagaagtcagagaactttcccaaagaagtagttagaatgtggtggagaggaaattcaggtgctggtctggctaactgaaagcattaagttgctttcctctttagtaattataactactaaagtaactaattaaatacttaaattaatgttaattaatactaaagtacctacttaaacatagattcataaaattatggcatttattctcttgattgaaggtactgtgtacagcagacaaatttatttcgtgccctcttaaggcttaggtgagaagagagacattaaacaaatcactaataaaatacaactgtgataggtgcaatgagaggatgtgacaaggctatgtgggagaagctgggaacctcatttagtttaggggtgggtcagtcagggaaggcttcactgaagaggacatttacattgacacctaaagggtgagtagaagttagcaagtgaaagagtggatgaaaaagccttccaggtagagggatctagtggttttcaaactttttatcagcagagtcctttttaaaaatgaaatcttatgctcagccaccatatatgataaatatgatgaaaggaggtgggaatgacctgcttgcttcacatcttcacaacatgtccactgaaaaaagactgttaagtagttccatggaaactcagaatgtagtttaaaaactacagatctagtccaattctctcattttgcaaatggggagacagttttggca

SEQ ID NO: 27793 - DNA, 1030 bp, Homo sapiens
ggaccccacctccacagaaaatttaaaaaattgacttggcgtgatggcgtgcacctgtaatcccagctacttgggaggctgaggcaggaggatcacttgagcccagaagtttgaggctgcagtgagctatgattgtgccacttcactttagcctgggtgaggggaggagaccctgactgtatttaaaaaaaaaatgctctcagacctgatgaggaacaaagcattctattaaaaattttttgcaactaattttagtttttttctttttggttaatcagctttctactaccaaagattccccacagcctgttgaggagaaggttggtgctttcacaaagataatagaagccatgggattcacgggacctttgaaatacagtaaatgggtaaagtcctttaagttcttctcatttttccttttgggcattgtgctttctgctcctaatagattttttaaagcttctgctttgctttcatggaattcatacattattttggatgtgaggacgatctagctgcgacatctgtcaccccattgatcaccagggttgattcggctgatctggctgggtaggcgggtgtccccttcctccttgaccactctatgtgcgacctttttgaagctgtgttcttggttgaagaggatgaccttctccaatagaggaggaccattctttgatcaagggtatatgagtagctgcactcccctgccagaacctcccaagtaagctctcaaggtccatacattattctgataacttcttcaaaatatctttgcccacgtgccacaacctcttgctgcttccagtcagatctatacaacatgtggggctgaactagtccctccacctgattccttagaagcatctcatagtagcaggcatggcaacaagactgggctttccaggcccttgctgcatggtatgccatatagatgacttctgaggggtcagatgggccaaatgttctgattggcaacattcttaaggaagcattactttctgatggacccatattttataagggattt

SEQ ID NO: 27794 - DNA, 1053 bp, Homo sapiens
taaagcctaagtgtccttgggactgaccagaagaatcctgactaattttttaatatcctcgtttggaaagaaaagtaaatagtaacattccacaattagaaattctattttttcttcgttagggttaaagaaaaaaaatcattttcattccatgtgttccatttcttcttggaataaaccagaattgaagagtcagccctcttcctgctccctctcacccttttttattgtaaaggtaatatagcattagtgagagtttggaaactagatttttttttttttgccagaattattttggctatagattcttaaatttatccataattctaacttaacaaaataactctttggtttcttgtgtgttctttctaaacttgcccatatgcagtctacgcagtcatgttttacctataattttatacatattataagcatttaacatttttcatgttgttaacaataataataatctctgagtaaaccgtgcagtctgagtgatgatgatgtgtcagtgtaggtttgttctttgtatcaaatgcaccactctggtatgggatgttgatggcgggggaggctgtgcatgtgggggaaggggtatgtgggaactctgccctttccaggaagttttgctatgagcctaaaactgctgttaaaaaaaaaaaaaaaagtctatttaaaaaaaaaaaaatcccagccaggcacccaggctcatgcctgtagtcccattttgggagttcaaggcattttgggagttcaaggcaggaagatcactcacttgagcccaggagtttgaggccagcctgggcaacatatggagacactgtctctacaaaaatacaaaaatcagcagggtgtgatgacagatgcctgtagtcccagcaactcaggaggctgaggcaggagaattgcttgagccggggaggtggaggttgcagtcagctgagattgcaccactgcactccagcctgggccatagagccagaccttgtctcaaaaaacaaaaacaaaacaacaacaacaaaaacaaaacaaaaaaccctcaatggatacctg

SEQ ID NO: 27795 - DNA, 1035 bp, Homo sapiens
ccaggaggtggaggttgtagtgagccgagatcatgccaccgcattccagcctgggcacagcgagactccgtctcaaaaaaaaaaaaaataggaaaatatactttataagattgttgtgagataacataagtaaaacaccaagcatgtaggtaggtactagacatacaggagatcttcagtaagttgcaattgctatttttgttgctatttatgttcctgttgcttgggaaagttttctcctcactgtatgaaatgaaacttaaaaaaaaaaaaaaaagttgtcctaaaattacctttaccaaattgcaacctctccctttgtcttagtttcctcatctgtgaagtgaaaaggttggaccagaatatctctgagatttcttccagctcaagtgttgttattctgagttactctttagttcttcagttgccttttctccaagctaaacagcctaaattccttttgacctttccactaggaccttttattcatccctttgatcattcctgtggttctttttttggacgttctccaaagttgtcctctttgaaaaaaaaaaaaaatccacctagtttttattgagtaatgacttcatgcccagaatggtgttgagtattgggacagaaaatgacagacatataagatgggctgtgccctggagcttatagttgctaaaaggagcagacacacacgcccatggtattcaagaatcgcttgagtttgtcccagcaccccctttctacttctctgcctctgtcattcttgtttttttattttttatttttattttttgagacagagccttgctctgtcacccaggctggagtgcagtggcatgatcttggctcactgtaacctccgccttctgggttcaaacgattctcctgcctcagcctcctgagtagctgggattacaggcacacaccaccatgcctggctaatttttgtttttttttggaggggggtagagatggtggtttgccatgttgcccaggctggtctctaactcctggactcaggcaaccctcccgcctcgg

SEQ ID NO: 27796 - DNA, 1050 bp, Homo sapiens
ccactacgttcagctaattttttgtatttttagtagaaatggggtttcaccattttagccaggctgatcttgaattcctgacctcaggtgatctgcccgccttggcctcccaaagtgctgggattacaggcatgagccactgtgcttggccacctttgaaactttttaagtgtacagttctgtggtattgagtgcatttacattgttgtgccatctttaccacccttatccacagaattattttcattttataaaactgaaactctgaacctattaataactctctatagtcttttctccccagcccctggcagccaccattctactttctgtctccgtgagtttaactactttgtgtacctcatataagtggaatcatacagtatttgaccttttgtgactggcttatttcatttagcgtaatgtcctcaagattcatccatgttgtagcatgtgtcagaattttctctttttttttttttggagatagggtctcgctctgtcatgcgtgctgaagtgtagtggctcaatcatagctcactgcagccttgacctcctgggctcaagtgatcctcccacttcagcctcctgagtagctgggaccacaggcatgtgccaccacgcctggctacttttttttttcttttttgtagagatggggtctccttatgttgcccaggctggccttgaactcctgggctcaagcaatccattgtctcggtctcccaaagtgctgggactacaggcgtgagccactatgtccagcctgtttaatttgttgaggaattgtcctactgttttccacagcagatacactgttttacattctcactagcagtgcacaagggttccagtttcaccacatccttgccaacacttgttattttctggtttttgtttgtttgtttttgagacaaggtcttgctgtgtcatgcaggctggagtgcagtggcccaatgacagcttactgcagcctccacttctgggctcaagtaatcctctcatcttagcctcccgagtagctgggactacaggtgtgtgccaacacac

SEQ ID NO: 27797 - DNA, 1031 bp, Homo sapiens
tcctgcctcagcctcccgagtagctgggactacaggcgcccaccaccacgcccggctagttttttttttgtatttttagtagagacggggtttcactgtgttagctgggatggtctcaatctcctgaccttgtgatccgcccgcctcagcctcccaaagtgctgggattacaggcctgagccactgcgcccggccttagtttttttattttttaagtgacgggggtctcactatgttgcctaagctggccttgaacccctgggctcaagcagtcctcccacctcagcctcgtgagtagctgggactacaggcacatgccactgtgcctggctatactctctagttttaacatccattgatgatccttgcctgaatcagtcatttctgtgattgtcaaatgattgtgtaattcttccttttacatttattaggagctttcccttctccctcagtaattaatccatagtacggatccttattgtatcaaatggatcattattaaataggttataatctgatgctcaaactctcctggatttgtccaggagaatccctctcatctgggtgctaattcaagctgtgatttagggcaagtcccctcctctctttgaaccttagtttcctcatgtgtaggagacagttaagtaccctggtttacaagggtgaatgaatgaaatgcacccaggttccgagatctcctgggctgggatggggtgatttcaggactggtgtagtcctgagaggtccaggattttacggtatttcttgctctcctctgcaggcatccagggcattgtggatgcctaccgccaagccctgccccaagttcgcctctatggccctaccaactttgcacccatcatcaaccatgtggccaggtttgcagcccaggctgcacatcaggggactgcctcggtgagagtcgtgggtggcagtggcagtggtggcaatcaagggcttccttgagggttatggaacaaaggacttttttttttttttttttttttgagatggactcttgctctgtcacc

SEQ ID NO: 27798 - DNA, 1750 bp, Homo sapiens
tgggttcgagcaattcttctgcctcagcctcccaagtagctgggactacagtcgcttgccaccgtgcctggctaatttttgtatgtttagtagagacggggttttgccatgttggccagggtggtctcgaattcctgacctcaggtgattgacctgccttggcctcccaaagtgctgggattacaggtattgagccacagcgcctgacccagagggtggattttagagctaggcctctggaatcaaatcgtcatgccaggccaggagtggtggctcacgcccgtaatcctagcactcagttgcgaggccaaggtgggtggatcgcttgagcccaggaatttgagactagcttgggaaacatggcaaaaccccatctctactaaaattacaaaaattagccgagcatgatggcaggcgcctgtagttctagctactcaggaggctgaggtgggaggatcacctgagcccaggaggttgaggttgtggtgagccatgatcatgatcatgccactatactccagcctgggtgatagagtgagaacctatctcaaaaaaaaaaaaaaatgatgccacatgacttggggcaggttgcttaatctctgtgtgctttggtttcataagactaaacataggaaattgagtactcaaggagaggatacaagtaaagcagtaagcctggtacttactaagtgttctccgaaaaatggtatctgttatattatcgttattatctttgcctagaagctaacaggtacttacttgagcatcagtggaagccttgtttgcctccttgcagggtgcattttgccagagtccaccaagcccttttgtttagggccaaaccttttgactccccagtacccccaagggggcacaagctgaagtggaaaatctgacctgacctgatctgatctgggttttaaaattttaattttgtatttcaacataagttcagacttagagaaaagttgcaagaatagtcataggagctcagtcccttggaactcaggggtcagggcctgagttcacaggggctcttcacctttatcccaattaccctaacataacattttaccacatttgttttctcttttctcatacatgtatacagtgtgtatgtgtgtgtatatgtgtgtgtgtgtgtacacatgtatacatatacacacacattcacacatttcaagggaaaaaagattaaaaatatgtgtttatgtatgtacacacatgtatacgtgtgttggagaatgctgtagtgaatagccctgcctcaggtttgcttctatggccctaccagctttgtacccatcattatccacctggctttttacctctgagtacttcagtatctcctaaaatcaaagactctttcttacattatcacagaccaatcctcaaaatcaggaaatgaacatctatgctattatccagcctatagcatttattcagatgttgccaattgtcctaatgtcttttacagcaaaagaaaatctcagatcacacattgcgttcagttagcacatatctttttatatggaagacttcttgcctttcatgacattcacatttcatgatataaacagtataggccagatattttctagaatgtccctcagtttgggtttacctgataaatcctcaggattagattcaggttgtacatttttggcaggaataccaccaaagtgatgctgtatattctcagtgcatcatattcagaggaacatgatgttgatttgtcctattaccagtc

SEQ ID NO: 27799 - DNA, 1023 bp, Homo sapiens
gagtccttgactgatgctctgagaatttcctaccctaatttttctgtcctcaccaggctgagtttgaatgcatccaccctgagaagcagcagaaaaagaaaagctacaagaactctggaactatccgtgtcaagatttgtcgggtgagacaaaagcccatgtaaccaaggctctgattcctgagctccatgacaccaactgctatcaccccaggcatgaccctggtttcatttgcaggtagaaacagagtactcctttctggactatgtgatgggaggctgtcagatcaacttcactgtaagttactttaccaagggcaagagaacaggtctggggctcagggtggcctttagctgccttcctcacctcctcccaggtgggcgtggacttcactggctccaatggagacccctcctcacctgactccctacactacctgagtccaacaggggtcaatgagtacctgatggcactgtggagtgtgggcagcgtggttcaggactatgactcgtgagtacctgcttctctgggctatacccgctccctgcagatgcttcagcctctgagcttacagtcccctcactgccttttgcccaatacactgtcctcccacagagacaagctgttccctgcatttggatttggggcccaggttccccctgactggcaggtgagctccctctctttctgccactcctgttttcagtttcagggtcctgattttgggggatgtggtaaatttacttgctacttggcactcagctttaagaggagatgcagggttggattcctgcaggcacgtagacagcaagtgctcaggactccatagctcctataggaatcttggcacacgccagtgtcctttttcattcttagcagaggtcatggggaaagaacctcattttcattcttgtctccaggtctcgcatgaatttgccttgaatttcaaccccagtaacccctactgtgcaggtaagtttccccatccaccctgaggcaggtctgtccacacaaagaggggca

SEQ ID NO: 27800 - DNA, 1033 bp, Homo sapiens
cagagaagcttggtgctgcctgattacaagggcgagacatcagttagtttggagctggctgggcagggagctggggctggagatgaactttcagatttcattctgcaaatatgtattgtctaggtgcttgggatagagcaataaacagaacagctaaatattcctttctcacagaatttatattctagtgggggaaacagtatatacatgtatataatgttagacattgagaaaaagcaaaaaaggggtatgcaatgccaggggcagtggggttgaaattttagaggggctaaaagggagagcctttatatatatatgtatatataaaacagggaagattattttgagtaaagacttgtggggaaagggagcagtgagccatgtggatataatgcagagaaagaacacattccaggtactgcaaagtgtttggggtagaaacaaacttggctggctgggtgtggtggcacacactatcatgccaggactttgggaggctgaggtgggtggattgcttgatccgaggagttgcccagcagcctgggcaacatagtgagaccctgtctctacaaaaaaaaaaaaaaaaaaatagctgggtgtggtgatgcacacctgtagtcccagctacttgggaggctgaggtgggagggatcgcttgaacccaaggggcagaggttgtggtgagctgagatctcaccactgcacttcagcctgggtgacagtgagactctgtctcacgaaagaaggaacaaacaaacttggcttatttgaggagtgacaaagtggctgaaatggagtgagcaagagagacactccgagatcaggttaaagaaatctggaccttccaggaccttataggccatggtatagtttggactttttttcttttcttttctttttggaaatggagtctagctttgttgcccaggctggagtacggtggcgcgatctcggcttacttcaacctccacccgccaggttcaagcgattctcctgcctcagcctcccaaagtgctaggattacaggcgccca

SEQ ID NO: 27801 - DNA, 1050 bp, Homo sapiens
ggttggtaagtgtccttgtcatgaaaacacttgccttacaaggctctaattatgatttccctagtcagtgctctgaagatgtgtcacattatattataaacaatacggaaggggagataggtgagatgatatgaaaaacaaattttctcactgtcataaaaggctctaattatggttactttccttgtgatgaaaaacttggccttacagggctctagttatggttactttccctagtcaatgctctgaaaatgtgtcacattataaacaatacagaaggagagatagatgagagatcatgaaaaccaaattttatcttttacatggcccctttgtcttcgtttgaaacatccccaacatttcctacaaatcagcgtagttacaaaggggtcagtcttttaaaataagtatttcctattaaactatatatatatacagtgcctttttggtgttgtgagtcagtggaacactgaaatacagcggttgtgtaatttaagagtggcaacagtttcatttgataagatttgaaaaggctttttatcactacaatcttagaggattgacagtacaggatttttgtttaagagaaggattgtttagactcaagaggtgactatgttgtgggtcttttgataattcatgaatacagatttgctttgaccgatcactagatactgcctcctcaatttcaaaagcaatataacgtttgtatatgctgtttaatttaagttaatgttaagtaatcatttctcattccaaagacaatgcaaaaaacttcagcactgcttgagagttgtatttcagccacagatattttctccattggaaagctattttcattttagaaaaatgggttgtttgaagatgaaagtcttttatcttttttcacaatttattttggttatatgttcgtacattcttattaaatatttcatacactttattgcaactactttgttatttctacatcttagataaatgctgaaaaggaaaacgatttcattgttcatctaattaaataaattaaaagagcggtttgtgtagaaattg

SEQ ID NO: 27802 - DNA, 1022 bp, Homo sapiens
aaagggctaccatttgaagcagaaaacaaacatgtcattgatttttttaaaaagctggatattgtggaagatagtatttatatagcttatggacccaatgggaaagcaactggcgaaggctttgtagagttcagaaatgaggctgactataaggctgctctgtgtcgtcataaacagtacatgggcaatcgctttattcaagttcatccaattactaagaaaggtatgctagaaaagatagatatgattcgaaaaagactgcagaacttcagctatgaccagagggaaatgatactaaatccagagggggatgtcaactctgccaaagtctgtgcccacataacaaatattccattcagcattacaaagatggatgttcttcagttcctagaaggaatcccagtggatgaaaatgctgtacatgttcttgttgataacaatgggcaaggtctaggacaggcattggttcagtttaaaaatgaagatgatgcacgtaagtctgaacgcttacaccgtaaaaaacttaatgggagagaagcttttgttcatgtagttaccctagaagatatgagagagattgagaaaaatccccctgcccaaggaaaaaagggattaaagatgcctgtgccaggtaatcctgcagttccaggaatgcccaatgcgggactgcccggtgtgggactgcccagtgcaggacttcccggtgcaggcctgcccagcacaggactgcctggttcagcaataaccagtgcaggactgcctggtgcgggaatgcccagtgcaggaatacctagtgcaggaggtgaagagcatgccttcctgactgtaggatcaaaggaagccaataatgggcctccatttaactttcctggtaattttggtggatcaaatgcctttgggccaccaatccctcctccaggattaggaggcggggcctttggtgatgctaggcctggtatgccttcagttggaaacagtggtttgcctggtctaggactggatgttccgggttttggaggtgg

SEQ ID NO: 27803 - DNA, 1030 bp, Homo sapiens
ttttaaatactaacttctatatattctttgcatgttttttccctatagattgttaaactttgtttcctgatttgacttagacatttcttttaaatcttactgaatgattagtggtctgaatgatgtatatgtattttactgtcctacagttgttttttcttgaactttttgagtcttgggactgaactgtttccaaaattaatgccttctggaagttgaaattgtctacgttttacattgtaaatggcacgtaatgttcagtttttagaatatctaaattaaagacattgcctgtgatagcttgagggaatatttgagggcctaatatggtagctggtcattcttgtagctaaaaacttggtgtgataaacaggagtctgacctggccgttgccttttctcatctgcaggtgtgtgtggtttcagcgcagcatggctgtggtcatccgtttgcaaggtctcccaattgtggcggggaccatggacattcgccacttcttctctggattgaccattcctgatgggggcgtgcatattgtagggggtgaactgggtgaggctttcatcgtttttgccactgatgaagatgcaaggcttggtatgatgcgcacaggtggtacaattaaagggtcaaaagtaacactattgttgagtagtaagacggaaatgcagaatatgattgaactgagtcgtaggcgttttgaaactgccaacttagatataccaccagcaaatgccagtagatcaggaccaccacctagctcaggaatgagtagcagggtaaacttgcccacaacagtatccaactttaataatccatcacccagtgtagttactgccaccacttctgttcatgaaagcaacaaaaacatacagacattttccacagccagcgtaggaacagctcctccaaatatgggggcttcctttgggagcccaacgtttagctcaactgttccaagcacagcctctccaatgaacacagtcccgccgccaccaattcctccaattccagcgatgccatctctgcc

SEQ ID NO: 27804 - DNA, 1048 bp, Homo sapiens
gttgacttttcaggtggggcgcagtggctcacgcctgtaatcccagcactttggaagactgaggagggtggatcacctgaggtcaggtgaaatcccatctctcctaaatacaaacacttagccaggcatggtggcgcatgcctgtaatcccagctacttgggaggctgaggcaggagaattacttgaacctgggaggtggaggttgccgtgaaccgagatcgtgccgttgcactgcagcctgggctacaagagtgaaactctgtctcaaaataaataaataaataaaagttgacttttcagatgggttggaaaacaccctatgttattgaccaccttaatttcaaagtagtatgtttcccaggcccaataattcggtttgtgtcactttccaaagggctgcccttgaatttgctcttagaagcctttggaactgaaatactgaaatttgaggggaacatttcttttttgattatgtcaaaacaggcatgatctaaggagatcacagagatcctgtaggagttgtgtaggtccaagactgtaacaaccactgagtaattcacactctggttctaaaacaaaaacaaaaaatatttttattgtcagccctctcctaggggaaaataatactttaaaaaattttattaaatagaggatttggttatgagtcattggacctgagttttaattaaaatagtcacagtgaatgggactataaccaggttctacttttgggggtaatgaatcaaggtaactcagattttagctgtcctattcagtagttcttttggcttcttagtatgtcttaaccttgtttataataaataattccatatgtagttttttgtaatgtacaaggcagattgaaaagttttaggatgaataaaataatggaaccagttctcatttaagacttgaatctacttttagtcttaagtattatttacaattcattagtattctagttttttgcttctgttggatggattttgagactgagctctataaaatcacactcttgataattctatgaaattatcaagtatatag

SEQ ID NO: 27805 - DNA, 1048 bp, Homo sapiens; identical to SEQ ID NO: 27804

SEQ ID NO: 27806 - DNA, 1050 bp, Homo sapiens
ctcaggtctaagatccaaggaattcttttggattagacccagggatattggaagcacaggccaactctggggagatgaaacgggcaagaactgggtaagggtacagcataccaagatgatgtagggttaagttccacccctaactgggaactagaacaaaaccaagaaacaaatgctgaaaagcgggtaatatgtggtgggctgaaacgagctgcttatacatgtcatatgaagagaggcttaaactagatgtttatacaagtctcaagggtcttggttcctccaagggaaaccatggccatagcctcttaccagtgggatgaaagcttcaagaatatgaccatgtttggtgtccattggctcagggccccactgcaattgagcctgaggaacctagttattcctgttagcagttggggagagctctcaggagagctgacaaggacttacagggagctggagagctcaggataccttaaccacctgtgttagggtctaccagggcaagaggcagaggacagacagggacagaaggaggcaagccattgctcagagccttggggccaatgttgtcgacttcctatctaagccctcactcatttaatgcctcttctctttggcagccctctctgggagatggttcaggatggcattgacctcaagagcatcaagtggacccaacactagaagaatagggccctgactttgtgctggtctggcccctcctgcctcaccaacccgtgcacaaccagacaccttgttacacctagtggatgctctagattggtatagaccagttgacttcagcatcagtccacctctatgacagaaacacaagaaaactgtctttccctagcttcagttccttgggtgtggagcactccccatttcttctcgggtcttaaagtgtgtggacattttcatcccgaagccatagagacatttgctgtcatattgctgctgggcacatctgtgctcttggtgaggagagcaagaggaaccagaagaagtctctttggtcagggaccatgatgctctacatggacattt

SEQ ID NO: 27807 - DNA, 1020 bp, Homo sapiens
ttgtaagtgcctctctttttttggttggctgggtagctgggtacagactgaagtttaccaccctaggaagacttcctggggtagaattttgtgccttttatcgtcccaggggatgtatgtgtctgttgtgggttacactagcagttctgttacaggcctctagaattgaagatgctccaaaggccactaagtgtttggctgcccttcaggctggtgcagatggtgcattacgtcctggggaagtgagcacatggtcctctgctgcgtcttcttgtcaaacccatgtggtatcatgctctgtcacactttgccagcgtccttgcttaaggaagtcatccaccatgggggccagaggagctaggttcacacatcctaggatgtgcaggggagcatcaggtcctttagttctgccagattagaaggtctcttgttttctccagggtatgactccagggccctgggggatgggaacaagactgagggtttgtgactaaaagtagacgttgatgatgaactgaacaaggttcgtgtctctctcctcagtgcctgcacctctgcatccctggagccctcttatgtgcttagagcaattggcactgatgaggatttagcgcactcttctatcaggtcagtgagttgagctgcaacatttatgaaaggcatcctcttatatttttcatctcctgttacagtttttttctttttccaccctgaagtttttctcagtcgagttctccttatctcttctcataaccttgtgaaagtttctagagcagtggttctcagacttcattgagtatcacctgggaagtttgtgaaatatgatatctgagtcccacattcagatattctgattcactaggtccggaggaggagtagaaaacatctcaggtgattttaatgttggtggtccgtagatcatgttcttttttttttttctgagacagagtcttactctgtcgcccaggctggagtgcagtggcatgatctcagctcactgaagcctctgacttgcaggtt

SEQ ID NO: 27808 - DNA, 1029 bp, Homo sapiens
tttttcctaggttatgattgtagagcgaggattattataatattagaataaagagtaatcactacaaactaatgattaatgatattcatatataatcatatctaagatctatatctagtataactattcttattttatatattttattatactggaacagctcgtgcccttggtctcttgcctcggcacctgggtggcttgctgcccacacctttagcaacaaccttccagtgtgtcctgcacatcctcatcagactttatttctaaagtacttatttggccttttctcactttactcaaaaatcttgagagatttcccatttcctttgacatgaattataacttcattttgcctgatattcagagttctttacatggtgcctttttaagcacttagaaatttctgatgtaattcacataccataacattcatcttttgaaattatacaattcactggcttttaatgtattcacagtttccaacaatcatcactgtcatattccaggacattttcatcacttcataaaagaaagctatgtatttttcttttgtcatttgcacttttttttttttttttttttgagatggagtttcgctcttattgcccaggctggagtgcaatggcatgctctctgctcaccacaacctccgcctcccgggttcaagcgattttcctgcctcagccttctgagtagctgtaatcccagcactttgggaggcggatcacctgaggtcgggagttggaggccgaggtgaccagttcatctgaggtcagaagttcaagaccagcctggccaacatggtgaaaccccgtctctactaaaaaatacaaaaattagccgggtgtggttgagggcgcctgtaatcccagctacttgggagggtgaggcagcagaattgcttgaacccaggaggcggaggttgcagtgagccgagatcgtgccattgcactctagcctgggtgacaaaagcaagactccatctcaaaaaaaaaataaagaaagaattcattttgaaatccaaggtca

SEQ ID NO: 27809 - DNA, 1841 bp, Homo sapiens
aaacaccttacctcaagtgatctgcccaccttggcctctcaaagtgctgggcttacagatgtgagccactgcgttcggccctcatttcttaattacctgtaacttttacattgacccaaatctgggagataggataggatctaattttgaaatgtcaaagacgtgcttttagaacatcataagaagaaccttttgttattttgttggtgggggatggagtctcactctgtggctcaacctcttcctcctgggttcaaggaattctggtgcctcagcctcccacatagctgggatcacagacatttcccaccacacccagctaatttttgtatttttagtagagacctgcctgccttgacctcccaaaatcctgggttacaggcatgagccccctcacctggctggtcctttgaccttatatatatatacgaagtgagactgtaactgagaagatagattttagaccctggtagtaccacatctgaaagtacgaagaggtcctgtggttgcttcatgattttcttctaaattgaaagctcaatattcaattaaagtagaagacgacttttgtttttacatttattttttcactgttttgccttcttagtggttgttcttaagtgtgtgagtacctttagaaaacctgcatttggtttcatttcctttctataaattgtatgacttattttgaaatttgacaagcagttactccctagaatttctgacagcgaagccagtttatacttacaagaatcagaaccagtaaggcatttgtgtatttaacagtcatttgatccctcctcaagttatctttattccattggattaacacataatttattttgagcttatagtgttagctattcgatcctttacagtgagtaattgtcgattgctacttgctctaattgatagtaaactcattacctagagtttattattacagtttgaaaggtttttttttaaccagaaaactgtttacctgtattgcttctcattgttcataatgttctttgacaactaagaaaatttttagttcatgttctaggtattccactaaagggtggtgaaagatttcttcctgccttcagggaattgatacagtgacaaaggggtcatttatagacaattttcttacaccctggatgctgtatcagatacgttgatttgctcttaatgtcttcagttaactgaagattatccactgttaaatatcagttctaccgttagcctttatttcttttattatggatgaatgtacctcttgggttctttctcatcgtgtagtatatattaagattgtttgaatgtagccagctaaaatcctaaagctccatatggattcctgacaatagtgtccctaccctttatctatgtatctagttacattcccttttttagtgctggtggtggtagagatgattttaaagatcattctgttttattagccttgctataaatttcttctgcattaataacactcatgttttaggtgaatatctgtgtaactggatatttttctccagatggtggtcattaaaatattacatataacttgctgaaataaaattgttgagtgtttactgtgtttgaggtgcttgtcccctaagtcttttaaagctattgggtgaaactagggatgggtcatcactatatccacattattttattctgccagtttgataggccctttctaaaataggttagagtccttatctttatgaaaaccatgctttatttttcactttgtcacaaatgatatgacaaatcatttttgaaattatgattgggttggtagacaaaatagcatggatttctgatatctatacattttttcccat

SEQ ID NO: 27810 - DNA, 1048 bp, Homo sapiens
atcaagttatgtatttatttgcttgtgtatgaagtatttatgttttatatatgaggattatattgactattttgtccctgggcacatttttgttagaaaagtactaaattctacctcaggtggtctgcctgcctcggcctctccaagtgttgagattacaggtgtgagccactgcacccagccagttttcacattttctaaccacaatccccatgttctcaaatataaagctgtcattacttgtaatatcttttatttaaactaccacatcaacaagcctaatttgcgttagctagcgtcgtcatcatgtatgttgtgtttgctacttacagcttgcagtttctaccttagtattcagaagtaattattgaatatgctaaaaatataaatatatttttaagtatagtttgtattttaaaaattaaagcactgtctcctgtccttgcctcccctatcatgtagttttctgactcagaatgtgccaaaaaggctttggaacaacttaatggatttgaactagcaggaagaccaatgaaagttggtcatgttactgaacgtactgatgcttcgagtgctagttcatttttggacagtgatgaactggaaaggactggaattgatttgggaacaactggtcgtcttcagttaatggcaagacttgcagagggtaagtgtttcttgctattacgaatgatttactgtgggtattgtagtggaaaagaaaggtagccatgtaaactaagaaagggaaaaagattttatcttattttgtagttggcgttatccttggtcacactgcatattattttatagatgatgtgccttgtattaatgtatggaaatctatattatgtgttttgaatgccacagtataagttgcaagatttcttttcctttatgtagtgtttatatgtcatacttaggaataaatttagttgcagctattataatgttacaagtttttctttttgtaatttcttattttttgatgcagggtctggctctgttgcccaatttggagtgcagttgtgcgatcctggctcaccgc

SEQ ID NO: 27811 - DNA, 1067 bp, Homo sapiens
atgttggttgtgtctaacaattccaggaagcatttttctctgtatttagtatttgtggtatcagaatgcatcttaagattgttgtcaagaatgtaggttcatgattcattttaggtgtgaaatgtagcctgcttacttttttttttttttttctcttgagacggagtctcgctctgtcgcccaggctgtagtgcagtggggcgatcttggctcactgcaagctccgtctcctgggttcacgccattctcctgcctgagtctctcaagtagctgagactacaggtgcctgccaccacgcccggctaatttttttgtatttttagtagagacggggtttcactgtgttaaccaggatggtcttgatctcctgacctcgtgatccgtccgcctcggcctcccaaagtgctaggattacaggcgtgagacactgcacccggccagcctgcttactttatatgtgactggcatgtgctctgaaaacattctaaaataagcagggtatgatgtggggtgtgctgtagtccctggcagtctctagtggatgagaaggaaggatgatcacttaagtttaggagttcaagaccagcttgggcaacatagtgtgagactgtctcaaaaaaaaaaaaaaaaaagcctctaaataaactttttatttttatttttttttttatttttattttttttgagactgagtctcactctgtcacccaggctggagtgcagtggtgtgatctcgtctcactgcaagctctgcctcctgggttcatgccattctcctgcctcagcctcctgagtagctgggactacaggtgcccaccaccgcacccggctaattttttctatatttggtagagatggtgtttcactgtgttagccagtatggtcttgatctcttgatgtcgtgatctggctgctttagcctactaaagtgctgggattacaggtgtgagccatcgtgcccagccaaaaactgtactcttgaagctgtaactccctaatttcctgcaggcccttggtaaaatgttatctacctcctctttctgaattttgcatattctagatgcctc

SEQ ID NO: 27812 - DNA, 1035 bp, Homo sapiens
cccacccaggttagcctcccgagtagctgggactataggtgcagccaccatgccctgctaatttttctattttttttttgtagagacaaggttttgccatgttgctcagttggtctgaaaatccagggccaagcaatctgcacgctactcccggccttaaaagcttttgtgcctggcgtggtggctcatgcctgtaacaataaggtcaggatatcgagaccagcctgaccaacatggtgaaaccccatctctactaataaagtacaaaaattagccggatgtagtggcgcgtgcgtgtaatcccagttactcgggaagagaggcaggagaattgcttgaacccgtgagatggaggttgtgatgagccaagatcacaccactgcactccagcctgggtgacagctagactgcgtttccaaaaagaaaaaaaagcttttgtgacaaatcttacaggtggagcgaccaccccaacccccgtacatcctgagagtgtccaaaaaatggaaaagatcgtgtttaggcttacatcttaaaggatgacttacaaccttaattgatattttgtaacagagatgatgttaatagacactgtatctaaatttgtaaagtagaatttgtagaatcatttggggtttcacttcaagtttgccatttgtgattgtcaaacttaatttgactttacaattacatggttttgttgtaaagaatcatccattacactgattttggatcagtctggcatttgtgattggtctggtgatatgttttatgactatgattaaactgtcaggcttctggttgacccttgttttagaaaaattaccctttttgggccaggcgtggtggctgacgcctacaatccgagtacttttggaggccgaggcgggtggatcacgagatcaggagatcaagaccatcctggctaacacagtggaatcccatgtctactaaaaatacagaaaattagccaggcatggtggcacacacctgtagtcccagctactcgggaggctgaggcagaagaattgcttgaac

SEQ ID NO: 27813 - DNA, 1048 bp, Homo sapiens
gctgttttcagctgaaatgtcaggccagttgtgaatttgttgtgtatgctcattgataaagatccttttttgggctcatctgtatttaaggtttgttaataataataaaaggtattccaaactaaaagtgttttgaagattagatcactagaaatttggatgtggatatttaaagttggaaacaaatatattatggttattaaataactatattaaccacctacaattctaaggattgcatctagcaatctttaatgctttatgaggttaattcctcttaataaacacagtgctgtaaactctgggatatattaaaaataacccttctaacttctaagatttgaatggttaaggatggaattcaaagacaaacagacccgaatcacttgggcaagatacttaatcccctaagctaagcatttgttttctaaccttttaaggagataataagtttcagataagctattaatgagtaatgaatgagaagaaaatgtaaagtgctcagaggacttaatggattcatgaaatgttttggcattacatgaattccgattctggctcttttatctttaaaataaaaagaattaaactccgtgatgctggtttcctccaagctgcttatttcattaactttttaatagctgaaaatgggaccacaatgctattttaatttcgaatgctgtacaacattaggaacttctctgcttttgtcccatttatcaagattctgagcatttttaaaatgggattatgttaaatctttttaccaggatgaactaaataaggggaaaggaattagcttaattcctttgagtgatggatactttgtttgctgggatcatggcttaactttaataaaaaattacttagttcttaatgttgggtttgaggctgtaactcagaatattttataattaaaggggaaagaaaatagcttataactaattacttgagaactgtaatacatccagtaaatgattctcagtcatcagcattagtctgaattgcaaagggtcaagttaatataaagtgttttatttggaaatac

SEQ ID NO: 27814 - DNA, 1034 bp, Homo sapiens
tgaatgtgaaaatattctattgtaagtttgttttattaatttattttgtggattacagtaatgcttttgttggcctgttgtatgacaaactatttaaaggttcacattttgatttgtatttgccaacaagcccttttgcttgttaaagctatagctaactctcaggagataattgcagttctactcttagaggatggtgtctttcaaataatgtcttgtctgctgattttcagtaatgttaatataaggcaaaagggatattgtttactatacgtagcaatttttttagacagagtcttactctgtcgcccaggctggagtaccagtggcgggatcttggctcactgcaacctccgcttcccgggtttgagcaattctcctgccttagcctcccgagtagctgggactacaggcgcacggtactatgcccggctaatttttgtatttttattagggacggggtttcactacattggccagactggtcttgaactcctgaccttgtgatctgcctgcctcggcctaccaaagtgctgagattacaggatttttttttttttttaagtatgattatgtaccattgtatcatagtaaaactagccaaagaaatttatgaaaggatgaaaaaatgattctggccataaaaggtagtatattttggtgggttcttaagccagcatgataatggcgagtttttttcttctcaggaggaaaaaaagcaagagcagaagtcgtagtcatgaacgaaagagaagcaaaagtaaggaacggaagcgaagtagagacagagaaaggaaaaagagcaaaagccgtgaaagaaagcgaagtagaagcaaagagaggcgacggagccgctcaagaagtcgagatcgaagatttagaggccgctacagaagtccttagtatgtaactatagttatgattttggtttgagggttattctctgggtattcagatggcagtttaacttgagtgatttgaattgtgaatttttatttttttaatgattggttaaaaagtattgaattaaggat

SEQ ID NO: 27815 - DNA, 1028 bp, Homo sapiens
gttttctctgggcttttatgcaaaagattgtattttctgaatgtcttagtatgttgctgtctttttacctgcctggggttgccttcagatgtgggtgaggacttgtttacaaaaagtcctagaagaccttaagttaaaattagctctccaattttcaagtgttttcttttggcagaataagttttgggtcctatgagaggtaaataggttggttgcctctcttgctatagcccatctagagcagaacaaaaactttgtttttgagggggatggagttactttttaccttgttccctaattgaatatatttaggacttttggttttagaaatctcagagttctatagttggaatagtgtcacagagatagtgttaggtttcttaggcaacaaaattggagtgttacctattgcccatctgggcatggctttgatgagttctatataaataatgagtgtagcctaattttctgtcatgtgctacctagcatatacatttctgacagtcaggtggattatcttgaaattttagacaaactttctgcctccttggaaagctctacatctccttgtgattggagtgtgggtttcaagattccagaaggtgggtgtcttcattttctattttcaatgcactctaaagatgacctgcttacaggttctctgaggcagacctcagttgctcttgtgatatgtaactttgctttgataaggaataaacaattacatatccagataatgatacagaattgtcaaaatgtttaatcattaagccactacaaatagacattttcgtggaataaactgattttgaaatgtctttcaatttatattgaaatatctgaaggcacctctaaaatttgggtgatgacacagaggtatagattataagatttaattatgaatgggtggtatactgtgaagactacggaagtgagcagaaagatatgtttggcttttttggtttttagttagagattttaaaaaggtctgtgaaggtcaagttgatcattggttttgattgcatccc

SEQ ID NO: 27816 - DNA, 1024 bp, Homo sapiens
tgtcagtctttctcactacaactgtgttaggtaggttgataaaatttcataaaacagatgagaaaatatataatgttattcagggcttgttaagccactattttttttttttgtagttcccctaaaataatgtggtaatggattaaaaatgatataatttgtagaaaatgtgctccttttttctggtataagcttggatgggagtcatttatagttcctcaccaatcacaagaaattgtggggatcaggttgggtttagtcttgatgtgggatctgatgcaaccaaccagaggtatggtttatgtcatctggttttagactttctgccacagtaatggtttcctaatgtttttgttttgcaattctctaatcaaaagaaaacccaggaaggtgtatccatataaattgacataaattatccaatttaggtgtcaggccgagtggctaaagatttcgcttcaagtgccagaaggataagaacgtacacttttgggtacagaccttcgttactgtaccattgtctcatgtcgctttttgccactaaggtcatctccggtgtctacttgtttttatcctgtgtataagctgattaaggctacaagcttttacaaggaagctgagcatcaagttctccatgtgtgatattcggtggcctttgtctaatgtagagaaccacaggactaaataggagaatggacaattttctttaaccatgagattgtctaagggaagatcctttcaaaacactttggtaatcttaaaatactttccagtcagacttctcgtcaattataggtgataaataaatgattcccttgttcaatcaggactcttgattttctgaaggaactttatgtttcaaattaattttaaagttacctggaagaaaatttttgtatttaggaatagatataaaacatacagaacactctgctttaaacctttagtactaaattaaatttcttaaccaaaggaaagtgccgtgttgcatttttcattctaaaacttcattgtcttaaaagcc

SEQ ID NO: 27817 - DNA, 1614 bp, Homo sapiens
aatgtagtggtttgggaaaaagcaggggtccaagaataacaaagcatgaccagtctgtggcaagttaaatcttctaacagtcttataagaagaaatgggtgagattttaaaatttatgtatctatgtaagactggtgatagtaaatcttaaaacagtccagtggcaatctgctgctcagttaataattactaaaattcttggatccctgaatagaaattaaaaaaaaaaaatacaagaggcagtagagtcaatacaagcttaatacaagcttagagtaaatacaagcttagagtcacttgatgactgttttactgttctccatattgtttttatttttaattaggccctaccatagtatttcacactaaaaacaaaggaattatattggctaatatagtctttgactcatttcggtatctcagtaaaagtaaactgtcttttcattgtttcaccagttggtggtgaaaatagcagtatgcatgcattatcactggtgtcacaaactgtaagctttgtaagttagcactttactcctatagctgatgtaatcaaactttaaaataaacatttcactaaaccttttaaaaataatacatttgttttggattgtatagcacgaccatgtggtaccaatttggatgaattcttgatagatttaaatagtgtatgtaattttgtaatgcttagactcttgaagagctactttctgttttaatgttaagattcttgtgtcttagttttttttaacatggatgtaattccatgtaaacaggtatggaagtaggaaatgtttaggctggacttggtggattattaattgactttcttgggttcttgggagtcaacattactaaagcagtgtgaatccctgtttgcttcagggcgagatgtgtgacagaggtggcatcaagctcttacagtcccaaccctccaacggaaatgggcgaagatctcaggaatggcatcggtcacaggaaatcgatagtggctggctgctagcatggccacttggggcttaggcagaaatagagccatggtactgaccaaagggaccatagcacatggaataaaactcaaaacaggacttcatgttttatggaaattatatttaaccacttcaacattgtaaatctggataacttttaatatctaaactatataagaaagtaaaatttaacatgttaatatggaaaatttttttatttttgtatcttgatgacttaaatgtaagcaacaaagtggttaaacacatacccatctaaatttttttatagccttccatgttaaactataagtaaataattagttttaaaattgttttgtattttcttattcctgttccctttaccctttgacaacttgaaatgttaccacttcgtcctcatgatgttcttctatcaaccctgcttaggatgagaacaagttgagcagtgccaacggccatgaagaacgtagcaaaaagtgagttttaagaaggggcttgggggagggtggtgagcttttttgtggttttagaccttaagttgtgttcctgtggctaaagtatacaaaattctcttctgaagcttttctttgctgcttttagaaaattggttctttgccttttgagacaa

SEQ ID NO: 27818 - DNA, 1034 bp, Homo sapiens
gagtaaaattagcatattttgtacactttgtgttgaaattcgtaggaaaacttgtcttctgtaaagacttttgcataggaatttgtttgaccatctctaagcattacacgtgcctgtacttgtccactggattgaaggcagagaaggaagggaggagggaatgattcaaggccaaaatggccacatttagaagatacctcagatgataaccattgttatgtgtgtgcaattttatttaacagtgctgtgtatgtggtggacaagttatatgaaatatctagtctttctagatatttggaagtgcttgatgtatttaaaagtggtagtagaataacactttgtaaatagcttttaaaaactgatgggaaatgctgtttggaagtggaattgttgaaccacctgggaggtgggagggaagaaattgcaaatggtgttttgccattgtttattagaaaatttcagcttaatccattgtgtatatgttacatgcatttcatttaactttgctatactgtatatattgtatatataacggacaaattagtcccgattttataatatctagtctctagatattaaagaggttgccaatgtatgacagaagtagagttagtaaactaacacattttgtacactttgttaaaatttgtagaaaggctgtcttctgaaaaggacttttggaagtgagataacatcagctctaagtgacacgtgcctatatccatcaggttggtggtggagaggagttggaaggaatgaagggttctagaccagaatgttcgtatttagaagacactatcagatataaccattgttacatgtgtgtagtttattcaaccctactgtgtatatagcggacaaacttaagtccttatttgaaacatctagtctttctagatgtttagaagtgcacaaagtatgttaaaagtagaggtagtaaataacacattttgtagctatccttttgatatgaaatattgtcttggaaattgatcaattctctgagcagtacccattttgatatttgtgctggt

SEQ ID NO: 27819 - DNA, 1049 bp, Homo sapiens
acaaagataaatgcttatagaagattgttctttgcagaactgttcattcgggaaaattgcaaacaactaaatacccctcaccaggagctggcccattatagcaactctgagacctctctaccgcaggctcttaaaatggggtaagttggtgcgcgctaatgtaggggcatgaccaaggtatatttattgacagcttacagtgtcccaacaaggagggactttggacatagttggtgagaactttagtgggaaaactttttccaagtgataagttattgtcatttttctctcccctactttcttttttctttttttttttttttttgagacagagtctcgttctgtcgcccaggctggagtgcagtgatgcgatctcagctcactgcaacctccacctcccagctgcaagcgattctcctgcctcagcctcctgagtagctgggactaaaggcgcccacgcccaccaccgtgcccagctaatttttgtgtttttagtagagacttgagttttgccatgttggccaggctgatcttgaactcctgacctcaagtgatccaccgcctcaacctcccaaagtgttaagattacaggtgtgagcctagctttctcctcctctttctaaattaaaaagaaatattgtgataagaagctcctcctaccttttttccccatgtttgaagaaactgggttgctaagggaagaaaagacttgcctaataggagtttggggtcctgacccctggaagggagctggggatagactaggagaggaaggagaggtggaaaggcatccaagcccagaccagcctggctgcccaggtcatctaagtcagttccctgcctccgtaccagaaaaacccaaaccggaggctcttggatgtgaggctccaggttcatcctgccagtttctagtgaacttggtgatcacataggtttaaatgaataaatccacttttgttaaaaaaaaaaaaaagtgagccgcttcctttttttttttgagacagagtttcgctcttgttgcccaggctagagtgcagtggcgagatctc

SEQ ID NO: 27820 - DNA, 1031 bp, Homo sapiens
ggctgaggcaggagaattgcttgaacccgggaggtggaggttgcagtgagctgagactgcgccattgctcagcctgggtgactgaacaagactccatcttataaaaaaagaaaagaaatgttacattccatttgttttacactttatggtttatatgtttatataacttttcttacttaatctttaaaacagccttgtcagatagctggttattgtcttcattttacaatatctctgtttttgtgaagaatggcagaacattaaaaaaacatacaaagaaatcagggttcagagtgacgaggtgacctaagttccacagctagtacttgaatccataataggtcttttgctgccctcatctgacacagaatatagcactgaaccagtctgatgcaaataatcagtcattcagcctaccagtacatcagtagtccccaggctctgccccagttcccatcatgagccgcacgatttggcttgtggtaatgaaaatgcaaaccaaacaagatggacttattctggagctcagaagcttacccatgtcttctttcaattgttctaggaagagttacaggccaacctggacctgatccaaacctacagaatgcatattgcccaagacatcaaccaagacaacctgcagctcttcttgaattcctacaatgggtatagttttttcctgtttcttcacttaaatgtaaacaggttctaaaaagaggagggtgggagaaggagagaggactgtatctaatcttgggaccagcttctccgaggtgaaaatgtgagccccttctggctttctagaaacatggacaaagattgaggaaatggatcagctgtaacttacccaaaattatacagccagtaaggagtaaagccagattttgaaccttgtctctttagctctttcctctgtataacagagcctccctatttttagttgaaatcagaaagattaagccctgtgctaaactcagttacaaggaaaacacccctcccccctcctcaaagtgtaagtcattctcttaagg

SEQ ID NO: 27821 - DNA, 1073 bp, Homo sapiens
gtcggacgctctctttaacttggatttgcctgtagtgtcactccatatggcagacactttctccttctctccctttttcttgctgcctccccccgctttattctttatatctctcaagaaacaaaacatgagagatattgaaacctcctttagttctctttaataatttatccattcccagaaggaaacaaagttctaaagttagtgtaccttgtttctcctccaagtttttatactttagttataggctggctgtgctggctcatgcctgtagtagcgctttgggtggctgatttgggacaatcacttgaggccaggaattcaagaccagcctgggcaaatatggagaccccgtctctccaagaaatctaaaaaataaaaattagccaggtgtagcagtatgcgcctgtagtcctagctacttgggaggctgaggtgagaggattgcttgagcccaggagttctatgctgcagtgagctatgatcacatcactgcactctagcctgggcactagaatgagatcctgtctctaaatatatatgtgtacgtatatgtatgtatacatatatataaataaacagaatctatagtgttgctttttaaaatattggcataagtggtatatttttaatatatatccttttgcatcttgctcttttacatttttttgaagattttctgtgtgtattaatgctaataattctagttcatttttatctgtatgtcattatatgaataaatcgtaattcatttattaatttccccattgatgaatatttgggctgtttccagtttttttgacattatagagaaggttgtgatgtttacacccttgaccaacacaggtttgaactgtataggttcacttatacatggcttttttttcaatacataaattggatttttttttttttaagaaagggtcttgctctgtcacccaggctggagtgcagtggcaagaacatggcttactgtagctcaagtgattttcctacctcagcctccaagtaactgggaccacaggcatgcaccaccaggcctggctattttttaaaaattttttgtagagaca

SEQ ID NO: 27822 - DNA, 1062 bp, Homo sapiens
aagtcagatcgtgtcattccagtgacaacacatttattgaagtcagagggctcaagaaaaaagtgaaagttggttattaaataatggtaatatcttaaactcttacattcttaaaaggcttttttttttttttttttaaagatgcagggtctcagctgggcacagtggctcacgcctgtaatcccagcactttaggaggccgaggcaggtggatcacctgaggtcaggagttcgaaaccagcctggccaacatggagtaaccctgtctctattaaaaaatacaaaattagccaggcatggtggcgcatgcctgtaatcccagctcctcagtaggctgaggcaggaaaattgcttgaacccaggaggcggaggttgtggtgggctgagatcgcaccattgcactccagcctgggcaaaaagagcaaaacgccatctcaaaaaaaaaaaaaaaaaaaagatacagggtcttactttgtcacccaggctggggtgcagtgacgtgattatagctcacagtaacctcgaactcctgggctgaagcaatcttcccgcttcagcctcctgagtagctgggactacaggcacatgccaccgtgcctggctaattagaaaatatatatattttttgtagagatggggtcttgctctgttgctcagactggtcttgaactcctggcctcaagtgatactctcaccttggcttcccagaatgctaggattacagacctgagccatcctgcctgaccttaaaaagaccttgtgtttaagactacagctttcattaggtgggagagacagtccagaatagagaagtatgtcaaggacctttatgatttcatgttgttttataaacatggagaataaagggattatgttcaagaagtgcatagccttggaggtaataaataatcagtaagtactgggagagccggggaatggtggctcatgcctatattcccagcactttgggaggctgtggcaggaagatcacttgagcccaggagtttgagatcagcttgggcaatatagggagaccccatctctgcaaaaaatttaaaaatt

SEQ ID NO: 27823 - DNA, 1026 bp, Homo sapiens
atctggagtatctctggaggggcagcttttgggaagctgttaggaaccttctagaagtcattgtagagacagaataaatagttgtgataaatcagtttctacataatgggagacttttttcaggaagggggttacactttgtgaaaaatcaagtagaagttttcttttattcccaaatacatcacttgttacctttttttttttcctttttttgaaatggagtctcactctgttgcccaggctggagcacagtggtgcgatctcagctcactgcaacctccgccttccagtttcaagcaattctcctgcctcggcctcccaagtagctgggattacaggtgcacaccacaacacccggctaatttttgtatttttagtagagacggggtttcaccatgttggccaggctgcccacaaactcctgacctcaggtgatctgcctgcctcagcctcccaaaatactgggattacaggtgtgagccaccacactcggccccttttttatactcttatgacttgcaattctggcatctggaatgctggaaaaatgcttctgagttattgccattgatttttttttcctcaatcagtcattattataatataatccctttttagaagcttggtgaattctccatcgattttttgactgtgtttgactttttaaatgattcaatgacttgtcctttttccctatcagcgatttcataggatgcaacagataggccagtgtattaagaaccttgttttgtctttctttccctccttcagtaacactgcctttcttctctgttagatttcaaggctttcatttctgatccatccatatctttgtcctcttcctgatcctttatttaattcctggttctgcacctgttctccttcacctttctcagctttggtctccaactcctttcctcccaggtacttcccttgtgtgttcaaggtgtgcttccagactgtggtccatgttttaccctcttcctgcaaattctcaccgctctccttaggtaggaaggcaagaag

SEQ ID NO: 27824 - DNA, 1039 bp, Homo sapiens
taattaatggctttccttgatttttttcctcttcaaattattctgttgttttaattttttccttgaatccctttctgctgcttaagtctgcttagtgtaagaatttctctgaatatggaattaatggcatcttcaaaatggacagaaaaaaagaaagcacccatagcctgaaatttctagaagttttgttagagtggaaccatatactgtgaacatcagagacaaacaaactgaggcaggaggattgcttgagcccagaggtcaaggctgcactgagctatgatcatgccactgcaactccagcctgggtgacaaagcaagactctgtctcagaaggaaaaagaaacagggcaggtgcagtggctcacgcctgtaatctcaacactttgggaggccaaggtgggcagattgcttgagcccagaagttggagaccaccctgggcaacatggtgaaaccctgtccctattaaaactacaaaaatgagccagttatggtggcgtgtgcctgtaatcccagctactctggaggctgtggcaggagaatcgatggaacttggcaggcggaggttgcagtgaatggagattatgccgctgcactccagcctgggcagcagatcaagactccgtctcaaaaaaaaaaaaaaaaaaaaaaaaaatatatatatatatatatatatatatatagccgggcatggtggcacatgccagtagtcccagctactcaagtggctgaagcaggaggatcgtttgagcctgggaggtcaatgctgcagtgagttgtgatcatgcgactgcattccaggctggctgacagagcgagaccctatctcaggaaaaaaaaaaaaaaaaagaaaaagaaaaagaaacaagtctctagggaagggccccagaaggtactcagccttttagaatgcccccaatgagcagtactgaacttttaatgagtacagagaataaataatatggcctcagttaatcacagttgagtgaaggaccagctaatgatccccattcagaaactctggagccagttactgtc

SEQ ID NO: 27825 - DNA, 1095 bp, Homo sapiens
caacctccgcctcctgggttcaaatgattctcgtgcctcagcctgctggagtagctggaattacaggcgtgtgccaccacacccagctaatctttgtacttttagtagaaatggggtttcaccatgttgaccaggctggtctcgaactcctgacctcaggtgatccatccatctccgcctcccaaagtgctgggattacaggtgcgagccaccgggcccggccggaaaacgcttttaaattgccatttaaaataactgataaatagtaaagttcaaataaaaagtagccacagtttgtagtgttattaataaacaaacatggagtagattccagttaggccaatattttaagagttaagtggggactgtgaaaaagagaatgtagatgctggctgaaactcactgtttaagagtcaagccacctcacccccttttgaaatgtgactggtataaaaacaaaaaaagattcaacttctgggcattaagtagctcaatcaagtatatgggtgcctgcgatctgacaaaagaaccactgtcctatagggaggttaaacatcatcaaatttgtggtctctaggtggttcacacttttggaatattcacagttagcatgtggggttcatagcctgaggagtgttctcaatagacatcctctgagtcccttgaataaatgataagagggcttttttgttagtctgttctaacataggcatagctgggagcaggatttatttcagtgtgttggcaaataatagctaaaaggtagcctggaacacataccctctccataggtaattaaatcaaaatcatgtcattctatctctagaaggtaaacagaaaagtggattaatatagtacactaggccgggcgcagtggctcacgcctgtgatcctaacactttgggaggctgaggtgtgtggatcacttgaaggcaggagttcaagaccagccgggctaacatggtgaaaccctgtctctactaaaaatacaaaaattagctgggcatggtagcaggtgcccatagtcccagcttctcgggagactgaggcacgagaatcgcttgagcccaggaggcggaggttccagtgaaccac

SEQ ID NO: 27826 - DNA, 1048 bp, Homo sapiens
ctaatgattgaactttctaggaagtacctattctgctaatagtgtaaatatacacttatccagggtcagaaatactcaagtttacccacttaaaagatctagaaaatacatgaacttgggcttacttgccagttaaaattgtttatctcagaattgtaccatcaccttaattaaagtagatatgctaggattatcctgataactaattaacatagcctttccccttagtgttcttcacctgaatgtagtagtggactcttcaagtctagcagaggcctgtttttaaccttacgcccataatttttttttttttttgagacaggatctcgctctgttgcccaggctggagtacactggcatgatcacagttaactgtagccttgatctcctaggctcaagcatttctccttcctcagcctcccaagtagctggaactataggcatgtgccaccacacccagctaactttctaaaaaaaatttttttgtagacatggggtcttgctgtgttgctcaggctggtcttgaactcctgggctcaagtgaaactctcacctcagcatcccaaagttctgggattatagcagtgaggcactatgcctggcctttttggttttctgtctttcttttttttttttttttttttttttttgagacagagttttgctctgttgccaggctggagtgcagtggtgcaatctcggctcactgcaacctccgcctcccaggttcaagtgattctcctgcctcagcctcctgagtagctgggacaacaggcatgcgcaaccacgcccagctaatttttgtatttttagtagagatggggtttcaccatgttggccaggatggtgttgatctcttgacctcgtgatctgcccgccttggcctcccaaagtgctgggattataggcatgagccactgcgcccagcctggttttctttttttctaataaagagatggggtttcactatgttgctcaagctgtgctgggctcaagcaatcctcctaagtagctggaactacaagcactatgcccggctatgcccata

SEQ ID NO: 27827 - DNA, 1031 bp, Homo sapiens
aagtggaataacgatgcaagtaaagcgcttacatagcacaggtcctagcacagaataagcgtttaacagttgacagttgttgcttttctaagcctggatctgtgtgatacagtcgttattatccaagcctggatttgtgtgatattgtcataaggaccgtgggggattcagatccttgaccgagccctccttgttatcttttcctttttgtccctctgcatatattcatatctttttacttagcaccccccacagacagatttctgctgggagggaggggacgatgaagagatgcctaggtgacatccctgccttccaggcagttgttcctgacagtcactaggaatacaaatacagcctggctggggagacagacatgtaaacagattttatagccaatgctacgaaggccaaggggcataaccaccaactctgccaaagataagtgatgtgaaagcttcatatttgagccaggttgggaaggatgaataagtttaacaggtagaaggacagatatgtgcaaagattcagaagtagtacagggaataggactgggaggagagagcaggaatgggtaaattgggactagtttacctgaggtgttgactacactttggaaaagtcccggcaactgtctgaagaatagactgggccgggtgtggtggctcaggcctgtaatcccagcactttgggaggctgaggccgggcggatcacctgaggtcaagagttcgagaccagcctggccaatatggggaaaccccatcgctactaaaaatacaaaaattagccaggtgtggtggcaggcacctgtaatcccagctactcaggaagctgaggcaggagaattgcttgaacctgggaggtgaaagttgcagtgagccgagactgcgccactgcactccagccttggcgacagagtgagattccacctcaaaaaaaaacaaaaacaaagaatagactggagacgggccgttggaggtagaaaaactagtggagagactattaagatagtgggagggaccagaaatta

SEQ ID NO: 27828 - DNA, 1023 bp, Homo sapiens
agagacttgccggccctctagctccagcctcttgtgtctctgacattcttctgcctcctgcactttaaaccaaatcccccaaagcagcattcttctttacactggactgacgattaagccagactggtgaaagcaacagagtggctggtgggaaagagcttctgaccaggagtccccagtccttacctggctccaccaggtacaaccccagtcaagtcacctctgatctctgggcctcatctgtaaaataaggatgaccattcttgaccttctcatcttgcaaggcagctatggaaataaagtgagatagccagaagattcaaagtgcttcttaagcccacccctgtctggggcttggtttgattctatggtcttcatctctcattgctgtttgctgatgttagtgttatttccctccttcccttccctcccttcctccctcccttcttctttcttcgtttctttcttttcttattttgagacaaggtcttgctctgtcacctaggctggagtgcagtggcaccatctcagctcactgcaacctccgcctcccaggctcaagtgatcctcccacctcaacctctcgtgcagctgggagcacactctaccatgcctggctaacttttatttatttatttatttatttatttatttatttatttatttttgagatggagtttcactcttgttgcccagactagagtgcaatggcgcgatcttggctcaccgcaacctctgcctcccgcgttcaaacgattctcctgcctcagcctcctgagcagctgggattacaggcttataccaccacgcctgtctaattttttgtatttttagtagagacagggtttctccatgttggtcaggctggtctcgaactcccaacctcaggtgatccacctgccttggcctcccaaagtgctgggattacaggtgtgagccaccgtgcccggcaacttttgtatttttttgtagagatggggtttcgccgtgttgcccaggctgatcttaaactgctaggctcaa

SEQ ID NO: 27829 - DNA, 1034 bp, Homo sapiens
tgactggcctcttttacttagcatcaggttttcaaggtttatccatccatgttgaagaatgtagcaggacctcattcctctttatggctgagtaatcatccattgtgtgggtatatgaccacattagatttgtccatttatctgggttgttttggctactatgaataatgctgctgggaacattcatgtgcacgtttctgagattctgtgttagttctcttgtgtagatcccagggagtagaactgcaggatgtagacgtgactggggaaagacaaagatgggattcaaacccaggactccacatctctcaaacccgcactgactcttctggtgttgcccctatgctccttgccccacccttgctctcctaggaccctgttgtgtcttcagaaacctggaagaggctgcccactcctgtgactgcttccttccctggcacagccttctcatccggaattcctacctggtgggctaggaaggggctgatagttcaaagcccggttctgccttttttccagacttggcacttacttgcaagtgactgtaaccttgcggaaatgatataactgctctagcgcttagtttatttattttattattatttttgggggagacaagagtcttgctgtgtcactcaggctagagtgtagtggcacgatcatggttcattgcagcctcaaacttccgggctcaagagatcctcctgcctcagcatcccaagttgttgggactataggcgcacgccaccacacctggctaatttcgtatttttgaaagagatggggtctctcactatgttgcccaggctggtctcaaactcctgggctcaagctatctgcccttctcagcttcccaaagtgctgggattacaggcatgagccatcgtacccagcctagtttgtttataaaattggaatattatccctacttctcagaggtgtttgtgaaaattaaacaagacaagcaagtaaagtgcttaacacagactaaggacttattattttcattagtgtcacaaccaccgtgagggctg

SEQ ID NO: 27830 - DNA, 1035 bp, Homo sapiens
tcttttgttattattattttctggtttactgtgtatcttcctggtgaagcttggggctccatacagagtatatagaaggggctggacccaccccattgtccctccctgcccctgcgcttagcacagggcctacctaggacgtacatagttgatgctcatccatgtttctttttttttgagacggagtctcgctctgtcgcccaggctggggtgcagtggtgcgatctcggctcactgcaagctccgcctcctgggttcacgccattctcctgcctcagcctcccgagtagctgggactacaggcacccgccaccatgcccagctaattttttgtatttttaatagagacggattttcaccatgttagccaggatggtcttgatccaacctcgtgatccgcccatctcagcctcccaaagttctgggattacaggcatgagccaccgtgcccaacctcatccatgtttcttaaatggcctctcctgcttccccagtgtgttcctgttgcttctgtaacaaatcactacaaatttagtggcttaaaagaacaccaggccaagggcacggtggctcatgcctgtaatcccagcaatttgggaggccgaggcaggctgattacgaggtcaggagatggagaccatcctggctaacacggtgaaaccccgtctctactaaaaataaaaaaaaaaaattagccaggcgtggtggcgggtgcctgtagtcccagctactcaggaggctgaggcgggagaatggcgtgaacccaggagggggagtttgcagtgagccgagatagcgccactgcactccagcctgggcgacagagcgagactccgtctcaaaaaaaaaaaaaaaacaccaggctgggcagggtggctcatacctgttcccagcactttgggaggccaaggcgggcagatcgcttgaggtcaggagttcaagaccaacctggccaacatggtgaaaccccgtctccactaaaaatataaaaaatcagctgggtgtggtggtgggcacctgtaatcccaactactt

SEQ ID NO: 27831 - DNA, 1034 bp, Homo sapiens
cagcctctcccgcccacgtccctgcagacccagcctggggccacaagcctgcctttgtcagctcaccctctcacgtggggccgtgccagcaggggctaacgggcattctgcctgcagctgggactagccccctgagaggcctaggcccccctggagagatggaactggcgtgaatgcaacatcttgggctgtcacaaattgactgtggtgaagggcaggccttggggagacagctgctcatgtgagaactatcattcattcattcacttattcaaaggatgcttgctgagatcctgctctgtgtcaggccctggcatggggacttgtgctcagagacctgactcttgcccttttagggggggaaataactagaaggaaacgcccttcatcagaatcccttggggggctcaccctaggagtttctgattcagcaagtctgggttgggacatgagaatttctcacaaattcaccagtgatgctgatgttactggtccaggaactgcactttgagagccactgtaattcaggtattgtaattatgcatggattatgttttctttttcttttcttcttcttcttcttcttttttttttttttttgagacagaatcttgctctgtcacccagggtggagtgcagtggtgtgatctcagctcactgcaatgtccatctcctgggttcaagcaattctcctgccttagtagctggtattacaggcacctgccaccatgcctggctaattttatatttttagtaaagacagggtttcaccaagttgcccaggctggtctcgaactcctgacctcaaatggtccgcccgcctcggtctccccatagtgctgggattacaggcgtgagccactgcacctggcctgttttctctattttcaaaactgtctctatgatcatgttttacttttagagacaggttcttgctctgttacccaggctggagtgcagtggtgcaatcatagttcaacagaaccccaacctcctgggctcaaacaatcctcccaccccagcctcccaagtag

SEQ ID NO: 27832 - DNA, 1111 bp, Homo sapiens
atgggaggaaactgtcaggcgcttcctgacacgaatgccccagaggccgtagggcctgtggatatctccctgctctgccaggtaaggccttgaatgggagagtgacaacagtgacaagccagatgtggccttggtgggcagtggtctcttaccaacaacaaccaccacacacacacacacacacacacacacacacacacacacacccctccctgatagagcatctgtagtgtctcttgtgcagaactgtaccagacggatctgggaggctcactcctgactggctgcgtagaccttatcttcctgggcctccgtttgcttgtctgtgaaatggggataaaataataatagtgcctgcctctaaggatcatcactgagcaagagataatggcttttctgtctcagtccggtgtctggaacgcattaaacgcttgtcaatgttagctattgttatcgtcaccattgttcattataagactgtctagtccagcttataggagctccaactggacctgaatcctggctgtgccacttagtgtgtgaccctgggcaacatacttgacctctgtgaggttcctctcccatcggggattgctcgggctgcagtgagagaatgtgcactccctggcggggatcaggggtgcacagggagcatctcatttcttggcattggagaggcgggtccaggccccagtcttccctcattattcccaaccagaggagcaggacgtggtgagtctccagggccaggcagcctctgtgttgtctggagtggggacatcatgtggcacggtgatgccaggctgcgtgtcctggccttctttccccgggacctttttttttttttttttggagacgaagtctcactctgtcgcccaagctggagtgcagtggcgtgatcttggctcactgcaacctccgtctcctgggttcaagtgattctcctgcctcagcctcccgagtagctgggactacaggcatgtgccatcatgcctggctaatttttgtatttttagtagagacggggtttcatcatgttggccaggctggtctcgaactcctgacctcaggtgatccacccgcctcagcctcccaaagtgctgggattaca

SEQ ID NO: 27833 - DNA, 1046 bp, Homo sapiens
caaggaagtctgaaggttattaactactgaggtgccaggattctaagatgcagctttagctgccgagcagacacgtcacctgagaccttcaaagacccggtgatctgaggtcttccagcctttcatcaccactaaccattaagcacgtaccatgtggccagaacatgtaggaacccactgggtgtggatggaggaatctgagagttggagtctgaagacctgactttgaaacctgactctcccgtttactgtgtggccatgggcaagttacctggcttctctgagctgctttttttctcatctgtataataaaggtgatggggcctggcgcagtgactcacgcctgtaatcccagcactttgggaggccaaggcgggcggatcacctaaggtcaggagttcgaaaccagtctggccaacgtggcgaaaccccatctctactaaaaatacaaaaattacccaggcgtggtcgtgggcgcctgtaatcccagctactcaggaggctgaggcaggagaatcacttgaccctgggaggcagaagttgcagtgatccgagatggcgccactgcactctagcctgggcaacagagtgaaactcttgtctcaaaaaaaaataagtaaaggtgatggaacctgcctggacaacctcatacgatggtcatcaggaatcagggaagtgtgaatagacaagaaaacattttgcaagcagtgaacccaagtcgcctgaggaattgttattattcatagccaataggcagacaggatgtctgtgtcttcattcttggaggaactgggagaatgcaggagggtggatttccttagttttagaatgttaatacatcagtagctgccccagggagaacggaaaggtgtgatcaccttccctgccgtgtgtgtgtgtgtgtgtgtgtgtgtgtgtgtgtgtgtgtgtgtgtgtgtgtgtgtgtgttttccctccttggtgattctagatgtgagtgaagtgcagccagtgtgtgtgtgtgtgtgtgtgtgtgtgttttccctccttggtgattctagatgtga

SEQ ID NO: 27834 - DNA, 1030 bp, Homo sapiens
gccccgaatgtcttctgctctgatgctccccggactaagcctccctggcacactgggagtgaggggcagcctgagcaagtaggggaactcagaccacaggccagcagatttcccagcagtccatcactggccaccgtgtagccagattctgttccgtccacactggggtgaagagtacttggaatgtctgccatcctgtatgatcaccccaccccctgtccatccatcagtagataataagggttggttacaattcataagagaatagttaaaacacttctcctctcatgcctaccatggtgctgtatcaaggggatttgttcacatatgggctcagcaacgcacaagtgaggtcagccatggcactaggtcattcccattttagccaaggtgcctctataggggtcagacatcatgtgcccagacctaaggtcaggaatgtcatatttttctgttaaaatcattttatttctgtgtatcttacctttaaatcattgtggtttactctgagattctgtagtcctaatattgtatcattgtgctgtctgcaaaacaacttgaatctattttgtttgcatcttttgttacatgtaacgcagctgtactttatgttctttgcaactgtttccattatgagaacgctgtgctatttacaaggttacatttttcttggccaggcgaggtggtcatgcctgtaatcccagcactttgggaggccaaggtgggcggatcacttgaggtaaagagttgagaccagcctggctagcatggcgaaacccagtctctactaaaaatacaaaaattagccgggtgaaattagccgggcgtggtggtgtgtgcttgtaatcccagctactcgggaggctgaggcaggagaatcgcttgaatccgggaggcagaggttgcagtgagccaagatcaggccactgcactccagcctcggggtcaagagcgaaactctgtctcaaacaaaaagaaagaaaggaaggaaggaaggagggaaggaaggaaggaaagagagaaagaaaag

SEQ ID NO: 27835 - DNA, 1032 bp, Homo sapiens
ctaaaaatacaaaaatgagccaggcgtggtggcacgcacctgtaatctcagctactcaggaggctgaggcaggagaatcgcttgaacccaggaggcagaggttgcggtgagcagagatcgcaccactgcgctccagcctaggcaacagagcaagattctgtctcaaaaatgaataaataaaaataaataaataaataaaaataaaattggaaagcaatcacatagcttacagaatccgtggaaaggctggaggctctgaaaatggagaaaaacaacagaagccaagtgacctaagacacagcctaatcactctaccgtagcttcctgccgagagtgctgccgttctaccacagctggattctatttgctgcacactgacagaatgaaacctaaactagctcctcctaaactgtgtttgaagaaccagtttttaaaattaccaaccccttgcagattgatatttctgtaaagtatgataaaaatgaattactagaaaaatgaaatggggggaaaaggcatgtaaaatacaagcccaaatttttattattcaacttgacagacttcacattacacctttcagtaaattcaatcaaaagataaataataggccagacaaggtggctcgtgcctataatcccagcactctgggaaaccaaggcagttggatcgcttgagcccaggagtttgagaccagcctgggcaacatggtgaaaccctgtttctaaaaaatttaaaaattagccctggtggtgcgtgcctgtagtcccagctactcaggatgctgaggttggggggatcactggagcccaggaggccggggttgcagtgagccaagattgcaccactgaagtccagcctgggtaacagagcgagaccctgtatcaaataataataataatgatagagaaaaaatttaaaaattaaattacaagaactatatacattgttctttaaaaatatacatgtaaggctaggcagggtggctcacgcctataatcccaacaccttgggaggctgaggcaggtggatcac

SEQ ID NO: 27836 - DNA, 1066 bp, Homo sapiens
ggcaagaccctttctcagaaaaggaaaaaaagaaattctggacatgtttttatcagttttcaggacttggtatcaatgtacatagaatggctaataaaaattggaattgagattattgaaaaaaaactcttttctgtatgactggaagcagttgcacagccatctgaaatctgtctgttttaatatctatgtctctaaaattccttagaataacttaaaagttaatgttcctgtggtttccagggtctagggggaaaatgaaaaataactgcttaatggatacagagttttttggggggggagtgatgaaactattttggaacttgatagaggtggtgtagttgcataacattgtgaatttactaaatgccactgtattggacatttaaaaatggttaattttgtgttatgtagatttcaccttaaatttttttttaagtcttgatttcaccttaaatttttttttaagtcttagatactatattagtccattttcatactgctgataaagaaatatccaaccgagactgggaagaaaaagaggtttaatggacttacagttccacgtggctgggaggcctcacaaccatggcaaaaggcaaggaggagcaagtcatatcttacatggatggtggcaggcaaagagagcttgtgcagggaaactcctgttttttgtttgtttgtttgtttatttgtttgtttttgagacagagtcttgcactgtcaccaggctggagtgcagtggtgggatcttggctcactgcaacctctgcctcccgggttcaagtgattctcctgcctcagcctcccaggtagctgggactacaggcgtgtgccaccacgcccagctaatttttgtatttttgtagagatggagtttcaccatgttggccaggatggtctcgatctcttgacctcatgatccacctgcctcagcttcctaaagtgctgggattacaggcatgagccaccatgcccagcggaaactcccgtttttaaaagaatcagatctcatgagacacattcactatcaggagaagagcccaggaaagacctgacccgataa

SEQ ID NO: 27837 - DNA, 1061 bp, Homo sapiens
gaaagtgcatttggtagatggcacccaggataggaagatgtctgaaaacacaagcctcctcttacgtacatagacaactctgtgatcatctccatccttatccttgttcagtggtgaagatgtggtatggacatgattgctgttttcagagacttcatggactatcaagcagatatgttcagtatgtctccagaagtcagaatcagtataaactggaagaaattgtagtggggcagattgtaactctgtccaaatacagtggctccttcttattactttcctattcagttatacagataactacagagttcctactatacttgacaaagttggctaagataatatacctgactggacacagtgactcaagcctgtaatcctagcactttgggaggccaaggcgggcagattgcctgagctcaggagttcaagaccagcctgggcaacatggtgaaaccccgtctttactaaaaatacaaaaaattagccaggcatggtggtgcgcacctataatctcagctactctgctgtggaggctgaggcaggagaatcacttgaacccggcaggcggaggttgcagtgagccgagatcacccctttgcactccagcctgggcgacagaacgagactctgtctcaaaaaaaaaaaatgttgaaaatcattactctaaggaagaagatctcaaactgtagggagctttaaaatcattgggagggcttgttaaaacagattagggccgggcacggtggctcatgcctgtaatcccagcactttgggaggccgaggcaggcagatcacgagatcaggagttcaagaccagcctggccaacatggtgaaaccccgtctctaaaaatacaaaaattagccgggcatggtggtgggcacctgtaatcccagctacttgggaggctgaggcaggagaatcgcttgaacccaggaggcagaggttgcagtgagccgagatcgtgccattgcactccagcctgggcgacaagagcaagacttagtctcaaaaaaaaaaaaaaaaaaaaaaaacagataaggctaggcacggtggctc

SEQ ID NO: 27838 - DNA, 1107 bp, Homo sapiens
gtatctgagctacaagagcagtgaagttccagagagtagaagtaagcaaaagataatagacgatgtcgttttctgttttgttttctttttgataagtatctgccaaagaaacttgggtgactgagagtttgccacttcctgtatatataggtttcagatcaaattctgctacacaatttctttctttctttcttttttttttttttttttttgagatacagtctcactcttgttgcccaggctggagtgcaatggtgcgatctcggctcactgcaacctccgcctcccaggttcaagtgattctcctgcctcagcctcccgagtagctgggattacaggcacctgccaccaggcccagctaatttttgtatttttagtagagatggggttttgctatgttggccaggctggtcttgaactcctgatctcaggtattccacccgccttggcctcccaaagtgctgggattacaggcgtcagccactgcacctgaccttttgtttgtttgttttgagaccatgtcttgctctgtcacccaggctggagtacagtggcacagtcacagctcactgcagccttgacctcccaggcccgagtgattctcgactcagccacgtcctggctaatttttatattttttgtagagatggggtttcaccatgttgccaaggccagtcttgaactcctgggttcaagtgatccatctgccttggcctcccaaagtgctgggattacaggcgtgagtcaccgcacactgccttacatacggttattaactagatatatttattagcaagtaagcaaacaaccattgttacagatcctgtacagtggtggtggcacagggcagggagaatatccagtgataatgaactcaggaattctggcactcaaaaagagagaacacagtggcttacatctacaatcccagcactttgggaggccaagccaggagggtggcttgaacccaggagttcaagaccattgtgggtaacatagtgacagcctattgctacaaaaaattttttaaaatagccacacatggtggtgggcttctgtagtccaagctactcaggaggctgaattgggaggttggcttgagcccag

SEQ ID NO: 27839 - DNA, 1096 bp, Homo sapiens
agggacatggtgaaacacctaaacagcattgaagaacagattttggagagtttagcatggagtcacgattctgcactgtgggaggctctccaggtttctgcaaacaaagttcctacctgtgaagaagtgagtctgggcaaggctgataatcgtatcattaaaaaaaaaaaaaaaaaaaccagctttattgagagataattcctataccatagagttcacccattttaagtgtacaattcagtggttttagtatataaatagatatgtgcagccataaccacaattttagaatatagtcatcacttcaaaaagaaacctacatcctttagctatcacttccctacccccgaatcttctccctagctgtaagtaaccactaatctactttctgtctccataaatttgcctattctagacatttcatataaatggaatcataaaaatgtagtcccttttgactgggcatctgtcacttagcataatgtttttaaggttcatccatgttgtagaatgtatcggtatttcatttcctctctttttttaaggcggggtttcactcttgcccgggctggtgtgcagtggacaaagatggtgcactgactacaccctcaacttcctcggcccaaactgtccttctgcctctcaagtagctgagaccacaggcacataccaccacacccacacccggctaatttttttttctttctgtttttctttttttgagatggagtcttgctctgtcacccaggctggagagcagtggcacagtctcggctcactgcaacgtctgcctcccagttcaagcaattctctgtctcagcctcccgtgtagctgggattataggcacccaccaccacacccggctaattttttttgtactttttttagtagagacggggtttcaccatcttgtccaggctgttcttgaactcctgacctcatgctccacctgcctcagcctcccaaagtgctgggattagaggctagaggcttgagccaccgcgcctggccacacccggctaattgtgtgtgtgtgtgtgtgtgtgtgcacgcgcgcatgtgtgtgtagagacaggatcttgccatgttgcacag

SEQ ID NO: 27840 - DNA, 1049 bp, Homo sapiens
aggttcaagtgatcctcctgccccagtttcccaagtacctgggactacaggtgcatgctgctgcacctcgcttttctgtttgttttgacctatgtttttcaggtaagaggttttcctcaaatgtcagataattcttagtggtccacttaaatttgaatgagacactaaaaacgtgttcaaagctctgtgaatgaggcagtaaaagtttgttttaaagctcttttatttcaagagtggaagtaaaaaatccattgacctcaggtgatcacatagtattagagacttatctgctggtatccgtaagacttttctggaatatctcagtttctccagagacatatctgtaaatctcttgcctggctgttggtgttgtggatcagaagaaggaagggaaacttggtcttatggttcagtctgcagagtttcacctaaaaccctagtcttttctgtgcctaatgttctctacctctgagtctccagttcaatttctctagagaataatcctgtagattcctgtggagacagaatagaggtctgtcatctgatcccatagagtgggggttgtgtggggacctgaggatcctaagactttcagatcacccacccaatgcttcacccccacttcccattctgcctgtgtcctcagttgctatgtattttagatcagattcttttgttttaagtgtctcactgcaggtccttatgcttgatcatcgtcccttctgctgagtaatttgtcatccttcatatattgtggtttacagttacaaatgactgctagttttactgatgatggagtttctgttttttatcctcccttgatttggggcgatacttgttttttgtttgtttgttttagttttttgttttttctgagactgagtctcgctgtgtcgcccagtatggagtgtggtggcgtgatcttggctcattgcaacctctgcctcacaggtttaagtgattccactgcctcagcctccggagtaactgggatcacaggcacgcgccaccacacccagctaatttttgtatttttagtagagacgggg

SEQ ID NO: 27841 - DNA, 1274 bp, Homo sapiens
gcaaaaacaacatacaatgaaaccaattttaccataggctaactgatataaacaggagtttaagttcttttggcatatgtctagtcacaaaaacctcaccaaacttctaaataaagacaaaacacttataatgttaaacattgaaataaataagagaaagtaataaaaataaggaagattattacttatccagttattcctgttcagggtcatgagagcctacctcagcagctcacgatgaaaggcgggccccaaccctagtcaggacaccatttcatcataggacacacacacacccacacttacactgtcacaatttagatatgccagttaagctaatgtacatatctttggaatgtaagaagaaaccagagtacccagagagaactcatgcagacgtaggagaatgtgtaaatttcatacagtggccccagctgggaatccattatttttcattgttacaacaaactggtgttgagcgaaatggtgttattcaaggatctgctgtattctgctattgttggatggagtgttctgtaaatgtcagttttatcttgttggttgatgttgttattttatattcttgctgatttccagtctagttgttatatcagttgttgacagaggatgttgaagtgtccatgtatgattgtagatttgtctatttctttcaagtctgtcagcttttctccacgtattttgaagctctgctgtttgatgcttacacatttaggattgctgtctgccttcttgatgaattgactctgtaatcattataaaatgttcctccctggccaggcgcagtggctcatgcctgtaatcccagcactttgggagactgaggcaggtggatcacctgaggtcaggagttcaagaccagcctggccaacatggtgaaacactgtctctactgaaaatataaaaggctgggcatggtagctcacatctctaatcctagcactttaggagactgaggcaagtggatcacctgaggtcaggagttcgagaccagcctgaccaacatggcaaaatcccgtctcaactaaaaatacaaaaattagccaggcgtggtggcgcatgcccgtagtcccagctactcaggagtctgagacaggagaatcgcttgaacccaggaggtggcagttgcagtgagccaagatcgcaccactgcactccaccctgtgcaacagagtgagactccatctcaaaaaaataaatatatgaaaatacaaaaattagccgggtatggtggcaggcgcctgcaatcccagcta

SEQ ID NO: 27842 - DNA, 1050 bp, Homo sapiens
tgaaaccccatctctactaaaactacaaaaattagccaggtgtggtagtgcgcgcctataatcccagctacttgggaggttgagacaggagaatcgcttgaaccctggaggaagaggttgcagtgaactgagatcgcaccactgcactccagcctgggttacagagcgagactccgtctcaaaaaaaaaaaaaaaaaaaaagaagaagaaggcatgttagtattctggtgtggagtcttttttgtttgtttgtttttgtttggtttggtaattggttcctcttgtattttgtagatcttgtgtgcgtaatcctgtggaaaacattatgaaaatactaaaaggaataggagagactttctgtcaacactatactcaatcaacagatgaacagccaggatctcacataggtaagaaaagaaaactacagttggcatagcattgaaaataagtaatccccccaaaattagaaattcacggtttttcctctcccgttattcttatttcttttttttttttgagaccgagttgcccaggctggagtgcaatggcatgatctcgactcactgcaacctcctcctcccaggttcaaacgattctcctgcctcagcctcccaagtagctgctattacagggacccaccaccacaccggctaattttgtatgtttagtagagatggagtttcaccatgttggttaggctggtctcagactccggacctcaggtgatctgcttgcctaggcctcccaaagtgctaggattacaggcgtgagccaccattcccggcctgccctgctattcttaatgtatcagatttaagtttatatataatttttgcttttcagtccttaacaactaaaattcattaacacatgttttctctgtatttccctgatagactttgctgtaaacagactaaagctggcagaaattttgtattataaaatactagagactgtaatggttcaggaaacacgaagacttcatggaatggacatgtcagtaagtaaatccactctctgagctactggcaaggtccaaaagtcagcctg

SEQ ID NO: 27843 - DNA, 1089 bp, Homo sapiens
gcaggtgatgagaaagagaattttcattatacatgctttagtaacttttagaattttgtgcttgtgcatattacttattaaaaaacaacaccttcacacaaagtatcatgatatgcatctttgtatttttgcctgtattttttactttcttcttaggttagagtctttaaaaagtaatttctggatgaaaggacttgagcatttttaaggctttttattcatgttgccaaattgcctctagaaaagtgaacaaattaggccggtgcagtggctcacacctgtaatcccagcactttgggaggccgaggtgggtggatcacctgaggtcaggagtttgagaccaccctggccaacatggcaaaaccccatctctaccaaaaatacaaaaattagtcaggtgtggtggcatgtgcctataatcccagctactcaggaggctgagggaggagaatcacttgaacccaggaggtggaggttgcagtgagccaagatcgcgccactgcactctagcctgggagacagactgagactccatctcaacaaaaaaaaaagtgaacaaattaatatttctaacatatttacatgtatttactgtaacctctttggagtagtgttgtggggaggtattttttaatagcctattgagatattatgacataccatataattcatcctttaaactgtacagttccatggttttttgtattttcacagagttgtgtaccaccaccacaatccattttaggacatttccatcaccccaaaaagaaacccctgttagcattcacttcgtattccaacccccacacccagctcttggcagccactgatccaacttctgtctctatagagttttctattctggacatttcatataaatggaatcgtataatatgtggtcttctgtgttggcttctttaggataatggtgtcaaggttcatccatgatgtagcatgtatcagcagttctttttatggttgaataatattccattgcatagatataccacattttgtttatccatttatcagttaatgagttatttctaccttttggctattgattagtgttgctatgaacatttgtat

SEQ ID NO: 27844 - DNA, 1028 bp, Homo sapiens
caagacccactctcaaaaaaaaaaaaaaatccattaaaaataattacaaacttatgaaaaaaaagaaaactaagtctttttaaaatgtagattgatattctcaaagtccctttcccccaaaatgtttatttttttttgagctagaatcttgctctgttgcccaggctggagtgcaatgcacggtctctgctcactgcagcctcctcctcctgggttcaagtgattctcctgcctcagcctccccagtagctggggctacaggtgcatgccaccacacccacctgtattttttttttttttttttttttttgtatttttagtagagacggggtttcgctattttggccaggctgatcttgaactcctaaccttgtgatccatccacctcggcctcccaaagtgctaggattacaggtgtgagccaccgcgcccagcctgtttttatcttttttattttttgtttgtgttttttgagacagggtctcaccttgtcacccaggctggagtgcattgtcgcgatctctgctcacttgcaacctccgccttctgggctcaagtgatcctcccaccacgccctcctgagtagctgggactacaggtgcatttcatcacgctcaggtaatttttgtatttttagttgagacaggatttcaccatgttggccaggctggtctcaaactcttggcctcaagtgatccacccgcctcagcctcccaaagtgctaagattacaggcatgagccaccgcgcccagccttccgcaaaacgtttttaagtgtcaaatttttaatgctaaaagagcagttacccagcatcaatgtgttcattcagagaaataaacaaaaatttcaaatgattttgtttgctttgacttataataatttgggctgttttcaaaatttcaacttaaatataatttttttaacttttattattatttgagtcagggtcttactctgttgcccaggctagagtacagtaacatgatctcagctcactgcaacctctgcctcccagattcaagcaatc

SEQ ID NO: 27845 - DNA, 1029 bp, Homo sapiens
tgtgggactctggtgaagcaccatatttggatgagaagagttgtctgttgagtcagttgagcatgaggtgcctttgggacttgtggcttctggagtccataggagaacttgggctggaattggacattgcagaggctttgggtccaagccggggtggaggcggtgttgaagcagctcagagatgggtgagattaaggaacagagtgcagaggaatgagcagatgacagaggctgagcccaggcgagcactcgggttcaggtggctgggtaagggaagaggacaccaagaaggaaggaccagagaggaaagcagcaggggggactccctggggcccatggaagagagtttccaaaaggacacagtggcagtggcagggagctcaggggaggtaaaagttgattggtgaccctggacttggccttcagggccgtttgtcagtttttcggggatgcggaggggtgggtcaggagcaaggttgatacagggtctatctgtcaagagaggagagtcaacaaaggggggcagaattttttgcttcattttggttttaataaaagggcaacatttgcatattaattttcccaaaggaaggtacctgtgggatatgagttactgtggagcagaggcaattagctaaatgaggcctccaaggaaatgaggccacatggacgagagggatccaccctggcggtaacacacatccaacctcctgggacagcgctcgattggccttttactgagtaatctgcgtcccactttctgtctgggaacttgtatatgacctttgtgttttaactgtgtctccctttggcaggaatttcatcccactccatggccaggaccctgtctcattcgttttggaatcctccccagtctggagcagccaactggggctgttgaacaaatattttctgatttgaaataaaatgtctgaaatgggaggtcaaaaatttttagccaaaaagagtttgtgattatcgaaacaaacaaattccgtgtgtttgcttaattttgcacggcagagtgaa

SEQ ID NO: 27846 - DNA, 1027 bp, Homo sapiens
ctccctcggaaagcagctttctgttttaggtcaagcccgcttaagagtcacaaacaggcctccctctgaaagatttgtggccctttccagcagggagcctgcagcccaccccttcccaaagtgactgccaaatcagcattctgtcaccccacagtgcttcctaccttgccaggcaaccaccccctcttcctgaactgccttttaggaaaatgaaaagtagataccttttctggaaaagagtaggggcagcaggccttagaaaaacacacaattacattggtcactgtggctcagtgtgaaacggttgcccacatggtacctagtgaccacaagacaccataaggcctaggtctgggcttctttaggaactggttcttaccctgctgtgggccccagtttccagagaggtaaaatgtggtctttggagcagacagtttttctagtcctaatatcctgggagttctttctcccaagatctagggtcttcctggacccatttgaggatgttagctgggctctgagtaggtggcagtgcactttcaggatggcatgggctttatgctttagtcagtgtaccatgtgagcccaggtatttcctctgtcaggaagcttccctggatttcttctccctggggatctacttgactggagcgtttcactcagccttctgttgagtgctactgctagtgttacgcagacttccccttctgtagcgactgagttcatgggctcctcttgtctcccaagggggcctgcattgtcagtcatttggctggtatttggcagaatcccatgcaggaataggccttgagactacagggtggacagttcctgccattagggagccctccaggctaatgggaaagggcacaacattgagcagataatgccagcgatacacaaccgtggactgtgtcagctgctagaagagaaggtctaagaggggacccaatgtaggcctggaaggattgactttcaggtggagacctgaagaacaaatataaaggtttgagcagtgaagtaatga

SEQ ID NO: 27847 - DNA, 1049 bp, Homo sapiens
ttagctgggcgtggtggcacatgtctgtaatcccagctacttgggagcctgaggcaggagaatcacttgaacccaggaggtggaggttgtggtgagccaagatcacgccattgcactcccgcctgggaaacaagagtgaaactcagtctcaaaaaaaaaaaaaaaaaaaagaaaggaagaaaagaaaattacaaagaacaggggagggagggagggatggactagttaaatgatctccagtacatttatataacaaaatactgtgcaacattttaaaagaataaaacaggatgtaagggcgatctggctgcaatatccatcaccccattgattgccagggttcattcggctgatctggctggctgggcagttgtccccttcctccctctccactccatgtgtgtccctcctgaagctgcacactctgtcgaagaggacgaccatccccaatagaggaagactggtcttcagtcaagggtatataagtagctgagcccccctgctagaacctccaaacaagctctcaaggtccatttgtaggagaacgtagggctccaagcttccaaggctccagacacattcaaatgaggcactacctgtggtagtctgcctttgaaagaataaaaaataaaatagcaatagctatcagaattttaaatgcacataccctttgactcagcaatcctgcttttaggaatttacttgccatgatcaaagatgatgaataaagtgtttgttgatgcattgtttgcattaatgaaagaatggaaacaacctaaaagtccatcaagagagtactggctaaataagtgcctcataaacatgggtagtgtaccacatagcctttcaaaataatgaggtagttctttgtatagctccaagatacattattaaagaaaaagacaagcagcggccgggctctgtggctcatacctgtaatcccagcactttgggaggccgaggtgggtggatcacccaaggtcaggagtttgagaccagcctgaccaacatggcaaaaccccatctctactaaaaatacaaaaattatc

SEQ ID NO: 27848 - DNA, 1840 bp, Homo sapiens
cagtattacttgggaacttgtaagaagtgcaagttcttagccctgtcccaacctactacatcagaagttttggatctggagccagcaatctggcttaacatggtctccaggtgattcgtattcatgctaaagtttgggaaatcaaaccatgttagaaatctttgggaatcagaagcagctgctgcaattctaggctgcaaatctggtcactgacttgtttccaggtctcttagtttgggcccttcctaagctgctgtcagtgcctcccctctcaactcactcactgccctattttgtccctgtattcgaaagtgatcgtgggctgcctttgccctggtcattgatagtgcagggagaggaatcaatgaaagcgcttccccgtgtttgaagggtccactcctatcccttccaaactctggagctttcgtacatgcctttattctcaccagtgatgttacctcctggtacctggttgtcgtgccagacccctgtttacctcattagggatggcaccaggttcaacaggccggagaagagacctggagccagtgaaggaaacagggtttatctggggaacttgagggcagtcagcagtctagtggtggggggctggatgggggcacctcatccacttgtaaaatgcatgcagattatatagcaccttcccccagtaacctccacatggcaaccctcgtttcctaagaagctattgttacatgcatctaccatacactggtgctgtatggttcattgagtgtcccttgtgcctagcatgggactcagaggctcctgtcaaaggacagtgaagcagggacctgccacactgagtttatgtctctgagctagttttggagccacagtagtggttaccccttcctagagctccccccagaagctctctctgcctccccatcacactccttcccacctctcagcactggtcacactgtctgggaattgttggtttgcttctcctgcccactgtgctgtgagcttcctcagggcagtgcctctgtcttgtttcacatggtgcctggtaactgacatgtagcacctggacaaacagtaaatgagaagacacattgttgtaaggtgacaaggcttatcccattgagcagtgctggggttaaaaatgtcctagaacaagccagctgttacagtccaccttcagtcctggctgtgaggagcgtccatggtctaccagaggtggattttccttctggccttagattaaggtggcaagggctagagtagtaatcgggggagacaatatgctataggtatagtcagatgtatgaatgcagctcttacacactagatggtaggtgcggggctctcccaccccacctgttcattacccatcccaggtctgtgctgatcactgccaggcatggcctgctccaaaagccttcttgccttggcatcctttttttctttttttttttaatttttttttttttgagacccagtcttgctctgttgcccaggctggagtgcagtggtgcaaacacggctcactgcagcctctgcctcctgggttcagtgattctcatgcctcagcctccgagtagctgggattaaagatgtgcatcaccacgcccagctaatttttgtatttttagtagagatggggtttcaccatgttggccaggctggtctcgaagtcctggccttatgtgatacaaataattgggacagcctcccaaagtgctgggattacaagcgtgagccaccacacccaacctgtttttaaaatgtttattgtctatatttgagtttacaacatgatgttatagaataatgggacagatatagatagcacagtggttactatggtgaa

SEQ ID NO: 27849 - DNA, 1032 bp, Homo sapiens
caggttgcccctggaggaatgggtggagttgtaagatcaggaataaagctagagagggaggaccaaggggaagtcactgatgcagccgccgtctagcccatcccaccccgattgagaggtcgctttttcctgttgaacatgttggatagtggaatgtgttataagaagtgatatgtgtggcttcttgtcattgcaggattgtcagctgacctctgtcctgtgtgcccagtggccccaggtgacgtgtcttcaagaagaggctgagctgcggtgcttgtaaggtatgaatcctgggtgcttctctagagaatgcactggtgttcaggctgcaaggacgaaggctttgaggtcactagaggggaggcagaggctgcttcccattgcttgctcttccactgaggcccacagggacatgtgacaccctcttttcctcgaactctgcgactccactgtgtgaatcacggtggggcttacagagctccccttgggctctgagtcatcctagtgtggattggcatagtttgttgaagtgggaggagtactgcattttggaggcaggcagttagctagtggttttctctggacttggtggcgatccttgttatgaagtgatttatggatttttttttttttttttttgaggcagggtctcattctgtcacccaggctggagtgcagtggtgcaatgatggctcactgcagcctcgacctgggctcaagtgatcctccacctcagcttcctgagtagctgggaccacaggtacgtgctgctgcacccagctaatttttagaaattttttgtagaggcggagtctcaccatgttgcttgggctcgttttgaattcctgggctcaagcaatccttccaccttggcttcccaaagtgctgggattatggatagtaagtccaggcctggccgacgtgtggatagtatcacacaatccctgacttcctaatccagtgaattctcaacatttcacccagagttgatcttccatctcattctcttatgagggaagcatttgagtagtg

SEQ ID NO: 27850 - DNA, 3549 bp, Homo sapiens
tctggcaatccacccgccttggcctcccaaagtgctgtgattacaggtgtgagccactgtgcccggcctatttttttatttttatttttattttcttttgagacggagtctctgttgcccaggctggagtgcaatggcgtgatcctgactcactgcaacctccgcttcccgggttcaaatgattctcctgcctcatcctcccgagtagctgggattacaggtgcctgccaccatgcctggctaatgtttttttgtatctttagtagagatggggtttcaccatgttggacaggctggtctcaagctcctgacctcagatgatccacctgcctcagcctcccaaagtgctgggattacaggcgtgagccactgcacccggccagcccagtctttgagaagagccccaggattctcaatatttctgcccatgtttgccttcctttctgcttctggcagggagtggtaagtgatctctgggagtcagaagcagcatctgtaatcttaggctgtaagtctgctcattgccctgtcagctgttctgttccaggtgagaccattgcccggaatgccagcattggcctcctttctgggcttgccctctgccctttctgcccctgcattcgaaagtgatcatgagctgcccgtgccctggtcattggtagtgcagggagaggaactgccgagagcacttccccgtgtttggagggtccactcctgtctcttccaaaccctggagctttcccacacctcctccctcccaccacgtcttagatggctcctggtgcctggcatcatctagtgggttgtgttgctcttctccctggcccagggcagttattgtgagacatgagggaagggtgtggggtgatgggtttggcctcatggagcagaagggctgggtgtggagctgagatagggctgccctgctccttcctcccggaagctttctctgcctccacacctctccttccacgtccttatccagcccctgcaccaagctgaacctgtggaaattgttgcctgacttgtttcctggctctctttgctgtggtctcaagggcagtgtctgaattttgttccctactttgttatgtctgccagatggtcagtattctgacagtgtgggacaaaggaaaaacggcagcctgggcaaccccgcctctataagaactaaaaaattagccaggcatggcggtgcatgcccctgtagtcctagcttctcaggaggctgaggcaggaggctctcttgagcccgggaggacaaggctgcagtgagccatgaccatgccactgcactcagcctgggcaacagagtgagaccctgtctcaagaaagaaaaacgagaaagggagagtccctccactgtaaggagatcgggttcattacattttggggtgttggagaaaaatactgagtcagcacctgtgtgggattggtgggagcagatttggtgttttccaccccttcacaggattctgaggtaactcatttctgttggccttggccttgtatggggaggatttccctccagccttgtatggggaggatttcccttgtatggggaggattttccctccagcttgtgggaaaggaatcaaggaccagagacaggcaggggagaagatcactgagggatttacggcagcagcctctgcacggcttccccacgacctccccagctgcttgctggacgctgctggagaaacagcacatcccaagatcatcatggccccagcatcctcttgaacttagtaacagttggcctgacagatgaagcggatatcatccctgccttagaagttctctagcccctttcttagagataagctgctatttcattcctaaaagaagtcatggctgttcaggtgagaagaacggtttagtcagcatctatgcaacactgtagagatgcttagtgagaggtgttgcaggagagtggcagaccgcagggcccgaggtaaggtttcttgtccatctctggaattttggctttttgcaccctgtaaagtcacgtcccctttttttctggtgctttggtggtgacgtagggagaggtgaggatgagaagaggagccatgtcctatggattcccagatccagactcctcttccctgggaaagctggattggagctggcccctccttctgtgccttcaggggctgtggaggaggaggcccctgcagggagctgcctggggcgagcgctgggggcttttcctgcagtgcattagcagcatgtcataatggaaagtggctggatttctttccagttgtaatcaatggttaagatttaacctagcaacattgtaggggtacacagccaaatgattcaggaaaaaagatgcaggttgagtctggaggaatccctgtgccagcttcctcatgctccctccctctctcagaaatcacatggaacccattctcccctcagcagtgaaaatgcattcagcctgtgtgcagtgtttctgcccagggaagcccagtagggcctccatgcccggggtgtttactgggatctggttatgtagacaccacctgcctagcacgcaccaaaattccagactttcaggaaaacaggtgcctgtgccacattatttgcacggagagactgtgtccagtgaacggttctgatcagtaaactgttgactaggaacatcccgagagccaagttcccagatgccagccaagggccatctgacctgttttgaatctcaatttcctgatacagaaaacaaaggtagggcataattgatttttacagacgtgaccccatgatcctgctctctagtccccagatttttccagggcttttgtcagaggtgtttcccctttgattccccttggtggttaggttttatgggattttacaggacagatggcagctgcaggagtcttgtactgtccctgacttgggtcatcccacaggccctggcaccatcctcctgcccttcctggctctcctgtctgtttctgctcctgcatccgaaagtgatcataggctgcctgtgcctaggtcattgatagtgcagggagaggaacgctgaaagaggttgtccccgtgtttggagggtccaccctatcccatccgaaccctgaagctttcacacaactcctgttgctctcctgccagcccttgaggagtccggcgcttgcttggctgccacatgaaagtcagtgcggggggacatcatgcttaagtctttctcagcttgacctctctttgcagaaaccaggctctgtgttctgaggggtagatcaggaagggaatgtgatatgtaatgagtcatggtgtgtcgcagtggatagcacagtttcgaataagtgcaatattggcatataaacatgagggagactttgaggttggggtgagcagggctgaccccgtgtgtgtgtgtgtgtgtgtgtgtgtgtgtgtgtgtgtatgtgtaacttggggacaggatagggtagcatctttacatctttacatgtcattggcctggaatagggggtcctgaagggtttgtcgtaagaaagagaaagtgctcattgctgcaaggggagcacagcc

SEQ ID NO: 27851 - DNA, 1079 bp, Homo sapiens
gtgccgctgcttctgcgcaccttggggaaggacccttctgtgggacgcagtagaggggacagtcaatgagctcagccagttctgagttctgagaactgtctggcaaagcgggtgcagagcaaagcgtgacttaggagacgggctgcgcttggggtcacatgctagctaagttccttcattcccctgaggttgactttctgtaaagtagggaaactgcaaaggctctctgagggcagaggccttggctgtttttcttgattttgaacccacggtgcctgtccacgtgtagatactcagaactggtgggctgaatgtacagccgaggcatttttaccagaagtctgttttcctgtggactctgggtggggacagatggaatctgcctgtgaagtgatgatggctctcagggtcctgggtacccttctcttccctggggggtgagcctccctctggagatctggcagctaacacgctgacgtgggctcacctgcccttttttgcacctgtattcgaaagtgatcgtgggctgcctgtgccctggtcattgatagtgcagggaaagaaatcgcggaaagtgcttccccgtgtttggagggtccgctcctgtccctttcaaactctggagctttctcacacctccttctcaccatctttcaaatgcctcctggcacttggtgtcttattagtgagtgctccctgtgcaaggctcagtgcagggttccatgaggcgttcaccagggtctatgaggggtgagtccctgcctcaggattggtggtgaaaccacagctgcagcccccactagtcacaccctgtggcaattactggcttgattgtctttgcctctctctattgtgaccttgaggacagtgtcttgagttttgtttaatattttattgtatttttttagagacaggatctcactctgttgtccaggctgaggtgcagtgtgcagtggcgtgatcatagcttgaactcctgtactcaagtgatcctcgcacctcagcctcccaaatagctgggacagacagggtctcgctatgttgcccaggctggtcctgaactcctggcttcaagtgat

SEQ ID NO: 27852 - DNA, 1033 bp, Homo sapiens
atggaaagacatcccaagcttatggattggaaaaattaatattaaaatggccacactgtccaaagcaatctacagattcaatgcaattgctatcaaaataccaatgtgattttttcacaggagtagaaaaaaaccctaaaatttgtacagaaccacgaaagagctaaaatagtcaaagcaatcctaagcaaaaagaacaaagctgtaggcatcacattacctgacttcaaaatatatcacaaggctatagtaaccaaaacaacatggtattggtataaaaatagacccacagaccaaaggaaaagaaaatagaacccagaaataaagccacatatttacagccagctgattttcaacaaaggtgccaagaacatgcaatgaggaaaggacaccctcttcaataaatgatgctgggaaaattagatatccataagcaaaagaataaaactggacctgtatctctcaccatatacaaaagttaagacagattaaagatttaaatataagaccttgaattatgaaactactagaagaaaacagtgcagaacacttcaggacattggtctgagcaacgattttatggctaagacctcaaaaacacaactaaaacaaaaatagacaaagggaactatattaaaaatcttctgcatagcaaaggaaataatcagcacagagacaatatgttgagtgggagaaaatatttgcaaaactattcatccaacaaaggactaatatctagaatatataaggaattcaacaaaaaatcatattaaaaagtgggcaaaaggtggggcacagaggctaacacctataatcccaacactttgggaggccgaggtaggtggatcacttgagcccaggagtttgagaccagcctgggcaacatggtgaaaccccatctctacaaaaattagtcgggtgtagtggcacatacctgtagtcccagctactcaggaggctgaagtggggggatcagttgagcccaggaggttgagactgcagtgagccgtggttgtgccactgcattccagag

SEQ ID NO: 27853 - DNA, 1032 bp, Homo sapiens
atttatttttatatatttatttatatatattatatatatatatacccctaacagagctccaaaacatatgaaacagaaatgacagaattaaagggagaaagacaaaaatagttggagactttaatattccatgtccgataatggatatagaaaccagacagaagatcaatcaggaaatagaggatttcaacaacactctaagcaaattagaccaaatagacataagcagaataccacccaacaacagcagaatacacagtcttctcaaattcacatggaatactctccaggataaaccgtatgttaagccatgaaacaagtgttaatacatttttaaaaactgagattatacagagtacattccagttacagtggaatgaaactagacattgaaaataaaaaagtggaaatacacaaataggtggaaattaacacactatttaaaaactaatgggtcaaagaaatcataagggaaagtaaaaaataccttgagacaaatgaaaacacagcataccagaacttatgacacatagtgaaagcaatcctaagaggtaaatctgtagctgtaaatgcatacattaaaagagaacttacgctgggcgcagtggcttatgcctgtaatccccacactttgggaggctaaggtgggtggatcacctgaggtcaggagttcgagaccagcctggccaacatagtgaaaccctgtctctactaaaaatacaaaaattaggtggacatggtggcaggcacctgtaatcccagctacttgggaggctgaggcaggagaataatttgaacccaggaggcagaggttgcagtgaactgagaccgcaccattgcactccagcctgggcaacaagagcgaaactccttctcaaaaaataaaaaatctcagtcgagcatggtggcttgcatctataatcccagtgctttgggaggccaaggcaggaggatcacttgaggccaggagtttgagacctgcctgggtaacaaagtgggatcctgtctctacaaaaaagtaaaaaataagcc

SEQ ID NO: 27854 - DNA, 1039 bp, Homo sapiens
gcggaagttaactcttccccagtactctcctgagtgtatcactggtgagtgtgggttcatgcacactcactcacatattgcaggaggaaggctgagatgcgaatagggagatatatgtacttcattcctgataaatagttgttggagttttatattttgcaccatcacagccactctcattttcaggatttatgattgactttattgcgttttagattagagaaggctcaggtactgagcactattcctctcctttccttttgcttcaccttgatgctctaaggtttctcaaagacagaacaagtatcttcagaagcctcccaatgcatcttccatttggctgtcaacatctctgttctgctgccccccaccccaggacaataatgtgaaaatgaagagctctgggaaaatacagaactttattgagcaaatccagttggtcccattagttgggcagcataagattggaaggggatttgcagagaaatatcctggctgtaatgataaggctgatcaacccagtgaataggacttaatcttacctgtcaagggaaactgatacttcctgatgaaatattaacagcattcaaaacagtactcataaaggaaacattttagaaactgtcctgggccgactaaggtagagccatagccctctattgttccagggggcttagaccctgagtacctgcagcttcattctgctcagacctggggcagtacccttctctggatgaggaacctagagttcttccaacagaaagggataggaaaggtataatagcttccttcccttttggacaagtaaaataaattttaaatttgacctgttgaattcacttgaaaatagaggaaccaggaggttatcagaaaggactagggagtgagcttgagaggaagataatttgatgacaggatcaaaaaaggtaaagacgaattgatgactcctgtgatttctgctgctctgccagcatcataggattgtggagagcttaaacaagaaaaagtgtatacccaaaagaataaaaaataagatccc

SEQ ID NO: 27855 - DNA, 1125 bp, Homo sapiens
gaggagctttcagatgatcatctaatcccatgacgttagctgttgctctccacactgcccggtggctccagtctgaagcatctaggcagtgctgtccaacagaaatacaatgagagccaatacgtgataagtgtcctatgggccacattgaaacagtaaaaaaaaaaaatctaagaatatatttaacccaatatatgcaaaatattatttcaacatctatttaatattaaaaattgttaatgaaggcatatagaccaatggagtagaatggagagaccagaaacaaatcctcacacataaggtcaaatgattttttacaaggatgccaagacctttcaatgggaataggacagtcttttcaacaaatggtgctgagaaaactggctatctaatggaaaataatagagttggatccttaccttacaccatatatataaaagttaactcaaaatgaatcgaagacctaaacaaaagatctaaaactataaaatgcttagaagaagacagaggagaaaagcttcatgacacttgcaaaccatatatctaataaaggggtaatatctagaacatatagagaatttctacaacccaacaaaaacagcaaaaaaccccagacaacctgattaaaatggtcaaaggacttgaatagacatttattcaaagaagatacacaaatgaataagcacattaaaaatactcaacgttaatataattaggcaatacaaatcaaaaccacagtgagatacagcctcacacccattaggatggcaactctgaagaaaaaaaaagaaaataacagatattgccatgaatgtggagaactcttgggaactcagtgcactgttggtgggaatgtaaaatggtgcagctgttatggaaaacagtatggcaattcctcaagaaattaaaaatagaatcaccatgtgattaagcaattccacttctgggtagttacccagaagagttgatagtagggactcaaagagattgtatgtccatgttcatagcaacattattcataataggcaaaaggtagaagcaacccaagtgttcattgatagatggataaaatgttgtatatacatacagggggatattattcagcctttaaaaggaagtaaatcc

SEQ ID NO: 27856 - DNA, 1050 bp, Homo sapiens
aaacaatgaaaatgtggtttttttttaataagcagaagaaaagtaaaattcactgaacaaacaaaagtaatcagagttgcttgtgtggcagaaatagttaggggaaatcatatcaactaatctcttggaaattttaagcagagtgagcaggtttgtgaatgagggagccagtagtccttcaggaaagctttgaaagaatttgcatcatctcaaactacctcaacgtgttaattaactataaagaaagaggtcataaattggtagtggaaaaacccagcagaaaccaccttaaccaagaggtcaagaccaacaccaccagcaataagacatatcaacatcatgagccccatgatatgatgtattaagaacacaacatcatttctgtggtatttttgccaagaatgcataacctcagagtaatcatgagaaaacatcaggcaaacccgaatcaagggacagtcaacaaaataactgtttaatactcttaaaagttgtcaagaacgtgaatgataaggaaagaacaaggaactgtcacaggctgcaggagactaaggataaataacaactaaatacagcggggattctgaataggattctggaacagtaaagggacatcggtagaaaaaaccggtacgacttgaataaggtctttggtttagttaatagtattaatattaaagttctggttctggtaaatatacaatggttatgtaagatgctaacactggggaagctggggccaggatatatggaaactctgtacgatttttgcaacttttctgtaactctaaaattagctcaaaatgattttttaaaagaaatcttggctaggtgcagtggctcactcctgtaatcccagcactttgggaggccgaggcgggtggatcacctgaggtcaggagtttgagaccagcctggccaacttggtgaaacctcatctctactaaaaatacaaaaattatctgggcatggtggcgggtgcctgtaaacccagctactcaggtggctgagacaggagaatcacttgaacctgggaggtggaggttgcag

SEQ ID NO: 27857 - DNA, 1034 bp, Homo sapiens
aaaatcctcagccgggagtggtggctcatgcctgtaatcctagaactttgggaggctgagacaggcagattgcctgagctcaggagttcgtgaccagcctcagcaacatggtgaaaccccgtctctagtaaaatacaaaacaaaaattagccgggcatggtggcatacacgtgtagtcccagctactctggaggctgaggcaggagaattgcttgaacccgggaggcagaggttgcagtgagccgagatcacgccactgcactgcagcctgggcaacagagcgagactccatctcaaaaaaaaaaaaaaaaattcctctaatgcttctgtttgtttctcaagattattagttgtgtatttagtttttatttttatttttcggtagcacagaaagcaatactgctctctattcttttttcgtggtctataatttcttatgtaatgattttgttacattttccaacttcattatcattatttcatagcctatcttgcaaacagaatgttgtcggattttgtctgtttaacttatctttgaaggttctatatcttatatgggaatttatactctttaatttattattgctattgtattatgttttctgtatattgtatgtttctttgtttttgtatttgttgtttcttctccattatgtcttctgtattacagaacattctttgctttctttagcttttaaacaaattttaaaggtgaacaatctttcaaatctcttagtgctaaacatatttttctgaatttatttactaaaatcaaagcaaaagcaagaacttgccttttcttccatataaggaaatttaatttgccccttttttggcatcttctcttcctattccttatctaccctatctctccaatttttttttcaccccttaatgtttgttctgtgaagtgtcttaattcttctgagcctcagcctggtactcataagtattttgctattttttgattcagttagttaacaaccactgaggtctcactctgagccaacagatcctgagctgggtgcaggaga

SEQ ID NO: 27858 - DNA, 1034 bp, Homo sapiens
gtcacctcttcttcaggtttaagatccttcagttcagccattcttttcgatagaatttccagatccctttccctccttgtttctcaccaaactgtgtgaccacagttcactgtcagtcacttagaatgtgtgaccagacttatagctagttctctagaagtggtctgatttgtagcagtatactcaagtgtgccttacttttttttttctttagcaaatctctggttgtttatattcttttacgtgatcagctgtcaagcctggtctcttccaagaggtgcttttgcaattgtttccttctagtttagtgttacttgggatttgatgagggttcttcaatatccttatgtgactcatcagtaaaaatgaggaacaggaggggcccaaggaagagttttgtggaaacctccttccaaactgacaataatcctctaaatccatgcttttcaaactgtgatgtgcatacaaattacctgggaatttggttaaaatgcagattctgattcagaaagtctgggtgaggcagagcttctgcctttgtaacaagttttctctaagcttgtgctgatgttgtgggtctccctgatcatcttttgagtagcagggcacagttcttggggaaagttgttcatgaaagcaaatcctttggtatttgggtagctgtgctgtacccatcagagcccccagcagatactatctgatgccggtatttgacaccctataatcaaacgtgcgtctcccatctcactaggtagatgaagaaaacaacagcagggctgtcttgccagcttccaaatggtggcacacctctgtgtatgttcaattggaccttttattctagccagacaagctgttacccaacatacttagtatcttttcaagtttcttgtcatctggacatctgataaagtggttgtgtatactgtttttttgagttattaatctgagatactctcacataccagaaagttacagaaaagagacagtcaacagttttttaagcattggctagaaagtacagtgttactgataaa

SEQ ID NO: 27859 - DNA, 1023 bp, Homo sapiens
aggctgaggcgggtggatcacgaggtcagaagttcgagaccagcctggtcaacatggtgaaaccctgtctctactaaaaatataaaaaattagccaggtgtggtggcatgcgcctgtactcccagctactcaggaggctgaggcagaggttgcagtgagccaagatcgagccaccacactccagcctgggcgacagagctagacttcatctcaaaaaaaaaaaaaaaaaaaaaaattcatgttctgctgttccagtccttagtttatattattgcttttgtctggaatttgggatgcgttttccctgtagaaacaactcaagtaccaaagaaatgaacataataccttattctcatatggaacttgactcttttcaaaccagttactccatttatttaagttgatcctcacctcaccctgtcttcatttgagggctgaggaaactttaggccctccctgaaagttaaaggacttgaccaaattctcacaaccactagatcacagagctaagacttgtaattctctagatattccggtattctttgttgtagtcaagtattcttttcgtagtccagacaatagagagtaattcaggtgtgggtttatgccccttcctcccagcagtagctcatatgaagaggccagcctctgaaagccactgacattaaactggacatgcttagctaatcaattaggaggacactggagggccatggcagaatcaataaaaataacttaagcgctcttatatattagagttaaactctggaattacttttgtattcatttacaaaattaacacatttatgatttgctcttcatatccttaaaacctggggtatagaatatcattaaaagcagttgaaatggggagtggatttccccagattctgaggtggacagattataaacggattcacctttacttctagtctgcatgctaaaaccacacacacatagagggatggccggcatctgagccaggcctgctgcccaccctgcttcacgcttgctccctacctc

SEQ ID NO: 27860 - DNA, 1034 bp, Homo sapiens
tcaaacagcactgcaacaagtgagtgtccctcctccccataccctggtggcagcccggctcagactgcttcgattcctgggaaccccacagggagagcacttcatgctcttgtgctacttctgtgcaaggtctagaaagacaggatgtgttatctgtggtctaagctggctcagaattcatgttacagctcctataactcctttaacagtacctctgctctcccgcagaacctggcccctctgccactgcattgtatatacccctgaggatttttctattttgactctcaaaaaccagtcaggtcatcctctgcccctgaggtcacattaacaagggcagaacattgtggccttggtcgctgccactctcagccacctcttccagtttgctgttgccattcatggccttcagttatttgataggcatgcatttgagatagtatgctttgtatctgtaggctaacagctggggtcgggtgggatggagacagcaaaaaaaaaaaaaactgattgaaaaacaaaactttgttcatatttagtttagtcttggggacttggggcattcagcgacaaaacaatggcaagtttgcatgtggatatttgcaccactgtgcaatgtatctgacccttggaaatgatctaattcatgtcaaggtcatgcaagagttatcttcccagcattcctggtaggcagtgtgagggcctccggtcgcacacctctggtaatcaagagtttattactttataggttaagagcttttgcttgggttttcccgtctccctataacatcttcttaatgattttgtagttgttgggttgtggggtgttttgttttgttttttttcttttacagataaagtataatcctttcccttgatcacctcaaatatttgaagataagtctcatgcccaatactgtaataaaaactaatgtacacaaaagtacaagctcttcagagacagcagtaagcactcaaagtgttgttattattagtactatattattttaggcatgaaattgtcatcaaaagaa

SEQ ID NO: 27861 - DNA, 1097 bp, Homo sapiens
atgcatatgttgctaagtataatacttcaagttagtcatgcagagagtcatggaattccctcttgtgattgatataaagagaaccagattcttaattagaaccagaaaagggtgtttgggaccccatttcctgttttttttgagaagatcacatttatcatgggatcattttttttttagttgagaaatgacctcatttacaatactaatatacatatttatttaataatgaataaatcattgttcttctgcttgtttggtacatctggaggtttttaaagatacaagctctaactaaaatataaagatgtcaaaagtaccatcttcaatgatgcatagttatagtggcttgtgacatctgataataaccaacatcctgaagaatgttagggaccttggatcatgtgctgagctttatttcagagctgcctatagaggactgtctgcctgccctccccagagtatcgcatctgggatttcactagctgaagtttgttgcccacgtcctttgttctaacatgtagttcatggaggaactatgcactgaatcacaaaaaccagatttgaggctgtttttctcctatacattttccactttgtgagtagcctttggtgacctgtccaggtacagcagctctcaaaaatggaggtggaggacctactccggaaaggtgcttatggagccttaatggatgaagaagatgaaggctccaagttctgtgaagaagacatagaccagattctgcagaggcgaacgcacaccatcaccatccagtctgaggggaaagggtccacttttgccaaggtacagggccttctctccagagctgttgggggtgggagagaaaaaaaaatgtttattctctgaaacccattagcagggcttctgtttctctgaatgcaaatcctagaaattggctgcacatttagtctgcgtgactatctaaagatatagatccttagaggaaggaagtctgaatagggagtcagggactataccaagaaaataccactcctcacctttgagagctgatctttaacagacagaataaacactcctattctcagttggctctgtttgcaaggactgctctgaa

SEQ ID NO: 27862 - DNA, 1067 bp, Homo sapiens
ccagtacttactgggcttcttagtgtttgggccgctttagtactaagtataggaattctggtgtcattttcagccatgaggttaggggaagaatgtgggcagggcatgggtgggggcttccatatccagggattctggcactgggtgagtcccttatgggcaaacataggattcctgcttagacttacccctttctctgggcccagtaacttcaaatccaactcaaacagcctggcctctgacacaggggacccattgcttgcaattctggactccaggatcaagatcacggggcaggagcagaagtccaaggctccagacttgctctgccactaactcacagaggagcaagggccacatgtcttactgctctgggccaagataaggaaggacctggggtgtccagtgatacctgcagggctcactcacatggcatggccacctcttcctctcagtgtcagtaatcacccctctgcttgcttactcagggagaaaaaacattcccgctaaaagagactaggacttctggaaacaaaatggctgaagccaggtctggacaggaaatgtacaagaggagtgtggaatatgttgaaagcaagggaactattgaaagactaccagtctttgatataacatacaaacataaatgtacacatatccatacctatttctatatctgtgtgagtatgtgtatgtatatgtgtgtatatatacatatacacctaaccatgagttcatactgataccttcagtccattcaaatactgcagagttgattctcgtcttccttttttccacatttgactaggtcatgttgaaggaactcaggagccaacttagagaggctcccatgagccaaatgtgaacagcaataagaataataactgcagtgcagtaaaacatggcagatatatttaagtgcatgccttcattgtatcccataaagaagtaataaaaaaaatttcattggtcactttttgggatgttattttggaaactgattaaataaagagaatcaaatatttagcttgtccctcctatatgaactgtacattagggtagcccct

SEQ ID NO: 27863 - DNA, 1049 bp, Homo sapiens
gttctccattgaagtcatgattaacgcctgggctttcgttcatttgggtcccctcagatacacctatgagcgaattgatgggcgagtacggggaaacctgcgccaggcagccatcgaccggttctgtaagccagattcagaccgctttgtctttcttctgtgcaccagagcgggaggcctggggatcaatctcacagctgctgatacctgcatcatatttgattctgactggaacccacaaaatgacttgcaggtaaccactaggatgattgctgtttaccttagctgccctggatcccagaacatcatgatagggcctggcttggctacagagcatccgtgatgctctatgctatggtgtcagctggatgacaggcttagggccttggtcagggggtgaaactgaatgaaaagtaaatgtcgacccttccaactaattagagagtgtggttctttccgttaaatcaaatgatgtttcacagtggtagcctccagatatagactagaactactaattattattattatcagaaataaagatactaatcttgactaatgctctaattcttgatatgtagacgattcgggcattttcactcagtttgttggttaagatggtcatgtgtcatgtacagtaaacgagttaacccagaggggtgggaaagttccatggtgtggcaggggcaacagtggcagcctcactagttcctttgttctccacacagtgcaacacattagagtttatatgtgtccagttaagtggctttatggattctattttctggttttagccaaactaaataaccggtggctttaaaagattactgcaaagattggagttgatatattttttgaaagctaacataaacaagcaagaaaatggcagggtccagtttggagttcttcatcaaccctgtttcaaagtaaaaacaatggcattctaactatatgggacgcgaagtcagccaaaaagattctaacttgtcaataagacaatatggaatatagatttacagccattatcattaatgaagaacttcatcttaagt

SEQ ID NO: 27864 - DNA, 1033 bp, Homo sapiens
gccaaaggtaacctccaaaaaatcactttgaagatttcccaagtagagtatcttcttctttacctgcaaataagggagcacgtttctgccggtattttcctattttactgacaaatatttgagaaagtatttccaggctacctaacccccagcttctgtctgggaaaatctagtagcgcctcaggcttgacttggaaagtgcttcaccatgattcccccctcctttcaacatttaacatgttgctcaaaatgcacacaagtctcctagtgaagtgtcatattttgaggaagttctattccttagttatgatttgggcttggtttagctttgagtatgatgttccacagtgaagcacatgattctagcatgtgggcacgcgcgcacgcacacacacatatacacacaataaatatttaaaatgaaggttaaacatatacagacagtgttctaatataatgaagttacgtttagtaagtagatgaaattgatttcaaatgctggaaagaaagatttaagattgtacagaagattcagaggccactgagcatgtgattattagggtgacttttgggatattgtaagctttctttaaatttgtgtcaaagaaacctttttctaagagagctataaaaaactatcaacatctatgaatttgtgaattttatatatttgggtcattggaatgttgctgattttttaaaccattattttgagattcaaataacattaaaggatatttgaagtttttacatttactaaaagggagactgggattttagaaaaaaagaggcaaaatacatgacttggtatgaaaaagtaataccctgtgactcagctgacctgagcgtaagcctctgccctgctgctgactttggggcatttgctgcttttaaatctcagttttcctcatctggaatatggggattatttgtcctggctccctcatgggattgggatgagacatggaattcataagtactttgtagaatgtaatttgctatgcagttttcttaatgaggagccacataacat

SEQ ID NO: 27865 - DNA, 1034 bp, Homo sapiens
tcactcttagaggctggtgaccataatactaaaaataacactgtcctagagaatatttatagttttttcactccctcttcataagtacagactgtgccttatctaggaaataccacttattttgggactctagagttgggcatataaattgtaaggcatgtccagtagtagtcgtgtttcaagtcacttcaacagacattttcatgcttctaaagagccctgccatgtacttcgtgctagaatggcaaatgtgatctcaggggaaataaacatgaccaatatttaaattgaagtgaaccaaagtaatagaacagtaaaaggaacatagaaggagggtgaggaggttaggaagaacttcccagaagagttaacatctgagttgggatttgaaggatgaataggagtttgtcaggcaggtaacagtcacagaaagattaagtgaaaattcctggaaaggtgggcagaggttttcttctgattttattgccagtgtgtctagatttttgatgtgatagagccttcagttgtaaaattccacttttttctcctagtgacttgaaatgccattgggatcctatgcctcaacagtggggctgggtatgtttccagccagtcatagggaggggcaaatgctacccatgcagcacctgtaggcacactgcaactctggacagaagcaagtttcttgtttgtgtgaggtgatggtggtggttagcttagctccagcccaaaactttgactgcaattgcttgactagatttttcttcccttatatgaaaatagtgtagttgattgttgttatttagaaagtatttaggcgttcagtcacaaatgtttattgagcattgatgtttggatgggggttgaggcagatgagggccatatatagaacttgggtttttgaaatacaagataaatttcagtaaatggtactaatctcaagtatactgcttgattattcttttagatatgtatatacctgtgtaactgccaccctcagatcaacatagagactgttccaacactccataagg

SEQ ID NO: 27866 - DNA, 1033 bp, Homo sapiens
tgcccaggctggagtacagtggcgtgatctcagctcactgcaagctctgcctcccagattcacgccattctcctgcctcagcctcccaagtatctgggactacaggcgcccaccaccacgcccggctaattttttgtatttttagtagagacggggtttcaccgctttagccaggatggtctcaatctcctgacctcgtgatccacctgcctcggcctcccaaagtgctgggattacaggcgtgagccaccgcgcctggctatttaaatattttataaatagttatcttacatagtgtgtccagtaattcccagtatctgaaaacctcaggggttgtaaatattgttagttttttggttttgattgattggctgttaccaatgatagaaatgaatcagaaatctatttaatagtaatggcataatggtcatttgtaacgttagcctcacagtggttctgaagctgctatattcaggtttagggcacaatatttaggcttcacaggatcggtttcagttgtatgtttgaggtgcttccctcagacccactggtcaaaggctcccaagcttagagttggaacagggcaggtgttctgtcccaaatgtttggcccaggtgattcagttaaaaaataccattatctcacctcgttctatagcttgctaataagatgatgttgaagttgttgagacacaaagacttaggcagcatgaaaatggaggaaggtgcatctcttgcaggaaatttatgagcttagactcataaagctgagggaaggtaaatttcctactgtcataaagaatctgtttaggacagctccatatcccaacatcttcttgtatattttttttcctctttaggtctacaaggaagtcttcacgaggagcagtgagaactcagcgtcgtcgacgttctaagtctcctgtccttcatcctccaaagtttatacattgcagtacaatagcgtcttcttccagcagtcaactcaagcacaaaagccagactgactcacctgatggcagcagtgggctggg

SEQ ID NO: 27867 - DNA, 1070 bp, Homo sapiens
tcctggctggtggacacattctgtcttcagttgctgagacagtcgcaggatagagtgactagcctgaaaggagaaccttgtggaatgggtgggtagcaggtagtgccagggtcagttctactttctgtcccagtgaggctcagatctcagcatgctcttttctcctccagagatcccagcattggttggagtcttgaactgagattctgcctctcaatgatcagcagttgccaacagtagagacccaacatgtagatgttagctagtgcgggcgctggacagtggtgcagcttgtctactggccaggaaggcgggcagggagaatagggacaggggaggatcccctagcctggtctgtggctcacagtgctagcccactggagcagtgtccacaagctgtacaaaaacaggcagggagccagatctgacccacaggctgtaatttgctggcccctgttacaaataattcagatttattttcccgtcagtcattctttctttagctgtgtgtacaagtcccctcttatccataggggatatgttccaagaaccccagtggacgcctgaaactgcagacaatatcaaacccatttgccatcagtcagagcacgtttttgttcatgtcttccacccacacatttaatgccttttccatcttaactaaggacttacatgcactgtggctgtaactttcacatttgaagtgcaacagcaagtctatcacaaatttgtttttccttcttcacaatttttcacataggagattcgttcttaccgtagatcttagcaacctcagtatacgatttatttttttcctttccttattaagtcaagaactttcacctttttacttaaagaaagctgtcttagttcattttctgttgctgtaactgaatacctgagactgggtaatttttaaagagacttatttcttacatttcgggaggctgggaagtgtaagagcatggcaccagcatctagtgagtgtatcattgctgcatcataacatggggaaggatatcacgtggcaagggggctcgtgagaagtagccaaaccggcttttataaca

SEQ ID NO: 27868 - DNA, 1554 bp, Homo sapiens
atcaaagttcttggggaaggatcgtatatgtgggtcccttccctagaagaatggttgctgatatggctactgcttctacatcttgagttttttaatttactttttttacactgtagcattgagactgcttgattcaagtctggtgctttgccagatgtattaatttccataaatgctttgtgagtttggttaaaatgaagattcacttgggaaaacactgcagctttagtctgtgttactatcttgttatgagtatgtaaaagtaaaatgcatgtgaatttatcatatttgcactatgaaggtatttggttaaaatacaaagacttttaagattttaaggccctttcttccaacagcttttatagttagcagccattctttattttctggatagccaggttttatcacgcttctagtcaggatgctcctattccttctaaaaattacggtctgactagtgagcaaagtcttgaatttattcaaaagtcctaaataccttctctaggtaagacacttggtagatgagagacggaaggcattgtcaagaaccattttcatgagaggtggtgtgcaaaaaggtagaataaaagagttctttcaacaaagatttactgtctattctgtactagaccctgtaggttttggggtacagtgttaaacatgatagaggctctgccgtcttggactttaatagcttagagaagagagcaaatgagctgacaggtggttataatgtgaattagtgctgtggtttaggaattggagagaactcaaaggagaggtatttggtgtaatggtaggctttctggagaaaatgatatttaagccaagaactcttagaagttagctaagagagagatgggaaaatgagacgacattgctggagtagataaaactgcatgttaaaggcaggaagatggggaaaaaaagttcagtaaagctggaatggggaaatgtagtcagggactgaattttaaagggctttatcaacctcagtaaagagtttggaccttatgttgagggtggctgaaaacatattcatagtgtcatgaacaaattttatcttcagtcacttgggctgatatatagagaatggatttagagagatgagaccaggtgcagtccatatgagatgtgaaatagagaagtggaatcgtagggacggggagaaattgacaggtgagggctacttagcaattagaatttttttttttcaattttaatttttttttttgagacggagtcttgctctgtcgcccaggctggagtgcaatggtgcgatctccgctcactgcaggctccgcctcccgggttcacgccattctcccgcctcagcctccctagtagctgggactacaggcacccaccaccacgcctggctaattttttttgtatttttagtagagacagggtttcaccatgttagccaggatggtctcgatctcctgacctcgtgatccacctgccgcggcctcccaaagttctaggattactggcatgagccaccgtgcctggccagcaattagaattttaacactggcagttatgaataat

SEQ ID NO: 27869 - DNA, 1048 bp, Homo sapiens
cagtccctgtgccactgttttccttttgattccataggaacaccagcctcgctccggcctcttgcagtcctccctcatcaccctctacactatgtacctcacctggtcagccatgtccaatgaacctggtaagggaatgtcaataacacattcatttgataaaaagaaagtaggaaatcagcctttacatagttggtacaaaaactagagctagagcaaatgtgaaacaagcaaacaaaacttaaacgtacagtgttcactgtaggtttgtaggtatttacctttcacattttagtccccacatctattgatagctatttataactgacagtctaaagggtcagagtcctttagatggtctaggctttacctaacctaggctgagtcaaactagttaagagctgtggtcaagggctttggccctttgttgtgactgaattttagtttgatgtcacaggctgtagaagaaacagctgtaggaaatctccttttgtagttattataggattgtttctcagtaggatattctatgggcttcttttaaaggaaaacaatgcagaccccccttccaccaatgataacttatattttgttcttaagtaactatgtaaaaaccaaaatagagataaacttctgtgcttaaaaccttgacacttaaagaattaaaaagatttgtcaaactacaaaaccaataaaatcaataatgatgtttatgaaatttgacagattctgttgttgttttctttttttttcctaattctgtcattgattgtgaccaaacgtgttactactgactgctaagtttcagattttttaagtaaagcattcccatgtttcacatcatgactgaatgatatgtagggaactcctcaagttctttcttggaacaagatgagctgtaaccaaggataatacaaattttctcattttcagatcgttcctgcaatcccaacctgatgagctttattacacgcataactgcaccaaccctggctcctggaaattcaactgctgtggtccctacccctactccaccatcaaagagtgg

SEQ ID NO: 27870 - DNA, 1147 bp, Homo sapiens
gtctcaatccctatatgacctgcagaaaacagagccctcctgtcaagacttattgcagtttgatgtgagaaagaaccaagcatttataatgcaaagccactgaggttttggagttatttgttacagcagtcaacatggctaaacccaaggcatagaaggacggagctcagggagacagctgccttcctcacatgctggggctaagaggggtgcgagcagggaggagaagggcttctgtagatgtccaaatctgacccaggccagcttccaccactgtctagctgtgtgactctgggcaagtgcatgaccctttctgagcctccttaaatagttacgtgaggcagtgggactggaggctctcaccctaagtgcccatatgattatgacattcactgactccttcctcacagcagccagtggccaaagagaaagggtgtggctcccctaggggctccgggtcagggtcactgctctgtctggaatctgggctctgctgcccagaacggccctcctgatgtctggaattccaccatgagtgactcatgcctttgggaagccactgccctgaccccactgagtaataacaataacagcccctcgtggctttttctttgctgagagtttcatagtccatggtctaatctggtccccagcacacggctgtgagtaggcagtgaaggtggagagagttagaattgccatacacgatgcaggaagcaatgtgcccacagctacacagcaagttagtggccaagcctagagtcctggacagtggctttttccccaaaaaccctttgcttgaaaaggctgcctctgatattcgtgtgtccatgttcatagcagattattcacaatagccaaaaggtgaaaggcactcaagtgtccattgatagattagtggataagcaaaatatagtgtatccacacaatggaagattttcagccttaaaaaaggaaggcaattctgatacatgctacaacagggatgaagcttgaggacattatgctaagtgaaataaatcagtcacagaaagatgcatactgtgtgattccatttataggaggtatctgtcaaaagtagtccaattcatagagacagaaagtggaattgccaggggctggggagggggaaatgagaagtttcctt

SEQ ID NO: 27871 - DNA, 1049 bp, Homo sapiens
gagggaaaacaggtggaagttcaggaataccaggcaaggtcccttgctcagaccaagagtgagggacactttctgatggaggtgccatttcagaaagccaagaaaagagagggtgagagagggcagaatgttccaggccaagggaacagtacgtaccaacgcctagatgtcggacatagcatgatagcctgcttattctgggagccaaagcgcctggtatgagtggagccttctgtgcaacgggaaatggtgatgtctgtgaagggtgagacacacaagttcacatcaccaagatttggggacatctactatgtgccagccatgggggcgggggacagaaagacatgggctttgtttgtagaatttggcaaagataaaagaggtgatgtcaagggctgtctggggcccccattacctccaccagtagttgtccaaacctcaaagtgatctagctggatagcagaggttccagaatgggcgattggtgaggaagaagtgtgacttgatatagtggcaagacggggattgtgagcatggaggagattccccacgggtgctgtcccatcggaagaggcaatggaaacggaaggtgaagatgaaagtgtgggatttgattatttatggcaggaagaggtggccagggtggagatgggggtctggaaacttggaggaaaagaaacagaagggatcttttaaattttgttttattttttgggattcttgtggaaatgctaatgttttagtcagaagcatgcctagaataatttacatccacagtggatcatttttaacacccctcttccttcatagtacaaaattattttcagtaataatcatgaaacaaaacaaatatttttcatgtatgaattaaaatttgcacttaccaaacaaaatcattaccattcacagttcacactgttttactcttttaaaaactgtaaatacaaatcaaaactccaagtagtttcgtaaaatgacaaaattgaaatacccttatcgtcatctttcccatcattctgcgttcatagttgatttcactctactgttta

SEQ ID NO: 27872 - DNA, 1058 bp, Homo sapiens
tttgttccaacatgattcaagtattagggaacaatttgagcataacataaattttgcatttgttcaggtgcaatttcatccacgaggagcactgggtgaatgaagaaaactgcacccacataagaatacacaaaacacatgcgcctcagacatccacggcaccctcagtttactattataagccacacctgtccacacctggtggtacaactttccattgacttcagtttttccctcaccacctcacaatcactcacaggctgcacctcttccgacacccacttccacaagcaaactgcaggtcattttcaaggtcaaatgccatttttattgtagtatttgtgcatttctaaagcatttaacatatttaaaaccatgctttcatttttactgcattcttgcctttttctgtttttgatgtgacactgaccccattttcccataagctgtgtgatttttatagcaagattttgcgttgcacagtaatttttagaaatgtatatttcatgttacagcagaattgattgcattgtaggcttggtgagtttgtgggaggatggatggatggatgaatggatggacggatggatggatgggtggatggatggatggatggataaatggatggatggatggatggatggatggatggatggataaatggatgcataaatggatggatggatggatggataaatggatggacggatggatgggtggatggatggatggatggatggataaatggatggatggatggataaatggatggatggatggataaatggatggatggataaatggatggatggatgaagtgataggtggatggatggatggataaatggatggatggatggataggtgagcatgtagtgaatggatggacagggaacccgtaaactcctaaacctttgagaatcacataacctataatcaccacaagggctgtgcaaccttttaatttctgatgctgttgagacgagtgatccatctggaaaagagaatggagtcaaacccctgcgtgagccagttacttctttcaccatcaagaacac

SEQ ID NO: 27873 - DNA, 1129 bp, Homo sapiens
ggagcagggaggttagcaattaggagaccagaatttatttttcctgaaacaggttctctgtcacccaggctgtagtgcagcaatgtgatcatagctcactgcagcctcaaactcctgggctccagcaatcctcccaccacagcctcctgagtagctgggactacagtgtgggctagtaattttcaaattttttatagaggcagggtctcactatgttgcccaggctggtcttgaactcctgggctcaagcagtcctcccatcttggcctcccaaagtgttgggattacagccatgagccactgtacccagcctgaattctaataccaacatggcctttaactcctgcccctctttgggcttcagttgccctctgtacaataaaggcattgatctggatgatccctaagttccctccagatgaaaccatctcttattttaaggtagggcagattcctatagctccagggagaagggaaaggttagggccctcacagaagtaatcagggttgtgcttcctccacccatccttggagacacagccagaggcaacatcagtgctctggaggcctgagtatctgcagatggctctcagcccttgattttcagatggacttcaagacctggacaagggaggcatgtgaggcccaagtcactgggaataactaggccagggagaggctgaccatggaggaagaagaggcagcagtctccagggtatttatctcagagatacaggaagagtagtggctgtgggaaggggaagcagtgagccaggggccttggtgcctttcgcatcctggtttaaaataacccagtcacccagagctcttgtgtctgggggaacttcacaggcttctctatggacttggagtggacactcacactgaccaggatgtggttagtggttttagagcctggggacctggaacaggtcatggagcctctcttggcttgaggcttttcatctggaagtcaaagctgataatgcccatcttcaataaaatgtcaaagtggggactggttgagttctctccttctccctccccccaacacatccctgaggtctcgtggttaagagtatatgatgatctgttttcacacagacctggtttcaagcctagctctgtc

SEQ ID NO: 27874 - DNA, 1023 bp, Homo sapiens
cagttctcatttggggtctctcatgcagggtcagcaagatggtagctggggctggaatcctctaaagccttcttcctcgaatgtctggcagctgggctgcctgactcaaatggctgggtgatggaactgctagagcaagctggcacctctttccactttcttagcagccttttcatgtgtgctgctgtgagcttcctgagagcgtggtggcctcagagtagttggcttcttccctgtcagttcaaggctccaagagcgagtgtttccagagaccaaggtggaagctgcaaggcctattatgacctaaccttggaagtcacatcgtgtcccttcctctgtcctctgttggtcagagcagtcacagagcctgcccgaattcaaagagagagagcagatacacctccgcctctcagtggaggattgccaaagaatttgtgcctgtcttttaagttgttacaagaagatttttctctccgttaatttatgaattccatgcaatcacaaaggactagtagaattttcttctttaaattcatgataagtcagaaaaaaatgagaacaacgacatgagagaatctggtgtataataaagtctggggcaaagagagattatttaataagaggtgttgggttggccaggttagagttaaacttgaatcctaccttgcttcttattttaaagtaagttctgagtggatcacagtttggaatgtaaaaagcgaaaccattaagttctagaagaacacatggattaactatcttgcagtggggaaggtattcttatgtgaagggaaaaaaatgttacagaagtcgttaaaggaaaagttagagaagtttgatttcaaaagattaaaaacccttattaaagatgttcagctttacccacaactaagcagctaaggcagtgagatagtgttttattccatattggcatacatgaaaatttaagacccaaagttggtacagttgtaggaaaataggctctgtcaataactattcagcttttttggaaagcattttggc

SEQ ID NO: 27875 - DNA, 1050 bp, Homo sapiens
tattttctgttgtgcgtcagctttgtctttggcaagcttccctcctagtagcaaaatagctatagcagttcccggcctcacatccataccccatgcctcatgacccagagaaagaaagtctttctctgatagctcactaggaaaagataggatttttttcccccaaaaaactctagctcacatattttctcaatcattttctcaatctattctggtcttcatggtcacaggccattccctgaagtacacaccataaccggcggatgagattttgtgattaggtcaccctgaggcacctgccccacctccagaactagagggtgatgcttcccaggagcatgtacactgtgtgaatccctggagaagcatgaagaagagaaaggagatccaagcagccaaaaacaggagattcctcacctcaactgtatgaaatgaagaggccatttgtcaggcactaggaagctcttttaatgctccaggggaatggtcccagcccagcaagctagggattcaggctagaggtgcagaagggatcagagatggagccctgccatgtgtaagtgacctataggtgttaggggaggacaagagttactcaccttctacaggagaatgcctctctggtcatgggtagcattcactctggtttgtgggagcctggtaagtgttccccactcttctctaggatgaaaatgtgcggtgctaatgaacctgatggcatcagtgccattgatttcattctttcaatcagtgcacctaccattgatttcattctttaaatcagtgcacctaccattgatttcattctttcagggtcactgagccatgtgttccaagccatgtgtatgctaagcagtgtgacacagaggacagtcttggccctcagggaactctccctcagttgagggactgagacatgtaaacagtgtcttaaaacacaaggaggaggaacatgtgctttagagtcttagtgtttgaggacttcaggatagaaactgacttaagtgcatgagggagtcggggaaagactcagaaggggtggcaatggag

SEQ ID NO: 27876 - DNA, 1084 bp, Homo sapiens
ttgccctggcagaaaaatggattcaacttggcctttctgaaggcaagactgggattggatcacttcttaaacttccagttaagaatctaggtccgccctcaagcccatactgaccatgcctcatccagagctcctctgaagccagggggctaacggatgttgtgtggagtcctggctggaggtcctcccccagtggccttcctcccttcctttcacagccggtctctctgccaggaaatgggggaaggaactagaaccacctgcaccttgagatgtttctgtaaatgggtacttgtgatcacactacgggaatctctgtggtatatacctggggccattctaggctctttcaagtgacttttggaaatcaaccttttttatttgggggggaggatggggaaaagagctgagagtttatgctgaaatggatttatagaatatttgtaaatctatttttagtgtttgttcgtttttttaactgttcattcctttgtgcagagtgtatatctctgcctgggcaagagtgtggaggtgccgaggtgtcttcattctctcgcacatttccacagcacctgctaagtttgtatttaatggtttttgtttttgtttttgtttgtttcttgaaaatgagagaagagccggagagatgatttttattaattttttttttttttttttttttttactatttatagctttagatagggcctcccttcccctcttctttctttgttctctttcattaaaccccttccccagttttttttttatactttaaaccccgctcctcatggccttggccctttctgaagctgcttcctcttataaaatagcttttgccgaaacatagtttttttttagcagatcccaaaatataatgaaggggatggtgggatatttgtgtctgtgttcttataatatattattattcttccttggttctagaaaaatagataaatatatttttttcaggaaatagtgtggtgtttccagtttgatgttgctgggtggttgagtgagtgaattttcatgtggctgggtgggtttttgcctttttctcttgccctgttcctggtgccttctg

SEQ ID NO: 27877 - DNA, 1041 bp, Homo sapiens
gaggggccctttgctggcctccttggtgaagagtctaaacaaatcccagtctcagaagagaagttggggtggcggggggacattcagctcctgccatccccagctcctagaaacagagggcttttccaaggacttggagtgctgagcctgcctgaatgaggagctggggaagccaggctgggctcccagccccatctccctgttgggagaagttggctcctagctgtccttcaacctcccggactggacaggcgagtgtgatttccaaatgaatgcttaaaattggggtaaggggctggaccgagcgctgtgagtcactgcatgctagcgtagcctgcctgagtcacccatttcctttcaaactcttggctaataggacagctctgtggtgggggtgttggaatgagctcagagttttaccttgtcctttgggagtcactgtttcagtgtccggggctcgaggggacatacaggacatgtttgtactaggtcccgcactttcacagccccttgcctgcatgtagactttgacattgtacattgtgcagccagtcctcaaaattgggctttagacctctgcagagcaggtagtacttttttcctctttaaggcaaaactgaggctgcaactggcctgcattttttcagagagcaaaagctggtactgttcaggtttggtgtgaccccaggattttctgatgtttgtgaggactcctctttgcttcctggggctggccagagggcattgaaacattggcttggtgttacacagacttaactccagacgtgcgaagtccacctcttactggctacatgaattcagtcatgctactccacctctgagccccagcctcctggtctgttaagaagatcatgataccggtgtggcgaagcttaaaggagacgacagggctgtaaataaaggcacctagtaccatgcctggtagggaggaggtgttacttagtgacagttcccttccttgcccaggccaccttcatgccagggggtcctatctctgaagattctgagcccaggtctcct

SEQ ID NO: 27878 - DNA, 1021 bp, Homo sapiens
ggtaatagaaatgtgaaatggatagaactcaaacacggaggagaggaaaaatttaccaggaaatagtcttgctcctgatcttaaaggaaaactttttaatttctcccattaagtatgatgttatctcgggatttttcataaatgtgcttttttaggttgaggaagttctattcttaatttgaggagtgtttttatcataaaaggttgacagatttttgtcaatttttttttctgtgtctattgagttgattatgttggttatgccctttgctctgttaaagtggtatattacattgatttttgcatgcttgaataacctggcattcttgggacaaattccattggatttcattatggcatataatctttttttatatgtggctgaatctttttactaatattttttgagaatttttgtgcctatattcatagggactattggtctgtagttttcttttttatgatatctttgtctgtagtactggcctcatagaatgagttggaaagtattccatcctcttctatattttggaagagtttgtaaatgattagagttaattctgtaaaagtttggtagagttctccattgaaatcatctgagcttgggatttcctttgtggaatattttttgattagtgatttggtgtctactctttacagatctattcagatttcccatttattttaagtcagttttggtagttgttatctttttaagaattcgttcatttcatctaagttatctaattttttagcatacagatattcccaggattcctttataatcatttttatttctgtatgaggtagcggacgtgtttgcttccaccaagagcatgtgccttgtccagcttaagtatggctgtcggtatccctgggcagcaacccctcctggctcagtgtggagacaggaatctgctagggctctgtagccaacttgctaggcctcagtctgtccagcactagtttaagagtgggagaatctagcttcaaactgcgcctctgcttgtgatcttgcaca

SEQ ID NO: 27879 - DNA, 1025 bp, Homo sapiens
tagtagagtgcctgtcaggcgttgtgatgatgacagggcctgtggacccactgtgtccttgtgcccactgcaggggacccgaagctgccagtactgtaccaagtggagcggacacgaacagggtcgagcttctcggtgcgctctgtgaaggccgtgcaacatgggaagcccatcttcatctgccaggcctccttccagcaggcccagcccagccccatgcagcaccagttctccatgcccactgtgccaccaccagaagagctgcttgactgtgagaccctcattgaccagtatttaaggtgagagacctggaggctccatggcagacttttcaaaatgcagctgctatctgtttgtgggtcatagaatcctttagtgggtcttgaccagcatttttaaaatacagattagaaaagaagatactggagtgaataatatgtatgtattaagggcaagaatccttttgtgaaacttgaggtttagtcatgtgtgtttctggtgtgtgtctgtactgggtcatggtataaaatgaagggcttggccgggtgcagtggcgcatacctataatcccagcactttgggaagccaaggcaggaggattgcttgagaccaggagttggatactagcctcgccaacatagcaagactccatctctaatttaaaaataaggctggggctgggtgtgggggctcatacctataataacactttgggaagcccaagtgggaggatcacctgagcccaggagttcaagaccagcctgggcaacatggtgaaaccctgtctctataaaaaatacaaaaattagccgggtgtcggggcatgtgtctgtagtcccagctacttgggaggctgaggcggggggatcacttgagcctgggaggtggaggctgcagtgagccgagatcgtgttactgtgctccagcctgggcaacaagagcaagactctgtctgaaaaaagaaaaaaagaatatatattttgttgttgtttatatatatacatgtttgtttgtttttgagatgg

SEQ ID NO: 27880 - DNA, 1025 bp, Homo sapiens
atcttgagtgtggcagggtcggctggctcctcgcacccagcttgctttcggccccctccccttcttcccatccgtccctgctgttccttgtggcgctgaggaaggggagacagctttgtaggcctgcgggtggactgaggaaggaatgaattcactggcacgtccccgcctcagtttccccctcgagcacacacgcaggagccggatgttcgcggtgggcggtgcgcggcggggttggactgagcgtgcgcactggggggcgtgggggctgtcttagaacctgcgggggtctcgggttctgccgccggcccaggggaggcatcgtggtgacgtaggctccggacgtagcaaggacctgggtcctggcacccgcgcggctctgcctcttccagccagtctctttccctctctgggcctttgtgctgcgtggtgtccaaatgttaagaagccctgccccatgcccgggctacatatacatcgaacccaagctgtaaatgctcttgagtagaagcaacttaaactagccttcgggggcaagtaatagagatggctttcggcagagttgggaaatcaactaaatgcattgtagggcctttccaacattgacatctgtggccattagttgcagttcaaagcctcactgagccctcaaaccagctacagcgggtagcctggcagggaactggcagctgtgaggtgctcctcatccggctccctgcaggattctttttggtaggagcctgcaggcgtccgagtggtagctccacccatctccggtctccccagcaagcatcccttccagtgctagcttgagaagaggaaaagcttgccacctgctgtcagaccggcgcttgtgtggagccaggggctgtaggtaccccggctgagtagcctctcagatgtccatggtcctggctgcacgccagcgtgggggcaggcaggcggacgctcaagaaaaacggaggcaccgatatgagtagtaattgagaacgagggttcatgatcctcatctgatttcaatccct

SEQ ID NO: 27881 - DNA, 1075 bp, Homo sapiens
ttattttgagacagagtttcactcttgcccgggctggagtgcagcgtcatgatctcggctcactgcaacccctgtctcccaggttcgagcaattctcgtgcctcagccttctgagtaactgggatcacaggcgcccaccaccacaccgacttaatttttttagtagagacagggtttcaccatattggccaggctggtctcaaactcctgacctcaggtgatctgcccacctcagcctcccaaagtgctgggattacaggcgtgagccaccgcacttggcctattgtattctttagtctctatttcaaaaaggcctttttaccgaggcacatatgtatggaaagttacacatattctgcccaggtcaatgagttttcacaaggtgcacacacctgtgtaaccaagcacctgtataacccagtcaagaagcagaacattacctgcattgtctgtattgttaatttgtctagtacatatttaatatttaaatactgtcaatgtttttgaagaggtaacagatttagattgtccaaatggtttgcaagcatggaagtcacatctccctccttccctcccatcagccctccagctgcctgacctccctggggaatgccagtgttaaagcactcctattgcttcccgagccttagattgttctgtgaagtcaccaaagccgccattctggcctcccttggataaatggggcaaatgagactccgggagaggaatggctttgtctgtaggtgcacagcatgtcagtgacagagccgtgcctggaacccaggtctcctgactgggaggtcccagctctcgccgttgctctaatccaggccaggtcctactgtgctgacagaatgtcggctgttgggcggtagtatccatgctgccctctaaccacaggctgtctgtgtcatgtgactcaatgcacccatcagtggtctgtgatgagtgggtgggaggatattttggctggcctctggcccacttgtccacgtctgtcctggtgtgtcagtggctggcttgtgacctggcatgtccgtggcaggtgtggaaggagagcctctagtgagttccc

SEQ ID NO: 27882 - DNA, 1031 bp, Homo sapiens
tggtggcagctgttttggatagggcagccgtagagtttgtggacttcaatgtttatttaaacttttttctaactggctgtacagtgtctggaggaagggttgccttttccctattcacatgaaggtgctttatgagctagtggtaggtgccaggaagggtagagaaagaacttcaggggctcagggcaggaacgccaagtcagccagaggagatcaggagggctttctggaggaggcatcgctgtgggcttggaggaggagtatgcaggggtagggaagtgagctgggcaaggggtcagggctgaaagggcaggtcccgccactcactgttcaccaactttactgtcccccacagaggatagcgactataatccagctgaggatgagccccgaggccggcagcttcggctccagcgccccacccccagtaccccaaggccccgaaggagacctggccggccccggaagctgccccgcctggagatctcagacctcccagatggtgaggcttggtcttgggaggggctcgtgtgggtgggtcaggagtggcctctctccctgcttgtctctgtggagttctggggactgagtgtgccctgcagggcagctgtctcaaaccgggtcacctgcaggcctccagggaaaggggaaagccctcaaagactcaagctcaagaaaccctgactcaggaaactctctcagctttatggaaatgcctttcaccacaatttgtcatagcaaaagagaaatttgggactttatcactgaatgcgtaagataagttttaaatattactgaaatgagaagagaggaataagtctgaggcctgggactatcagaggagccctggttcggagcattactggctggggacagaaaggacccagccgtggtgtgagcaccagctctgccgcctgcagtctgtgtgacttggagcttaaatctccagtccctttatttatgcatggaggttatagcagcatgccttttaggattgcttaagggttaaatacacacaaaagagtacagtg

SEQ ID NO: 27883 - DNA, 1112 bp, Homo sapiens
gcagattagaataataataatattcttatctgtcaagttggcaagacttaaaaagaatgacagtactcactgttgactaaggtgtggagaaataggcactagatgatctacctctgtggaggtataaattagtatcagccttctcagggagcagcttggcagtaagtatcagatgcagcattaaaatggccacgtcctttaatccagcattacattttggttaatttataatagtaaaaaatattaatactggctgtttttaggagatagaccagaggattgattcagagtattatgacctttgcctacaagtagctcaggatttaaaatgagggtccagtccttatttcagtttaccctggtggtgttttgcagagcgtttgaaacgtgaggaacggcgtagagaagagctttatcgtcaatattttgaggaaatccagagacgctttgatgccgaaaggcccgttgattgttctgtgattgtggtcaacaaacagacaaagtaagaacccttagatatttctccccagtaaggagaagagtcagagaaattcaggctcctgtttagcacctctatccactgaatctgagctgtgtattcttgcattgctgtgcgctgttagccagggttctttcagttataggtgacagaaaactcaattcaaattgaggccaaaagggacatttttcatttaagcaaaaattaactgggaaattgaggcacagccacatccaggatcaaaccatgtcatcaaaattggtctctgtgttagtctctaagcactgttttcctcagatttgcctttgttctcaggcaggttttgtgcttgaagaggcagaatggcactggccctgaacgtgtgtcttcttagcttagcaagccaagtggaaagagaacttctctttcccagtgtttccacctgaagttctgcagttctttttagattgacctgactcactttcccatccctgagcctgtcactttggcaggggtgctgggtgttctgattggccagggctaagtcatgttcccatcccaagagctagaggtgggattagccctgtggaaccatgcagactgagagtggaagagggtgtagccgctggtcaag

SEQ ID NO: 27884 - DNA, 1115 bp, Homo sapiens
catcattcacaggggaaaaaaaacactacctatggcaaatatttcctaaagttatacctctacatttttagcgctttctacgtttaataagaatattggtataagcatactggcaagacctttataacaccttgttttgctggacttaacgtaggtatctttgggagttttacaggattatcacctcttcagatgtttcagtaaaccacagttctgctggctttgctctctattcaataatatgactccctgatgactccagctgtcagtgtgtaattctgacaatattggcccagccaagcacagaactctgcatgaggaatctctgctctggatcacatttcagcctgaattcttatcatctaactcttgagggccacttcattgaactcctgtgagtaccttgcatagttaccatgcaagttgtcaagcatcgatactaagcattagtccttcttcaaagacaggatcatgattccagttgtgccttagatatctcagttaccatcttcagctcaacaccttgacagtccagatcttgtagcatatctttatgcagatgtggcctctaggtacaagaagtaagactgtacttctgaatgacttaaagaagaacaaatagaattaacttgtctgcatccaacgctctgcagaggatttttccccatatatttgtgaaagatgttaaacctggtatctctttggtgaaagtcattgggtatcggctcatcagaaataacctggctgtagacaagtttcttatatgacctgaaatgctttctgcttatccacagggccctaatgcttttgattattgcttgctccctggttgtgagacagcccttgctctaggtgggccacaaagaaattccaggttgtgattacctctgcagtaacacttgaagaagtcatcagttctcagcagctgccacctctaccaataagaaagttctgtttgtgctggagaaggttgtcagtgcttcctaaggaaaagcatggacatgtgtaaaatttgggtctgtgaggtgtgatatctcattgcacgtccatatcctacctccacctaatggcaatattctggacaagtctgttgtctccatttctaacagtagcat

SEQ ID NO: 27885 - DNA, 1029 bp, Homo sapiens
taatttagaccattataaactttaagagttgtaaattgtgaaagtactgcatgcagtagcaaagctatggtcagatattactggccaagtcttacatagaaaatattttcaggttttttttaaaatagaaggattatatcttgtgtctgcttaattgaaaaggtaagaatcaatttaagatatacttcactatttagctttatattattttcagttttgtcagaagccatttttctagacaaattagagacttctgatttaaaatggaattgaagattaccttcatttgatcaggaactcaaaagttggcaaaatagcagcataaaatctctaccagacctctaagtttcttgttattgctgtggtctttcatgtgataggaatctggttgggatttttaaaatacataattattattttaaagcactcgaattatgtgagtacttaataccatttgatgtcattagatacactattaattgtttaatacggaaaaaggggaacaaactctactgcagcagaaagcacttttatttcttcattcatctgaagtatgaaatttgtaatgtatttatttagctttaagtcatatgaaaactgtcaggtattattttggggcatagatttcttagtacatggtatttattattcacttcaatttttgtaaagcaggtattcttggtttttagcaaagcaggctttagctatacaaatttgcttttctttaagcttatgtgattctacttttctcccatatctagttctatacgccagccttctctaatgaaaacaacttaggaggagtgttttattacctaaccctactataccaaacgccagtccttattcttggttatctgtagatgttaacaggtcatattctttgtttattaaaaataataataataattttctttcctgcatgttattctggaagattctatccagtggaattcaacacaagacacactaacaggaggccctgcttcatgggatattggaagttttaagacaatgaaatccagctat

SEQ ID NO: 27886 - DNA, 1709 bp, Homo sapiens
actctctccattgccggcatttttaaggtacagactcgggcgtgatgccagtcctgtcttagagagggagcccccaggggtttctcaccagcagcttcagtcccagctcctgcaccccagggccctgcagagaagagaaggaagtgccccattaggtgccaggcactttgctgagtgctgtgctggcccctccttctgccttgaccacagccctgtgagagggtatgatcactcccatcccacagacagggacacagatggagagccgcccctccccaagggcacagcaggggcctcaaagccagctctgactctgctaggcctggaatgcattcacattttaccttgactgccaactctggcactgggcagtggcctggagccacaggttgaacagcccctatccagactcatcaggaaagagttccgtgattgactggcggtgtcctccaaggccatggccagggctagtgagaccctgagaaagcacccctgtggccagccttgctgtacctctgcctcgcaggcctgtccttccctctcatacctcttctcacttctccttctccctcccacacatttcaacagtcctccctgttcaggggcagggagggacttttctctttggccaggcacacaccagtgttgaagcagtgttgcctaaacccagaaatgcaggcctgtccaagggtcttctggtggccagccgcatgctgaggcatggctgtggttcttggatgaacggccttgccagtcctgtttggagtctctgtttatagagagccccgggaccagttgtgtcttcagtccggggtaacacagcattctcacacataggctcagggctctcttctgtggctgccttctggggcagccgtcctttatccttgtggataaggcgcgatctggacaccctggtccccagcctgggatctggtttgcctcttttattcctgacagaattccatgacaagcacctcctttgttgcatctcacaaaaggaggctggcgggacagcgccgcaagccggccgggtcccctgacctctctgcctgcctgggcccaggatttcagtaagatcttgatctgcccacctgagtgtacctagtgcccccaccttccaccctcctggtcaagcagccaaatctgcctgttgatcatgctccctcctgcttctctgcccccaggaagtctgcactttgctgttggcagctcatctgctgggcgatcagatcagcctcctgaactggctgggcttcgccctctgcctctcgggaatatccctccacgttgccctcaaagccctgcattccagaggtaacccagagtcccttccagaagcctctgttttctgttcttctccctgtgactcttagtgattctgatgcaggaagtgtgcccggtggctctgctgccgtcactcctctaggaagatgtgggggtcatctccagagtgggtgggtggggcctgggtgactcagcacacatgcaaatcagagcaaaccaagaaaaccacgactgggcctgtaactgtggtctctctctatcccaaggtgatggtggccccaaggccttgaaggggctgggctccagccccgacctggagctgctgctccggagcagccagcgggaggaaggtgacaatgaggaggaggagtactttgtggcccaggggcagcagtgaccagccagggcaaatggcttagaag

SEQ ID NO: 27887 - DNA, 1023 bp, Homo sapiens
gcccagtggggccaggtcctggagagcctgtggctgagactgggaagaccagcagggccagatgaggccatgggagccgaaagaagggtgctggtctttatcagaaaagcactggaagctgctgaagggttttaagcagtggcctgacatgatcagtttgtgttttaaaaggtcactttggtggcagttcatggagaatagcttgaggtgacaagacagcagacacgacgtgggtctctgggactgcctgtgccgttgtgggcagcccctccagagccctgagtcacgcagccttcagaggcacccatggctacgagaagcacagtctctgcctgaggctccagagcggccctttttccccagcagcagaccttgggacctgtgagcgctgcatccaattaaccatgggaagggtcagcaccagccaccagccccttaggtgaggactctgcctggggctctgctgatggttccgaatcatggagctgcagagagctcctccagcctggagacgttcttggtgaaagctgtggtctaactccaccggctcttcctgcacattgtattcaagaggggtgcctgcccccgctgactcaggagctccggtgctgcagccgccacgaatggggaggtgggccctcgatgtggcctttttgtggaaggcggtgttgaccctggggctggtgcttctctactactgcttctccatcggcatcaccttctacaacaagtggctgacaaaggtaccaggaggccttgctggggcggggtgctgggatgaaggtggccagagccatggctacggtgcccttcatgtttaacaggaaggcacaagcttcaaccagtctaactggaagccagtcacggctgggctggaacagggccctccaagcctgccgtgccagggttccccttcagtgtttggatccagggaaaccaaggagagcggggggtgtgaagggatgagctggggaaactggggctcaagcagcagctatttaccccactagagaagtatttcaa

SEQ ID NO: 27888 - DNA, 1097 bp, Homo sapiens
ccttcaggctccacttctaattctagttgtcttgctatttctatcacatctgcagttacttcctccaccgaagccttgagtctctcaaagttatccataaaagttggaatcaacttcttctaaattattattaatgttgatattttgacctcttctcctgaatcacaagcattcttgatgtaatctagaatagtaagttctttctaggaggttttcaatgtatttttcccagacctatcagaggaattactatttatggcagctatagccttacaaaatgtatttcttaaataataagacttgaaagtcaaagttactctttgatccatgggctacagaatggatactgtgttagcagggataggaacaacatttgtctccttgtacatcttcatcagagtttctgagtgacctggtgttttgtcgatgagcagtaatattttgaaaggaatcttttttattctgagcacagttctcaacagtgggcttaaaataatcagtaaaccttgctataagcagatgtgctgtcatccaggctttgttgttacatttatggagcacaggccaaagagatgtaacataattctaaagggctctaagacttgagaaatgggaaatatgcattggcttcaacttaaagtcaccaactaccttagctactaacaagagagtcagcctatcatttgaagctttgaagccaagcattgacttctctctatctgcgaaagtccttaatggcatcatctcccaatagaaggctgttttgtctacattgaagatctgttttttagtgtagccaccttcatcagtgatcttagctagatcttctggagaacttgctgcagcttctccatcagcacttgctgcttcactttgcatttttatgctatagagatggcttctttccttaaccctcataaaccaacctctgataacttcaaacttttcttctgcagcttcttcacctctctgtcttcatagaattgaagagagttaggggcttgctctggattcggtttcggtttatgggaatgttgcagctggtttgatcttctatccagaccactcaaactttctctgtatcagcaataaggctc

SEQ ID NO: 27889 - DNA, 1027 bp, Homo sapiens
attcctcttctctcagaaatctgtagatatacttacagcatagtttgcttccacggatgcagatgagaagtcaaatgacatctcattgtttctttgtaagttacttattttccctctctagaaatgagtaagcttttatattaacacttgagatttcagtcattgttttcaggacatggctaaagatgagtattattttgtgtaagttctgtttggaattcagtgggtccttcaaatctcagatcaagtctttattggaaaattttcaaggacaatttcctctattatttgtttaattattgcctgtcttccatctgctttattttacaaatttctattatcctaataataataattccaacatagaataatccaaatatgcaagtatttgattgcctgcatcatttcctcaaactgtttatttcacctcataattttcctctctttgcatttttgatttgtgttttgtttcattactccatttggcattctaggtcaggtttcaacagtgactctgcaatcctttgattcatctcttgaaatttttagtctgaaaatgagattctttagatccagaacatgtgtgtgtgtgcatgtgtgtgtgtgtgcatgtgtgtgtgtgcatgcgtgtgtgcgtgtgcatgcatgtgtgtatgtgtgcatgcatgtgtgtgcgcgtgtgtgcatgcgtgtgtgtatgcgtgcgtttatgcacactgtatttgtggttccttacgtgttgttgttatcattgtttttggttcaggctgtcctctctctcccccagaaggtttgtagctgttgttctctgcaatatgctggttctttcactttctcacttctgggtcccccaggatgggttggtattttcctttgctgacccactggggcccatgttcagctgctggggatctagagcaaggccagtctctcgagtaatggatgttgcaacagtctttgacttgctgggtccgctggcaagtggttggtcccaaaaggtctccctctgcccgctagtctcttcagc

SEQ ID NO: 27890 - DNA, 1023 bp, Homo sapiens
aaaacatgagcgaattcacacaggggaaaaaccctatgaatgtaatgaatgtagaaaaaccttcagccagaggtcagccctcaccaaacatcaaaggaaaacacacaagaagaaaactattatcaacaccctccatgtgcagaaacctgcatcttcaaggcaaatttgtcaaacatcagcaaaatcatagggcagaaacactaaggtattaatacatgtaggaaagtatttgtttgtaggttataacgaataggaattagaaaattaacataggagtgaaaccacatgaatgctttgaacatgtgaaagctttcagcaagtattcagagctgtggaggaaaaattaattttaaggtatatgaatgcaaaatgttcttgtgcataaaatgtttaggtagaagtcatctttcagatgtaatagcagagtaattaaagaaaagattagaaaatgacttgttcttaatagaatgtgaaacatgatccttttgtaaaactatgaattatttaagtcattgacacgatagcgttgaatatgtgtgaagatttcctgaagtatattgggctatatatagttacataggatacgagtgtgctgtataacataaattatgtgtatgttggatttacacatgggaacacaacaatacaatatattttataagtgaaaattgaacggtcacataacctgtggtccatcaattccaattctagatacataccataaaacaataattctcaactggacttcctaaagtgtgtttggaaatctgttgttttgattgtcacatcattgacatgctacaggctctgggtagatgggaggccagagatgctaatttccctacaatgtatcagtgaaaggacaggaaatagtcttatccagaataccagtagtttcaccacacaaaaaaattgccttacagaaactcttgcacatctgcacccacaaatttgtacaagaatgttcactgcaacattgcaatagtttttgtaaaaaaaaaatttaaagaaaatatccaaatg

SEQ ID NO: 27891 - DNA, 1021 bp, Homo sapiens
gatgaaaatgtcttctcttaacacagagctacgatgctttactgaagaatatgaagttagaaaattcaactggcattttcagggagtgttgcagatatttgcacagaaggagaaaattctcccatgggcagttgtgaactaacaagaccttccttacccaaagacgcaaggtatttacagttatccagcatcacatctttatacaggtttctctgttcaggagtcagatgatcccactcttctggtgagaagaccacggccacatctctaaatctcaccaactcctgaaataacaatttatactttatatgtatacatgcctccacgtggcctctggtagatatctttcaaattgggcattctagggaatcacacaggatataaggatacattagaatatgtgaccaaaagctataatagaaagtgcagacaataaaagtatgatttactcttgtagagtttaggaagacaaaattacttatgataaagtaacagctaaggaaacatacatttggtgttcatgcttggctgagtcagtggggtagagctaccatctgtgggattatgaccaaatacctctaagtcagaatcccacccaagcagaatgataagggaattcgtcctgcctgactgcatgggatgggacatcggttttttgctgattcagactgaaactggagcatcagctcttcttgagtcttgaacctactgggttttggaccagtattataaatcagtcaaaactaaagatttgacagagtctctcaatatgaacagtcaaaagttctttgcaagtaatactagaaccatgtcaggtctcccaagtatatacataaattcaatagtatctccatttaaaaaatccattaagattattttataaactgtgataaacagatacatgattttcacacaagggaaaaatgtgacagactagttttttacatgaaaagttaatgaaggtcttgttcttgccagggtgcagagtcaagttgtagtaattcaagtgggttaggaatgt

SEQ ID NO: 27892 - DNA, 1015 bp, Homo sapiens
attacatacaaagtgtttctctcctgtatggattttcttgtgtttattaagatttgaattattgttaaaacgctttccacattcaccacattcatagggtttctctccagtatgaatttttttatgttggttaagttcccagttaaggcgataggtctttccacattcattacatgcaaagggcctccctatagaatgagttttctgatgtttagtaaagtttgaccgatatttaaaggctttttcacaagtcgtacattggtaaggtctctctcccgtatgagttcctttatgttgtgttagatctgacagacggacaaaggtctttttacaactactgcaaataaaagacttctttccggtatggatttgttggtggcgagcaagatccgtgcgctgggcaaaggtttttttacattcattacatgaaaagggcttctctccagtatgagttttctgatgtttattaagatttgagatgcttttaaaggatttctcacaaacatcacacttgtggggtttctctcctgtatgagttctttgatgtagaataaatttggagtacggattgaattcctttttgcaataattacatgtataatatttctttctagtatgaattaatagatgttgagttttttctgagaaacggtgaaaggtttttccacaaaagttacaggaaaagggcttcctttgagtatgagttttttgatgccgagtcaggtttactctgttgccaacatgaaatctctgatgtatagagagggatgagagaaacctaaaggccttttgacatacatcacatttgtatggcttcagtccactgtgcatgctctgatgttgaataacctttgaaggtctgttaaaagtttcaccacattggttacattcaaagtgtttatatagtgtacatattctctggagcattgtaaatgatgagcgatgcctaaagccccttgtattttcaccatattcgtgggtttcccctaccttatggattttctgatgtccagta

SEQ ID NO: 27893 - DNA, 1005 bp, Homo sapiens
tctagagcattgtttcaaaatacacatttggtcacaaatctccagtccttgcttacaaataactctttatggatttccattatttataacagtgatctccaaagtggaggatagggagcaccccagcaattcactggacttctattcttgtatttcagccaaaagaatgaaaaaataattaagctttattgatattagtgtatagctggaactcacttggaaatatactacaattcctaagtaaatgtacgttagcgtatatgcaagaatgttttactgatgtgccgtactatctaaatttcaagactactaattagagaaaagagttcctctattctctgacctctgtcccgctcctcactaacctttcctgtggagagattgtagttctcgaactccccatatgtgttttgtgtctgtgtatattcttaatggctacagtcctataaaacatactgtttatatttcaggactaaaattattatgctctcaaggaaggggtaacaaaaatggagcaagctttcttcttttgtgatcacccttcatcttgtgtatatgtccagcattgctctttaaagatgtacatttctatttttgtcaccctgtcagaatgtatgctcctaaagagtaagattagtattttatgtgattagtaatccaggcaattggaatagctccaggacatggtataagctcagcacatttttaaaattcattttaaaaaatgaacacagtgacagatttttaattttctgccctcccacaattacatctctctatagctttccattagccatggcagtggtcttcttatagtttatgttaccatacatttgatatcactcaattttggtcacccaagattaaacattttctttcagataccagtttcattccaggacctgactgtgaacttcacccaagaggaatggcagcaactggaccctgctcagaggctcctgtacagggatgtgatgctggagaactacagcaacttggtctctg

SEQ ID NO: 27894 - DNA, 1071 bp, Homo sapiens
tcctgcctcagcctcccgagtagctgggactacaggcgtgagccaccacacctggctaatttttgtatttttagtagagatgggggtctcgaacttctgacctcaagtgatccgcctgcctccgcctcccaaagtgctgggattacaggcatgagccaccacacccggcctttgttttgtttgttttttagagagtgagtgtgacaaatgaagtccagtgagaaagggtggtttggaagggaggaggaagctatggcctcctcagtttagctgtggggtgttcccaggcatagtcctgcagtgggcatgagcaggggaatattccagatgagttcagttgtaccatttcctgtagcattcctcaatagtcctgaaataagtagatatagatggaaaaactggcttaatctttgaaaattaagtttacccgttaaaaaaaatccaacccaataaccacttatgtcttgatttcaggaatatctgccccagttgtcttttttgtggactatgcttccaactgcttatatatggaagaaattgaaggctcagtgactgttcgagattatattcagtccactatggagactgaaaaaactccccagggtctctccaacttagccaagacaattgggcaggttttggctcgaatgcacgatgaagacctcattcatggtgatctcaccacctccaacatgctcctgaaaccccccctggaacagctgaacattgtgctcatagactttgggctgagtttcatttcagcacttccagaggataagggagtagacctctatgtcctggagaaggccttcctcagtacccatcccaacactgaaactgtgtttgaagcctttctgaagagctactccacctcctccaaaaaggccaggccagtgctaaaaaaattagatgaagtgcgcctgagaggaagaaagaggtccatggttgggtagaagaatgtgtatgacaaccacacacagtgaagctcttttttcaaagtaaatttgaagaaatgctacaagtatgagatgagatctaagtaaaggtgttaagatatttttaagtggtatg

SEQ ID NO: 27895 - DNA, 1048 bp, Homo sapiens
gtggaggttgcagtgagtcgagatcgtgccactgcgctccagcctggaagacagagcgagactctctctcaaaaaaaaaaaaaaaaaaaaattgtagaaacggggttttgccatgttggccaggttggtcttgatctcttgacctcaagtgatcctcccgcctctgcctccggaagtgctgggattacaggcgtgagccactgacgattctcttgagctgaaaagcaaacatttcatttcacttctgcatattgagtgcatggaggaagaagtgatgtccattgttaggggctgggaacggtttccctaaggggctaggccttgaaagttggatgggatttgggggcacagtcagagggagtaatatgagcttgctttaggagggaggatatgaacttggcattaaatatgactgaaccacctattgaaaaagcaactccctcttcacttccccttgtaacaggctcagtttagtgctaagatgtctttagcatctctcatatttcctgattctctttttaacaaagactgagcagactctagattttagccgcatgctccccaccctagaacttttaatttaaggttttcattacattcatttttggagttgcccttgatttaacagcagattttattggttttgtgttttttgttggttaacaataaaagtttagttatttacctaagttacataagtttaaaataaaaacatgaactaagcaatatgtaagaggactatggatgtgtcgaaatggcacaagtggtgtgaggaaggtccaagttagggaaacaccgtttcagacagaggggtgctgttagggttttggagcctcaaagtggcttgattgaaatggcatctgagaagatgaatgatgccgtggtaggatgaatctggcaggagtctgttggcatcaggagggtggcatacaggaaggtagttgggagaggcatcgtattccattctgagctggaggagtattacctagaccagggtcaagaaactttttccatagagggccatttagtaagtattttaggttttgca

SEQ ID NO: 27896 - DNA, 1097 bp, Homo sapiens
ctccatgtcctttggggtttccattgtctggtggcttaaagcaagtcagggatgggccttgagaatctttctgctgtggttatggtcaacctgggctgctctggaacctcagctgtcagagtgagagaggattcctgcagttcagctaaagagaatgtctgtgagaggtacagtggaggaagagagagatacagttacataagggagggaggataggccatcaaaccatcccgacccatctgttagatttatagatggcctctgaaaaatatgagtatgttatggattgggttttgagagactgtctctgttgttgcagagaacaataggagtagcatttatttcatgaggatcgtaggaatatttgggtgcagatggcagtgctcctatgagtgacatatttatactgttctttctttctggaacagatcttttgattgattggttttgtgcccctacctcttccagaaagaatttgcaacagattgacaaggatacataaccatatgaaacaagatgaaaataaagacatccatgtaaaaggaaaatgaaggtagaatagcaagtggtctggggaaaggttttatacagaaatctgtactatttcaatcttcagagttagggaagttggctctgaaagcagaatgggaaacacagtaccttagaagatctcatactttccaaaaaaacaaaaaaccattctagttgattaaaagaagtagaacttttcctcacattgatgtctgaagggaatttctccaggaagctttagtagatggtggacaattaagctgaagatgattctaaaacacagttcagttagagcagcttcctaaggcttggggcaaaaccaattgatcttaaattcagagctgatggtggtttgggtcttgaaaaattctcgtgtcagactccgctagagagcatcttttcaatgatgtgttttcacttaagagtttagtaagtgaagggcattttggattgcgctgttgtgacctccagcttaccttccactagggatgcagcttatgggtagaatatgaatcttcagatggcaaaacagcttttatagctaataacctcagaacagaagcaaa

SEQ ID NO: 27897 - DNA, 1101 bp, Homo sapiens
ccccatctctactaaaaatacaaaaattagccgggcgtggtggtgggcgcctgtaatcccagctgcttgtgaggctgaggcaggagaatccgcttgaacccgggaggtggaggttgctgtgagctgagattgcaccattgcactgcagcctgggcaacaagagtgaaactccatctctctccccgcccccctcccccccaaaaacaaaaagaatgatccaggtgtgtttggccttgagccaccaggtgggtggccgtggcattcatgatattgggaggacaaggcaggtgcagggtgtttcacacactggggaggtaggattggtggcactaggaggtggacataggagacctgtttctcagggagatgcagaggagggttttgcagcgtgaggcttgtgggttgctagtgactctcatgtatgtccttttcctgactccatgaagctttgcagtcccagatgccttaggaggatgggccctgcccttcactggctgggtagagtgtgaaccagacccatctccatgggaaaccaatgttttcctgacacccttattcttgccatatccaagtgctatgcttaaaaccattttttaatatttagaacatacctcttaaatctcaacacttgtttatttattaacaaaggaaatagatctatcaaattaaaggcctgttctagttattaattttttagcacacatgaatgtatatacagaattataaaaataggctgggcgtgatggctcacacctgtaatcccagcactttgggaggccgaggtgggtgggtcacctgaggtcaggagttcgagatcagcctggccaacatggcaaaaccccgtctctactaaaaatacaaaaagattagttgggcatggtggcacatacctgtagccccagctactccggagactgaggcaggagaattgcttgaacctggcaggcagaggttgcagtgagctgagatcaccccactgcattccagcttgggcaacagagcaagactttgtctcaaaacaaacaaacaaacaaacaaacaaacttgacctgtcgagcaggaaaatggattcacttggctgtgttctacgtgcaacagcat

SEQ ID NO: 27898 - DNA, 1039 bp, Homo sapiens
atccggctaatttttccatttttagtagagatggggtttcaccgtgttggccagactggtctcaagctcctgacctcacgtgatcctcctgcctctgcctccccaagtgctgggattataggtgtgagtcaccatgcccagccttggacttgtttgaaagaaaagagactcttttccttccctgccaagcaatttcatggaaaatagttgggggaagggaacagtgagcgccttagataccggacagaagtgtgtgggtgaggtgggtgtggagcaggtcaggggggcgaggttatgataccaggaccaactggtgataagctcctggtggccctgcctcttgattctccagagaaggactcactctcctttttctcggtgacagagctgaggctagctcaggaagggggagtcatttgccctaggacagcactggagaccctgatgccttctcagatctgtcctgtctagtagtcctgatctgtgcccgctcactttgaacgcagaatctcaccgtgaggcaaactcttaccttgagagcatctggcttctgttctgctctgcccctcttggtggagatatggttcttcaggtctcaggagaaagacagcagtcagaatggatgagaagctggtgatttccagccctctgatagagcagatcgatatttttggggtgtttagttttagtttgtgttacgatctggtgtcaccgagacttgcaaacaatccgcctgtattgtgaattcggtcccagggatgtgctttatttctcctgggttgttttctcttagatgccaactgttgaaatgggggtaaaatgtaacataagaagtctattttgtcttcttctctttaaaatattggaaaacgtggcagtgttgggtccagattcctacatggttgctttggatagcaactgagtagatactgctttctccctttccaccagacgtgagttttctgcttctgcaaagtcccctttgctccccactgctttctaccgggcttcagtttgtggtctgtgaaatctaaaaggc

SEQ ID NO: 27899 - DNA, 1380 bp, Homo sapiens
ttctgggatctttggctctaagctacaatgttattctaggggaatgtactttcttatgagagaaaaggacaataaataagttaattgaattttcggattgtcgtcagtggagctgaaatagggcaacatggtattaattagctactctggacatagaattgagcttggcaagcagagcaggccagagtggctggaaggggttggggagcggaactgctgcaaggtgagccgagacaggtgggctggggccagatcacatgtggctttgagggaacctgtcaggtcattagacttcattgttagtttctcagcttggtactgctgacacttagggctggagaattctttgttgcagggactattgtgtacatcttagatttcagtagtcccgcatccctcctttgggctacttgtgacaatcaaaaatgcctctagacattgctatgtgatccctgtgggtggggggaatggttaaagtgctctgacagagaactactgggtataatgggaagtcactgggggcttttaagcaggggaaggacaagaacagatttatgtctataaaaggtggctctgggttgggcatggtggctcacacctgtaatcctagcagtttgggaggctgagacgggtggatcgcttgaggccaggagtttgagaccagcctggctaacatggcaaaaccctgtctctactaaaaatacaaaaattagctgggcgtggtgatgcacgcctgtaatctctgctacttgggaggctgaggcacgagaattgcttgaacgcaggaagcgaaagttgcaatgagcccagatcgggccactgcactccagcctgggcagcagagtgagactctggaggaaaaaaaaaaaatggtggctgtggctgctctgcagggaatgtctataatgggggtaaaagtggaagtgggtgacgtggggagttagctgttgcattggtccagagagaaaggacggtggcttggactgggtggaagcattgggagcgatacatagtggttggattcatctccaaggtgttccctctatgggactttaaaacatcttaaccttcaaaatcatcaagcattgattgaggtccacaagatatccacccctggggtgacacattctaatgtatttttgctttacagatgaatgaaatcgaagtatgtccagaatgttatctagctgcttgccaaaaacgagataactggttttgtgagccttgtgtaagttggatttactttgcttatttcatttactgaaccctgtgccttggatgactaccctgagacagctttttccaggtggcttattagatgaaactttggatggagttttaagataattttttgctgataaaattatggcagaaggaaag

SEQ ID NO: 27900 - DNA, 1033 bp, Homo sapiens
cagcctgttggattctcatacatgccattttctaggaaacccactctcaacaggaaccactttctgctttgtgttaggatagattaattttgcttcttgtagaatttcatataaatggagtcagagttagtgctcttgtgtgtctggctgctctcatgcagtgtaatattttgaggagtcatctgtgttatgtgttattagtggttcctttttttttgttgctgatttttttttttcattcgatcaatatgccgccattcatccatttaccttgttgatgctcatggatatttgggttgttcttagctttgggctgttaggaataagctgctgtgaacctgcttgtgcaagtctttgcatggacataggtttttctttctcttgggtaaatacctaggagtggtgttgccagctcagtgagtaggattttatttaacttactacgtttcaccaaacagtttttgcaaagtggttctatcattttacattctaccagcagggtatattagagttctcttttgctccacacactataagggttgatattgtctgccttttaaattttacctgttcttgaaggtgtaaagtattatgtcacgatgttttaatttgccttttcctaatgatcagtggtattgcgtatcttttcctgtgcttattagtgacttgtatgtcattttttgtaaacatctattcagatattttgttcattgcaaaaataggattatttatttatttatttatttagagacagagtctcactgaatcgcacaggctggactgcagtggtgtgatctcagctcactgaaacctctgcctcctgggttgaagcgattctcgttcctcagcctcccgagtagctgggattacaggcgtgtgccaccacacctggctaatttttgtatttctagtagagatggggtttcgccatattggccaggctggtctcgaactcctgacctcaagtgatttgcccaccttggcctcccaaagtgttgggattacaggcattagagaccacgccagcctgttt

SEQ ID NO: 27901 - DNA, 1022 bp, Homo sapiens
gcagactgttgctttgttgcccaggctggagcgcagtcatagcttactgcagcatcaacctcctgggctcaggcgatcctcccacctcagcctctcaagtagctggaactatagatgcacacaccgccacacccagctaacttttttattattattattttttgtaatgacagggtctcgctatgttgcccaggctggtcttgaacttctggccttaaatgatcctcctgcctcagccttccaaagtgctgggatcacaggcatgagtcacggcgcctggcccctacagatgaagagaaacttgcggacatgatgccccctacctgatttgcacaaaggcaccataggggctagtggtgaccctttgtacaactcctgagagtactgtacagaaatgtagattcttggggctaatcactgtggttttatatctttaaaaaaaaaagaagcttttgctttgagattatattctgaaattttgaagagatgataaaaaaaatttagagcatgctgattggatatccttcaattgagaacctttaacaaattggactcttttaaacaaaatctcaatcagtggaagcaaaaggtgtagccttagtttggtttgcacaatttttttgttttttttttgctatggtataatttttatgttgagtgtggcaaggaattaccttcgattttcataggctaaattatatgtgctaatgactattaacaaaaagaatgagtcatgtagatttgtcagccccatagaattaaaaaccaagaagaaaaattgaagagggcgttaatttctcaagtaaatcgttgaacgtcaaatcagtcaggggagaaagtgctgattttgttaaagcatctttttaacttacagtgcgtattgtaattgtcaatcttaatgtaagaggacaggatctgtttcttgagtgtgtattgaaaaccaagaataaaattggatcacaattgggcttataattatcaataaccaggcagaattagaaggtagaccaatttggagctcc

SEQ ID NO: 27902 - DNA, 1052 bp, Homo sapiens
gccaggctggtcttgatcttgtgacctcaggtgatccgcctgcctcggcctcccaaggtgctggggtttataggtgtgagccaccgtgcctggctgaagtgtacatgtgtttaaatgagatgctgaaagatgaaaagaaggggtgcatgaacaagagtggggctggtgagaatccacaaggatgtaatttgtattgatctttttggaggagggtctcaaacacgaggcccagaggcggtgggagcacgggaacttcccggtgggtggggtgtgttctttccacacaattacagttcatagcctattaaacacgaataaatgatgttgttttccacaaaggagaatgtatgccttcatttccttgaagtatggccttcctggtctatcttctttggtttcctgcttttgcaatcaggcatgggcatggacaagtcgtatttctttggggtaagaacaatactggtccctgtgtgatgactgttggcaggttggcctcggtctcatcagcagggacgtagtggggaagagtggcgattgcacatgtttccatctaaaagtggggtagctgttactcagctgtatctggtgctataggggcctgcaggtcctaatctgtttttttttttttttttttttcacgtcggaggcttgccctgtcccccaggctggagtgcagtgacacaatctcggctcactgaaatctccgcctcctgggttcaagcagttctcctgcctcagcctcccgagtagctgggattaaaggcatgtgccaccacaccaggctaatttttgtactcttagtagagacggtattggccaggctggtcttgaactcttgaccttgtgatctgcccactttggcctcccaaagtgctgggattacaggcatgagccaccgtgcctggccctcctaatctgtttttttaagaaaagtgaaaaatctaggttattacatgaaatttcctgatttttgtatcttggcaacaagttaagattttacaaaaatgttacataggtcaaagaaatacttgtctgactgttgaagcagacag

SEQ ID NO: 27903 - DNA, 1181 bp, Homo sapiens
gactggtgattacgaaaagggctgtagagcaggcctctgcttctgaccctgccttcacagttactgggggaaacctggcattttcagtctgattgaaatgcagaaatcctgtcctgggctgattctggtctccagtctacacaggccggtgttttccatagctttgaacttgtggaattgatttaacatgctccttccagaaagcaagctgtgtttttggagtggggggcggtagtcggggaggaggtggaagagaagcaagaaaaggaggaagagtgattggttaaaaaaaatacagttacccattagttaccattgaataggtgcttactatttgccaggtattatactaagagctttacgtgaattaactcattgacttcttcgataactttacaaggtaccacttgtaaagtggtaaactctctgaggcacagagaggttaagttgcctttttacggtcacactgcaggggagagcacagccaggttctgcatgcattttgacgccagaaagctgattccccaccactgtggcatcctgcctctctgtcgtttgcaacctggcccatgagagcatatgccttgacctatgtgtcctggtttgcccgggacccagctaagcacatggttggttgccctactcctgtggcctgtcatgcctgtctcagcctgtggaccaagcttctcttttcgttcaggccccagcaggcttgctgtcgacatcattaaggaaattaaacacccacaaaaacacaagaagctcccggcctttcagctgcggccctttcccttgagggaggagacaattccctgtaatggtgtgtcatttcctagcccctggagaacggcatgtgctgtgactcaggcaccggatgtgggggcaggagtggggtggagggcgggtacctgatgtggcctgctggggaggcctagccttgatggaggctggaaaaggggaggtgagttggccctggagcccccagcctatttcagggactgatgccactgtttggaaattgggaggtgaatgtgctttctggggactgcctttgagagaacggtgtcatcagtgaatgacacgactttccaccttttcccagttcctgaaactgtttgttggaccttctctgtccctatacttccatctgcagtttaggggaaaaaaggcaaaatgagagt

SEQ ID NO: 27904 - DNA, 1062 bp, Homo sapiens
cttattttaaaagagaagctagagcttctctttaaaggcggtggctcacgtctgtaatcccagcactttgggaggctgaggtgggcggtcgggagttggagaccagcctggccaacatggtgaaaccccatctctactaaaaatacaaaattagccaggcgtggtggtgcatgcctgtaattccagctactagggaggctgactggtttcctggccactgattgctccttttccagatcactggttcaccgcatcagctgtaagtagtgctctcttcctaataaggctgacctggttttgcgcaccacctccttaatgaccctcccgtaactccccatccccagacttcaagtttgggtacagtcacttcaaaccaggttgctatttcttgacttgggaccagatacagtagcagttgataagagccgagggactgtgttgtaagacaaatatttatcttgaaaatctagacccgtcttatgcctggtgtgatgctgacactctgagaagctcgagggaactagatggagacaggaaggagcagactgaatatctcttgactcatttccatgggatgcagggaagatgaacttgaaaaataattttttgcttttcccagtcgaagctgagcctgtctgcacatagatcagtacctgtatctgatccctgcttctcatagcaggggcagacttggagaacccagagggagactgaggatctacggaggttttggaaaaagagatcctcagactcagacgtataagaaaaagggcccagaaccaagactgaagatttggttaaatggccatctcagtggcgggtctcctagaagggaatatgttttccctggagaaagtcatgcctcttttatttttattttttgaactgctaaataattctgaaacaatagctctcctcaagaataactgggaggccgggcatggtggctcacgcctggaatcccagctctttgggaggccgaggcgggtggatcacctgaggtcaggagttcgagaccagcctgggcaacgtggtgaaaccccatctctactaaaaaataca

SEQ ID NO: 27905 - DNA, 1030 bp, Homo sapiens
cttgaacagtatcattcttgctgagatttgctgggggtatggatgtgttttcagagacaggatgctagagaatgtacaattatagcaatttgctaaccagccccagaccttaattagcacaggatccttgttctcactgttgtatgtaaattaagactttcacaaagggattgtttatgaggacggctgtgagatagagaccttctgtcatttttcaaggaaactctttcagaaaatataaccacaaacacttttaaatcacagcgcgatgcagaagtgctgagaatttttctttcaaaaaatgagcatcagtatttttaaccgtattttggctcctctctatctctgacagcccaagaagtgccatccgtgtactgtgcagtggaaagaatttatttgtgagttagatgactaccagattgttcctctcctaacaaggtctaaaatatcccagaactctgaagatgtctgattatggttttgcaaatgagaaatcttctaccttctcttggccagcatcgtctctactgtgcatctgttcatggaatcctgtcggcagtgtctgtgcaatttagctttgtggttcactcatgcaaaccttgtgtttgccccatttttgaagcatgacccacgttatatgtttgtgtgactattattattctagaagactgtgatctaaaatcgaccgtttcaagcttagtttaaaaagaaccatctcttctttttcctctctaaatgcctgtagaataagcatatcagggctgaggccttttagagatctgggtactttttattgccttattaaagtcgtcattccttcattgttctctattgatagtggatcctttaccgatgacttgaggtgatcagtttggaaagaccaggtgtcatggctgtgggggggtgagggtgagtggaatgataataagcccccttcaacttcctgtgactcccctcacctatcctgggctttcctgggaacctagagatccagcgctttatagacttaaaaaaaaaatacctttattga

SEQ ID NO: 27906 - DNA, 1051 bp, Homo sapiens
ttctagaaaaaggctggccttcctccctggacaagggccgtttctctgggggcaggtgagggtgagccgttccagcccactccaagaaactcccttcccagggacctccgggcctcaggctttcctggagcaggtcaggctggctgccctggctggcccgtgccgggaaatctagccagggtgcaggagaagtgcgtgtgggggcccctttcccaagtttttcttgctgcaaaaggcctagcttagcctgtctttttctatgcacaggatggctcttgctcacccgagcctcacaaagataatcgctcaggaagtgtttcagccaatccggggcggctttacactccgatttgccggggcagccaatcggggatgagcttttattaggcggccagatcatcagccgaagtgccaaaccctttttctgtgagaactaggagcctgtcctccatgttttataagtattgacattacacagtgttaacaatgcatccacagaggtaagctcgactttttaaccatcttttttccccctccctctgagacatccgaattgtgggcgagcagtgtgatttctctgtggctggccgtgccacactcacccccagagcacttatgttaacttggaactgtttagagagaatttttttgctttcttgggtcacatggctcagtagccattagccatagcttgattttgcaaactggcaagggcctggcacacctttccttccaccagggcatggtgtttctggaagagtttgaagctagatcctggtatgccaaaaaagaagcttttttttttccttctttttttttttttctttccctcttccctctctcttcccctctctctctctctgagcagttccccccctcccacccctgcactattgtcttctcttttgccacatgccctgctgggggaagaaaatggaaggtaagcaaacaggctcctctccaaggagagctcatggcagacagcagagcaggcaagtttgcctctccaaagaggttctgggaaggctggataagttttgacaagagagga

SEQ ID NO: 27907 - DNA, 1030 bp, Homo sapiens
tggggaccactgaggcctgtcacgggcctccttggtcatagagcaaagaactaaaggggtgagggacggtggcccctgatctccagggaaaggacattccaggcagagaggatggtaaagaagaaggccctgaggctgcactgtgcctgggctgtcaaggaacagcgaggagccagtgtctgccccagaggttcaggggaagggttcaggaagggccaggatttgggctggctgtaaagggggggtcgccttcactcaggaagtggggacaggaagggcaggagggggacagggtgaggctgtcagctcacggcatgagctgagacacagaaactaagggggggcgagcacagagtgggggttcagctgaatctgggccgcagaggggagctgctgaggttgaggtgccagactgcagcttccatacctgcagatgtcagcctcccacaaactgctgcccacctaccgctccccaccccccacgcgaggctgaggcaccaccacctgagtgactgagtccccgatctcctgcctcccccaggaatccccacatcgtcctcaacattgacctggcccccaccatcctggacattgcaggcctggacatacctgcggatatggacgggaaatccatcctcaagctgctggacacggagcggccggtgaatcggtgaggacggagcagggcaggtgttgagggggccgggacattgacctgcgggaactcagagcaaaaccctgtgggtctagaacgtggggtctccaagggtcgggagctggggttctcaggtcccgccatgccaaccacttacctgctgtgggagagaagcatggtcccctctccgagattctgtcttcccatctggaatgtggccaaggtgaccagttggggaccttctctgagctaaaattacccaaagcttgaaatgatagcagcagtgatggtaggagatggtgctaactgcacggcgcttgtgtgtgaggccctattctaagtactgtgcagggaaatctaggaatttgatcctca

SEQ ID NO: 27908 - DNA, 1049 bp, Homo sapiens
catgatttcaccactgcactccagtctaggcaatggagcaagaccattgctccattttttgctccatgaccaaaaaaaaattaaagagtataggcaaacctcaacttcttagctgagcttttaaagcctccagttctggccatttacttttcctccaactcttctctcctcttgcccaatatgtaagtcagttccttattttcctggagacattactgcatccccatcccttttttgtgtgtgtgctgctccttatatcatttctgcattttaccctctgacattttatcctctttccaaggagccagttgccatctgccctctcttctatttttagagcacatggcaagcacattcctgcctcagaccccgttatctctgcctggaactctttcctggatcagtgattctcaatcctgagtacccattagaatcccctggggagttttttaaaagtctgatacctgggccaaaccgcaggccaatccaaccagaatctctgggggtgggcccaggtatcagtaagctctccaggggattctggcaaaatccagtgatacatatcttcctatgcccagctccttctcatcattcaggtctcaactcaaatgtcacctcctcagagaggacctccctgactgccccagctaaaatatgcccctcacctcagctcccagttactctttgttacatctctctgttttatgatatttccttcatctgtcataacttttaactaccttggttctttatttatacatgtgtctgctcctgccccagtgtaggcaccccagggacttagggatatacccaccctgcatgacagtgtccccagagccttgaaaaaacttcagacttaggagccaagactatgtagtgctgggtccaacatttactagctgtgtgccattgggcaatttacttagcttctctgtgccttaatttcctgttctggaaaataaggattatcatcatacgtactttctatagttatgtcagaattaagcgagcaaatacaggtaaacacagaacagtccttggcacatcgt

SEQ ID NO: 27909 - DNA, 1073 bp, Homo sapiens
ctcagcaacaccagagatcaggagcaagggtcccagtgagggcagctcccctagcagtgggaagtggggttgtgtggcctaacactggggagacctgtgtcatgaggagacattcatgtggaaacccgaggcaggagcactgcaggcagaagcacggcacgtgcaagagccctgtggcaggaacaggtttcccaggacgttggaggagggcagcaggacatgggaatgaaggggaggaggatggggaagagggcggcagagagcagacaggggagacctggtggtccccagcaggccatgcagcagggtctggatttgattgcatgcccgatggaaggtccccagaatgttctgagctggtcagctatgcgtgcatgttctcagaggcacaccccggctgtaggtgaagagggtggcccagggacaagagcggaagcagggagatcaggtggtgtttgcagcagtccaggtgggagatgctggtggtacggagcaggacggggcactgcagagcgagagaggtgggtggattccggtgctgcttggaaggtcggcagggtttgctttatggatcgtgagtgggtgggtgagggaagaggaatcggggatgactcctaggtttttggctgagccgttgggcagatggcagtgccatttacagagatgggaaggcgggggcaggaggaacagattgggagaggtggggaagggggggacattaggttgctttgcaaacatcacccaccaggcctgtggctgggcagcagctctgcgtagccccttctgaaaagtggggaaaacaccctggaagccctgccccattgaataaatatcccctcccagggatggtgattgtagcattttgagttagaggaatatttctgggtggagtttctcagagaggaaatgaccaatcattgcagagcctcgtcaattacacccaagccctgccctttcccacgtgtgctctgccacctctctgctatggttgacgatgaccatagcagaattttctcccaggaacttctgcaaccagaggcagcagaaagcaacggagaaaaaattaactgcat

SEQ ID NO: 27910 - DNA, 1210 bp, Homo sapiens
gccagggttctggtggagggcgagattccctcattgattgattcactggttcactcagtgtgtgtgtgttgggcacctgctgtgcaccaggcatgtttgtagaccctggggacacaggagagacgtgtctgcacccatgtccctgcctcacattttcacatcccctggcttctgtatggagcatagactgtgcacggtgagggctgagtgtgactggtggtcagtgagtttccagagctctggaacccaggggcagttcacacctcggccctgtcccctcctccctacctgccggcaccatggctgtccccttactctggcttctggcagggcctgtaccagtggatctaccacacccatgaggatgcccaggaagcacgagccagtcaggaggcctccactgaggaccccagtggcgagcaggcccaggaggaagaccaggctgattcaggtaatagacggggcatggcatgacaggagcttccagagggactgagactccggaggggctgggtcctctcctgttgtcccctcccctcccctcctcccagccagtccacctccatgccagcaggtttgttttttttttcctttttggagacaggttctggctctgtcacccaggctggagtgtagtgttgtgaccacagctcactgcagccccaacctccctggttcaagtgatccacctcagcctccggagtagccaggatcacaagcgtgtaccaccacacctggctaattttttaaattttagagttttttttttagagatgaggtctccctatgttgcccaggctggtctcttaactcctgggctgaagcaatcttcttgcctcggcctcgcagagtgctgggattacaggtgtgcaccactgcgcacggccgcgatgcccacgatgttatgtcagtttctgatggctgctatagcaaagtgccccaaacccagcagcttaaacaacacacagttactacttaaattttggaggtcagaagtccgagtcccactgggctgaaatcatggtgtccacagggctgtggtcctccttgggctctcggggagaatctgtttccttgcccgtttcagctccctggtccaagccactatcatttcttaccaggacggtggcagtagcctgctcatggctctccctgttctgacttcctctcctccaaggggctattcccccagatgagaagagaaccttcc

SEQ ID NO: 27911 - DNA, 1395 bp, Homo sapiens
acgaccccttctcaagctggctcactcagacacattgggacaaaccctggacagccatgccagagagaggcctttgaccggccccagagctaaaagcaccagagaaaatcaaatgcttcctactcagcgtgacccaacttttctagtgtgccacggccccaccacctcctgcagtacccacaccatcaccactgctttctcttccaacagtgatctgtattcttagtttcattattttcttttgattgatatgacactatataaaattttcatttgagaatttctcaattgtatctagttaaatagcacagtttggaaacttgtctgagactgactttatcaataatctaaccgacaaagatcatatccatgtgtatgtggttagacatttttatttcattgactaacccaggacagtttcagtgatgcaaattgtgtgccctctggttcagctgaaacagtcctggactttcaaaaaccttgaataagtctcccacagttgtataaattggacaatttaggaattttaaactttagatgatcatttggttccatttttatttcatttttatttttgttaatgcaaacaggacttaaatgaactttgatctctgttttaaagattattaaaaaacattgtgtatctatacatatggctcttgaggacttagctttcactacactacaggatatgatctccatgtagtccatataaacctgcagagtgattttccagagtgctcgatactgttaattacatctccattagggctgaaaagaatgacctacgtttctgtatacagctgtgttgcttttgatgttgtgttactgtacacagaagtgtgtgcactgaggctctgcgtgtggtccgtatggaaagcctggtagccctgcgagttaagtactgcttccattcattgtttacgctggaatttttctccccatggaatgtaagtaaaacttaagtgtttgtcatcaataaatggtaatactaaatttttttgttaatttattctcaaatgccactactgctaggttggtcccctcccaacttgcccctatcctttttttatttttaagaaaaaaactttgtaatgcttgtgattccatctgggcaaaagtctgaagatctgaaataactttatatcaaaccattgatcaataaacagctactaatgaagtgtttggtcctgttgagcagtaactaaaataagggaagatgtgagtaaggggatggaagctcgtcgtggggggaccagggccagcccctctgggaagcgttgctgcctcagaggcatgttgggtacctggatgtagggacttgtgccccgtccagacctgacattgctacccaaagaaatgaccccaaggagctgagaggagactgccggacac

SEQ ID NO: 27912 - DNA, 1050 bp, Homo sapiens
tttgcatgggtcctgaataacagcaggagcccagccagtgaggtcccgcatgcaaagtgtctttatcattccctgattccctgcgctgccatgcgtgccaaggggagggccagcgtggggtttgatggtgtcattgcgtttttccaggctgtggatgtggattcgtgtttaccgtgtatgtccctcccaggtaataaagaggatgagttcaggatgccttatctaagtcatcagcagctgcctgctggaattcttcccatggtgcccgaggtcgcccaggctgtaggagttagtcaaggacatcacaccaaagattttaccagggcagctccgaatcctgccaaggccacggtaactgccatgatagcccgagagttgttgtatgggggcacctcgcccacagccgagaccattttaaagaataacatctcttcaggccacgtaccccatggacctctcacgagaccctctgagcaactggactatctttccagagtccagggattccaggtaactgtctggcctgagctgtgatggctgtgcctcaggacagtcatcttttggcttctctcagaaaatgaactttgaactttgtacttttttcttaaatcaagttctgtccagggatgggctggggagcagtgatggaagggtaggaggtatagaagtattgtaagcatatgtggtaagagaaatatctttatcctttggtagtaagatttcaacatgcaagccaaccctaaaagcttctaaccactagcagtggttgtaaatttggatttcaaagaacagactcatcgtgctgacactttctgtctggtaggaaaggatatggcttctcccagtcttgggcttctgagcagacacctaggttcctggaaggttctgggctgacagggcaggtgttagtatggccacagtggggctgagttggaaaaaagagctggtgatcttgcttgtggggcctggagctgcagccctccagcccactcatacttgctgttccctacctagcctcagctctcttttcccccttaggttgaatacaaa

SEQ ID NO: 27913 - DNA, 1026 bp, Homo sapiens
tgtgtagatatttgtataaaatcctatttttcttaaactaaagctaccataccatatactcttttgtgggttttttttttttttttttttacttaatgtgtgcggggaatccctctttatcagtgcttaagagatttgtctcgttctcttttgtggccacatagcaaccagtatttagtaggcctagtcctggctggaggctcagagcagatactaaacttgagcatttgtactgcatttatttctggactttgctgggctagcttcctttttgccagttgcagtggaccacactaaactcaggacagcctgtgagccaggggcatgggagtaaaaaggtctccctatttcatgcctgactgtttgggactcaccagactcaagagcataaaccagtttgagaagtaagaagaaaggcgagaaagcatttgaaatgatccccgcttcctttcatttagtaggtcttgtccttggttccccttccctgtgtctgtgtgaagtgtgccagccagtgtgccttggagcttttaataagtgtctgtccgctttcactcagtctttccctctgaaacaggtggcccgggagagtggcccaccccacatgaagaactttgtgaccaaggtttcggttggggagtttgtgggggaaggtgaagggaaaagcaagaagatttcaaagaaaaatgccgccatagctgttcttgaggagctgaagaagttaccgcccctgcctgcagttgaacgagtaaagcctagaatcaaaaagaaaacaaaacccatagtcaaggtgagaacttttctgaacacagaaggtgttttcattacttatagatgggtggggggtttagaaggctggtcgctgtccccaaggtgaaaggggatgagaccaacgtgccacaccccaggcctgccagaccccttagaggtgctgcaagagccacctgttaggtaagataaggacattgtgtcagttcagtagaggtacccgcagacgggcacacacatctgtgcaggagggcgctcatc

SEQ ID NO: 27914 - DNA, 1372 bp, Homo sapiens
aggtgcccgccaccacgcccagctaattttttatatttttagtagagacggggtttcactatgttggccaggctgatctcgaactcctgacctcgtgatctgcccacctcggcctcccaaagtgctgggattacaggcgtgagccaccgcgcccggccagtggtttttaattttgaggaatttcttttttctttatggtggatatcttttgtgttcaactctttgccagccttacagtcttgaggctttctcctgttataaagtctttgtaattttagtttagatcacatttaagtgatcctaggtctaatttttgttgtggtatgagttagagatcatggtttgatttttttttcttccccccaccccgctccatgcagatacctagttagttgctctggtactatttttttaagagatttttaatttgttttggtgtgtttgccaaaaatcgagtgaccttatatgtgcaggtctttttcgtgctgttctgttgatctatttatccttacacaaaaccatatcctagttgttgtgactttataggaagttttaaaatctggtagtgtaagtcttctatttttctttttgagtgtcttggctaatatcggttagatttttaagtttttttgttttttttttgtttttttttttttgctttttgagacgaggttttgctctgttgcccaggctggggtgcagttgtgtgatcatagctccctgtagccttgatctcctgggcttaagtgatcctcctgttttagcctcccacatagctaggactacatacaggggcacactaccacacctggctaattttgtttttatttttgtagagtcaaggtcttgctgtattggccaggctggtcttgaacttctgagctcaagtgatcctcccaccctggcctcccagagcgttgggattacaggcatgagccaccctgcccagcctgattttctatctgtgttattgtaatcactttcttgataatgtccatgatacacaaaagttttaaagtttgattaagtgtgacttttttttttccctcttgttgattgtgcttttagtttcatatcttaaaaaccaattgccaaacccaaagtcatgaagactcgcctgtttttgcttctgagagttgtgcatgttagcgcctctgtgtaggtctttggtccatttggagattgtaatcactttaatatgcagctaactttctgttcatgtttaattttagattctttccccatctttgttgacttagttttatttctttaatatgtaaaacagtaaatgcttccagaagtcaaaactatcattcccgtctcatcccgtctgtctaccctaatccctcacacctgttgtaggtaactaatt

SEQ ID NO: 27915 - DNA, 1009 bp, Homo sapiens
gggcggatcacgaggtcaggagatcgagaccagcctggctaacatggtgagacccatctctactaaaaatacaaaaaattagccgggcatggtggcatgcacctgtaatcccagctactcgggaggctgaggcaggagaatcgcttgaacccgggaggcggaggttgcagtgagcggagatcacgccattgcactccagcctgggcaacagagcgagactctgtctcaaaaaaaaaaaaaaaaactagacaccctgcttctcagaataggggatagggaatttggaaacaaaacaaaaactagacacccaaacttacaaaaattgttcaacatagaaaacttcttggctcaggtgaggcccctattggtaaaaggcatgggctatgttagaaggtctttggtatttgggctgctcagaggcctttttcagttcccattcatgccagtctttgaatagctgagatattagaacaactgagctctagactggaaagttgttagtataatatactatctatgaaaagaacctgagctgttaaaataccagaaaataaactagagctcatgatttatttctggaatcaatcagacaatgaacagcaattttttattgcctgttaagccatagtagcagtgagaaactgaaacaagcaaaaacacttagtgttgtaagaatgtataaaagcatctcaaggtaagaaattctgtgttactactgacaactaccatttaagttgaggaacctctagataaatcagaccgcagaatttgagaattaaactcaaattctgtaatgtaaagttcacttctaaaaatgattatgatttggacttattagagataatgtgcttttttcatattctgcaatttaatatgccactatttatgtacccaatgccttttggtaaaattttccataaaattgtatttgggtcaccaagcatatgccaacgacatttacgaataaagtggtaggtataaagggaaagaaaacacaggtttgaaaatc

SEQ ID NO: 27916 - DNA, 1057 bp, Homo sapiens
ttggaaagtagggcagataaatggcaagacggaaaactggatagaaaagatgagacagaggactgggaggtctcacatccaactcctgttctgtattctccagaaaggcagcacagagtacagaagggaggaatcatcaccgagagaatacctccccccaagcacatttggcatggaagaaggccagaagctgccacacctcctctgggaggatgaagttgagagaatacctaatgtatgtcttaggaggaaatgtcttggtgaaaggcgtggtgttgaattagaatcattgcatataaaactgagcaaacagaaaaacaagatgcataactttccacatttctcagcgacgactagtacttaacagcagcatcgtaatacaaagactgaagattgtcctaaccacagctatgatatgtgaccgatgggagactggggaatggaaggggatcgtgtggcaggggtggcagaaggaaggggataagtgggaggtcggtaggtaagactgaaaacagaaacatcacgaccagccgtagaggctgacagaggtgaatactgcatataaatgctgagatacttggccaaaagaagggcaagtggttcctttagaaaacagaaatgagaggagggcaactgctgtttttaaaattacatttaattacagttgactgtaaactgagtgctgcatataaacctataaaatcaataggaataggaacactggttaaaatctgccatttggctgacatttttattgatgggttcacatttttagctgcatcaaagcggtagtccagagtcctgtctccttctaccaagatgatagctaagagaaagacttacttggtaggcatctgataattgcacggttgatcacacataccagtctgatcgacttttttcctttacctccctagattatcctcttgacttgaaccacagtgaaaccttcctgcaaactacaacatttcttcctgaagacttcacctactttgcaaaccatacctgccctgaaagactcccttccatgagtgagtacagctctggcctgtcttcc

SEQ ID NO: 27917 - DNA, 1098 bp, Homo sapiens
ttggggttgatcaactggtaagtataatgcagatattccaaaatcctaaaaaatcagaaatctgaaacacttctggtcctaagcatttcagataaggggatactcaacctgtactgaaaagaaaatagcatttcactgaaagtgtatttaatgaaaacccatcattcttcttcatttcaaagcagttgtctacctagcacagtcagagagggtattctgggcccagcactgctgagacagccaaatgactgacacctctggcccgaccacttctgcctggagcactgttggcttaatggtggtaacctggattatgcaccatcctctgctgaaataatgctgaggcacatacccacattcaggcatctgcattaggccaagcatagctcaaaagcccagggtgacatttaagtcatgctggttttctttaagtttaaaagcaacatggtgattagtgaatgaaaacagacttttggggatggggtctgtgaacctggaaataaacctgaagtggtgaccaggagaagcttcctgttgtcactgaaagccattggtttgtgagattgtgaatctgcagagtgagtaaagtcatgctggtgtgctttgtaatctattaatggagtgggtcatcttcacctctttctcggtggttttagatgtccagtctgtagtcttcgatgtggctaccctcccagtaggtagtcatcctttaatggactaactcttgaagaatgctaattctttatatttcacagatatttgtcccagtggcatctttctagtatatataaatttccatatttttttcaagcagagaggcaagtgtttggtcttttctcaaatgggaggggaaagtggtgattcttgctggggtccattggtcagcactttcgattccttctcaactggatttggtaacacaagggagaaggcaggtttttacctcctccaggtattagggtagcaataccaagcttagctatacattggaattcccaaggacgtttccaaagtactgatgtctgtgcctgactgctagcgattcttatttaattggcctgaggtatagcctgaatgttagaattttgtttgtttgtt

SEQ ID NO: 27918 - DNA, 1033 bp, Homo sapiens
cattcttttatttctttactttcttaataaacttgctttcactttacggaaaaaaaaaagtaccatttaaatcatttgaagtatacaatttagtggcgttaagtacattctcaatattacgcaaccattactactattcgtttccagaacttgatttcttcattccaaacagaaactctgcacctattaaaaattagtccccttctcaacctctattattagtccacctattattagtccccttctccgcaacttctaataatcaccattctactttccgtgtctgtgaatttacctattctgggtacctcagataaatggaatcatataatatttgtacttttgtgttctggcatagttcacttagcatgttttcaaggttcatctatgttacagcatgtttcactgctttttaagtttaaattttttaagttttaattttgctaaacatcctaggatgcacatcagtgcttttattattattattttttaaaacaacctctaatatcgagtcttatttctgacaggaattctttgctgcagaagggtctccatagctcagccttatgttccaaaacactcatggtctctgtgtccagaacactccaagagcttgttgaaatggctcttcagcccatgcagccctcttatttgtgctactagtaaaataatgataatgctattgaatagctggattgttgaccctctggctaatatgatttgatggattttattatatggcattttaatcaaaggataagcttgtctcatttgaaatagatagaaaacctgaaaaagggacagtttaaaggtagcaatcaagtcaaaatagttttcttcttctggaatgtgataaatgtatttagtgagaggtatcttggagagcgtgattttaccacttactcatttgacaaattgctgagcttaggggccaagtcctgtaatatttccctgttgcttcaaggcaggtatactgaaaaaaatcagttattaaatatttgccatatttcctaaataacctattcattctttg

SEQ ID NO: 27919 - DNA, 1036 bp, Homo sapiens
atctgtatttttctattctccttccttctcctccagctttcagtctagatgttttctgatggcatagcttttggatcaatcattctctttttttgctctgtcttacccaatattaaaatattacaccctgttttttttttttttttttgagatggagtttcactcttgttacccaggctgaagtggaatggcacgatctcggctcactgccacctctgcctcccggacttaagcaattctcctgcctcagcctcctgagtagctgggattacaggcacgcgccaccaagcctggcaattttgtaattttagtagagatggggtttctccacgttggtcaggctggtctcgaactcctgaccttaggtgatctgcctggcttggcctcccaaagtgttgggattacaggcgtgagccactgcacccggccttgacactcattttgtcctatcttttggcatgcctgttaatttttattgaaaagtgggcattgtatataaaaaaattgtagcgaccctagatgattttctaatatctagatggcttacaccatttgctaggcaaatagaatgggggctgattccatttatcttgtctgagctgaccacagcaagggcgtggttttggtcaggctccatctctttttggtttgcctctactctttggaagtaccctgcaggagttctggctaagaactggggcccttcccccatggtgtgtcctgaactttaatctttgtcccccacggtgtgtcctgaactttaatctttgtcttcttagtacatgggattggtgaagaaacctgctgtgctattcagaggctttctgcttggtttcagccttctgacctgtgcatctttgggattttgtaaaatgtcttcagggtaaaacactcagttcttttcacaggaatcctaggcccttgtctctatttttctttcttcaggcctgagacattaccatgagctctgctggtttctctgcctgtgaatagtggctctggtcatgttcccaggctgcttttctgtttcctcagc

SEQ ID NO: 27920 - DNA, 1043 bp, Homo sapiens
tcactgcaagctccgcctcccgggttcacgccattctcctgcctcagcctcccaagtagctgggactacaggcgcccgccactacgcccggctaattttttgtatttttagtagagacggggtttcaccgttttagccgggatggtctcgatctcctgacctcgtgatccgcccacctcggcctcccaaagtgctgggattacaggcgtgagccaccgcgcccggccgcaatgttgtgtttttacatgtcagtggatccagggtatgctagtgagcacaactgtatattatttttattaaaaagttgtaggatatttaaatatcagtaaagaggtaactttttccaccccctcccaagtagtcctaaaagtatggataattgacatttaaaccttcttcttaattctactgtgttgaacaatcataagcttgggaagatggagagacagggttattttttcctcacagagctgctcattatcccattttaagttctactttcaggaaccaagcctaaattgtattcctgatcaggatgtgtgtatttgctgattggtagacttggctggtgaaggtcataaaatagtgttttcctaaatactgtgttgtgtcttgcttatgtaattgaaaaaggaaaaaaatgttttattcctgttcagaaaaatgacagaattgccaacctaaggaagtcaaaccagatagaccaaaaatgatagtagactgactttaggattcatgatatagttattttgaatctgtatttttttttttttcctgagatggagtctcactcagttgcccaggctggagtgcagtggtgcgatcagggctcactgcaacccctgcttcctgggttcgtgtgatactgctgcctcagcctcctgagtagctgggattacaggcgagcaccatgacccctggctattttttttttttttagtagaaatgcggctttgccgtgttagccaggctggtctcgaactcctgacctcaggtgatccacctgccttgggctcctaaagtgctgggattacaggcttgag

SEQ ID NO: 27921 - DNA, 1050 bp, Homo sapiens
ccccaagcatagtcttttataagaccacagggcaccagttaggacaggaagagatcagaaggaaagacagcatgaaggttaagagcggaggacacagaggtcagacttggattccaatctctgccctgtatgaccttgggcaggttactaagcctttgcatttctcctctgtaaaatgggaatgtgagtcccaatctcatacagtgttaaggatggaagtagatacatgttctttaaaagcacttaccactgtacctggtgcttgaagagttttaaaaataagtaaataaaggcagctattacatgtaacttccaggaagaagggagttaggtggaacgcttaaggaatgtgtttgcctgacttggcatcactatgaggaaacctcagtttatggtgaaaaatgatcagaagatgctgctggggtaggggcagggagagtaaattctgctagaaaaattttggattatatggattttaggaaagggttgatggtttagctgtagggaaatgccttttaggattgtagcaataactagtgccattctctgttgacctgtcaacgcagaactagctgaatagagaaatttccagatagagcaggagatcgtctcctgattattttttaagcatattttacttgtggttaatgttgatgttttgaactatcaactagatctgggaagatagaacaggcagcatcagattgccttgtttacaaagtgtcatcacgaaaagtgttcctctaggaaggcataatatgtggcctgatggatttgatgagtagattgtaaaagggttgggattctggcagaacaagaagagataactaattagtggaattaactgagaaaagagttcattagcatgttggctattagactctaataaaaatgggtgtgaaaagatgggatttggacctagaggcagtcttagagccataatcctttttttctccttttgtgaaagtgacaggtacttctggtctgagtccataaatcagctatatctaaatggaaaactatatcccactgggatggtaatcacccttt

SEQ ID NO: 27922 - DNA, 1050 bp, Homo sapiens
aatcattgaatgtttgcagaacctttttgcttatcgttatggaatgtctacagagcaccctcatctgtacagacttaaggaatgttagctaaacccccttctatgtggaatcatggaatgttggctgagccttctatggcataaaatcatggaatgttaccaaatacatttcttactataaaatcttgaacatagttttctcctgatgctcagtggctcaggacctgtggtagctgctgtagtcagtagcctggtcagcctggtcagcggcctgcagcatttgcccatagcatttgcctgtggttacgatgatgagtttatgtctcaatcccagatctttcctcagtggagtaacaggaaagccaaggatggtgaaacttaagcggggaatggagtactagggctacctggtatctgtagatggctacatgaacatgcagcttgcaaatacagaagaatacatagatggagcattgtctggacatctgggtgaagttttaataaggtgtaataatgtcctttatatcagaggtgtggaagaagaggaagaagatggagaaatgattgggaggctgaggcgggtgaatcacttgaggtcaggagttcaagaccagcttggccaacaaggtgaaaccccatctctacaaaaatacaaaaattagccgggtgtggtggcacatgcctgtaattccagctactcaagaggctaaggcaggagaatcgcttgaacccaggaggcagagtttgcagtggagatcacactactgcactccagcctgggtgacagaggaagactctgtcttaaaaaaaaagaaagaaaaagaagatggggaaattagagaatagcatcttttgtgggggatttttaaaatatatatttctagacaataaagatttgtttttcaaaaaaataaaaataaatgaaatacaatattgaaacgttagctctatattccctacttacatgttggagagggcaggggatggtggctcacacctgtaattccagcactttggaaagctgagacaggcagatcgcctgaggtcagg

SEQ ID NO: 27923 - DNA, 1046 bp, Homo sapiens
gtacatacattgggccagggaaagctgtgggttcttcatcctcagtcagccctcccaagggaggagaggagaggttccaaaattatttcaggccagatatggtggcccactcctgtaatcctaacactgggaggccaaggcaggaggatcacttgagcccaggagtttgagaccagcctgagcaacatagtgagacccctgtcgctataaaaagttaaaaaattagccagtgtagccgggcgcggtggcttatgcctgtaatcacagcatgttgggaggccgaggcgggcagatcacgaggtcaggagatcgagaccatcttggctaacacggtgaaaccctgtctctactaacaatataaaagattagccgggtgtggtggcaggtgctgaggcaggagaatggcatgaacccgggaggcagagtttgcagtgagccgagattgcgccactgcactccagcctgggcgacagagcgagactgtctcaaaaaaaaaaaaaaaaaggttagtagtgcacgcctgtagtccctgctagtcaggaggctgaggtgggaggatcacttgaatctgagaggtcgaggctgcagtgagccatgatggtgccactgcatccagcctgggcgacagacggaaaccctgtctctaaaaaataaaatggccgggcgcggtggctcacacccgtaatcccagcactttgggaggctgaggctggtggatcacgaggtcaggagatcgagaccatcctggctaacacagtgaaaccccatctctactaaaaatacaaaaaattagccgggcgtggtggcgggcacctgtagtcccagctacgccggaggctgaggcaggagaatgacgtgaacccgggaggtggagcttgcagtgagccaagatcgtgccactgcactccagcctgggcgacagagtgagactccgtctcaaaaaataaataaataataaaatgctgctggaaaaccccagaacaaattcgtggttaaatctaaaggtggcctcttctgtgctgagttacccccaagaggaaaacaaa

SEQ ID NO: 27924 - DNA, 1046 bp, Homo sapiens; identical to SEQ ID NO: 27923

SEQ ID NO: 27925 - DNA, 1046 bp, Homo sapiens; identical to SEQ ID NO: 27923

SEQ ID NO: 27926 - DNA, 1038 bp, Homo sapiens
ggcctctttcagaccttcctgatttgtgagagttcccagtcttcataatgccagccaaccgttttttgaggacacatagtaaaccctcaagaaatgtctcttaactctcacaagaccccattgttaggtgcaattgcattccatttcacagatgaggagacagactcagaggagtcagatctcttgcccaaagtcacatagctggtaacccccaaaccagatctgactccagagcctgtgctcttaaccactgtgctgtggtgtctcccttttgtttacattttgagttttcatctgttaccattatagaagatactaatcaagtagtaacttgatgtaggagtcaagaaattgatttccatactgtgacacacacttcagacaagcagtaagggcctctgcctgaatgtagcaagacctgtcctgtgtctgcttgtgtttaaggatgatgacaacattcattcttttgattgtgtgcaggactctgcactagcactgtgagagcagaaagacatgtagggcgtggcccgggctggaacagggacaagtgacatgttcgttaagtgttaggacactaatgctcatttcagatggtcatcaacactcatggtgaatgattggctttgccatttaatgttgcttcttaagtcattttgtgaccctatagttttgtggagttttaaaaatatatacatttgatctgtttttactcatttctttatcctttttttcctgtgaaaaccagaattttctgcgtctgctaaataccggggaaaacccaatctagaaatcctgtttctccatggagataattttctttgctgtctctgaaggtccatcatatgctgacatcttcttcactgcatgtcttctcttcctaagaatgatttcggtttcttgaggatgagaactgtgcttccctccttacttcccagaatacctagaaatgactcagaatggggtactcagtagatttgttaatcaacttactgatttacaggttctaaaatactgagaattgaaccaatgtacaacatt

SEQ ID NO: 27927 - DNA, 1038 bp, Homo sapiens; identical to SEQ ID NO: 27926

SEQ ID NO: 27928 - DNA, 1038 bp, Homo sapiens; identical to SEQ ID NO: 27926

SEQ ID NO: 27929 - DNA, 1038 bp, Homo sapiens; identical to SEQ ID NO: 27926

SEQ ID NO: 27930 - DNA, 1038 bp, Homo sapiens; identical to SEQ ID NO: 27926

SEQ ID NO: 27931 - DNA, 1034 bp, Homo sapiens
atgttagactcccagataatggtgctgtgaatgtttctctcttgtattttcaaaaataaaccagattagaattttgtgacattgagcgttgttcattctgaaatactgttcctagctaatacctagtcattcattaattctttcaataagtatttgggtgcttactctagagggcaaaacaccctgacacattggagattcagcagtgaacaaaacagatgaagttttactctcatggagcttatgttcagatgggagacagacaagaaacaaccaataaagtgaaaatgaatatatttacaatgtcgagtggcaatgagtactatgaagaaaaataaggcaagataagggaatggacagttagacccttggttgaggacaagggaaccagtcagccattcacagctctgggacagagaattccagggtgagggactcacaaatacaaaggcgggatgtaaggatgcctcttcagaaacttagagaaggactggtgtagctggaggaggatgggggagcaaggcagagtggcacaaaatgatgttggcgaagcaggtggggctctctcggccaggtgacaagtttgggtggattgcgggtgcaacgggaggccaagagtaggcttctggtaggagagcgagggcacctagtttacctttaagaggatcgtcggccgagcacggtggctcacacctgtaatcccagcactttgggaagctgaggccagcggatcacctgaggtcgggagttcgagaccagcctgaccaacatggaaaaaccccgtctctactaaaaatacaaaattagtcaggcatggtagcgcatgtgggaggtaatatatccattactctgacctgtcttttaaaaacagagtggtagaccaggtatccttacgttagtgattctgggtcatgacaccccaagatcattggtgagagtacaatgaacatgcaaggatgcatacaaggttgcttttgtgtttgttttttagaaaatgaggtttgcagaccttttgtccttttttactcgattta

SEQ ID NO: 27932 - DNA, 1034 bp, Homo sapiens; identical to SEQ ID NO: 27931

SEQ ID NO: 27933 - DNA, 1034 bp, Homo sapiens; identical to SEQ ID NO: 27931

SEQ ID NO: 27934 - DNA, 1034 bp, Homo sapiens; identical to SEQ ID NO: 27931

SEQ ID NO: 27935 - DNA, 1034 bp, Homo sapiens; identical to SEQ ID NO: 27931

SEQ ID NO: 27936 - DNA, 1031 bp, Homo sapiens
gttttccaagattgacatgctgtggtagctgctgcttggtggccatgattttcccaaaagatgttttaaacgacttcagaatcctttttgtaccacaaatatattaatatgttgctgtgtttcagattactgcattaaatgttttactgtggcatggtgtaaagctctatcaaatattcatgctttttcaacctggttgccatattttctttgtaatatcctgcaactgctgtcttttcagtttatatttagctaagagaataaccggctgacttttgatactgacacaggtccaggaaaaagccttctggaaagaataattctgaaataataggaacaaatattttcttcaaaaagtcttggattactgtgatattttagcaccttgatgaagtttttttttttagcattttcataattcactttttaatagtcatagtctatttgattatacttatcattagctatagattttcctagtgtacttcctagctattatagagcctgtagttctcttggttttgcaagattataagagtccttttgtttgtttgttttttgtttttttgtttttttgttttttgttttttttgacgagtctctgttgcccaggctgggctgcagtggcatgatcgcagctcactgaaacctccacctcccgggttcaagtgattgtcatgcctcagcctcccaattagctgggattgcaggcatgtgccaccacaactggctaatttttgtatttttaatagagatggggtttcaccatgttggccaggctggtctcaaactcccacctcggcctctcaaagtactgagattacaggtgtgagccactgcgcctggcctgtaagagtccatttttatgtcttccatattgtcacttgatgctgtttctccagctgcctttttggtgtcagattcacacagaaatattgggaatcctaaaattttatgttgattcaattgattaaagtgctagaggaccaaaacatatgttagagtattcttgggttttctcatctgttgtg

SEQ ID NO: 27937 - DNA, 1050 bp, Homo sapiens
ttggtggaagcctctgatattggatgagggagaacagatgaattgggagccccgaggatgtctctttgggagtggggattcaactgagggaagcccctgaaatgagggagtggaaaaggtcgggttccggagatgtttcctgtaaaggagaaaagtctcctctttttgaattgagtgagggaagcatatcctagaagtgtctcttctgtggagacgctcactctcatcgactcctttaataattgggacagatatgtgggttcagctcagaagttccccactggctgatgggagtagggaggtgaatagatgaaatgggaactcttgggtgaggctgcaccctcaggtgcctggcagtgaagttggccaaggaggttctctcagatggggtgaaaatgggttacctctctgatggaggaagcaaacagggccacagtgttccccactgtggggctgcagggacaccagcctgagtacagcaatcattggcatatttaaggccacagcagcggcagtgttgggaaggaattggtgatccatgggaaatagggtgaggggaattctttataaatgttgctactctgcggtctcaaggagccatacttgcctgatggttggggtgggaataaaagaaattgaatgtgggggatctgactgaagtgacccaccacaagctgctgccttttgagtttaaaacagtggggtcttcttgcagaatagcggagaccatgaatccttttactcgattttggtttcagctggaacagtgctgagtcaattcatttaccatgacgctgccccaggcactcccagaagagagattctgagtcaggccagactgctgggtaaaacttctcaccagaataacactcctaccgggtcgtaataaacgaaggggcccagtgtgctggtggtagccagcaataaggtgctgttgcagctcagccctgcttgcagtcactcggttggctacctacaatctgggttaacagctgcccggttctaacttctccagaccctgacagttaaaaagtgagtgcttcataaatg

SEQ ID NO: 27938 - DNA, 1027 bp, Homo sapiens
ccacctgagttgctctatctgcaagcctgactctgccagcctcccctggtagagaggaggtttacccactccctgcacgcctgccgtccctgccccgctgggcagcccttcagtgtggctggcgttggggccagtgagttgcctctttccctccttgtctggccccagtggtctggggagcccccaggcacacctaagcgtcgtggagcattgttctgccacagccctgcatactgaccccgggaggctgggcaggtggacagccccagccaccaccttcagcctagcctgtcccccaaggatggtgaagctcagcaggggtctgagggtagccggccagaagaggctggaacctcctgctcaagtctagacccctacttctctgctgcccccaccctgccagagctgatgtttccaataccaagatgtcttcacagggcacagcccctgcagagcatcttggtcatttggaagaggacacggtatcccctctggccagagtatgtcagagaaggaagagtagggcttttttgttttgtttttttttaaaggtgcttgcttgtttaatgtaaataatagaaagccttaatatcttttctgtaacacggagtaatattttaatgtcatgttttggatgtacataatatatttataacaaagcagcaagagtctacttaaccttggctgcctcgtggtgtttcctggctgggtggggtggggggtatcaaggagcctgggacgtgaggccccactctcgccccattcccagctccccccaaccctggcctcaggatgagagctgtcacctgagacagtgaattaatgttgacatctgctccaaagccttttggaggggattgggtgaggacagtggtctttcctgttgatcatgatgataaagtaatgatggctgatccctatttgtgacttccttcagcaaatattcactggcacctggtgtgtgccaggctctgtcctgtacacaggtacagcggtgaaagaaccaacaaagacctatcctggtgga

SEQ ID NO: 27939 - DNA, 1058 bp, Homo sapiens
cctgaggaccaaaaacacttgtaaacaggtattctgggaatgctgttgatgtctgccttcacactacagctgcagagttgaggagctgcagtggagactgccttggcctgcaaagcccaaaatatttactgtccatttatgtatttatttatttctgagatggagtctccatctgttgcccaggctggagtgcagtggcacgagctctgctcactgtagcctctgcctcccaggttcaagcgattctcctgcctcagcctcctgagtagctgggactacaggtccgcaccaccacacccagctgatttttttgtgtttttagtaaagacggggtttcaccatgttggccagactggtatcaaactcctgacctccagtggtccgcctgcctcagcctcccaaagtgctgggattacaggtgtgagccaccgtgcccggcctgcctgaccctttaaagaaagtttgccaacctcttatattctgtgtaggtatagaatctctatcttaacctgggggttggtcagacaggtgtgtctacgcataaaaaggctgtgagctgtgtaaggcctatggcctttactgtttgtaggttatattcaattataacataaaatgagccaaggtttagagaggggaaggggcttgtccccatctcatcaggagcccagaactcggggaacaaggaacctggactctgaatcccttgcgaggccccacccttatgacatccagccacttctcctctgtagctatttctttcatgaaggcagcattcattcattcatttatttttgagacagagttttgctcttgttgcctagcctggagtgcaatggcgaaatctcggctcaccgcaacctccgcctcccaggttcaagccattctcctgcctcagcctcctgagtagctgggattacaggtgcccaccaccatccctggctaattttttgtgttttttgtagagacaaggtttcaccatgttggccaggctagtcttaaactcctgacctcaggtgatctgcccaccttggcatcccaaagtgctgggaggagtgcaa

SEQ ID NO: 27940 - DNA, 1058 bp, Homo sapiens; identical to SEQ ID NO: 27939

SEQ ID NO: 27941 - DNA, 1058 bp, Homo sapiens; identical to SEQ ID NO: 27939

SEQ ID NO: 27942 - DNA, 1058 bp, Homo sapiens; identical to SEQ ID NO: 27939

SEQ ID NO: 27943 - DNA, 1058 bp, Homo sapiens; identical to SEQ ID NO: 27939

SEQ ID NO: 27944 - DNA, 1046 bp, Homo sapiens
tgtagtccccaggactgaggcggaggtgggaggatcgcatgagcccaagaggttgaggctgcagtgagccgattgtgccactgcactccagcctgagcaacaaagtgagactttgtctcaaaattttttttttagtaaaacttgtgtagcctaagtgttcataaagtctacagtagtgtacagtaatgtcccaggctttcatattgactcacccagagtaacttctagtcctgtaagctttgttcatggtatcatttatcttttacattgtatttttactgtaccttttctgtgctcagctatgtttaaacatacaaatatttaccattgtgttaatcattgcctatggtaatcagtacagaaacatgctgtacaggtttgtagcctaagagcaataagctatgccatgtagcctaggcgtgtagtaggttctaccatctaggtctgtgtgaatacacacttgaggatttcacaccatgatacatttttcagaatgcatccctgtggtttagcaacacatgactgtatagtaaacctgaagtctttagtaacttccttcatttaggttattcttgttatttctagctgcaaaatgtttatcttcaagtcatttgtctttggtttagctaaaatgtgactttttttccctaaacattgagaaagaacttagcatttttttaatttacactgacaaaaatatttggtttaagatagctttttttttgagtttctattttataaagttactatacaaaaggggaaaacatactaaaatcagtgcttttttttgagacagtttcgctcttgtcgcccaggctggagtgcaatggccgatctcggctcgttgcaacctccacctcccagcttcaggcgattctcctgcctcaccctcctgaagtagctgggattacaggcgcccaccaccacgctcagcttatttttttgtatttttagttgagatggggtttcaccatgttggccaggctgctcttgaactcctgaccttgggtgatccacccacctcagcctcccaaagtgctgggatt

SEQ ID NO: 27945 - DNA, 1054 bp, Homo sapiens
gagaatcgcttgaacctgggaggtggaggttgcagtgagctgagatcgtgccatcgcactccagcctgggggacaaaagcaagacttcatctcaaaaaaaaaaaaaaaacctcattaccaaaatccttgcatacttaagtcccacagttggccctggagaacctgcatataccaaaagctagccctctgtataagagggtttgagcatcccaagaatactgtatctttgatctacatttgtttggaaaaaatccacatataagcagttcaaacctatgttgttgaagagtcaactgtatagtaaatactaggtgacagaaatttttcagccccgttataatcttgggggaacatagtcccatatgcagtctgtactagacagaaaacatcagcacatgacttcctgataatgacagttaaaaaccgtattgccagtttatgtatttactatatatactttttattttagagtgtactcctactttttaaaacagcttttcatggtaactggtagcagcctcatacagcttgtgttcactgtgtctcttgattgcatcattcttgtgcatggtttaatctcatggtattttgttcatcatggcccctaagcatacaaaatccataatgttgccagtaaggggccatgttgagtgattgacctggaaacagaagtgattaaggactacgaaggtggagaatcagtgatggttatttcttgccagtcaggcttgtcccattttaccatagctatgatcttgaagaacaagaacaaagtgacagaagctgttaaagcatctgcttcattgaaggcaatgagactaacaaaaattcaagaagggcctttatcagacacacacaagcttctgatgacctggattgaagagcagacacaggtgcacacggtgctgtgtacctctcagcaccatgatgatcccaaagcaaaaagtgtgtttgaggtgttgaaagaaaaggctggacctggctgtgatgttgaattgactgctagttctgggtggtgtaaacaattcaagaatcgttattcattacataatgg

SEQ ID NO: 27946 - DNA, 1035 bp, Homo sapiens
catcatactgcttaactttctttgaatagctttctttctgcctttttgggtttgaaatttgagttttcttcctgatctgatctcctgccccctcccctcgaaaaaaatcttttttttgcacagaaccagaaatcatatttgcagtgctgtaagcaaacattgctattttagacaccattccagtactgtaactgacgagttagagtacagtactctaatgaaaagtgctttgatattagtgtgtggctgaattttttacttaattagaacttccagcaatttccttggaaacctgactgaccatcaggaaagtggttggttgatataaaatgtagactgcaacttccatatgcctttttatatttaagagccttatcactcctagtttaagtccttgttgacgttggttttcctgtgcctctccccatcttagttaagaggtgagatttacatgtaagattgggttagcgtttataccactatgtttttgtaaacttatttcactgttttctaggattttaaacaatttgaacctaatgacttttatttgaaaaacactacatgggaggatgtaggactgtgggacccatcacttacgaaaaaccaggtaagtggcacaggagacttcctcagatggcagcatgcttggtatactcccttttcagctctaggccttttatagcggtgcagtgattgcgggcaagtgccaaacatcgaaagtgtcaaaattgcatttcatattttcctgaccagtgggaagactaagaaaaactttttgtccttttttgtcattggactaaaacttgaggtgtaagaagaaacaaaattttgttacttaaaagttacgaagcctgctgtatcccaccatttcccctaaaagtgctctggctctatttttctgcatctgtgttgccattcttgttttttctgcacagaaaaagacaagacccttccttacatttaagcttttcttatttccctatgttgatggcacccaacttctatgggaggcctggggaagtgactctgtaggat

SEQ ID NO: 27947 - DNA, 1505 bp, Homo sapiens
aggtttttttgaaatacttttcattttcggccccaattagactttggtacttcatatagaatattttgagacttctaagttagagtaacgtacccagtttcaaaatttctaggggttactctttgattttggtagatttcactctttctccttttattttccatttttttatagttaacgttgattttggattagaataataaatgaggcagcattttattacatttggattagttgacttgccatttacagatgatattggtattacagagtaacagcctttgttaattagaaaactggatttgcatatattaaattttaattcctggtgctttgtcttttgtttttgctgttttgggttttagaactactttatatcctgcgaaattgtgttagatttggattattaaattgataaatttttaccatattatgggaagcatttctgatctcattagaaaccatacatattctcagctgcccaggttttactgattttattttctcattaaagacaaacttctgttttaaggaacttgggaaagttgatatgaatttctaatttaatgtattaggtcattaaaataatttttgagttcccttagacacatacaggcttttcatttttttcaaaagtaccctccttaaagtctgtaacagttaacatttttgagtacctttgcccaggtacgttgcaggcaggggtggagtgggggcatgcattggtcgagtcacatatcattactgtatttagtttggggagtatacagaaacttaaggtttttttgtttttgtttttgtttttgtttttgttttaaagaataccgtagcagtaggcaggacagttccaattcaacaaaaacctctttaccctggcactcaaaactgtaatgatgatgaactggtaagcatttttctgttttcagatgttcaacatcaaaatgagaaaagcactaacacttgatttaaaaataattgattgctagtatttctctaattttcatcttgaagttcattactgaactgttgttaagtcttatcagaattatgccagattagactcatagtcaaaatgtcctgttaaaaactgggaaaatcagagagtacttattttgcctgcctgctttaagtattcaaaatatagtagatatgtgctcggctcagtggctcacgcctataatcccagcactttggggtgccaaggcaggaggatggcttgagtccaggagtttgtgagcagccttggcaacatagtgagacctagtctctacaaaaaaattttaaaaattagttgggcatagtggcgcactcctggagtcccttcctcttgagaagctgaggtgagaggatcacttgagcccagaaggttgaggctatggtgaatcgtgagtgcactgcagtcaatgaaccatgagtgcactgcactccagcctgcgcgacagagtaagactctgtcttaagaaaaggaaggaaggatggatggatggatatatcaagccatatgc

SEQ ID NO: 27948 - DNA, 1031 bp, Homo sapiens
tttgtaggcaggtatagtttttatctttatttggtgttttatatgcagttatttaagttctgaaaatgaccatataatttgaagacaacttatttgacggaatgtttgaaatgaagtttgttgaggggcttttgtttgatttagcgaatgggatacagtgttgaatgatgtcctaagtggtaacagccattttcccttaaaggaaaacttgctgtgagctcttagaaagcatgtattctactgtttcaaaggtttcttggttttaacactcaaaaaataaggtgaggccaggtgaggtggcttacgcctgtaatcccaaaactttgggaggctgaggcaggagaatcacttgaggccaggagttcaagaccagcttgggcaacataatgagaccctgtctctaccaaaaaaaaaaaaaaagtgaaacaattgggcttgaagactggaatttatagtaggtaaactatatacttcattaaagtatagtaaaaggttcaattaactagagtgtggggaatgggtattctgtttaactgaactttaagtagaaattccttttttatcttggcctttgttgaaaaatttcctgagactagcttattaggagctatatattgaaactaacctctttgattttggtttttatagttcctgtatagaaaatataggagattgggctgaaaatctcttaatgacccttggcccttccaaccttggaagtcattgattttatacatgcccactgtgaatttgctttgctttgcttaagtttatctttttctccttataccagagtgcaggaagagttttaatactatttatattaaaataagaacttcacaaccttgaacagatggttttggtaccacttgcaagtaaccaaccagtaggcttttatcaggcaaaaatggcttattatttatatttgattattaaaagtataggtatataaggcatactatgtgaagttgttgctttccttgtaactacttacacgttttgaaagtattaaaaagttagtattttgaaaa

SEQ ID NO: 27949 - DNA, 1033 bp, Homo sapiens
ttcacccactgttaagtgtctaactgtgacctcaactggtgataggtgaatcccaccaggattgtttctatcctgtgatgcctcgttcctgttttaacctagcttcccaagctcatcctagagcaacttagtttatcctggggaatttataaaggaaatcatgagaaatcaaaactcatcataaacatttattggaaaatgactgtgaattatgaggttctttcttgtcatctaacatatatagttgcttcatgatcatctgtccaccctgttgttcaatatttggaacagtttctttcaactttaaattttagggaaatcttaaataatggatggttctgcatcaaatgattcattttaccgtatttcactaatttctgatagtatggtgggaaaataattctataaaaagataactgagaattcattttcacaattattctaagttatttagcaaatatttaatggcctttcttgcttaggacaaatgtatcataatcatcaagtgtgcgagcttttctgtttaccaatggccagtgaaagttttaggctttatacataccagtgaactctttgaaaggtcaggatacataggcatgtgtatttatccagaagttgatatatatttttaatttcttacagattataccgaaaagaagttctagagaaattaatagaaaaatgtgtttctaaaggctacgtcttccagatggagatgattgttcgggcaagacagttgaattatactattggcgaggtatgcaactgatgctaaatagtgtgtcatgttcctggtaaaggagcagtaaggtttagaatttttataataaaaagtttaactttcataactgctaaattgtggaggtcttctagttgtttagaatattcatgcacaaagggtaaaaattcatattagtacatttgaacagtaagatttaaaacattaacagtcagcattctcttttaaataattaaaagttcctggtactttctcaatcctagccctttcttctaactaatcagcattatggac

SEQ ID NO: 27950 - DNA, 1042 bp, Homo sapiens
catccttgtaaaatataaatgttaccagtaaaaccgaagttgcctttgatgaacattttatttatttatttatttattttttttttgagattggagtctcgctctgtcgcccaggctggagtgcaatggcaagatctcagctcactgcacactctgcctcctgggttcaagcagttctcctgccccagcctcccgagtagctgggattacagacctgcaccaccatgctggctaattttagtatttttagtagagactgggcttcaccgtgttggtcaggctcttcttgaactcctaacctcaggtgatctgcccacctcagccccgcaaagtgctgggattacaggcgtgagccaccacgcccgacctgatgaacattttctataggcatcccattcccttgcacaggggagacccaggtcaacagtttggtgcgtttttttgtgcatatatgtgtgtatgtgcatttgcagaactaggtagtgtggtggtcttgttttttaaaacataactgccatcttcctgtatcatcattacttctaattctgtcttggcgatcttttgtcaccagctcacctcatttctgttaatggctccataatactctaatattttatataaacctttgaagattctgaaaattataagtatcatagtctccttgtccatggttttgctttccgtgatttgttacctgcagtctgaaaagaggtaagtacagtacaagaagattttttgagttagaccaagttcacataacttttattacaatatattgttgtaattgttttattttattattgggtattgttaatctcttactgtgcttaatttataaattaaactgtgataggtgtgtatgtataagaaaaagtatatataaggtttggtactattggagatttcaggcatctcctgggggtcttagaaagtatcacttggggttaagggggtgtgcaactgtaacaaagttatgtttgtttgtttgtttgtttgtttgttttttgagacggagtctcactgtgtcactgaggctggagtg

SEQ ID NO: 27951 - DNA, 1048 bp, Homo sapiens
tttgccacttatatatacttaaaatattcccatgaattatgtccagttcttcttggaaaaaaatttggttttgaatgaacctgcaaagcatcctgcagcgtgagcagctcctccacctggagctccgaagcatcttctcaggccaaagcggcattacccgtgaatctgtcttctccgccacagcatggtttgaggcgcagtctgttaatatagctgggccatgtcagtgactgttgtgtttgtggggtcaggtggggggcatggtatttgcaaaaaaaacaaattatggctaatttattattttgttgcagtggggttaactgtaaactcatgtaagagtctgtgatttcctcattggttgatctctctctctgtaatcctcattgcaaattttcaccaggacagcgttttttgattagaggggagctctggcacagtatgctttaatttagcaggaacttccagatgatttaaattctcgatgctgtgatgacacacatatgatctttcgtgtttctgagcgactctactttcattgtttgccagcgtggctcgttgctgttgcccaataaagcttgtgtacgttctgccttgggggattattttaatttgtacagaaacatgaattctggtatcaaaatgaggactttttattataacgctcctattttttctttatttcatggtacatgaaatgtaaagaaaactctttccagttcagaaaattattttgattttggcaaaaaaaaccccaaatcaatgcatgttatttattattttgtactattgtccatcccagacgtgtcagaatttcaaaaggtgatagatataaatggaaaataagatgaaaaccataagcttcatattgtatttctatacacggtcctcgatgactggaatcttttttttttttttttatcgagggatggaacatataggaacagtcagttaagttttaggcagaaaaaatttttaaggcccggcgcagtggctcatgtctgtaatcccagctttgggagaccaaggcaggaggattgcttgagcccag

SEQ ID NO: 27952 - DNA, 1033 bp, Homo sapiens
ccaggaggggctgaagaagccatagttggaagtggaaggtactcgtcagtgttctccacaaacctttttactctgttgtctcagccgcactggggcggaggcggtcaagggtgagaagtaccgacactcaagtgcaaactgccacgtcgttggcccatcccatcagtgggcagctggctgacgccattcactggacggtccctgaacacctaggaatgcacacaccgtgcttctcagacactggagacgcaaaggcaggaggatgcagtccggtgagaggacacgatctttacctgcacaatcagactgtaagcccagcagagaaccccaggggcgcctgggtacttctcggaggtcatcttagttgtggtggggaagacaaagaaataagcaaacaagaaactagagttactatacaagaaactctcctgagtttgtaaaccttaagcataaggattcagttgacctttttcttggttcatcaatctggaaagaacttacataaagcgccattgacactgtcacctgggagctccatgggccgtaagtctttgacagccaatttaatttgaggtcagagggccttgaggtacacagtcagcactgtttgaacacttttcctgaaagcaaaactcacagctccctgcgccctctgacaacactagctatttctgccagagtaagaacttctattactattttattattgttcatatgtcttttgatgatggttgtgtgacagggggaagcaggatctatttggtttcttcccctccccccaccccttcctttttgtctctctttttttttctctaagaaaatcaccagactagtttttccatcttgagtaatttcttatgtgggacagttttgatcctcattttgaaagcatgcgtgtgcacatgtgtgttgcctgtggtgccaggtgagacaggtggcactaactccagctgcttggaaggcatcccaagggcgcatcttaaagttggagcagacctcccttttccagcccctggggccattagaccacgtg

SEQ ID NO: 27953 - DNA, 1050 bp, Homo sapiens
cagctgcctccccctctatgtcctcaagtacctgcgaagacggttctctccccccagctactcaaagctcacatcataggccgtgcgttcgctggagggggccctggtcttggcgcttccctgatggacagagctcaagttccatttatattaaccgccacctgtggattttgcagtaattgctaacacatgcagttttaatgggaagtggctctgcgcctaaacggagtcctaacgctgcatcaacgggagggagggtcctgaaagagacccatctgggcctgtctgaacccctcgttcttcatgtttaggtgaatatgaatatgttaaagctggtggctcagctgggagatttatatgggtcactgtgcgagcttccttatgacttgaattttgttgtcacatgataaaagtttctgtgtagctgaaggttgtagaaggcttgtgtgtgtgtgtgtgtgtgtgtgtgtgtgtgtgtgtgtttttaaagagtcctaatgtgtatgtactctttatgtctttcttgctcttacaaagaggtgtcagaaaaatagaaagctcttggtgtcggtttgggaggaaaagacagtgacatttggtaaaaagttatccacacaataatctccattcggaaatgctcagtatcgtctccagccagccctgcttatccaggttacactggattcctgggatcgtaaccagtaaatgagaggagagggagagagagtgtcctaagtccaatctgttatccttgatctgattcagcatccatagtgtgtgagttaacttcacctgccacctcgtaaaagaatttcagaggtgtgatcccgctttattgggacctggtaacaatcacaaagccagtggctgtttgagaaggacctcagacattttcagcagagttgttttagcaggaaacgtgccactgaatggcccctaaatgtgtcgacagtgtgataagagactcaactaattctttaggcaacatggcagatgtgactcagatcctccaagaccaaagcggaaaggtcagggggctgggactcttct

SEQ ID NO: 27954 - DNA, 1030 bp, Homo sapiens
aggcgttgtaagatgacctgttggaatataagaagaaaatagcaaaacttctgtttgtatttatttttcctaactcttttaaatttacatatatatatttatttatttatatatttttgagacacagggcaaagccaccatgcccagaatccttttttagtatttctatttttatgtatgttttgtagtgcacataatagattttatatacttataaaatatattttatataatatgtagaaacagagtgagaccctgggtggcggagggtctcactctgttgcccaggctggagttcagtggagcaatcacggctcgccgtagcctcgacctccccaggctcaggtgatccccctacctcagccttctgagtctgggaccacaggtgtacaccaccaccaaatcagtttccaaatcagttcatttcttcccaatggactgtgagccacgagtccctgcaggtccagcaagatgacctcatgctgtgctgtggatcctgtcgggtgctgacacaggctttaattcctgtctagaaacctgtttctagttcagcatcttagactacaggtgtacaccaccacacccggctaatttttgtattttttgtagagatgaggtctcaccatgttgtgcaggctgatctcaaactcctggactcaagcaattctcttgcctcagcctcacaaagtgttgggattacaggcatgagccactgtgcccggaatcctcactcttttttagtatttccatttttatgtatgttttgtagtacatataatatacatgtgaaatgatcctaatatttctatatatctggacaggtacacatatataacttacaaataaacatgtgtatttggggattattattattactattctgagatggagttttgctcttttgtccaggctggagtgcagtggcgccattttggctcactgcaacctccgccttatggtttcaagcgattctccggcctcagcctcccgaataactgggattacaggcgcccacctaattttagtattt

SEQ ID NO: 27955 - DNA, 1061 bp, Homo sapiens
gcacaggaaattttcttttcttttctttctttctttctttttttttttttttttgagacagagtttcactctgtcgcccaggctggagtgcagtggtgcgatctcggttcactgcaacctccacttcctgggttcaagagattctcctgcctcagcctcccaagtagctgggattataggtatgtgccaccatacctggataattttgtatatttagatatttagtagagatgggttttctccatgttggtcaggctggtctcgaactcctgacctcaagtggtccacctgcctcggcctcccaaagtgttgggattataggcgtaagccaccgcgcctggctgcacaggatattttctaaatcagccccttgtatggatgtagaaactgaggctaagtgaggcgtctccattccccaggttctcacattgggaagcagcagagccgggactggagctggggtcttggacccttcctgtagtaccttgccttcatcacagcatgggacattagccatgtcgtgcacctgatcgttcttttcatgcttttctggaacttgaacttcccaattccttccccagtgtttgttctcttacctcaaaccctgagaactatgactaaacgaagctcaccaaaaagaatattatttttaggacaggcgggatattgagggaaaacagacccagctaggggagagggcccgggaggctcagccctgagaggtgcccggtgccttccttctgcccgtctcactgcctgggtttccatcctacctctccctttacttcttctgtgacccttggcaaatgactgaagctcttagcgcttccatttccagcctccagaagctgtcatgaaggtaacagagagctcagcgtgggtgctgggcacgtagtggacactcaggagacaattgtcatgatcttctttcctatactttccctcctatccagattttctttgaccgatagccccaagactgctcccagctgggagcaaagagaacaaaagggttaatgaggtaaaatcacagagcaggaagcacattccatgaggactct

SEQ ID NO: 27956 - DNA, 1051 bp, Homo sapiens
ccgctttttctcaaagtgaatggtactttatctcttctgtggatgaattgcacttgaaatcagatttgtcttgtttttctaagattctgaatcatgattgagaaaaaaaaaaagaactactttcctttggcctttggtgtcttcagaggccagtgttacctttttgctgtggttgtttttttttttgagacggagtcttgctctgtcacccaggctggagtgcagtggcgtgatctcggctcactgcaagctctgcctcccgggttcacaacattcttctgcctcagtctccccagcagctgggactacaggcacacgctgccacgcccggctatttttttttgtatttttagtagagatggggtttcaccgtgttagccaggttggtctcgatctcctgacctcgtgatccgcccgccttggcctcccaaagtgttgggattacaggcgtgagccactgcgactggccttgctgtggttttttttttacaacttttattattttgtattgcacagttattttatgtctatagtagaacacatgaatgcattgatcagaaaagtaaaaagtagcccataatcttactaaaggtatagtcattgttaatgtcttcctgatcagccttctaaaaactacttcagaggccgcctactgccaaatacaaataggtttatataaatgcctcatgaggctcagaggaggctaaatctagttaaggtgaaatctttcagaaagccgtactgtttccaagtccctgtaggattctgcatagacttggctggctctagaatcgtgcctttgaaattcaatatcaataaaacattgctagcctaggcaaggtcagtttatggaacatgtgtagaaaccagtatgcattttacttgggagctgctggagtaatttctaccagttggcgtaggattcatttcctgtaacagaaagcaggatttcctaaatttgtttcctgtgcacattccagttggggaaccttgaagtgtctttattcagctatcgattacagcctgggggcgctgggccctccctgccacc

SEQ ID NO: 27957 - DNA, 1043 bp, Homo sapiens
ttgagacagggtctcattctgttgcccaggctggagtgcaggggtgcaatcatggctcactgcagcctcgaactcctgggctcaagcagtcctcctgcctcagcctcccaaacagctgggactacaagtgcatgccaccaggcccagctaatttttaaatacttttttagagatgggggtctcactcttgcccaggctggtctcaaactctcagactcaagtgatccttctgcttcagccaaaacgctgggatcataggtgtaaaccaccttgccttttccttctttgttgctctctagtacagtagtagacactcgattaggatcctgtgtggcaaggagagggaatgaagcagcacaaactatccctggagtaccgtgtgtcaccatccacacatgcactacttaatacaaataggcagaggtgcactctcccttgaggttttttctgctacattttatttccactgcctgcctttattttcatcatactttggtacgtctctcagtccccctgatgactaaagagcgagaaattctgcacggtcatgcctgggccacgcctgggcacagccacccaggggacgcagcatgcagacgttcacatcctgcccctccttgccactttccacccatgtcacctgaaccaattttttcttgctttcaagtcatttattaacaaataataattaattactctttttattctttgataatttgactgaaaaataattatctcattcagtttgaatttcctagattacctggcaggtggtcatatttgcatctgtctcttttgtttctttgtaagttactagttggcttaaaaaaaaaaaaaaagagtccctctgtggcccaggctggagtgcagtggtaccatcttggctcgctgcaacctccgcctcccaggttcacgtgattctcctgcctcagcctctccagtagctgggattacaggcatgtgcaaccacccctggctaatttttgtatttttagtaaagatgggatttcaccatgttggccaggctggtctcgaactcctga

SEQ ID NO: 27958 - DNA, 1140 bp, Homo sapiens
ctccttgcttcctcccttagaggtggagcaagagccctgttggctgatggacagttgggtacagtaggtgtgtttgcatgaaggattggcctgctggggttactcagaaactgctctgcaaacacagaggattaaaggggtttttgttgaggcagaacagatggacagagagaggcagagttcaaatgaatggatcataaatcagcactcacttgcagaagggaaaaatctgggtctggtcacttaaaaatttgagctaattttaattattatttttttcttcttaggaaagcaaccttacgcttaatggaaaaacaattcatgtgaaaaatttggaaaatatatgtgccagagaaagccctgctgatccttttagtgaaatctccctgattttgtcctctgtcctgctaatgtacacacatatacataggcaattattatttaataagaatgaaaacacatgctcttctatgagttagattttaagagggaacctgtaactagagcttgaagatctgaacccgggtgtgatcatttgggccaggtcagcagcataaattttagtaataaaaccaaagacaatgtgtaaatttatgtttgggaaagttggggcaagctcaggtgaaggaaaagttcattggcgctgagggccacgttgaatttacggtcttccttcaagtaataccttcctgagctcccagaaaaacgacaggtctgtgttcatttttccttttgccccctagtggagcaagaagagtggttcaggccatgaaatcgttctgccaattagaccgtctctttacccatttctctctttctttcgctccctctctgttttctattttttgagacggagtttcgctcttgttgcccaggttggagtgcagtggtgcgaactgggctcactgcaacctccgcctcccgggttcaagcgattctcctgcttcagcctcccgagtagctgggattacaggcgtgtgccaccacatctggctaatttggtatttttagtagagatggagtttctccatgttggtcaggctggtctcaaactcctgacctcaggtgatccgcccgcctcggcctcccaaagtgttgggattgcaggtgtgagccaccatgcccggcgctctctctttc

SEQ ID NO: 27959 - DNA, 1051 bp, Homo sapiens
tcataccaatccttctgtcctcatgtttgcagatggagatctctactctgaagccttttaggggcgtgggcacttttgagagcctgagctggaactgaagctggagctgcagtctgggccttggtttgattcttggcctttggccagcacagcctaagacccttagcagtgcgggcatgagcatgcgtcccaagtttggagtgggcaatgtaggcaagtcgatgaattttgctgccgacaccctttgagatcttgggcttaacctctttggactttacaagggtcttgatagcctcggcgtgtgcactcagggccttggtggtgttggcctgcatcttcttcatgcacttcttcttgtacttcttggcaaagtgcatgttcctcaggaacttggggttcacccacttaagaaagtcatatctttgtgactgggatttcttcctttctttctttctttcttttttaaatttcttcttaaaaaaaccaaaatgggatacacgtggactgggatttcttgatgccatttctgttccattttcgggcctggttgtgtgtggttgtatgtggacttggacatgtctgcaccgaacccacagctcccgaagtgcctggaaccggaagaggaccttatgctttagagggggttaggaatttcatttatggcttatccctgtttatttaaccagtcttcctttgatgaacggtgttatggtctgaatgtatcccttctccctaaatctgatagttgtatgaagttgggcactgaggaggtgattgggtcatgaaggcagaatcctcatgaattcccttataaaagaggcaggaggggctgagtggggtggctcacacctgtaatcccaacactttggaagatgaggtgggcagatcacttgagcccaggaatttgagaccagcctgggctgcatggtgaaaccccatctctacaaaaaaaaaattacaaaaattagccaggtgtgattgtgcttgcctatagtcccagctacttgggaggctgagaggtgggaggattggttgagcttggaaggttgag

SEQ ID NO: 27960 - DNA, 1044 bp, Homo sapiens
tctgtcaataacttttgttatgttgcacgagtgacattatttctcagagtctctgtttttcacatctttattttttcattatttatttatttattttttgagatggagtttcgcttttgttgcccaggctggagtacaatggcacaatctcagttcactgcaacctccgcctcctgggttcaagtgattctcctgcctcagcctcctgagtagctgggattaggcatgcgccaccacgctgggctaagtttatagttttagtagagatggagtttcaccatattggtcaggctggtttcgaactctcagcctcccaaagtgctgggatcacaggtgtgagccatcacgcccagcctttaatggagctgatatttaataggattgaatgattacagtatgggcatctgctggtacaaaatctgaattataggaagataatggggctcatcttttcaccattgggtccccaacccctgctttgcacgcagtaggaggttagtattgtggaacgagaggcattacattgttttattgtaaggcattgttctcagcagtcctggttgaatcagtaaatccaggcatctacctaatcatctaatcacgaggttgtcatctcgcgattacgcgtgcccagtaggctttcttaggggtgtgccgacttgcctatcaataactacctgttattgataggcaaggctaggttggccctgcctagctttcttaactctggcaggccagacctgcccatggctgttgtctcttcccctgacccacccccagcctacacataccttgcaagacttcatattgtgacccagtctgaaataagtaaagattaaatcagtttgttaaggccatgcttcaagatcagcccctcctggaaacccgtgggtggactgtgctgtcaaaagtccgtggctttggctgggcacggtggctcatgcctgtaatccgagcactttgggaggctgaggcagacggatcacttgcacccaggagtttgagaccagcctggccaacatggtgaaaccccatctctactaa

SEQ ID NO: 27961 - DNA, 1034 bp, Homo sapiens
aaaatgtgaaagccccctttgaatttcccacttactattcaccaccacattcaccttgaaatccaaacttctcaaaattaaccaccgtgagcagtttagtccagacttttctatgcatttatatttctattcatatacacatatctatgtatgtctaggataatagatatattagatacatagataatatatttatctacatatataacacacacaagtgtttgtgtgtgtgtagaaatataaatatagactgggtgtggtggctcacgcctataatcccagccctttgggaggctgaggtggaaggattgcttgagtccaggagtttgagaccagcctgggccatatagtgagaccttgtatctagaaaaaataaaaaataaataaaaataaaaataaaaaggaagaaaagaaagaaaaaaattagctgggtatgatagcatgcacctacagtcccagctgcttgggaggctgagacgggaggattgcgtgagcccaggaggctgtggtggactgtgatctccagcctgggtgacagagtgagaacctgtcttaaaaagaaaagaaaagaaaaagaactgttaacagcagtgcttgtcagacttcaatgtgctgaagaatcagctgttgattttgttaaaatgattcagtgggtcttgggtaggatctgagattccccatttcttttttttttttttttttttgagatggagtctcgctgtcgcccaggctggagtgcaggggcacgatctcggctcaccgcaagctccgcctcccgggttcacgccattctcctgcctcagcctcccgagtagctgggactgcaggcacccgccaccacgcccggctaattttttgtatttttagtagagacggggtttcaccgtgttagccaggacggtcttgatctcctgacctcatgatccacgcgcctcggcctctcaaagtgctgggatttacaggcgtgagccactgcgcccgggcgagattccccatttttagcaagctccactgtgatgccaatgctgctgaat

SEQ ID NO: 27962 - DNA, 1083 bp, Homo sapiens
aatgaaaggaaggaaaaatcctggctcctccgtggggcgcggtggctcacacctgcaatcccagcactttgggaggccaaggcgggccaatcacttgaggtcaggagttcaagaccagcctggccaacatggtgaaaccctatctccactaaaaatacaaaaattagcctggcgtggtggtaggcacctgtaattccagctactagggaggccgaggcacgagaatcgcttgaacccaagaggcggaggttgcagtgagccgagatcgtgccactgcactctagcctgggagacagaaccagactctgtctcaaaaaaattaaaaaaaataaaaatcttggctcccaaattaactactaaatcaccaccctggagacatcctaacgccaaactccttgagagacggttaatcaatgaccttattgttcaagccctgctgagttgggtttgtgttatttgcagctaaaatatcctaacattccagcttccccaagatattgaaacattcagaatgttctcttctcctctgtagagctgaactgaccataccctctctttgaagtcaccgagtgtggagtagggtgaaagggaatttaattaaactcaataggttaaataaaattataaaaatacaggctacccatcctgagcaacatgatgaaaccctgtctctacaaaaaatacaaataaaaagctactcctcatggagggggtactgaggtgggaggatctcttgagcccgagaggtcgatgttgcagtgagctgagatcgcaccaccacaccccagccttggcaacagaatgagactctgtcttaaaaaaaatacaggctaccagtggtcacctacaccccaaatatgtgataccctcacatggatgcacagagaaagctgttggtctccttatgacaaatgatatttcctgcattctaatgtaatattgtattttttaaatcattactttaaagattaattatttagaaaataggttagaaaccaccccaaatgccttggagctatttttgcagagacaggaaattactctatagattacagaaagttaacactaaaagaaaacttccag

SEQ ID NO: 27963 - DNA, 1074 bp, Homo sapiens
gacaattaggccaggcgcagtggctcacgcctgtaatcccagcatctgggaggccaagatgggtggatcacctgaggtcaggggttcgagaccagcttggccaatatgacgaaaccctgtctctactaaaaatacaaaaattagccagcatggtggcacatgcctgtagtctcagctactaaggaggctgaggcaggagaatcacttgaacccaagaggtggaggttgcactgagccgagatcgcatcactgcgttccagcctggccaacaagagcgaaactccgcctcaaaaaaaaaaaaaaaaaaaaaaagagagagagacaaggaggcttttaaaagctgcaggtgctgctaacagactttaaattcataagcaaacaataaaggagacagtgttggccattaataagtacactgaagaaaccataatcgtgactcaggggaagggaaccactttcacctaggaagttagggaaggcttcctggaggagggagtatttgaactgagactgaatgacaaagaaccagccacgtgaacatcttgagaagagcatttccaacagtgaggccaaccaggacagatggcctgagaaggaaacaaggcagggttggagctccataaaatagaccaaggtggtcagagtcagacagcagaaagtcttctttgtacaaagagagagggagggaagtcatcagagggttgttcttgtttcgatttgtggttgaggatttgcatttttaaataaaacaaaagtatatgaggcagatattaagttacttttacaattttctagccaggcactttggctcatgcctgtaatcccagcactttggggggctgaggcagacagaacacttgagcccagggttcgagaccagcctggccaacatggtgaaaccccatctctactaaaaatacaaaaattagccaggcatgagggcacacacctgtagtcacagctactcgggaggctgaggcacgagaatcacttgaacccagaaggtggaggctacagtgagccgagattgtgccactgcactccaggctgggcaacagagtgagactctgtctc

SEQ ID NO: 27964 - DNA, 1069 bp, Homo sapiens
gaaaggggtagagactcttctgtcattcctatttgcagacgaagaaattaaggcagacagagtaagggaccttgcccaggatcacacagctagtgaaaggcagagtcaggatttgaacccaggctcatctgaatccagaggccaggatcttacctactgtgctgtttggccttggaaagctgccttgggtaatttgttaggcaaaaacaggtgagtgttacacaaattaataaacatgattctgttattggaaaagaacaaacattagtgtgtacattgcagaaaaatcaaacaggatgaatatgcattatgcttttgccagtggtccctctcagtagcatcagtttagggaggcgtggtcagacacgtcacacacaaacacatccccttcgtctcccatggtagcatctcagtgcaagttgcacattttccacaaagcacttagtacatcatataattttatattgccttgtgagactctttaatacctttcactcttactatactgttggctccttgagaacagcttctgtgcctgttgtttgcttgtttcctcggttgaatcctctggttagcccagagcccagcataggaagaattctcaatggatatttaccagatagataggcaaatggatgcttggggtgagaccatgggagacctctccttcctacatgatagactactagaatgtttgaatttatttacatcaaatgcattctttttaaaatcagaaaaaaaaataccgtttttaaacacaaattggggttcatccatacaataaaatatagtacagcctataaaagtaaagttgtaggtatagatttaatgcatggaatccctattgttgcatttgtttttttttgtttgtttgtttttttgagacagaatttcgctcttgttgcacatgctggagtgcaatggtatgttcttggctcactgcaacctctgcctcccaggttcaagcaattctcctgcctcagcctcctaagtagctgggattacaggcatgtgccaccatgcccagctaattttgtatctttagtagagacagggtttctccatgttg

SEQ ID NO: 27965 - DNA, 1039 bp, Homo sapiens
agtcctacaaatgataaatggtagatctgggatttgaactaagttctctgtcaactccacaaccagcattcattaccattacattcaactgccaatcagaactgaatatgggagatcttgtagtttgggttaagcagagaaaagagcagggccttcgtggtctctggttttcttggtctatttcaacccctgggatattcactaatcacctagttgaggtttcagcacccatagagctcacattccagtgttcttgaattagatgctcttatttgattatcctcctaagagatagcggctattgtcatgtgaaggccattgtcctttggaatctgaaggtaatcaagtttggaggcatgacctgactgatgggtatttcagccacaagtttaagaacaaaaagacagatgcataagaattatgcgatgttcatagtttccacatggaatcccattatgaaaaaggccattttccatttttaagaaacatacatctatggagagtctcctagggttggttgtgtgctatcgtgattaattcccatattattcatgaggccatagggctcagggaggtaagggaaggtgtccagagtcatacagctaaggagtctggagccagccaatcgactcccaaatccagtggtcccatgttcattacagtggcattggatgccatggaattccagtccagagaaggaagagttggttttgtggagtttgttgtgctggtacttctcctccatacaggacagatctagattttgtggaacctgaaactttacaattggagggggtagggacctctaaaacaaaccctataaaaacaccttgtgtttgcaaattttacagacacatgtcaccatgtgacgacattgctaaggcccctgctggggctatgaaagaggccctgaaacttaagcctcacaagcctaacaaagccattgtggcctctatttataccgtgttttctaatttgtgttttggggataataataacagacatggtggactagaaaaaaaaaagggatatggaagca

SEQ ID NO: 27966 - DNA, 1049 bp, Homo sapiens
gtgtggaggtgcacgcctgtaatcccagctactcgggaggctgaggcaggagaatagcttgaacccgggaggtggaggttgcagtgagccaagatcacgccattgcactccaagcctgggcgacagggcgagactctgtctcaaaaaaaaaaaaaaagaaaagcctgtgagcttagtactattgcttggccacattttaattcctacaaatgcaagctattaggttaaaaaaaaaaaaagtaatccaaagaaagcagaaggaagaaggtaatagaggtaatttttaaaattatatagcaaacagtttcacagaaaaaactagctaatccaaagctggttctttggaaagactaataatctactagtctactaagtgctaataaaaaagaacaaatgcataaaaatattagggataaaaagagagcataactgcagatgcagaagagagtaataactgaaatttaatactgtaaaaaattcatgccaaaaaaagttgaacactgcaaaattaacaacttcctagagaaacattatttaccaaaactgaaccaagagactccagaatcctaaatagacctgtgttgagaaaattaaattagtagctaacatatatgcatacatgtgtacatgcatacatacatgcgtaaacatgcccacacacaccagacgtaagcaggtttacacttctaccaaacattcaagaaacgtgaaaataagccgggtgcggtggctcatgcctgtaatcccagcactttgggaggctgaggcgggtggatcacgaggtcaggagatcgagaccatcctggctgacacggcgagaccccgtgtctactaaaaatacaaaacatttgccgggcgtggtggcaggtgcctgtagtcccagctactcaggaggctgaggcaggagaatggcatgaacacaggaggcggagcttgcattgaggcgagattgcaccactgaactccagcctaggcgacagaacaagactctgcctcaaaaaaaaaaaaaaaaaaaaagaaaagaaaagaaaagaaagaaaaagaaacag

SEQ ID NO: 27967 - DNA, 1046 bp, Homo sapiens
tatcatattctctctctctctttttttttttttgagacagagtctctctctgtcacccaggctggagtggagtggtacaatctcagctcactgcaacctccacctcccgggttcaagcaattctgctgcctcaacctcccgagtagctggaattacaggcgtgcaccaccacaccgggcttgtttttgtatttttagtagagacaaggtttcaccatgttggccaggctggtctcaaactcctgacctcaagtgatccgcctgcctcagcgtcccaaagtgctgggattacaggtgtgagccaccatgcctggcctacaacaaagtcttatgcaaaaagagctacaaagccttcacaggtatggtgtcttttaccagaatgaaacagtccctctccttaaggcataacaaacaacatcttccgaagccacgccaagaagtgtgttcagatcatgtcttcattcttctgaatttcaagtgaaagagctgccttcttggaactttgtagaaatctaagatgtgtactagagctgctcaaagacctgccatttacttactgtacttgtgttatcaaagactccataaaatcaagtgatttcctctgcttttgtccaggccgccaaagaacgtggcgcttagtcacttcagattcccttctgtctgtgatcccctctgagaaataaagccataaatatgctgagttctgttgacattcacaccggaaatagcacagagctccaagtattgtggtctcctttccgattttattgctaaacagcaagaaaaacagcagaggggctttcctggcgagtcagagaaatgcaacgtggttttttgtgtgtttttttttctccgcaagacagaggaaactatctcttcacaccattgccaaagccaagagacttcgaatgaacagatagagcccagagcagaacaaacaccatttgataaaatgcttagagcacgtctccccacacgggcagggactatgagcgtctgaaaagcagaggtccggcctcccctcctccccaactcaaggttgaaaat

SEQ ID NO: 27968 - DNA, 1016 bp, Homo sapiens
gttagaattcctgtagattcctgggcctcagcccagaactactgagtcatactttctgggaatcttcattttaaatatctacctctcccctctccaaggtgactcatagatgtcctgaagcttataaaatgccattctaactcacttgcactctcagcactgttctgaaaataaggcctctactttttattttcaaacagaaccttcccttatccctcccttggcttttctccttccttactcttctttctctgaccccctttgaaggttccacttccttctcctcccccaaatacatatgcctctaaatgtataggctctgctaggtgctctcttcagatatcaactgtgtacctcactgcagatgtctcatctagcccacagtctgcctttaggcttgggcaagaggggcccctgccctggacttctcattttagtggctttgaatataaactacacaaattctcattgctaattccaatcactctccagtgaagaataggcagcatttattgagtacttactgaggaatgggtactagactttgactttgattcactcatttactgcccgcagcagccctttgaggtaggtaatcatcaccaccttatataaatgatgaagcaggaaggagctcagagggaaaagcaactttttccagctggtgagtacaaaaactgggttgtttttgttttgttttagacagagtctcactttgtagcccagactggagtgcaatggcatgatctcggctcactgccacctccgcctcctgggttcaagcaattcttgtgcttcagcctcccaagaagctgggattacaggtgcgcaccaccccacccaggtaatttttgtatttttagtagagatggggtttcaccatgttggccagactagtctcgaactcctgacctcaagtgatccacccaccttggcctcccaaagtgctgggatcataggtgtgagccaccatgcccaggcaaaaactgggttttgaacttgggaaagtctgacct

SEQ ID NO: 27969 - DNA, 1031 bp, Homo sapiens
gccttggcctcccaaagtgctggaattacagacatgagccaccatgcccagcctgcaaaacttttttgtaaaaagtttggtatctattttaggctctgtgggccactctgctgttgtagcaaaaaagcagccatagacaatatgcaaacaaatgggtatggttgtgtgccaataaaactttattcataaaaacaagcagagggccagaattctcaagccatagattaccgtaatttaccaacccagccctagtgggtagttttcataagcttgccagaagccccttcaaacctttaggaagctctcactgagcagcaaccacagttaatcctcatgacgttccccaggaagttgtctgacacccctcgttagcctgcagctgcctccagctagcctctcttctgactgccaggtttcccaggcatacctcccccaacaatctctaacccagaactcagggaaggagagccttatcatgctgccctctcctctctttgttcactgcacactcgtcactatcttcttctctcccagttcttcaacctgctcaagacttttctgcctcaggacctttgcacacactgctccatttgcttggaatcttctttccacgcttgttccaaaactagctctttgtcttgttttttcttcttcttctttaattttttatttttaaaatagagacaaggttttgccatgttgcccaggctagcctcaagctcctgggctcaagcaatccacccacctccacttcccaaagtgccgagattatagggatgagccacagcctttttcatctcttagagcccaaattaaacaatacttttatagggaggccttccctgactcctttatttaaaatagcctgcctcggtgtggtggctcacagttgtaattccagcactttgctgaggtgggaggatcgcctgagcctgggaggcagaggttgcagtgagctgagattgtgccactgcactccagcctggccaacagagcaaatccctgtctttaaaaaaaacaaaaacaaaaca

SEQ ID NO: 27970 - DNA, 1054 bp, Homo sapiens
tgccactgcactccagcctgggtgagagagcgagactctgtctccaaaaaaaaaaaaaaaaatgacttgcgattgcttccgtcttaaccagaacaagtagaaccagcatttgaatacttattccccccacattaaaaaaaaaaaaaaaaaaaaaaaacctttggcccgggtacagtggctcatgcctataatcccagcactttgggaagccaaggtgagaggatcccttgagctcaggagttcgagaccagcctgggtagcatagtgggacctcatctttataaaaaaataaaaacccttgtatttgagaaggattctccaaacagggctcttcgtaatacctctctattagtcttttcccccataaactgctcttcagatggctcaatcttcatgtgttagtttgagggacttaggcctacagaaaacaaatgtacatttgtcaattccaaaattctaaaggcattgcactcacatgctctttctcatgctgtgcagtatgtatttcttgaaagatcgccaaagactgatttcaccctaatgctaagggcaggatttttatcccatagctgagaggggcaacacatgaataacagttaattctagtacccagcccagtgtcatctgcacttgttagctttaagcatccttttgataaactatctctttaagagaaattgattctctgtgtatagttcttttaaaaggcatagacgtggccaggagcggtggctcatgcctgtaatcccagtgctttggaaggccaagatgtgaggattgcttgaggccaggagtttgagaccagcctgggcaacatagggagaccccgtccctacaaaaaacattaaaaattagccaggtacaatggcatgcatctgtagtcccagccacacgggaggctgaggcaggaggatcgcttgagcccagcagatgctgctatgatctatggtcacgccactgtactatagcctgggtgacagaatgaatgaatacatagacaaccctggattttgagaaaaaacaaatattgactgtacttcagttatccatttgt

SEQ ID NO: 27971 - DNA, 1094 bp, Homo sapiens
atgacaaagattgtgccctttgatcaacatctccccgtttcccccaactcctggcaaccatccttctactctgagaagccaccttttttttagttataagcgaatgcagctgaagatgggaaatccctgcctcgttcagctagggggatgtcatctgagtctattttactcttctgtaaaatgggtcatgtcaggcatttggcctaatgatgcaatctactgacttaagagaagttggcttccctctgtctcccccaccccctgagccctgcttgctttttttcttttgtagggggaggaggaataaccaagatctaggtactgtggccttatgatcagcagggatcatgatttctatcttcccatgccccctgccacacacatcttcaacacatagtctcagatgacaccttaagcgccaactaggacagaaggtcatgtccttaacaccgctgggaagtcgcacataagctgctgcttgcctccccacctagtcacacaccatagctctacaaaggacacggggaagcaggttcctctggagtgggctgtgccggtgaaaacctggaaggggagatgctgaactcatgagcatcctctgctgtctgcacagtaaggcagcctcataggggtgggaggcattaatagctttttccatggggcacgtgatacgggtcctaaagaccctgagatgttacatttgcaagtatttgtcttatctgggctttatggggacagttttgcctgctgcttgtggatgttgggccatgacagtcttccaaggcatcctaaggctctactccagtagctctccaccgtgcctgcctgctgcggtcccctgggggcctctttggtgtttgaaatatctcaggggaggtacaagggcatctctactttctaaagttctgcaggtgattgtagtgtggaaccagggtgggaagagccatgtgagttggagacagaccgtcttcataggctgtgctgtcacaaagggccccatagtcaggaggccccctgtttggttgcatgttctgtcatcgactttaaattcttaatttttttaatagcaattttgaaaatattttgcatcgggc

SEQ ID NO: 27972 - DNA, 1022 bp, Homo sapiens
ctaaacctgctagaatgagacttaaaatgtacaggtaataaccaaataaaacagccttaatagaaaggagcagctgacatggcacagaccagaatggcaattcttacaccagccttgatttgcagagccctctggatctggaagaggaaactgagaatgtttgcagtttgacttcacctgagccccagggatccgcaaactttttcagttaagggccagatagtaaatgttttgagctttgctggtcctacttgttatcagctctgttgccactgctgttgtagcacagaggttccaactcggccactgtaatgcagctacagagaatagggaaggaaataagtttagctgtgggccaataaaactttatttataaaaaggacatgatttggaaggccagtctgttaacccctaagtacaagcaacagggtgattggccttggataaaaggcaagggggaaatgttaacatgaaattgagccagcatcagtaatgagtgtctatggtcccagctacttgggagactgagctaggaagaactatttgagcccaagagttcaagtcgagcctgggtagcaatgcgactccatctttagaaaaatttcgtggggccactttaaggaaggtgttgctccatgccacagacagatgagtttccggttaggtattggggaaaactggatccttttgatctttactcagatcagcttgtaaaatctccactgaagaacagaaatcaaggcgatctcccgcccctctgcttaaggtttcttgctgccttctagacactacagaacacaaatagcttgtttgtctccctgtatttaacctcttctaagaaagcagatgagcctcaattcgagttgccatcatgactgagccaggcactgcactaagaactttacctgtctgcaggtgtttttctcccaggtgctacccagagctgggatagggtgaggcacttgcctgggacatgagacttaagggagtgccgagaactcagtcgccaaaaaatattttaa

SEQ ID NO: 27973 - DNA, 1061 bp, Homo sapiens
tctactaaaaatacaaaaattggctgggtgtgttggtttgcacctgtaatccgaactgtttgggaggcttaggcatgagaatcgcttgaaccggggatgcgcagattgcagtgagtaagtctagattgcactgttgcactccagcctgggctaaagagtgagactctgtctcaaataaataaataaataataagtaagtaaagtatatgggaggatgtgaataggttacgctacaatactgcaaattaatagtactacaaggccagttgcggtggctcacgcctgtaatcccaggactttgggaaacagcctgaccaacaatggagaaacctcgtctctgctaaaaatacaaaattagctgggtgtggtagcgcatgcctgtaatcccagctactccagaggctgaggcaagagaatcacttgaaccttgggaggtggaggttgcggtgagctgagattgtgccattgcactccagcctgggcgacagagcgagactccatctcaaaaaaaaaaaaaaatagtactacagatactatgaatactgcagatacgacactgttttatattagggacctgagcatccatggattttggtatctgttggctggggtggtgggggcgggtggtcctggagccagtgccctctggatactgagggacaactgtattaatttaaaaccaaccttatttcccccataggtagattgttaacctcatagatgactggggttttccccatagaaatgtgtcctggtggtgtcacttcgtacaggtgtctggcacatacctgtatgtgtaaaaaagtagctcagtgtcccagggacatcttctccttggcaaactcggtcaaactgcagcatcttcctttatcacatagaagctctactggtttgtgctccccaaagaaacagattcagttttgcacatttcagtttgtgttagtttcaaactgaggattctgtgtggtgacaacactctgtcaagaattgcttgatgctgattggttcagtagagatagcaaattaaaaaacaattgctttcagacactccagtagatttt

SEQ ID NO: 27974 - DNA, 1034 bp, Homo sapiens
cacccccaaattcctatgttgaagttctaaccctcagtgtgatggtgctaggaagtggaaactttgggaggtaattaggttataaaggtggagtcctcatgaatgagatagttccattataagacaagaccaaagagagcttgattaccctccctgttctctaccatgtgaaggcacagcaagaagatggccatctgcaaatcagaatgttggtcctcagagacaccccatctgatagcaccttaatcttggactgaggcagaaattaaagaattaaaggaaaataaaatttaaaaagaaaaagaaataagctttactgtattaggctgatttatcccagaggcaggaacaggcacagcccagacccaggaaaagccttgataaacactatctaagaagctaggacacaaaggaatgtgttgtggagactctcccagcactccctcaacataaggataagaaaaagtaaagttccccctagaatcccacctctctccatgtgattgtaccttactctgcaagttttatgagtttatagattcctgttctctgtaactagtaacttcaagtattctgttttatctgagaaatacagtgcaggtcacaagaagcctgagcaagcctagataacagccatctggcttgcttggcaatggtcatatgtaatcctgagttatgcacgtgtcacaatttgattcactgcctttgttatgccactgcatccttgctttcacgccactacacttcatgccatggtaagcttgttttaggctcgcccacccccttttagaagtgtatataaaagtcatgtgctttctttgttctgggcccagtctcaggatgttaatccactgggtctgagtgcactcaataaaatcctcatcctttaccctgaggtctctctggtccccctgattcccacaataggacttcccagccttcagaactgtgataaataaatgtttgttgtctaaggcactgtgtctatggcaatttgttatagcagtccaaactgaatgaagacataattcatg

SEQ ID NO: 27975 - DNA, 1048 bp, Homo sapiens
atggctttggattaagagctgagactttggggtcaaggccatctagagtgtgtccccactttagcctccaataactatgtgactaggcaagtcactcaacatcttggagcctccgttttctcatctgtaaactggggatattaatagtacccaactcatggggtggttgtgagaattaagcgagttaatgcacctaaggtgcttggtacagggcctggtgtgcacactgccttctggaaactaaccatagaatgtgctatgaccatttttggttttcttcatccactcattctgagaagagtgtggaaggctttgggatgggtgcaggggtgcagtgcacaggacctgagctgtccaatctgatgagaccactcagggagagatgctacttataaaaacaccactgtggcccaggcgcagtgcctcatgcctgttatcccagcactttgggagactgaggtgggcagatcgcttgagctcaggagtttgaaaccagcctggacaacatgacgggaccccgtctctaccaaatatacaaaaaattagtctggcgtggtggcaggcgcctataatccccagctattcactacttgggaggctgagatgggagcatcacttaagcctgagaggcagaggcttcagtgagccggggcagcgctactggccacttcgctccactttgctccagccctggggtgacagagcgaggctccatctcaaaaaaaaaaaaacaacaacaaaaaaaaaaaacaaaaaaaacacaaagaatcccaaaaacaaaaaaaacaaaaacaaaacaaacaaacaaacaaacaaaaacaaaaaaacaacccatcactgtgaaaattgaaaattggtagcttattggaggattgaggtgctgatactgaacattctgagaatcttctctgcagtgcttttgagatagaaagggataaattctcagtacttagaaaggacctaggtaactgggagtgtgagttctgaaggtattctttattttgcatgatgtctgcagaggctgctaatgacaatgtctgaagtagtt

SEQ ID NO: 27976 - DNA, 1991 bp, Homo sapiens
tcaggagtgaagactccgtgacagaggatgggacgcagtgcccaaggggaggttggccttgcagggaaagcacatgcctgtccctccctcattagcttcatttggacaaaacatgtaaaatccggtgtgttgtggaggccttttgattggggaactgtaacgctgcctatcgagcaacagcactttaagcaggtggctttgttcaaattaaaggttcttctttttcttttcaggcatcatggaccgatctaaagaaaactgcatttcaggacctgttaaggtaaattgaataatctgtaatctcattcacatttataaacccacatggaggttggtcttgtcgggaattctttccgcctttactttggatttaaatttagatcccttactgtgatcctggatatgaattagtcacttttctcgtgttcagtaacattttgctgcttcttagagtagcttttttgttctgctttgtcttataatcggctgcttaagtttctatatccctccactgtatgcaggataatagtaataatgcatctggcaggagttcaaaacttttaaaattggccataaatataaaataattagaaaaaggctaccttgaattactgtatttgattctaagttcctatgataacggccatttaaaaaattgctctatatttaaaatgtttctttttatttgtctttgtctgaatgcctgctgcgttgtggacagtgtgctaatttcaggagtaactgactttgtatttggaagtcttaacaccctctctttgtagagcactcataccgttgagctggggatggactttgaggctttcatttctagcacttgtccctcacttacaatgagctgttgaagctgaaggaaatctcatccctcctaccccttttagtttgattagctgagggtgttagagttaacttaacaatttaaggttgtaatacagtacttacaggcgtataaataatacatttcaaggctgggcgcggtggctcacgcctgtaatcccagcactttgggagaccaaggagagtggatcacaaggtcaggagttcaagaccggcctggccaagatggtgaaaccctgtttctactaaaaatacaaaaaattagccaggcgtggtggcaggcgcctgtcgtcccagctgcttgggaggctgaggcagagaattgcttgaacctgggaggcagaggttgcagtgagccgagatcatgccactgcactccagtctgggtgacagagcaagactccatctcaaaaataataataataatacattttagtagtaactttgtgaagtgtctacatttgtttcctctttgtcagttttttgctcaattccattttgtcaatacttggaaaatgaaacattggttaatcaatagtacagtaataagcttattgtggaaaatcttcgatatatgaaaacttagactcttctaaaacttcatgaagataataccactgttgaacgttttgacgtatttttttttggtctttttcttaaacgtatattatcaaagaaatttcaatggaactgagattttggcataaagtttttgtatcatagctttttgccaaatagcaatgtagtgtctatttccaaattattgagaaattttagaaagtgtctccttcattaatggatatttgttaataaagcatgatttttaggggtgaggaattggaggggatagaaggtatcattcaggtattcttagccacatactaactatcctctggaggtactgattaaaataccttttcaccttccatctcttatcagtgacattcattattttgctatactagagaacaaactttgtgaaattctcaatatattcatcttttgctttcatgaatgccagaaagtttattttctcttccattctaggctacagctccagttggaggtccaaaacgtgttctcgtgactcagcaatttccttgtcagaatccattacctgtaaatagtggccaggc

SEQ ID NO: 27977 - DNA, 1027 bp, Homo sapiens
tgtccatgtaaagtgcttagaacagggagtgcttggcttggggagtgtcacctgcagtcattcattatgcccagacaggatgtttctttatagaaacgtggaggccagttagaacgactcaccgcttctcaccactgcccatgttttggtgtgtgtttcaggtccacttcatcaacccggaaacggtgcccaagccctgctgtgcgcccacgcagctcaatgccatctccgtcctctacttcgatgacagctccaacgtcatcctgaagaaatacagaaacatggtggtccgggcctgtggctgccactagctcctccgagaattcagaccctttggggccaagtttttctggatcctccattgctcgccttggccaggaaccagcagaccaactgccttttgtgagaccttcccctccctatccccaactttaaaggtgtgagagtattaggaaacatgagcagcatatggcttttgatcagtttttcagtggcagcatccaatgaacaagatcctacaagctgtgcaggcaaaacctagcaggaaaaaaaaacaacgcataaagaaaaatggccgggccaggtcattggctgggaagtctcagccatgcacggactcgtttccagaggtaattatgagcgcctaccagccaggccacccagccgtgggaggaagggggcgtggcaaggggtgggcacattggtgtctgtgcgaaaggaaaattgacccggaagttcctgtaataaatgtcacaataaaacgaatgaatgaaaatggttaggacgttacagatatattttcctaaacaatttatccccatttctcggtttatcctgatgcgtaaacagaagctgtgtcaagtggagggcggggaggtccctctccattccctacagttttcatcctgaggcttgcagaggcccagtgtttaccgaggtttgcccaaatccaagatctagtgggaggggaaagagcaaatgtctgctccgaggagggcggtgtgttgatctttggaggaaaaatatg

SEQ ID NO: 27978 - DNA, 1050 bp, Homo sapiens
gagctgatgattgcctcacaccggaggctccttcctgtgccgcgttctgtccagaagacacagccatggatgtccattttaggatcagccaagccccgtggggctttccttcatttttattttatgtttttttagaaatggggtcttgctctgtcacccaggctggggtgcagtggtgtgatcatagctcaccgcagctttgagccgtcttcccactcagtctactaagcttggactataggccaagactatagagtggtccttctttccattcttttgggaccatgagaggccacccatgtttcctgcccctgctgggccccctgctgctcagaaggcatggtctgaggcttccaccttgggtcgtgagcctggcgtggtggtttctggccagcatgggggttgggatgctgtggctcaggccttctgcatggtttcccacactctcttctcctcctcaggactggatcatcgcgcctgaaggctacgccgcctactactgtgagggggagtgtgccttccctctgaactcctacatgaacgccaccaaccacgccatcgtgcagacgctggtgggtgtcacgccatcttggggtgtggtcacctgggccgggcaggctgcggggccaccagatcctgctgcctccaagctggggcctgagtagatgtcagcccattgccatgtcatgacttttgggggccccttgcgccgttaaaaaaaaatcaaaaattgtactttatgactggtttggtataaagaggagtataatcttcgaccctggagttcatttatttctcctaatttttaaagtaactaaaagttgtatgggctcctttgaggatgcttgtagtattgtgggtgctggttacggtgcctaagagcactgggccctgcttcattttccagtagaggaaacaggtaaacagatgagaaatttcagtgaggggcacagtgatcagaagctggccagcaggataatgggatggagagatgagtggggacccatggggccatttcaagttaaatttcagtggggtcaccaggaagat

SEQ ID NO: 27979 - DNA, 1022 bp, Homo sapiens
gacccctggcgggtgtcctggggcccccggatggacctcagtgggtctgtgtggcccagagtgtgtagggattccgtatattttcttttctgacagtggatccatttttccaggtttctcaaaggggtctttgatctcccaagtcaaaaaccaaccaaattccttcatttgtattcgaagcctcttttatgctggactcttgaaggctaggattcaatgtcgaacacccacacaaaggctgcccttgggggtgttaatttaggacaggaaggagggggttgccattcacatccatacatagtaacagacccagagtcagggtggtgcctagggaacgcagcccatcccgagggctgcagacaacatttcgtggcgagcgagctgagagctctgggtccagtgggtgcccacgaggccaggctggtccggagaggatgctctgggctgtgggacctgcaggggcagaggcctgtgctgtggggtttcctggcgcctttggggagtggggaggaggctgtgggggctgaagcaggggaggggagtgagggtgggcgggtcaggcattctcttgggagtcacgtcttgagtttgaacttcatgccaagcatgttcagaagtctttgcagagattcaagctgtggtgtggggtgcaggtgataagatcattctggctgctctaagaaaggtgaggaacagggtgggtgccgagggggtgctcagaggccggagactccttagaggatgtggcagatcatccaggcaggaagtgtaggcaaactgcatcccggcagagacttccgtgtcttggagctccatcgggtgcacctgggtaatgagggggagaggaactaggcatcgcgggcttagaattcactctgattttccccaccgcctcctcatcaaagccccaccaagtctccatttacacagcccccaggacggggctctcactgtttcccgtggcagaaattcattgctgggaacctgcctccttcccgcggatggctcgtggccctgtttgc

SEQ ID NO: 27980 - DNA, 1047 bp, Homo sapiens
tgggcaaatcataaagtctgagattctagtgctcctgtcagccaagtagtgcacgctgcacccagtatgtagctttttattccttagccaccttctaaaagaagacttgggtaacttgaggcctggcccagtgacaacactctggcaaagtcgtgcacggtgcctagggcagcctgtttacaagatggtgcctgggctgacaggtacccctcgggttctgggtctcaaccctcccctgccagatcctgcacggggaagggcagcagggcctgtgggaggcggtgtgcatccgacaaatcagtgcacacctgctttgtgcctggccccgagctggctgcagagaccctggtccctaccctggggacctcttactgatattaactcagaggatatcctgcctgcaccagcacccagagaagacaggtgcccaggcagcagcgcccatgtcatcatccagaaggggtagagacagggtcacctgaaccttgcaaccactaggcagttacactgtgcgtgggtggagaggagcccccagcagctgctggaatttggagcccggacacctcctggggccttgcttttctcatgcacacaatgggcatgtggaggatagtaatttgggccagcgtgtttccattctagcggggcgcagccatcgcagaccttctttcagaaggctggtgtttaaccccacatgagcccctgcctgccagtggtctccaaaactccaaagcccagatggcgtcctccttccctcccatctggccacgggtggtggggggtctcgaggtcaaagtgcggaggtgcccttctgagaccacccaggaagcgtgcgtcttttccctcttcctcccagctgggccctcctgtgagtcaccatgcggagcagccgcagctggggctctgctccaggccagcgtgccctcgcggggagaagcctataaactcccaggcacctgcagctcatcaggaggaggccgagcggggagcctggtctcatctccctggggatgggctggtgctacaggaatgagggctggagtctgt

SEQ ID NO: 27981 - DNA, 1038 bp, Homo sapiens
acctgcatatctctgagcctcagtctcccacctgtgagaggggacaacagtgctcgcctctcaggtaccatacggttcagagggctcgctccgcaccttgttctaagatggttccatcttgagttggggtcagctcactgcagctgtgatcttactttagagccaaggcagcttgaatcccatggtggaagattcacactgacattgaggtttgctccaaccagctgcgaaccttgagtctctggctttgcgctggcatcttgagcatatctttccatttaactcattctcagaacaatcctcatggctacctccattttacaaacaaaagaacctgatggacagagactgacttgctcagggttacttcactgaaatttaactccaattttcctcaactcagagcctggagccctacagcctacatccctgagcacccactgtgggacccgaggaccactctggggatttcatcacaaagaggattccgggcctctcaccccctgattgtctctgctggtggctgtgtctctaatgagggagagccttccatttgtcgctgtatttctcttccctcttgacccccagcctctgtgatccacaccttgacacaagtttgaacggctcgttactgcgctccattgccggagcagacatttctttgcagcaggacttttcagagcctttaaagagctaaggtgcattatgacatctctaaggagcaatgtgtcatgtggtgcttcccaacctcatttcaccacagagcattttggatttttgatcctctcattttcctctcttagctatcctattaataagttgcagtttttgagaccttgataaactccaaaccctttgtcttgtggatggagaaactgagggctagaacataagggccactgactcgccttctgactgtgacaacgctggcctccgggtgctggacgggcatcttcctgactttcccatgagtggctgggttggtgctgtctgcagtcagctggccctgcccagagggagacagacagccgtggggtg

SEQ ID NO: 27982 - DNA, 1049 bp, Homo sapiens
ggtttttgtaaaaggaagacactggacttgtctttgggacagtgatgggtctgcttgctgtcaggatggtgttttctggaatccattttctttggacttatcttttggtcttggggatttaggcccttttaattttttgaagatgaaagtcctttgttaatgcctgtaagctctctcagcccttggggtgctgggatgtaactggaggtagagggaggaaaagctggaatcctaggctctgggcttccttaggaagcttttctctgtgggcatggggagatgtcaactctagacatttagtttaaaactcaagtcttgggtaatcaactatatacagtaactttagaagaaagtataaagacatattttcacctgaaaaatacatgcaagcttctacctcttgtagtggtaacaattcaattatcttgatacttgagttgaaatggtgtagatttcacactgtggagtggcttccatagaaaagggaaaccttggaaagatgagatttggaagttggtttggactttgaattatccactgcttatttgtgtgtgtgtgtgtgtgtgtgtgtgtgtgtgtgtgtgtgtgtgtgtacttcatgactgttctttctttgataatggatacaaaattattttcagaacatgtgacaatgtgggtttcagggagaatagagtaacattgtcgttcctgcttctcatagtctccaactaattaatgaaggaaatcctctcagaaagccataccaaagagcccacaaatgtttgcaagaaatttagttcctcactttatccctgagtttctttttagaaaagaaccttgtaactctgataccttaacagttaagatacagttcatcttctatattaaaaacagttgtacctgcagctgttgtaacaaaccttgtgtttgtgattatgtgtcagtgttttctttcttcattgggcatgactctaatgattgtacctgtgtttatgtcatgcttattcaaacgtatctttattgttcggtctattgcactttttttttcaaatgtaatcataagtgca

SEQ ID NO: 27983 - DNA, 1024 bp, Homo sapiens
aggataaacagaaaggacaccctctctagggtccccaggggggccgggctggggctgcgtaggtgaaaaggcagaacactccgcgcttcttagaagaggagtgagaggaaggcggggggcgcagcaacgcatcgtgtggccctcccctcccacctccctgtgtataaatatttacatgtgatgtctggtctgaatgcacaagctaagagagcttgcaaaaaaaaaaagaaaaaagaaaaaaaaaaaccacgtttctttgttgagctgtgtcttgaaggcaaaagaaaaaaaatttctacagtagtctttcttgtttctagttgagctgcgtgcgtgaatgcttattttcttttgtttatgataatttcacttaactttaaagacatatttgcacaaaacctttgtttaaagatctgcaatattatatatataaatatatataagataagagaaactgtatgtgcgagggcaggagtatttttgtattagaagaggcctattaaaaaaaaaagttgttttctgaactagaagaggaaaaaaatggcaatttttgagtgccaagtcagaaagtgtgtattaccttgtaaagaaaaaaattacaaagcaggggtttagagttatttatataaatgttgagattttgcactattttttaatataaatatgtcagtgcttgcttgatggaaacttctcttgtgtctgttgagactttaagggagaaatgtcggaatttcagagtcgcctgacggcagagggtgagcccccgtggagtctgcagagaggccttggccaggagcggcgggctttcccgaggggccactgtccctgcagagtggatgcttctgcctagtgacaggttatcaccacgttatatattccctaccgaaggagacaccttttcccccctgacccagaacagcctttaaatcacaagcaaaataggaaagttaaccacggaggcaccgagttccaggtagtggttttgcctttcccaaaaatgaaaataaactgttaccgaaggaat

SEQ ID NO: 27984 - DNA, 1060 bp, Homo sapiens
agctagcgttccgagagctagtacctatgtccctgttgagttcacccttaagcagtcctgtgaggcaggtactgttgttgattcgtgccttactgtgaagaagctgaggcaaggggccaggtcaccacagacaccacacatacagcaggtggctgcatctggattcgaatccagagccaggctccctgccttccacagctttgctgtgtccccatctcgacgctcagagaaaagacacctccggaagcttcccctgctgccttcgcagaacagttggtcagaacctcgtcttcccagaatttgggattttctgcttctggaagatgctgcttcgaaaggaagtgatagcaagggctggaatagcctcgcctgtggggcggggacagggagaggcggctgatgtctgggaggcttagaacttccttcttggaatctgtttttcacgttgcctgaaaaagaaagaggaagagactcatacagatggagacacagggaaagactcaacggatttagaccccagacagtcacacaccggagacagacagacagacagatgccccagaggaaaggacacacccccaaacaatcaaaggtgggaggcagacacacagacacccttggacacgtttgctgccctggagccccctctctagcgaggtcgcccttcccatctgagctccttccctcctcaagctgccgctgggcccggcaatccattcaggggccgactgtcagtgtggccagcagcatttcctagaccctcctcccccaaaccggaaaacactcgtagcaaggaatgccccgcctgtgggccaggggtcttcctgggcctctgagccccacatgaaggtgatgagccaagcgccaggctagggtcagcaagttggcatggttggggggcacgtgggtcatgatggcagtgaccttccagctcagtcgggctcctgacggactcaggccttgccttttgctgcttccaagaggtcggaggaggtgaaggcatggctgccggtggaggggtcggggctgctggaggctgcttttcggggtgggtactttg

SEQ ID NO: 27985 - DNA, 1035 bp, Homo sapiens
cagtcctgacttcctcctgttgtgagggcagcatggacccccctccccttatttcctgaatgcctaccatgtgccaggcacagcaccacatgcagccctgcaagagctactagacttgtcttacatggcgctacatgcaaccctccaagagctactagacctgttttacagataaatagactgaggctcagagggcagaagtcaattgcccaagggtgcatgactcgtaattggccccactggatgtccagcccactgcacccatctgtgtcctagccaccctcccatgtcagttccaagaaatctataaacccgaagcaaacggtagcacatgagaaaactggagatggcacgtggatggtcatttaaaatttaatagttccgtactcatgtgaatgtatgttaggaaaaatataacaagcacattgtcgatttcgtgagtattattgcttaagatcgggttaagtaataagtaaaccaattgaatattttatttcagttgaaaagaaaaatactgaagaattttaatgcctttaatggggtacttgagtatggcaaaaatcgggaaggctgagagtgtcatttgggagctgtgtcccaagtccctcgtgggcctttaatcagcagttacagatctgcagctcctcctgtaggatggaagcactttgctctttggccttttgaggtcacccagctatttgaaggtcaggggcaactcgattctaatgagatcaaggtcacagggtcatgttgcccccaggaaagtgggagatggagttctgtggtccaggctgtggccctgctgcagggctgggaggtggagaggtgtggacagagaaggacctcccatcctcaccggcagagaaagctcagagatgctcccagctggtgatgaggctccagcctgaatctcagcctgctgctgatgatggagaagccagcacttcactgagtacttccttggtgccccgtcaccacccaacacctcctcacaaggcttgcagaagagcctgctgagactcagagtgtctgtat

SEQ ID NO: 27986 - DNA, 1048 bp, Homo sapiens
ttgccatgatggtgcttgtcattcatagatgtggtatttggtctgactggaaagctattttctagctgcttcagttatctaaccaccccaaaactcaatggcttaaaccaacagcatttgatttcccacaaatctgtgagtagactgggtggtgcttctgcttaatgtggtttcagttggggaagtccgaaatgatgtcacttatgtgggtggcataggtcctggctgttggccaggacttcagttctccgcgaggtgccctttccacttggctaggtcagccttctcacagtatagtggccacagggtagttgcacctcttttctgacggctcccctccttcagtcctttttcacctatgtatgtacaaaaaaggaagtaaggaattatataggaaaaaattatgatcttactttggacaaatatttgaacaaatgttaggtgtttgagacttgtgattataaagacttaagtactcttcagcagacagctgaagacttgccccaatgaggaaggaaaccaccgttatggctctgaacttaaccacaccttgggtaggacaaccttggcagcctcttgggggcttcctgtttgggcaagggtaggagctgtggagtgctgtaccttaggagtttataacataattgatctgtacgggagggcatgctcattcgtgtcgccctgcttctacccctacacctccccatggtagtattgggaggtattatcataccattattggcagaaagaaccctgaagttttatcctctacatcctggctctctcacacctgtagctgtgttacgttgggtggaccactcatccattctgttcaattctttggaaaatggcatgagaatgggagctgcttcataggactggtgtgagggttagatggatagccagaaaacattctagtctagtgctttgtaaagtattcagtgattttatcatcatcatcatctttgctggatttttatgtaagagcttatgattcaatgttaacagctgctactctgtgaggtaggtgggattattcctcttaaca

SEQ ID NO: 27987 - DNA, 1048 bp, Homo sapiens
taacatggatgtggggaattggctgtgtcaggatgacacccaggtagaactagatggaagctagtacttttcactgaggtagagaagcagggaaagaggcccaggtgtgaggtagcaggaggccatgagttctgccatgttgagtggggtggtggggccaagagctctgccatgttgagtggggcggtggggccaggagctctgccatgttgagtggggcagtggggccaggagctctgccatgttgagtggggcggtggggccaggagctctgccatgttgagtggggcggtggggccaggagctctgccatgttgagtggggcggtggggccaggagctctgccatgttgagtggggcggtggggccaggagctctgccatgttgagtggggtggtggggctaagagttctgcctttggtctgttgagaacaaggtgcctttaggctgcacgtgacaaggtatcaagacaaggtatcagacaggtagaaagatgttctaggtctcgggcacagtggaaaggctgtcatagaagcagaaaaagtctagtgctaagtgggagacaagagaggaacactccaaattgagtttccaaccaaagtcattatcaacaggagtcatcctggagctggatggcactggagagatcgagtctcagcccttttattttacaagtaaggaaactgaggcttagagaggtgggaccagctggttagtggtaaagccactcttagactgaatttttctagtcctagttctatccctcaattgtttactacaccaagcagagaatcttcccgtgaaggtggaacatgagccaagggctcagatgtcagcccccttgatatcagatctattttttgtcagcaaccaaatggacagttcacagcttcacattcttttcttgatcactttagaactgacattcctccagctccttattaaagaaagagcaaagcaagagctggctagaagtggtttggaaggtagaaatagactataccatgtctttagtaatcagcctggcaaagtccacatggcagccggg

SEQ ID NO: 27988 - DNA, 1057 bp, Homo sapiens
aagtccagcagtgcctcctgagtgcctgggcacctggtggagatggtgcagggtccctggcaaaagagcctctgggacaggagttgtagccgccagcctgtgtcacacactcacactcacaattagaggacaacgggaatttaattaacttccaaagtgtgatttttgaccataagcattctaggaatgaggtgctgtgtggggattgagatgaaccttggaaaatacttaaggagaggcttgttttatgctgtcaggaaatcttcatcttgtcacttcgtaaatttttgaccttgctcagttagttagaaaaacaaaaacaaaagcttcctgtccacaactgagataagagagttttgcaagacatctctctgtcctcggagtgttgtggccttctgtgggttctgtagttttaattgctagtggtttcattcctgctcagttagtgaaattgcgacattttcccagtatcttagcgtgactgccctacagccttaataatgatgattttagactgtagtttaagatctgctggggcaaatgccttctcactgcacagtatctcagcattctctgatgttttgtccatttatttttctatatgaatttaagaaccatttttatcaagttttataaatgaccttggtgatattttgactggaatggcgttcaatttataaattaagttgggaaatattatcatcttttctgcatttagtcttaagccagaagtatggcctctcaatctgttcaggtcactatttctctcattaaggatttgtgttttcttcatgtaattttaatatatcctatgtgagtttgatatgtgaatatatatcatatatttcccaagtattagatgcttttgttgcattgtgagtgggcactctttttttaattatattttcaggcctcttattatgtatttatagaaatggtattgatttttgtacgtttttctcatcttctgccactttcagaattggttggtttttgaggcaaccagcagcctactcaggcaaacactcagagaaggtttctggaggatttggtagaa

SEQ ID NO: 27989 - DNA, 1039 bp, Homo sapiens
aggccaacctaatctgaatagagaagctttgacttatatattctcctatgtgtctgtagctagatttatgtttttgtgaaaaaaatggttttaaaaaattctgagtgtgacttttaggctgtgtctttgaagagaattataaccatcagcatttttgtaaatactgtagagtgtggggttcttatgaaaacaattgtggactcaacccttagtcaaagacctactgatggagttaaataagttcactcagagcagtgtctattaacacttcagtttaaataactgagtttttaatttttcacttttccaagttcttcttagtaatttacatttcgtggaaaattatttgctgttactgtagtcttggttagagtgttattttgtaaagatattttaacttaaaaatgagtatttttcagatccgacataaaatgttgagttattttactacgcagtcttggaaaacagctcagcaacatctgagaacaatgaatcatcaaagtcaggactctaggtctgtaataaaaatctgttctgaaaacttttgaatgctacatattcctatattctgaatgctacagtttttaaaattaatctcattttgtttctgtaataggattaaaaaacttgataaattccaattcattatcatagaggagctggagaattttgaaaaagattcacagtctttaaaagatttggaaaaggaatttgtggtttgttactttaaaaattttttaaataagtttaaaaccttatttttaaagagctatacttggaaaaactttcttttttgggagcacatcctaaagctttttgttcagaaaataatttagttttatcttagatttctaatcagcttcatagaaacacttttgaagtacgaacttaaatttatgatgaatatctttgataatgagaaatcctgagagattttactttcaattttattttaatttgaaagagcatatgacatctggaatatttttaacatatagccatactgtttatttaaatttgtaataatagaaatagagta

SEQ ID NO: 27990 - DNA, 1059 bp, Homo sapiens
ttttaatatggtgatttacatgtagaataaatcatggtttaaagtactctgggataactgtaaacatgttacacaagaggaaaacagactttgtaacttacagacaactgtgtgggttactttgcattttatatctctaataataatgaaatggcagtgtctttgaatatttagaagtctcaacatttttttaaattttacttatttcttctgttggcacacttgttatttgggctgtgttaattcctcaaatgatgagatatttctaatccatatgaagaaaatattaatagattaatcaattacattaatatattcttatttctcttgcttattctaataccttgtaaaatatatggtcttttataaacttaattttcataattgtaaatcaaacattaactatttttttaatagattatgacttacaggtaggcattgtagaagctttgtgtagaatgaccacagaaaaacaaagacaagaactggcacatcagtggttttcaatggattttattgctaaggcatttaaaagaattaaggactctgaatttgaaacagtaagttgtataacaataacagaaattcgtgaatttttaaaaattattatgatttttaaaagtatttctctttaaaattaggattgcaggatatttctcaaccttgtaaatggcatgcttggagacaaaagaaggtaaacttaatgcaagatacaaccatttactgtcaaataaatagagctcaagagtgagcacccagtgttgcatctttatacatttaactttattcttgttctctacactatgttggagtgtagaatgtgcatagataatttaaaacaataacatgattttagcaaattactacaccagtaatctgaaataattctgcactggccttgttttattttgtactttttagagggaaaagttcatttctgtttaattcatattaattaataactttagatgttcaaaattggcttactatacttctgagttgcatatccattattatttaatgtttgagggataataaaaatctagacatatttattac

SEQ ID NO: 27991 - DNA, 1157 bp, Homo sapiens
cagccagtgctaattaccaaagccattcagtattcagcaataaaggttgaggacagctcttgttcagaaaaatttcagtcttggtgctggatatcaaaaagtcacaataaaaccccactgccattggactgctgtgtggtagggaaagtcagaatactcagcttctgcttctgacaaaaattcaaagaactgaccatgggtaaactgacaagagtgaatgatgttcacctttgacactactgttttaataaaacatgatagattcaaatagttttcacagagcacttgctggtgagtaatacagtcatgcaaaaactggcagtgagttgcatttagttcgtgggccatagtttgccaacctttgatctaatggaacaaattttcaatagtaaattgagaatacagaatatgttcctactcattctttgacttgtggcctgcttgtgccaagcaatcagatccaacttattttagctctgtgttgattgaagaagacttacctaggattggtcaatgaggctggtgaattatttataaataaaggtacttgttgtcttcagagccaaaaagttttaaacagattgccattgatttaaataataattaatcctacctcttcgttgattgtttttgctacataacaatgtagtctaaatttttaagtttttagggaaaaaatcctaaagcaccagcaattgtaaagtgatccacctgatttttaaagtaaataattgtatcttttcatctgagtacttttttctttttatgcagtcactttggaaaactgtacatttgttgttacagtatttccattgtttaaagttatttttaaaatttgcattatgaaacagcatgtacacattcctctgaatatacttagtattgataaagcctcatctttcaaaaatgcgttaacgtaaaaggggctcacatcatttagaacttcattggggttaagatgtgttggtctttatgggtataaaaatttttgatgtataactaaaaattaatgaggtcagttttggtaaaagccttagaattgaagttttcaattttgaactatatttacttaatctaaaaaaaaaaataaatacctccttatgtgcctgcagttagaaactagatctagagttgtcccttgacagtattaaaatcag

SEQ ID NO: 27992 - DNA, 1035 bp, Homo sapiens
gattttctatagactggcttattcaccacacttacgaatgccacaatctatcatttagatttcatgaacacagtgggaaaaaagtgtctattcaatttttatgaaatacattgtttctgaaaaagtttagatactaatctctatttttttctttatagttttgctatgttactgaggaaaaatggaatgtaaatttctctttagaatgttaaaaaaaggtatataaagtaaaaaggcaagccacagacttggagaaatatttgcaatatttatacatgacacaggaataaagaattccactacttagtaataaaaagataacacaataacaaatgtgcgagacacttgaacaggtgctttagaaaagatacacaagtggcgaataagcaactgaaaaggtgcccaccgttactggtcattagagaaatgcaaatggacaccacagcgaggctccactgtgtgcccaccctcagggcttgaatctgaaagactctcatccagtggtggcatgttgtgtgacacaggaagctgaacgcacgtctgcccggtgtgtgacgcagtgatgaagctgaatgcccgtctacccagtgttgaatgcacgtctacccggtgtgtgatgcagtgatgaagctgaatgcacgtctacccagtgttgaatgcacgtctgcccggtgtgtgatgcagtgatgaagctgaatgcacgtctacccagtgttgaatgcacgtctacccggtgtgtgacgcagtgatgaagctgaatgcacgtctacccagtgttgaatgcacgtctgcccggtgtgtgacgcagtgatgaagctgaatgcacgtctacccagtgttgaatgcacgtctgcccggtgtgtgacgcagtgatgaagctgaatgcccgtctacccagtgttgaatgcacgtctgcccggtgtgtgatgcagtgatgaagctgaatgcacgtctacccagtgttgaatgcacgtctgcccggtgtgtgacgcagtgatgaagctgaatgcacgtctacccagtgttgaatgcacg

SEQ ID NO: 27993 - DNA, 1988 bp, Homo sapiens
agggccctggacagcaccccagctccagctgtgggcctaccggaaggagcccgtgccaggcctggcctcctctggaatcggggtacttggctcagatacacaggctcattgcaagccccactctgagccccactaacacactgtcttctcctttttcatcaccaggggtcgggccccggctcagtggtcccaggcagctcgggtgtcggaacccccagacagttcacgcgacaaagaatcacgcgggtcaacctcagggacctcatattttgtttagaaaatgaacgtgagacaagccattcactgctgctctacaaagcattccttaagtgacacaggaggacgcctggggactttttatatatttgcagattacgcctttttgtaacgagcaaatgggatattgtttaaaaaacagccacctctttacaatggaacagttttatattcctgtttctaaatcagctcttcagtgtgaaagaaaacacgtttctgtaacagagagaacacaaaggcctgtggatactcttaaaggacaattaaatcttaactcatcttgattgagtggccttcctgccaaacaagccatatataaagactgatggaatcgttagcaaataattagctgccctctgtcaactcatagcagtttctgcattatttgtgcattttggtttagttctacctaacttactatgtaggtgtatgtctacagccgatgacctcatttcgtttattttatttttgtaatagtcagttggcaaagcaaactgattttttagactatttatcttccttcccttcccctcccaccccgctctcctctctgccccctgccctcccctcccctcccttcccctccactccgctgagaatcctggaggaatacacaattcatcgttgcacccccacctcagagtgtaatcgcatttctgcttggtagaggccgagcccagcaaaggtggctccttctgaatgtgtggtcagcatctgtacaaatgcattttatttgctatagtttgtaaagctgtaaagttaaaagagatgaaaaccttttcagcataaatatattttacttgcactgtgttttttagctaaaagtgaaaacctagattaaataaaatcaaagttgagaagaatcatcaaaagactgtttctcggtgtgaatcaagtgttgaaaaatggttggtgtattttgtcagtaattgtacataacttttggcacatgacatagaaatggctatgtaaactataattattttgctaagagactgtatgcaagccttgggccgactttacagacgtccagagcaaagccccttctttgtacctatttttttattacaaatatactaattggttctttctattttcagaggttattgtatgaaattgtctattgatagtacttttatgactgtaaatactctggctttctccgtgtgaattctcacattagactttaattcgagcgcgtgtgaactgaacgctgatcagtattttttatcaacacctgagaactgttacaccttttattttgtcttttaggaaatccctgtctttccattttttcatgtaaattttgcacagttacttgttcatatgtaaatattttactttcagaaatgaagtttttaattgctattgttttatataggattgaaagaaaattaactcctttattaaaaacaaatttatctgtatttgttttgcctatttttcctccgttttccagttttagattctactgccagattgcactccggctctgctgaggtgctggtttctgagccacctgttggaatctgtagctgagccccatcagagccgggagaaagaactttctctgtgaggacaggggccgagctactctctgcgtggagtctgggggctggcggctgcgcttaacaccttctgctgtcacaggtggagatgagctgggcacagctaggaggggcggcgggaggcccagtgctgggggagatgta

SEQ ID NO: 27994 - DNA, 1055 bp, Homo sapiens
tggagacagaaaatgttgactgctagatttatacattggaaaagtactagtttaaaatatcagtaaacatttgcattctgattattcatgtagaatggaaatgttaggaatcgagtacaggccactgagttgtctgagctaccttttggcgtctggctgttcatttgcttagcaaagcagcccctcctttctgacagtttgacactgatgacccatcctccattgctcgaatctgctctgaaaactcccctctgtgggaggcttcttgttgacactcacttttggggagtaaagaaaggtgggtttgggtgattgcagggagctggggaccctcccctatgggaggctgcggctgtggagccctgaccgccctgtagccagcctctgcacctgggaggatggagctttcaggagccgttcttctgtttgttgttttgatttctgagagatggggatctgggttgcctgttaggattatttactctggtctctatgtgactttttccatggacttctgaggactggggtctctgcagtgcctggctttgtgaacgtccgtttttgatgcaggtgcaaatcatgccttcctcacccgctcaggactgcgatcgtcagggcacagggcaggcctcccagcagcactcccgtgtccagcgggctggcaggtggccggggtccttggcttcctgggcgtcctggccaccgcagggaggcttgttttcttttgctgggcgtgaggctggtctccccctcgtcagctggtggcgtgagatgcccttaccttgtgtttttggattcttgtagcctcagctcgttctgggtggcgctgcccagacggcttcacttgggacggcgacggctgttcagacggggactcctcagcgcacggtaccaggggcgaccaccacttcctcagctgccacggtaagagccactcctttccgtgccttcaaagacggtcaggcccgtggcgcaggtcagaaaatgcagccttgagacctcaggccggcttctgtcccagaccgctcactgcttgcttcacaaagcagtgaaca

SEQ ID NO: 27995 - DNA, 1049 bp, Homo sapiens
tcaggaggtttccattgttcttgtacttctctgcacttattaaactttctgtgaagaacacttctttctgtggtaaggaagatattaggacaattggaagccccagtgcggttctgttagctggaccctgacccattgtggtggttgtatgtgcacattggctggtgtggggttttggctgtgccatgaaggagtctccaggaaggtggggtggggcagagagaggggctgtgagctggggaggttgcgggggaggcggcggtggccacagtggcccggtcaggaggcagggtcccaggccccagcttcctgaccttaactgttaatgaccttcagggctatgccccatcccgtcaccacctggaattgcccatcttggttggacgaggatgctgagggtctttgggacggatgtcgtgtttcttgttgcaggtttgactgcttcctccctgactcgagggctgggtgcgtggagccggttgtgcctctgtatccgagagccctgctccctgtcatccttggctcctctctgcattcctcacaaagacctgggtggggacacggccagtgtcccacgtggctctctctggggagctctcagacagaaccctccgccctggccttggggtcccatctgtggggcggggtgggggccacacctgccacgtgtaccctgctgcaagtgcagagagaggagtagaggcaggaggggcggctgcctttcgtaggtcaggtgccgcccgtaaccacggttgattactcttaaattagttatgtcttgagacggagttgcacttctttgccttggcgtgaatagatgctgctggattatttgtccgtaaacagagctcacaggacccagaactgtgagaacctctcggaaacatggcgtggatgcagccgttggtgttctgagtgtcctcagatcatcacacagtgtctgactttgctttttggtacagtcaggctgtgatacaataaccagggaggcggacaagaaagtccccagtgacagcgcctcttatgtgctgtttgttggaagcaaacct

SEQ ID NO: 27996 - DNA, 1335 bp, Homo sapiens
gaagggtctattcaattgcccactttttttttttttgagacgcggagtctctcagtgttgcctgggctggagtgcagtggcatgatctcggctcactgtaagctccgcctcctgggttcacgcgattttcgtgcctcagcctcccaagtagctaggactagaggtgtgcaccaccacgccctgctaattttttgtatttttagtagagatggggtttcgccatgttggccaagctggtctcgaactcctgacctcaagtgatctgtcctcctcggcctcccaaagtgctgggattacaggcatgagccaccacgcccaacctgggttattttcttactgagttttgaggattctgcatacattctggatccaagccctttattagatggatgctttctaaagagtctgtccgttctgtgccttgtcttctcattctctagcagtgtctgctgaaaagccgaagtttaacattttgatgaagtccagtttatccttttgttcttttatgcatttcgtttctgatgttgtttctaaaatttctttgcctaaccctgggtcagagaaatgttctcctgttttcttctggaagttttaggttttacatttaggtctggatccattttgagttgatgttggtacacactatggggtgtcggtccaggggtttgcctgtgtctgtccagttgttccagcatgtgagaagcccgtcctcaccactgaattgcctttgtccatccgcgtgtgggcctgcttgtggactctgcacggccgtgttgatctgtttaactttgcaccaacactgtgctgtcctggttactggagctttttttagacggggatctcactgtgtcacccaggttggagtgtagtggggtgatctcggctcactgcagtctctgtgtcccgggctcaagcagtcttcccacctcagcctcctgagtagctgggaccacaggcgtgcccacaccgtctaatttttgtatttttagtagagatgggacttcaccatgtttcccaggctggtcttgaactcctgacctcaggcgatccgcctgccttggcctcccagagtgctgggattacaggtgtgagcccggccctgagattactggagctttctttttctttctttctttctttttttttttttttttttttttgagatggagtcttgctctgttgcccaggctggagtgcagtggcatggtctcggctcactgcaacctccacctcccggcttcaagcgattctcctgcctcagcctggcgagtagctgggattacaggtgtgcgccaccacgcccagctaatttttgtatttttagtagagacaggg

SEQ ID NO: 27997 - DNA, 1073 bp, Homo sapiens
tctcttgcctcagcctcccaagtagctgggattacaggtgtgtgctcccacgcccagctaatttttgtatgtttagtagaggcggggtttcgtcatgttggccaggctggtctcgatctcctgacctcgtgatccgcctgcctcggcctcccagagtgctgggattacaggcgtgagccaccactcccagcctgcattcccattctttaccagactgtcagctcctggaggccaggagtcaggccttccttaccccgccccaccacggcagccccaagtacaggtgattggatggagtgtgcatgtatgagtgtgtgtgtgtgtgtgtgtgcgcgcgcgcgcacgtgggcactgggccctggtgctgcagagctagcagggctcccttcgaagggcttctgtgtcagagtttaccaggagtcccactgtttaccttgttactccacttgcccaccgcccccaagtggagattatcacacagagttgcatgtctagatagcaaaacagtccttgcctccgagttttatcttgcaaaatttcaaacttaaaagaatgagtacaacaaacagctatgtacaccttccctagatccattaattcctaagtttttttttttttttttgagacagagtctcgctctgtcgcccaggctagagtgcagtggcgcgatcttgggtcactgcaacctctgcctcctgggttcacaccattctcctgcctcagcctcctgagtagctgggactacaggcgcccaccaccgtgcccggctaattttttgtatttttagtggagacgggttttcactatgttagccaggatggtctcgatctcctgacctcgtgatccgcctgccttggcctcccaaagtgctgggattacaggtgtgagccactgcgcctggcccatgaattcctaagttttgagcaaagcagttttaacctgtagctgacacaggggttggtatttatgggatgcaagcctgtgcctttgttgagtatcattggaggcttaggcaggtgctttatggcactcctgaatgtgagctcactgtcgggaaggagatctgtgttgga

SEQ ID NO: 27998 - DNA, 1433 bp, Homo sapiens
gttaccagttgatgggtatttgggttgtttctagcttttgattattatgagcaatgcttctatgaatgtttcctataaatctttatatgaacataagtttttctttgtcttgggtagataactaggggtgggattgctgaatatggcaaatgaatattaatttctgaaggaactccaaagtggctgtcctgttttgcattgtgtctcaccagcagcgcataaaggttgacatccttgcggaaagctggtatggtcagtcttgaattttagccttttcgatgggtgccgtgccattatgttgtggctttgatttgcatttccctagtgactaatgctgagcgtctttccaccagcttatttgctcatttgcctatcttctttcgggaggtgtcttttcaaatcttttgtctgtgtgttttaaattgggttgttagttttgtcattattgatttagtaagagtttaaaatgtattttctagatgtaagtaatttatcagatagaattgttctgtaactattttcttggtctgtgtttgccttttcttttagctgcatgcgttttaaagtgcaagttttcaattttaaggaagcccaatgtatcattttaagaattcattttgtgccttcttaaataaatccagtgtatcattttaagaattcgtcctgtgccttcttaaataaatccagtgagtcattttaagaattcatcttgtgccttcttaaataaatttttgcctaacccaaggtacaggagttttctagaatgcttatggctttagctcttactcaacccaattcaagttaattttgggagagttgtaaggtagggggttgagactcattttttctgtggttaccaatcatgccagccttatgtgttgaggagaccttcctttctctattgaacgatgctgctgcctttattgaaactcagtcggccacgtgtgaggacgtcacttctgggatgtgttctgtccactcatgtccttgtcttcccttctgcagctcagcactttccagcccatttagagggagtgttgatgggtggcaggagtcctccagtgctgctttttcgaaaacgttgagggctgttctggtcgtttgcattcatgtgtttcagaatcagttcgtcaacttctacaaaaaaagcctcttgataccttgatagctttttgtttgttttgagacggaatttttcactctttcacatcttttcctggagtgcagtggcacgatcttggctcactgcaagctccgactcccgggttcaagtgagtctcctgcctcagcctcccgagtagctgggattacaggcacgtgccaccacacccggctaatttttgtatttttagtagagatagggttttgccgtgttggccaggctggtcttgaattcctgacctcaggtgatccgcctgcctcagcctctcaaa

SEQ ID NO: 27999 - DNA, 1084 bp, Homo sapiens
atacacatactcgcatgcatacacacatatattctttttctcctattataactaatgtagcatatacgctaatttttaccttgacattttttcttaatataatctggagatcatctctggtagcattttattttaattgaaaaacttgaagttttatgtgtagtacactcaggaaattactctgaatagtgatgcttttctgcataattcaagcactaaaacttaaaaaaaataattttggaaggaaatagtttaaaaaatacatatatttttctctgccaaggcaaaaagcatataataagcacaagttagctctgcctgggaatattgggctggagacaggggaggctcagtcttaagggaaggccaggcagggtggtctttgcattggtgggaggctgaagcctgggttagctaacgggccctgcctctgtgtcttcccgtccagcctgcagtgggcttagaaatacttcctggaattatgtgtaaaccaggtacagtcgcgcgccacttagtgatggggatacattctagaaacgcatcattaggcaatgtcatcgttgtgcgagcatcgtggaatatactaacacaaacctggatggcacagcctgctacactcttaggctgtgtggtgcggcccctggctcctgggctgtaaacctgcatggcttgtgacgtgtacagttgtaacacgatagtgagtttgtgtatctaaacatagaaaaggtacagtaaaactaggggataaaagatgaaaaatggtgcatctgtgtagggcactcaccatgaatggcgcttgcaggactgggtgttgctctgcgggagtctgagaggcctgggacatgactgtgctgctgtaggctctggggcactctatgcttagggtatgcttagggactatggaatttataaaaacacagttttctttcttcagtaataaccttgacttactataactttataaacttaactttttcaaactttttgactcttttgtagtaacacttagcttaaaacacaaacacattatacagctgtgcaaaaaaatactttctttgtatccttattctgtaagctctgtcac

SEQ ID NO: 28000 - DNA, 1027 bp, Homo sapiens
agaaaaagctaagctggaacagttgtggttgcctggattgagggtgacgtagtgtggcattaggacatgttttaagcgaatagaaacgttttaaatcttgattgtggtagtggttacacaactgtatacatttgcccaaacttttcaaattgcacacttaaaataggtggattttgttttatgtaaactgtatttcagtaaagccgtaccaagtccctggggccatgttccttcctgttgcctgtagcgtggtgtttcggggaaggaaaggcagttatggctgtggttgtcatttgtgtctcatttgttggcacagaatcccaatcccaatgtctgccgtctgctgcacgggggcaccgcagagcgagggctttcagcggcctggcgggaaacagcctagttaactgcctcttaaatctgatgctggctgtggaactttgcatttctttaggagagaatcagtatttggaagtgtttgcgtgagagaaggaaaatttgttcgttatagttgtgaaaaagaggttactgctattcctgcagaggacacaaatgaggagctgtgtgtttgggacctgtctgtaccccgagcgtcagttctgtcttcccttcgtccaagcaggagcgtctgctctggattagacgagaaagagttttcatgcccgcctgctctttcgccacagatctgttgcgctctcctcagcgttcaccctttccaggagcaggtgtgtggcaatagcttatgtagccttacactcacaaacaaggcagttttctggcttttaaatagttattttctttctgagtagtacgtactcatcctagaaaatttgataaaggcaaaaaagtatggaaaagaaacgcatgctagtctgtattcctgtcaccaagggagaactgtagaaccgagaccacgggtgtgtggctcaggcagcatcgctggttcatcccacagcactcacggagtgcttgcacgtgcagggattctgcgcctgttctctgaagcttaaacccaaacaggcgcgctgtt

SEQ ID NO: 28001 - DNA, 1065 bp, Homo sapiens
cctgcggggctgccctgcaccctgccttccacttgacactgggggccatgggctgaggttcattttggacgtgatttccatggtgatttcctccctttctgaacctccttgtaacttttcgagagtgtgctgttgacttcagatgcttcccctgtgaggggtgaaaatgttttcttcccagctctgagctgctctgtgggaggggccctgcctggggtctccactgattccccagtgcccagggcagcgtgggtagtggcagaaaggggccttgctgggtgggtgcaggaggaagcagcgctgggcatgccttgttctggggggccaggtgtgggggttctgatctcttggggccaatgtgtgtgtgtttcctcggcagaggtcctttctgccgtgacttcttccttctgcctggagcctggcaggtggctctgggtgatgcctagatgcccgtcctatcagcagcaggggtgtgccctcccgggcgggcctctgctgttccggagccctgtggctctcatggagcctgcactgggtttattgaactctcttgtccttctcttctctttttattggggctttgaccatttaaattcctttactcttgttttggtgggtcttgctggggaggggtgggggagagaggagactgtgctgccagcaccccgggctgctctcagcgggtgggggcacctgtctggaatctccatgtacaagcacaagcaggcattgtggcgttttgggaagagtcgtcagaagttgcctcctatggggcagaggtgccaggaggagactcttgctgtgcccaggtccagactggcaggagaagggagcggtgagtgatgggacatggagtggtccatggggagcagagccaggccgggaccctggaggggaggatgatgagaggccgaggataggtcatgtgggggaggagcccttccttctgctgctgtgccctggtcgctgctgtgcagaaccttctggtctgcagtgtcctctgggggctctgggtgttacctgttttgactgttgtggcctcatcttcatggaaggttgtagaaa

SEQ ID NO: 28002 - DNA, 1026 bp, Homo sapiens
ccacagggcacacacgggctggggctggggtgtggagctggtgcggggcagggcaccctggggtttgtcgatctcagctgactggaggcggctggttccagatggcagtgctgggggtcaggttcaggaggagatggagaagtaggtcactgactgtggtgagggggtcaaaggacagtttctttgttttttcctgtttgtattttaaggagagatcttggagccatgctcaatagcggaaacaaagtgcgccccatttggattcgtgcttcgggtcggtgggagttaggctggatgaggatgggtggggcgggagggggaggttgagcctttgacatgcttcatgtcagccacttcatccaggccactgtcatttagcctgcaccccgctactgcaccccacttggagctggttggcctgggcacgtctgcggtgctcggtggccatgctgtgctgcggggatgcagggagtccacggtgcaggacgcagaaggggaaggtggccttcctgtcatctctcttccttgtggttgtggaggtgacatggccctgcaggggtttggtcgtgtgtctgcaggccctagagcctggtgggaggcggcaaccttggtttgtccaggaaggggtggcagatatccagaatggagcatgtcctgtgggtgcaggttcctcacgggtggatctgtttgtcatcactgcatccctgctacccgggacgcccctgaggtattgatggcctggccagtgatggctgcaggaggcttggcaggggcagcgttgagggccacaggccacctgccatgaggttctgaagtggtgccatggcaggggccaggcccctcagaggagggactgtggggactgagggactgtcttgatggctgtgggggtcaccgagcggatggggagggagggtggcctctgtggatcagggctcttggtggtgggaaaacaggtctgggacaggcccagccctgtgtcctatggcggtgagaggggtgggagtgaacggtggatgggactca

SEQ ID NO: 28003 - DNA, 1026 bp, Homo sapiens
ataatgtgagttttcttccacttaagggataaatttgaagaaagcttttataaattgttggttgtaagtgagttgatcaaagcataattagcagctgtgtttgaggatcttgaagcagaggtgtaacagggctctggagaagcttgcctgagatttggggtaatttgcagggttcccgaagtgctttgcttttcttcttcatggtgctcagtaggaacctccaagccctcgatcatccaggaaacagttgctgtttagggtgttcacctgtggtgcccggctcaggcagcgtgatgggggcgtttacttaatcaggcctttgatagcaataaagcagttaaataaagggggcttttggctgcaggcccttctgtgccgagtgctgtgcacctgggcttcctggacgcttctgcttccaggtgggcctgcggttgctatggcattgtggtgtcagctgcaaacacgtacacagctgttctttccaattcttgcgtggaataatgaagtagaataagtgctgtcaagttatgttcgaaaatggggtgcttaatatttccatggttggaccatgaaagttttgagtgaaaacttttgatttttacatatctcaaatgaacatttgcaccaaagatgtacagctttcgaaaaacaaagagatacatgttgtccaccatgaggcccctctcccatttgagaaagtacctggtgtccgctgttggtcagtccgcggtggtcccaggctcttctccaggcctgccttctgcctggagcaggccatgctgcagtgtgcaggatgatgtagtgaagtgcccccagcttctcccaccgtgggtgtcatgttgtggagcagaagttgtcgttgggaaccgcgtgtgagggcaggagaaattgtttgttgggagccgcatgtggggacaggagaagttgtctgttggggactgtgtttggggactggagaggttggccccccgagccccattgtctgtggcctggtgtgtagacctgtgtccgtccttcctgaggtct

SEQ ID NO: 28004 - DNA, 1083 bp, Homo sapiens
gtaacttataaaaataactcttgcttggttaataactcattctcattacaactcagtcttgcaaactgaggaggagccgggagtattaggggtgggcagggttctcaaagctgcatgtgggtgtcaagtggagtagcagacgggtggcaattggatggggtgtgaaagggcctgcccttcccagccttccctccgtggaggtcttgggtgggagaagggaggggacagaggtttcaccctgaagtctttaaggctaagccttaggcccgagtgtttcagccccatagtgcacaccgggtatgttgaatttggtttaggtagctgtcatgatattctttgtcaggacagtgttgtaaagacagttatgttaatgtaattgtaatttgctggtttgaggtgccagagtttagattttattcactgaggaaaaatgagaaaactcagtctttagtgagattgttgcagatgacacagttgtcccaagatcacggaaaagcactagttatgtacagcttaggatagtcataacgtcatagtcaggttgtgattacagctgaaagaagaaaaaggtgatttgacacccacattagcatgttggtaaattgttgagagatcttttcagatcggtgtaaggtaaagaagctcatttctaaaggttatcttttggcctggcaaattcacattttcttcagtgtatcttggtctattgtgctttcatgcagaatttactctccttttgctctaagatttggcccaagtgtagattcccattccaggacagaaaagcactttctcaccatgggccttgatcccttggcctagggggcgtgtgcttgctgcatgttttaggatgagtactcccaggtgaatgtgtgtctgtgggtgctgtctggagcattggttcccatctgtggggaaagggggaaaatgtccactagcccttaatcgcgctgttgggacgggttggatttggcgagtccaggcccatgctgggtggcggcatgcagacggccacccctgaggttgcaggagctgtgagttctggtggccagtggtggcagccagtgctctggcacaagggac

SEQ ID NO: 28005 - DNA, 1035 bp, Homo sapiens
gctgctacccggagtacgtaccccccaggacccaggttcagatctgctcctactgctcgctgcctggcagtagaaccatgtatcacttttttgggaggatagggtggggtgaggggacagggtcttgctgtctctgtctcccagccgtcatggctcactgcagcctccaccttccaggctctagcgatcctcccaccagcccccacagtagctgggactacaggcttcagccaccacacctggctaatttttgtactttttgtagagacagggttttcccatgttgtccggctggtcttgaactcttgaatttaagtcatccacccacctcagcctcccaaagtgctggaattaacaggcatgagccactgcacccagcactcatatcactttcttacgtggtttgtggatcttaattaaaggttggtgttcgaggaagagacattgttgttcttggtgtggagaagaagtcagtggccaaactgcaggatgaaagaacagtgcggaagatctgtgctttggatgacaacgtctgcatggcctttgcaggtatgagtcggtggggagcgctgtcttactctctagagtctcagcgaagaatagggctttggagattaacttgggtgtgtgggctattgtgagccatataaactgagtaaatgaaaatcatttaaaagaattggatttggacttttaagttggctagtttctttggtggcctctctctgccatagcaggtgaaacaaatggctaaatggatgaaaacacttctggctgctgcgcaatttgacctccactgttatttttctgtatcaatcagttacaatctagagaaaggctggactttctagagctaactgcatctgtggcatggagaggacagaaccacgtcctgccatccccagcagtaaaaaggaccacactggtggatgcaggccatgcctcgccatgttctcagcgctgttttggtcttgctcatttctcctctcagcagatgcaatctaggaagatctcaattcatgtaatgaaattagg

SEQ ID NO: 28006 - DNA, 1050 bp, Homo sapiens
tcctgtagatccaggtgttcctgctggggggcagccgcaagcgtgtgctggtgcgtgtggagcgggccacggtgtacagcgtggagcaggacaatgatctggagctggccgacgcctactacctggggggcgtgccgcccgaccagctgcccccgaggtaagcactgtgcgcagctggggctccgaggccaggctgttggggcggtaggctgggcttggaggtggcgccctgacccgcatccccgcttccccacagcctgcgacggctcttccccaccggaggctcagtccgtggctgcgtcaaaggcatcaaggccctgggcaagtatgtggacctcaagcggctgaacacgacaggcgtgagcgccggctgcaccgccgacctgctggtgagcagccctccccgggctgggggtggcatctgtggacatgcaggggcacccgcgggcactcagggatggcctccccgcaggtggggcgcgccatgactttccatggccacggcttccttcgcctggcgctctcgaacgtggcaccgctcactggcaacgtctactccggcttcggcttccacagcgcccaggacagtgccctgctctactaccgggcgtccccggtgagacctcacacccgtgcccattccccaccccgcggtggccgtcggagcagttgggactggggtgtctggaatgagtctgggtccccaggccggccggctgacctggctgccgtccccaggatgggctatgccaggtgtccctgcagcagggccgtgtgagcctacagctcctgaggactgaagtgaaaactcaagcgggcttcgccgatggtgccccccattacgtcgccttctacagcaatgccacggggtgagcctggccgctgggccctcatcgtgaaggtctggagggacgcccgcctgcacttgcctggacctctgtctcctctgaggtgggggtgggcagggtggggaaaaaccgagcctccggcctcccgccccccagagtctggctgtatgtcgatgaccagctccagcagatgaagccccac

SEQ ID NO: 28007 - DNA, 1021 bp, Homo sapiens
tgaccactgtgtggtcctgctcctggatgacctggaacgggccggcgccctcctccccgccattcacgagcaactgcgtggcatcaatgccagctccatggcctgggcccgtctgcacaggctgaacgcctccatcgctgacctgcaggtactgagcgtcctggccttccctccccaacccgggccagtgcaggccttcacctttcgcctcccacagagccagctccggagccccctgggcccccgccatgagacggcacagcagctggaggtgctggagcagcagagcacaagcctcgggcaggacgcacggcggctaggcggccaggcaggagccccaagaccccccagggccccgggaggctttcacctgtgttccccgcggttcgcttgtcctcattcagcagatgttacttcatgcctcgtacatgtgtcagtgcaggggacaggagctcgagagtcttaggggttgaccaagtcactgaattactatctaaactacctaatacatttgtttacagtgtataatatcactcaaatgtctttttttttttttttttttttttttgagacacagttttgctcttgttgcccaggctggagtgcaatggctcgatctcggcttaccataacctctgcctcccgggttcaagcgattctcctgcctcagcctcctgagtagctgggattacaggcacacgccaccacgcccagctaattttgtatttttagtacagatggggtttctccatgttggtcaggctggtcttgaactcctgacctcaggtgatctgcccatctcagcctcccaaagtgctgggattacagacgtgagccactgtggccggcctcaaatgtcttaatgagtaactatttcattaaattgacaggaaataacaaatggcaagttataaccaataattttaggtaactaacaagtgataaataacaagtcatcagataagagagttaaatagataaggggcccctcttccctgggaccctcggcgctcccccagac

SEQ ID NO: 28008 - DNA, 1050 bp, Homo sapiens
ggggggtctgttctaggctccctgttctgtcccattgagtgtggccccactgaggtgccatcctggacccacaggggaacttccggcatacggagacgcgcaacactgtgtcccgcgaggagctcatgatggtgctggccagcctggagcagctgcagatccgtgccctcttctcacagatctcctcggctgtcttcctgcgcagggtggcactggaggtggccagcccagcaggccagggggccctggccagcaatgtggagctgtgcctgtgccccgccagctaccggggggactcatgccaggtgaggttaggacagcaccagactgcgaggcggctcacctgtgcacacccttccctccagcatcctccctgtgttcccttccttgctgcctccacttcctgtcaccctactcacctctcttcctgcccctgcttttcacaggctgctggccaactcatgggcctgcctgtcccctgctgcctgtctgcctgcccctcgtccgcctgcctgcccctcatccgcctgcccctccatgcacacaccctccatacccctttcccacctaccccagcccccaccactgggtcacctggacatcccccaccgaccatcctggcgtctgcctgtcattctgcccatccctcgcccactgtgtgtctgtccagctgctaatctgccctgctaatctgtctgtctgctgtaactttgctccttctgtatgaggaggtttgtggttgaatacctcctagaaggagtggaaagagtaggccctggtccacatggagtgggtggtcaccagccccaaggcctggtcattcccgagacaggacatccgtgtggctttgagagctatgtcctcaaacagcagccaggtgctggcccacctccagccggccgaggccaggagttcctgaccagcctctgacccagcggtgaccatgctccacgggttcccagtgcctcgtgcctgcaggatccctgagggtctgacttgtgagcttgcagggtggggcccctcgtcctctcaatcgctgatgccacctgc

SEQ ID NO: 28009 - DNA, 1067 bp, Homo sapiens
gtgagggagctgagatgatgtggcagggtggttgggtgggcgtggcgcagtggcaccgtggtccaggcccgtgccaaccctcacctccccatgtgccttcccagggcaaccagatgagcatcacattcctggagccggcataccccacgcctggccacgttcaccgtgggcagctgcagctggtggaggtgaggggagctggcttgggcacccaggtccctcatggacctcagctcatctgggaaggccggaaggggtcccagtgctgctgtgcccattctccgtggtggaaaacagcccaggagcagaagcggggtgggggctggggaggtccccacacccattgtcagatatcttctgtgctggtcaccctggggggtgtcatgctgtcttcccacctgctttgtgagtccctgatccctgaggggtgagcagctgctcagtagctgttggcttcctccatgcactgcctgttagcatcttttgcccatttctctttgacttgcaaatctttttccatccttttagagttctttgttattcttggtgcttaccctctgtcagacttcagagtaacaaccgtcttctcccctctcacagctcatctggtttttctttgtttttttttttttgtttgtttgttttttgagacagtcttgctctgtcgcccaggctggggtgcagtggtgcaatctcggcttactgcagcctctgcctcccaggatcaagcgattcttctgtctcagcttcccaagtagctgggactataggcacccgccaccacaccctgataattgtgtattttcagtagagatggggtttcgccgtgttggccaggctggtctcgaactcctgacttcaggtgatcctcccacctcagcctcccaaagtgctgggattacaggcatgagccaccacacccagcctgagctgtcttctgatgaacggccttatagttaatgtacttgaatttatccttttttccttggcagcaagcgtttttgcatcttgtttaagaaagtatttgtcactacttgatcagaaaggacctgcctatgttttcttct

SEQ ID NO: 28010 - DNA, 1088 bp, Homo sapiens
gttaatgcttgcagctaactaggaatctacgtaagaaataactaatgaagcgttttgatagttggcctgactttgttgcacatcactgttttcccaaacacgcctctcccttgttggaatttttttttttttttgagacggagtctcaccctgtcgcccaggctggagtgcagtggtgcgatctcggctcattgcaacctccgcctcccaggatcaagcgattctcctgccccagcctcccaagtagctgggattacaggggtgcaccactacgcccagctaatttttgtatttttagtacagacagggcttcactatgttggtcaggctggtctcgaactcttgacctcatgatctgcccgcctcggcctcccaaagtgctgggattacaggcgtgagccactgcacccagcccttgctgggatttttattattttattttctagttagtgttgtgtaaaagtgtaagaaaatgagtttgtggagagggaaggtttgccaggaggggcgtactggggtctgcagggcatctgagactcccctgcctgtccccaccctccagattgtgactgcagcgcggcagggacccagggcaacgcctgccggaaggacccaagggtgggacgctgtctgtgcaaacccaacttccaaggcacccattgtgagctctgcgcgccagggttctacggccccggctgccagcgtgagtcccctctccccgctcaacctctacctgcgctcgaggtggacacctgaggcctggtgcctctgaccaagcatgtgggccaccctttcctgcagcctgccagtgttccagccctggagtggccgatgaccgctgtgaccctgacacaggccagtgcaggtgccgagtgggcttcgagggggccacatgtgatcgctgtgcccccggctactttcacttccctctctgccagtgtgagtggtgcctctccacgtgggcgtgggtaggggaggcccgtgggcctggcctaccgtgacacccgctccgctctgcagtgtgtggctgcagccctgcaggaaccttgcccgagggctgcgatgaggccggccgctgcctatgccag

SEQ ID NO: 28011 - DNA, 1071 bp, Homo sapiens
gaaccaccatgcctggcacgatattgtgtcatttttagctgcactttgactactctgtaagcttgaatcttcttgacttttcgagtgctttcttttttttttttttgatggagtttcactctagttgcccaggctggagtgcaatgctgcaatctcagctcactgcaacctctgccccccgagttcaagtgattctcctgcctcagcttaccatgtagctgggattacaggcatgcgccaccatgcctggctaatttttgtatttttagtggagacggggtttctccatgttggtcaggctggtctcgaactcctgacctcaagggatctgcccgcctcagcctcccaaagttccgggattacaggcgtaagcctctgcgcccagcctgtatcacctatttcttataagttgtgtgtttttctcctgatgggtcatttgccccttattttgggggggagcttttttccgtgtcctgattttgtaaattttgaggtgaatctgcccacgttgttctaccgaatctctggctgagtcggatgtagatgctcctcccttacccaggaattctcttgtctgctggttctgtgatggtttttttatgtggaaatgtttagtttttcatcaatagtgtaaaccaggggtcaacaaactgtcggaaaaggcccagacggtaaatgtcatagactgagggccgtgtggtccctgtggggaaactcctcagctctaccgttaccagctgtagcttgcaagcagccatagaacgcgtattcatgagtggggttggcggcgttccaataaaactttatttacaaaagcaagcgaggagtccatagactagtttgctaatccctggtgtaaactgacaatttatcttttcgctactgggccatagtaagcactcagtaattacctgtggctgtacagtattcactttcaatgtgttcattacaatgaattgtattgtctttcctaatggggacacagtgttgaacatcaatattttattttgtctaaattcacaagtgagattgttttggttttgtaaaatacttgggaaatcatccacactt

SEQ ID NO: 28012 - DNA, 1046 bp, Homo sapiens
ttttttttttttttttttttgagatggagtctcactctgttgcccagactggcgtgcagtggcacgatctcggctcactgcaagctccgcctcccgggttcatgccattctcccacctcagcctcctgagtagctgggactacaggcacccaccaccacgcctggctatttttttttgtatttttagtagaaacggggtttcaccatgttagccaagatggtctcgatctcctgacctcgtgatccacctgcctcggcctcccaaagtgctgggattacaggtgtgagccactgcgcctggccatgtgttcattattaattcaagaccatccttggccattctttctgactgttggctccctttcctacctcttttcccctggagtccccattagatacaggagcaccttctggtttccttctcataatttctatttcctctctctttatcttctgaggtgtcttctggatagcttcctttgctcctcttccacttcactaaatctctcttccactgtgtctgtctgctgtttagcccatccattgagtctttaattttatagtttcatttttcatttctagaagttctgattggttctttttcacatctgcctgttttccatagtgttattttttttattattatgttttagatttcttttttattttattttattcttttttgagacagagtatcacactcttgcccaggctggagtgcagtggtgcaatctcggctcactgcaagctccacctcccaggttcgtgccattctcctgcctcatcctcctgagtagctgggactacaggcacctgccaccacacccggctaattttttgtatttttctttagtagagatggggtttcaccttgttagccagatggtctcgatctcctgacctcgtgatccacccgccttggcttcccaaagtgctgggattacaggcgtgagccactgcgcccggcctatgttttagatttctttatgaccatttttaacattcttccctggcttctactagattactccattttgtgaggttct

SEQ ID NO: 28013 - DNA, 1108 bp, Homo sapiens
ggctcctggacccccagcagggagctggcagggctcatctagtgcctgcaaccgagcagcccaactttcatgcgcttggatttgggacccgcccttgccttctgtggggccttactgctctgtccacgctccagtttacaggggaggtggggaggcgggtggagctcagacaggacaaaggttcactcccattctcacggccagtgccgagcagaggcgggagccctgggccccttcggatgtggctggtgggtctgaggggaggagtggcacagtcacctgagccggaggacttgggctgtttgccaggagctgtgggccctggggacccacccaggcacttgttgctgccagcacagcttcaggtgctgagctccagcagagctaacttgtcctgggaaattaagtgccaagtggggacgcagctcgtgacagcagggagtggaacccaccaggcagccaaatgggcctccaaggagaggaagggcgcgggagccggggcttgccttggcctgcagggaagacattgccatcccctgactcaccgcacctgggtgtggactgagctcagctctccctgcaggtgcaagcaggggtgactgggaatctttcatggaaccacagcctctgttaccaggacctggtcacccaccagtgtcccaaaacattagcctgcccatgttctccctgcaccctttacccgccaccccacctctcctccagggaagggggctccatgtcatcagccagcaattttctgcctctttacctccaccatcaccttactcccacccaaaccatcacccccactaccagcccactcccaccatcatcacccccaccatcaccgtcatcacccccaccatcaccgtcatcacccccaccatcaccgtcatcacccccactcccaccgtcatcacccccacccatcaccacccccaccatcaccatcaccatcaccatcaccatcaccatcaccatcatcacccccatcacccccaccatccccatccccatccccatcccctgggttgctgcttcctccttcctgaaatgcaccctgtagtttttctattccatgacagtctatccggaattgtctgaaaac

SEQ ID NO: 28014 - DNA, 1040 bp, Homo sapiens
agtctctgccgccgtggggcctggggggagaggcaggggggtccctgggcaggccctccgtgaccaggcttctgaaggtctccgaatacccagccctgccctcacacccggctgctgcggtcatgactgtcagacgaggacccgaaggctcatggggatttattggctcctgtccctggcgtcgggcacagccaagtccaggggctgtggcgccaggaatctctggtgccatctcttggctgcctctggatggcttcatgcaccggcagctcccgtggtgacaaaaggggcctggcagctcccacctcacctcctgccagcctagccacctgcgtcaagagtactggagtcctagcccggatgctggccgtccctggccccgtgccaccctgaccagtcatgctggtgggagtgggtgctcctccccaatagggcaggcctggtcacgtgtcccccaaaattccctggcctgagaatgggggaggggcgggtcagtgatgggcagtaggcgtctgtccccaaggaagggggtgaggatggtcgtcgaggggggtcactcgcactcaaagcgtgcaagggagagcggtggggggcagtgcagtccaacgggccaggccccttcagccagtgagctgtggtctctgtcacgcggcctcttggcctgtgggagcctcagtggcaaggcccggagacgtcaaggggcccgggcaccgcggggacccaggcttttctggtgatccagcgccctcccctcccgccattccccgcagcctccaagagggactgtctggagcggttcgggccacagacgctggagcgcatcacacgggacgacgcggccatctgcaccaccgagtactcacgcatcgtgcccctggagaacggagaggtgggccggggaggggcagggcggtacgggggctggagaacggagaggtgggtaggggaggggcagtgccgagcggggctggagaagggaaaggtgggcccgggaggggcagtgctgagcaggggctagggccacactggcgtcaccgcat

SEQ ID NO: 28015 - DNA, 1046 bp, Homo sapiens
gctgactttctcaaactcagattgaggcctctggggcctcaatcaaccccaagcctgggagggcgcctttgtgtggacaaacagcagatctggtttcctgggggggcgggggagcagccaggacccagctctgccccctctcctcatccctgccccggctcccagcactacccctcccctgccaggatgcaggccaggattctgctgggagcctcctctcttccccactcacccatgcaggacaggcccccagcagatggcaggcccgggacagaagcggctgccaggctgtgtgtgtgagccattactcctcacggtggccccaggcaggtgcagccttatccccactctttggatggggacattgaggctcagcagttactgtgacttggcctcttcccaggactcggaagcagcagccaggaggcccaggcccacctgccgctgtccacacgtccactctggggccggtccccacaggcctccggaacagcttaattctgtctctctggagaccctaatccagaaggctgtgggcaagatctggaggtgggggggggtctggccgcctggatcccggccctgacggtccttctgtctgcagctcccccttccgccccctggcttgctgcattttgtccaagcctctctggagcccctggcagggccagcagggaggggtagccatgctttgccttactcctgccccttcttgctccctttggctctagacacattgatccaccttgtggtttactgtgagactcttcctgcccccagggctcgttgcactggcaccccctctgcctagagcacacccccccccttaccacgtagtgctcagacgccaccccgctagagaggcccaccgagattttcccacccaaggcagatgcccctctccaccctggtcttcctcttgtccttagcgccgtgagcagctcacatgagccacatcccctgagtcggaggagcagcaggtgcttggcgcatgtttgctgagcaagtggatgaggggcgcagaggctgggcgtggaaccagctca

SEQ ID NO: 28016 - DNA, 1044 bp, Homo sapiens
cccccattccgcctgtttcccctggggttcctggcccctggagctcactagggctccccagtctaggcctgaggcaagcaagtggtaagaatgggggtacggggtagggggaccgcaattaaataagattaaggtgacacgtggaagcgtaggtgcccggcctcggggtggacgctgcagccgtgtgccactgcatgtttaccccgggcgatgccttttctggggctccccagagatctgggggcaggagtcctggactctgcctcacaccccagcaaggtgctgggaggtgccctgacaggggcccccacttgagggaggggatgggttggggtcctgggagcaaccttgttactggaccggccccttccctgccaagttgtaggtggttagatcccagggaggtcccgggccccctccctgggagttcccagggccccctactccttccctcctaaaggctggcagggtggaggctcccctacacccagctacacaggcccaggccggggcaggggcatccaggtgggatcctggactctggactttcggtcgccacgcagaccaccccacagagctccatgaggcccccccatttctgagcaccccaggtttgcctgcttgtcatggggctgggcccgcctgcacagggcaccagcccaagcgcttctccttgccacttgggaagaaaaggagctgggtgggcaagaggagcctcggggagcatctgtggagagcccaaggagcccggatgctgaccctctccagatctccgacactgggcaccacctaagcctgtctgcaccccctctggcatgggggcccacctgaaaccccccaggtgtgaacccagtggcagcctttgggtcgggcctcggggagtgggcaggcgtgaggcatgtcacctgcacgggtgacttgtctcctggagccctaaggcggtggccatgctcctggcatggtgcctggcctggaaggctttgaagagccccaagtctgtggagggcctgccccgtgagtggtgcctggggctgcgtggcctgt

SEQ ID NO: 28017 - DNA, 1048 bp, Homo sapiens
ccaccattccaactgacacagtgggagcggcgccactgggtgccagagcccggccgtccacgtgggctcaggtccccactctgtctcttaccagccatgtcatcttgggcaagttgctaaacagctccttgcctcaatttacccacccatgaactgagcgtcagaatgctgcctccttcctagaactgtgcagatctagtttactaataagatgcttacaaaaaaagaaaagagaaggaaattacagagaaagatctgtagaagaacctgctgggaacagattttaaagcatagtggagagaaacccatcattcctgcagcgaccagaaaatcacggaggagccaggccagccggcagcagcgtcagcctccctgctgcagctcctctgcgtcctgggccagaggatccaacggtaccaccaggcaggctgccgcggggcctcaggcttctgctgggacccccacgggcctccaaatgaagtcccaggcatgcaaatacccaggcatcccctggtaattacccgtgggaaggagcttccagaaagacacacaggctggtcctcagggcctccaggcccagccttgtaggtcaggacacacaaacacctctctggggacagtccccaaatctcctccttcactggcttctttccccagtgtgggccctgcccatccagcctccgctgggctcctcttggggcagtctgtccgccgtcacccatcacaggccagcactcacctgggcctctcgggacagccggcgtctgccacacaccccctcagcatgcagctgggtgctctgcccctcccactgccctcagagcctgctgcctaccccagccccttagctcctccttccccacccaccccactgtgcaggccagcccaccgcatccccagcccttcctggtcccatcatccaagtgctctcctctggccagctgctcacccaccttctgcagccatccggctggtcccctgcccccacctccagctgggactgggcaggtgcacagctgtgtctggtgatggcgccaatgtgaggcac

SEQ ID NO: 28018 - DNA, 1072 bp, Homo sapiens
gggtggaaggtgctgctgcgagccagccggactcgggggctgctttggattgggtgatgttgggtggtcgagggaggcgcccaaccaaggcccaatgatgacagggagctggcagccaggacctgccggctgcagagtctgaggagtgcctgcctgccagccagtgttgctgggcagggcaccggggcaggctggggcctggtggaccgctagtcctgagggttgggggcctcggcagtctttgggcagtgagtgacatgacccatatcaccctgctgctgggggacactggatgctagggagtaggagctgggctggggtgagagtggaaaccaggagtctgcagtagctggaagatgtggcttgccgggcgatggctgccagggggcggcgctggggaggaggaaaggcacaaggcttcttgtgtttgtggcggtaccagttgggggttgtgatgggaaaaaggcgtcagggtttggcctcggtggctgggtggatggggctgtttactgagagggaagactcagagaagcaggatctcggcattctgggggcgtcaggtggggacatcgggaggcaggggatagataagtatggggtgagggcagggcggcgtcagccatcagtgattcacttctgttcgttttctagtgaacataggaattacagtgaacacctgtacacccatgcttcagtctcagcaatgaacatttaccgtatttactttgtacacacgcacaatttcaaagacaattatagacacgaaccttcatctctaaatatttctacataaatctccaagacaggccttccacagaatcccagtgccatgatcatgcctccccaagataataagtctttttcatatcctctaatgcacagactattcagatttgcccaaaatgttcttttattgccactatacctgcctaatttttttattttaatgtttattttgttttgttttatttttttgagacagggtcttgctgtctcccaggctggagtgcagtaacatgattatggctcactgcagcctctgcctcctgggctcaagcaatcctcttgcctc

SEQ ID NO: 28019 - DNA, 1032 bp, Homo sapiens
acccaccccaaaaaagaaagagaaacaaaaatgcagataagtgtcaaatagtctgatctggacttcaaatatgcccagcaggttaataagaaatatacttctgtggactgggtgcatatacttctgtggactgggtgcatatacttctgtggactgggtgactatacttctgtggactgggtgactatacttttgtggactgggtgactatactgtggaccgggtgactgtacttctgtggaccgggtgactatgcttctgtggaccggtgactgtgcttctgcggaccgggtgactgtacttctgtggaccgggtgactatgcttctgtggaccgggtgactatacttctgcggactgggtgaatgtacttcagccgaccgggtgaccatgcttctgcggactaggtgactatacttctgcggactgggtgaatatacttctgctgactgggtgaatgtacttctgcagactgggtgactatacttccatggactgggtgaacatacttttgtggactggttgactatacctttgtggactcggtgaatatacttctgcggaccgggtgaccgtgcttctgtggaatgggtgaatatacttctgcggaccaggtgactatgcttctgtcaaccaggtgaatatacttctgtggaccgggtgactgtacttctgtggaccgggtgaatatacttctgtggaccgggtgaatatacttctgtggactgggtgactagggaggagccggcgtgttagcgccagcatatgcagtccctcaggacagccagcctgccgtgatcctgtctgtgtggtcgtggcagtggcctgcagcaagccatcgtggttggctggaactagacgtgtgatttgaatgcaggagttcagtcagcccctcagtggcctaaaaggaagaaggtgtcagtcacagggctggttctgggccctgccttggggggaccccagttccagggttctgggccctgccttcaggggacccgagttccagggtcctgggccctgcctttgggggacc

SEQ ID NO: 28020 - DNA, 1029 bp, Homo sapiens
gctggtctcgaactcctcacctcaggtgatccacgtgcctcggcctcccaaagtactgggattacaggcttgagccactgcgcctggcatggcaatttcttttaaagggatctattcaaacttgctggggcagggtgcagtggctcatgactgtgggccgaggtgggaggattgcttgagcccaggagtttgaaaccagcctgggcaacatagcaagtccccgtctctaaagaaaaaccaacaatactagtagtggtggtgttgcacacctgtcgccccagctacttgggaggctgaggtgtgggaggatcacttgagcctgggaggtcagcgctgtagtcagctgtgatcatgccactgcactccagcctgggccacaaagtgagacccatcccccaaagaaagaaaattaaaaagctagctaatatctttttatgatacttttatacacatggactaactgagggccttcctcaccctactgtgaattatgaagggcattttgctccgacatttatttaatagacatttattgagtacctgctatgtggaaagccttacaccgtacgttgacagtttgaaagttggacttctagctctactgcgtagacttgtggttagagttcagtgagctgatgtgtaaagagtgtttcgctcaatgtctagaagtccaaaagcacctagtaaatgccagctgctgttttactggcaaagtctctaattaaagttctaaatagacgggtgtgaaggtgagtaacaagggccatattgaataagttgctcagtatctgcttgtttaggactttgcatgttactgaatgtaatatgtaaaagtttaaaaaatagtctaataacaagactccaattgtttatctctacaaagaccaagtttcagaatattaacagagtgttgggccgtgatcctttctgaatcagggccccttggagaaagctgtgcacgagttcctggtagggtatttagcccgtgaagggcaagtaatatcagtcttgaatgacagagttatctgc

SEQ ID NO: 28021 - DNA, 1048 bp, Homo sapiens
cgggaactagtgatcactagctcaagaactgcaaatgagacaggaagctgttcactgtgaaacagtctcttgcttgtcgtgtatttttcgagtacttctgaagtgtgaagtaaaaaaatctggctaatttatttgtacaaatacactttgataattttttatattttcataaacttttacagatgtaaaattaaagaacttcacttgttctttggagtctgttattccattgtacgtcactacagatttttcactttatagcacagattttttaagttaagaaaacattgagaatgtatcagtttgagatgtttggtgttgaaagccaagtgtccataggttaaattacattaaagtaggtgtcacgttccaacatctagtacgatgagaaggttttgtttgtttaacatataaagcaaatttttctaatttaaatacacaaatgtaaaaatcaagtgtgtttctttagtttacttgatagagattcctgtacattgtattttatattgcggaggcttatatcactgtacatgagaacatggaacgacctaggttttgttactcgcagtagaataaacagctacaggaagtttctgtctcgggtcttcatcagcctttttctaacgcggagaagtttggggtcgtgcacggacgccctggccacccagtttcttgttgctggtttgcctgggcgtgggcaggagtgccctttggacccctccctgaactcatgctgagcccagggtgagaccggccgggtgcgggtccccacatccttccgtcacggggcagctgtctcgctccctgtggggacccagcaccatccagctctggagacgatgggcaggaaggtcgggaggagggactcacccccttcagaccctctcctggggctgagtgggagcccgagaccactgcaacagcctcaactgcggtgaaggagtctcatggttggggagtgagccccgaggccccagcccatccaggctgcagcagagtgtgcacccgccgactgcggggcgtgctgctgctgaggatgcaggtgggc

SEQ ID NO: 28022 - DNA, 1079 bp, Homo sapiens
atcttggcctcaggtcagagaagactcagtgcccagaagcccaaggctcagccagaaagggaggtgacactcccagcggccctgctctttcctctagacagactcgggagccagcacacaccgggaagtggctccatcagggatcacttctctaacagggatggatttccaggagacttaacaataatgacatagaaaactatttctagaaataattattttaaaatctgcagctcaaattgtaataggttcattcatctttggcaagctattttgtgtttgcacgttccttggaaagtactgtatttaaacgattatttacaaatagcctaaaatacatctttgtcaagggttgagggtgattccaggggccacgtgctctgttagtgaccagctctttcatagccccttagaagaagctgatgtgacttcagttaggggttagtatctgatgcccaactgaagtgtctccgtggccatgcagtccccagaggattggtgttctctcaaagcgggtgtgtggatcacacagtgtcctctgaagtgcttcgtcataaaggcaggtgctgtctggaccctgtgcctcagtgccctctgtccctgtcaccaggcctcggcgggtgttcctgccatagctgtgcagggtgttcccacccacacccctcatgccgcaccctagctagctggggtcctgtaggggccactccacatcttgggcgggacttctgtcgccccaggcacagcccacgttcctactggagcccattcttcacagctggagtgggctcagcctatgcctgtgttgtggaattatatgtccataaagggattggttggtatcagtaatttcagggttaaatatttgctggcgtggtgcattaaattattttagtgccagataaatttttaaaagcaaagtgctttagtgtgtcccctcaaatcctacttgggataaagagatgccacctaatgggtggcagaaaggaccctggtagaggttcttggtgttgcttgtgaagagctctggccagctccacgtgaccagggagaggaaaagcccggccctcctggaggtgaag

SEQ ID NO: 28023 - DNA, 1076 bp, Homo sapiens
ttctgttaagaaagaagacttaaaatcaaagcatgacagctctgcacctgacccagctccggattcagctgatgaggtgatgccggaggctgtgcctgaagttgcctctgagccaggcctagaaagtgcttctcatccaaatgtggacagaacgtatttccctgggcctccaggagatggccatcccgagccctccccgctggaagacctgtccccctgcccagcctcctgtgggagcggggtggtcaccaccgtcacagtgtccggccgggaccccaggaccgctccaagcagttcatgcacagccgtggcctccgcagcatcccgcccagacagcacccacatggtggaagccagacaggatgtgccgaagcctgtcttgacttctgtgatggtgcccaagtccatactagctaagccatcctcatctcctgacccaagatacctgtcagttcctccgtcaccaaatatcaggtgcgtacttcaggtgtggtctgaacaagccaaactttttttttagattaacgaaaggaaagataactggtgattaaatagttgaacttggaaatgtaacctgaaatacagcttcactctttcatcttttaaaaagccccagttgtagggtgccttattgtccttttggaagtagagatcttagaaattgacatttaaatttgtgctcatccagttttgttgcctattcactttatttttctttaaccaaaatgtctgtatcattttaattaaagtaagtaattggcaaaagtaagctaccaaaaacgtaaaacttgcaagcgttcacttttgcttttacatataaagtctttgtactcttgaagccgggcacagtggctcacacctgtcatcccagcatgtgcttgagcccaggagtttgaaaccagcctgagcaacatggcaaaactccatctctacaaaaaagacaaaaattagctaggtgtggtaatgcacgcgtgtagtcccagctacttgaaaggctgaggtgggaggatcacctgagcctgggaggcggagactgcagccagctgtgttgcaccaccgcactccagcctgcatga

SEQ ID NO: 28024 - DNA, 1027 bp, Homo sapiens
atggttaaggaaagctatttcctgcttttaaaataaattacgttaatctgctgcccccactcttgggtaatgggtggttttaaacccatgtactgggagtgccctaaaactcatctctcaactcgggttttccctaagtgagggagacaatagtgtagttacacgagcagaaatctgagtgtggccatggacgcctcattccaacacttacgatctggagaaatggagttgatggttttgaaggtagcatgtaaccctaacttgcaacaaggtgagcgttaaacatcattaaagataccgttcaggtcacagcacacaggtgttctgtgtgtcacagccaaggcattttgccgaggtttctggaaatgctttcagccagcttttttagagttctttaaacgtgatattaaaacactccaaggtttctagtgcagtcactgaattggtttgaggtttcagtttgaatcacggttggcttcccggcaggtgtctgtctgccgcctctggagaccggggcttggttcctggtgcctgcctggtgtcagcctcctgccggtgtgcctccagcgccctaggcctgctgggccttttcattccatcctcaccccaccccctcgctgcttcccccaagaaaaagggcctccactgatttttatttaacctgactgacctattgcaaccctgcaggcaagatgctgcagacctgtgagctaagtctaatgagttaaactgagttgttaaaaacagattttcaaacactaaggtagtgactcctggggtgtatagacctgatctgatgacatagtacatgtggaattaaaagcaaagtttcctggacagataaaaactagctgtcacctttgttcctgtcgtgttagacgttgccattttttatagtgcgcttttaagatccagctccaacaggaatgagtgttttggggtgcggttgtgggtgaggagacagggcttggcagtgttgccaaggagggggtcctgtggctggaccacatctagcaaggggtaggca

SEQ ID NO: 28025 - DNA, 1062 bp, Homo sapiens
ttgtgggaatctttgcaagttagtgttgcatctgattttcaggtgtacatttatttttgactgggcagataggggatttttttttttccatgtccgattcacacgctacacacccacatgaacacattcgaacttcgaaggccacacactcctgcttcataggccccacggtaagtgagttcacacctagaacactgtcctgaccgcaggacgcgtgccttggacttggtattctacatgtgactggctttcttgccctcgtctcttgaatgtttagactcttaagatcatatcctgccccaaatttcaaattaatgaaatgaagatatttcaaacagatctttgaaacctcagattctgtggtgcaattttaatgttttcttgtttctcagttttctgctataaaactattttcaattcagtctttaatgccttctgtctatagtgcattttgtgctttttttaaaaagcaccgaaaggttaaatagtctcaattcaaagatgatcacagagtgccccactttcccgtcgtcagactttgagcagattccctaagggaaggcactcatgcaggcaagcagacctatgctaggtctggtgtgccttacaaaaaagacactttttttttttttttttttttttttttgagacaagagtcttgctctgtcacccaggctggagtgcagtggcatgatctcggctcactgcaagctccacctccgggttcaaatgattctcctacctcagcctcccaagtagctgggattacaggcccgtgccaccatgcctggctaatttttgtatttttagtagagacggggtttcaccatgttggtcaggctggtcttgaactcctggcctcatgtgatctgcccaactcggccttcccagagtgctggaattgcagatgtgagccacagcgcttggctaaaaatatgcagttattgagtatgagtagcttcataaaagaagaaaaatatgtccctcgttttgatcatgtaaacagcctagacctaagaaattgagccgcacataaaatgaatcatgcaattgctgcattat

SEQ ID NO: 28026 - DNA, 1060 bp, Homo sapiens
cccgtgagggtcattcacttggcagcagggctggtatggagggtcccagatagtgatagcatccttcctggccccagcccctggttggggagctgaaagtcgggactcagcttcttcatatcctcttttcagcatggtggtggccagcccatacttgcaaaagtccagaacagacttgggtccctttgcaggccacacccaaactggcacagcgtcttgttcactgtgcttgtggtcagagcagcccatctgcctgcggaggtgctggggagctcgtgccacctccgagctgctcgcgtccttgctcacgtccttactcacatccttaccctgctatactgtccaatatttcctatttgtccctactgtctggcttgtgaagccttgtcctgagcagttaaatgatgaaattgtacatttgatttgttagctgtatttttgtctaaacgttagttgtttaactatattaaaattatctttacaaatcatcttgaatcatctcacatagcacacattaggaaacactggtcagaaggacttgctttatgtagagctccactgtttgtagggaggtggcccctgctgcgcgtgtttggcggcaatgtcaccttttgttctgtggtcagttggtcactatgtgcttacactttaccgctaggtatggacgacaaaggcgacccgagcaatgaggaggcacctaaggccatcaaacccaccagcaaagagttcaggaaaacatggggttttcgaaggaccactatcgccaagcgagagggcgcaggggacgcggaggctgacccactggagccgccacccccacagcagcagctgggcctgtccctgcggcgcagtgggaggcagcccaagcgcactgagcgcgtggagcagttcctgaccattgcgcggcgccgcggcaggaggagcatgcctgtctccctggaggattctggtgagcccacgtcctgccccgccacagacgccgagacagcctccgagggcagcgtggaaagcgcttctgagaccagaagcggcccccagtctgcttccacagctgtgaagg

SEQ ID NO: 28027 - DNA, 1117 bp, Homo sapiens
ggcgctgctgtgtcagcggttaccagactggcaggacccaggactgctttacactcctaaaaagcagggaagaccccaaagagcttttgttatatctattgatagtcaccatgtttgacatttaaaaatgagtcatttaaatgctgaagtgccttctatttaaaattggaaaccagccgggcacggtggctcatgcctgtaatcctagcactttgggaggccaaggtgggcggatcacctgaggtcaggagttcaagaccagcctggccaacatggtgaaaccctttctctactaaagacacaaaaaaaataactcggcatggtggcacacgcctgtaatcccagctactcgggaggctgaggcaggagaatcccttgaacccaggaggcggaggttgcagtgagctgagatcgtgccactccactccagcctaagtgagagcgagactccatctcaaataaataaagtaaaattgtaaaccattatatattaacataagtaaaccatttagtggaacctgttttcaatgacgaaaacaatgagaaagatggttttgttttcacaaatctgtttggcttaactgacagcttctggattctccttccgaattcaaacttagtgtctccgttcagcttctgaaatgctctagcatatactcagagtggctgtggaaacagcatggaatgttggtgttgtgcagactgctttgatccgggggcctcccaaaaggacccctggaccacgctttgagaaccacttctctaagagttgtaaaatagctctaaacacttggggaaattgattacttttaggaagataagctgtgtctttgaacaatttttagtggctcaaccatgtgcttgccccttggggcaagtgtggaatcaatctgatgcgctgtcaccggtaaagctgttccagtacacacctctccctcaaagtgccctacacagccccttgctgaatcctttgcagcagtgaaaatcgggggttggggggaggcaagagtaggctgtgcttggggccatggaattatgcaggtctctaagggtgtggaccgaggagaacataaaggaacagtgatttaaacctgtaataaacagatgcccttgaggg

SEQ ID NO: 28028 - DNA, 1047 bp, Homo sapiens
gtctgttcttgtagacttgtttcagcaagtttcataagatacctcttgttttggaaaagcgcgtatcttgaattttttcaggctttccaccagaggctgtcccttattagtagttgattgaattcagactatgtcaagcagagctcattgtgctgtggtgagaagacagggcacaaataagataatttgtgattgactgcccagccgtacccatggttaccagacagcccagcccatgttgcatgtgcatatgtgagcctcgcaaaggcttgtctaggacgtgcggatcatcggttgggccttggagggtgctggggtttcttcatgtaaggaggaaatgattggaatgggcattggctcccgttttgttcgcggtgaagttggcaggttctgctgttgatactgtgagtttttctacagccttagggtcataattcccttaaggtcagttctgtggagcccagtagggtgcttctcttcagtgtttatttttaagctgtgccacgtcttcattgtttggaatctctgtaaacaagacacgtttttcctttttatatgcctgtcccataataccaagtggcttatttggctcttgaagagctaagattgaaagtgtttaacaggtgactccctactatctgtgggtccctgcactgtgcccttgcctgagaggtctcatctctctggcaggctcagaagaccactagaaaattctctctaaacagagtctctcacttacatttcttatttaaatgacggggtcccttacagtggatactaagatcagcctttttatgactactatcaaatgatgtgtgttaattgcattacaaaagttctataattaacagttaatggaaatgtactaattgggaaagaggaggtcaaagaacaaagtccagtttgctcatttcatgtacgtgtacacagtcatctgtgagacagtctgtgttgtctaggcctcattttattttttgagtagtaattttgaggttaagttgttatatgaagttgaataggtaattgtacatattttaataagaattc

SEQ ID NO: 28029 - DNA, 1039 bp, Homo sapiens
aagccaccacacccagctaattttgtttattttttgtagaggagaggtctcactatgttgcccaggctgttctcaaacttctgcgtgcaagcagtcttcctgcctcagcctcccagagtgctgggattacaggtgtgaaccactgcatagagtgcttcctttactcaaatcatagaatgtttaaaaaccaggatatcagccatgtttcaaaaccacattattcccatggatgttttgttttactctcaaaacccaaaagcataaaatcaaacccctacatactggagacttcaggctttcaaagagattgggcaaatcaaaccaccttacttttcaggataattgataaacccatcagttgttgatgcttagaatggttagcagaagtaggtaggaaacactcagacctcaattttcatgaacttcacttttcacagtattttaaacaattagagatgttggaaagaggtaaggaagaattttactatttagtctgctgcacatattcttttgttgttgtttttttgtttgagacagaatttcactcttgttgcccaggctggagtgcaatggcacgatcttggctcactgcaacctccgcctaccggtttaagcgattctcctgcctcagcctcctgagtaactgggattacagacatgcgccaccacgcccggctaattttgtattgttagtagagatggggtttcttcatgttggtcaggctggtctcgaactccagacctcaggtgatccacctgcctgggcctcccaaaatgctgggaatacaggcatgagccatggcgcctggcctgctgcacatattctgacaccatgtgtctggtgaacccagaccctgtaaagaatcttcactggtgattgtttgatataggtgaccttccccctccctctttttgcctgattttatttccctttctagattataccactaaatcagaaagcactgaatattttgtaagtttgtttgggtgagagcaagaataatcttttcttgatttttatttttatttttttaaaacc

SEQ ID NO: 28030 - DNA, 1003 bp, Homo sapiens
attcagggatgaggtcccctggggctaaatgaatgaacagattctgaaaagcagaagctacgtccgggggtctctgggccacaaatcactttctgacctgcagccgtgaggcgtgaggctcactcggaagctcccggaacctggagactgccctcactcaacacttgaacaagcaaggggccaggttcaatgaaacacctgcccgcccggcacaccaggctcaaaagcaagcaagcaagcaaacaaacaaacaaaatcaaatcaggccttcacaactccccaaatcatgtgtgagtttctacagagcagaagccaaaaatatatgttatctaactaggtcctatttacatatatttttatggctgctctaaaaaattatcacaaacatagcggcttcaccccgtttcccctgttgtgattattacacattggatgcctgtatcaaaatatctcatggaccccataaatagcaacaccctgtatgtactcatgacaattttttaaaaaagaacacttacactttccatttctgcaggttagacgtctgaaatggtctccctgggctaacatcaggtcttgggagggctggttccttctagaggctccaggggagaacccctcggccctcagtcccatcctccgtcttcagagccagtggtgtctcgtcactgagacctgctctgccctccgcctctatgttgaagggcccgagattctactgggtccccccggataatccagggtcacccctccgtgtcaggcggctgactggcagcctcatgtgtccacagtttccgtgcaccgggaggtgggcatgtttaggggcccccattctgcctcccatgagtctgcagggcctgactttgtaatttgggatcattcttagggtacccagatacaacaaacaaaaacgcagcaaacaaaaacacagggtgcccagctcaacaggaagtttggagaagcagtgactgattttttagtgtaagtctgtcccaaatattgt

SEQ ID NO: 28031 - DNA, 1091 bp, Homo sapiens
ggtagacttaaactgaaccatacgtatcctaattgtatcaaatgtagatggattataccctcaagttcagaggcagaaatggtcacactggatcaaagaagcaagacccgacagcatgctgtgcccaggagacacacttggaagacccagggtggtagaaggtacaaagatggacaggtgcgtgtgacacaaagagtgagcacaggaaagccaaggtggctgcatccataccagacagggtggggtctaagacaagtagcatcaacagagataaggaggtatatttcacaatgaaaaaaggcccatttcatcaggacatcagtcataaatatgtagcacataataacagaatttaaaaatatgtagcacataataagagaatttaaaaatatgtgaccatacacaaaactgacataattaaagagagaaatagacaaactcacaatcatagttggagattttaacacccttttctcagtctttgatagaacaagtagacaaaacattagtaataagatatagataacaccaccaatgaacttgacctaattggcattaatagaaccctacaccaaatgctgcagaatatccactttttttcaaatatttggagaattcactaagacggatcatatgttatactttaacataagcctcaatacatttcaaaagtttggaatctttaagagtatattctattattacaaaagaattaactaagaaatttatttgatatttaggaaagccctcaatatttggaaattaagcaatgcacttctgaatatcccatggggtcaagaaaagaccataatggaagccaagaaatatttctagtgaaatgaaataaaaatataacatatcagaatttgtgggatacagctaaagcagtgctcccaagaaagctttaaatgtttatattagaaaagcagaaaggtctgaatgtctaaaatcagttatttaagtttccatctaagaagataggaaaataagagcaaattaaactcaactctacttaaaacaagtagaaggaagagaaaaacaatggtaagaaaagaaagcaatgaggcagaaaataggcaaacaatagagaa

SEQ ID NO: 28032 - DNA, 1367 bp, Homo sapiens
acggcagagtcgaaacaaacaatgagggcgaaccagtttcttacatgttctaacgtttgactttgaaaacagtttaaaacacgtgtgcttggtcagctccagtgtgtcgtcccgtgcgggggttgagtgttgcatctttgcctttcttgtcgttgatttttgcccagatggatctgcatttatttgtactttttctatgtattataatcctgtagaagtcactaataaaggagtattttttttgtcagcttatcaatcagactgatctaatgtgaaatgtaagtatccttaaaaacaaagcatctattttggcagaaattgtgttcttaaattcagtcatttgatattctgtgagacttcatatttctcatccctttattgctttttagcaaacataagaaaccatgagtcattttgtcatttagagtattctgataaaatctcttgaaaatactgaaatcaaaaggttaatgattttttgttcattctgatttgtcattttattatctgttatcggtctaaagtgctaatttacccatttgatttttctgctagacagataacttttaatttttcaaatttggcagacactttttttttttttttgaaaatctttccttccagatctgttgcccactgaacagccacccgtccctcactgtcctggtgtccgattgggctggatggtgttggggcatgatgtgtggaggaactggaaggtgctttaggtctggttcagggtcgggcattctttgttgtttgcacatctttttaaattttacaccttttcttaagaattctaatgccgtcttaagtttttataccaataatgctgagctttaagtgtaggatctggtagtacagacagtgtgatggatgatgctgctggttgtaaatttcatcgtgtgtgtctaattttttttcctgttgaatgggtaaaaacaaaacaaaactttttttagaagatgaatttgctgtcatgttttgtggaatgagggaccgttgagctcactaccacctggagtttgagttgaagcatgaaaatggtgcccatgcctgacgctccagcgcctggatctgcacgtgcccttgtagaggatccttaccgtcctagagagcagacgctttctgaaaactacttgctccaaaagaccctctgagttaacgtttcagctgtatcattagacttgtatttagagcgtgtcacttcctctgaactgttactgcctgaatggagtcctggacgacattgggtttttcctctaggagaatacaagccttaataaacaatactatttagcaaacttggtgtcacctcattcttcaccctacttgatgagtttatgtgttggagctttttaagctgc

SEQ ID NO: 28033 - DNA, 1033 bp, Homo sapiens
aaccgcagtatcagagccctcagcagccaccccagacccgctgggttgccccacgcaacagaaacgcggcgtttgggcagagcggaggggctggcagcgatagcaactctcctggaaacgtccagcctaattctgcccccagcgtcgaatcccaccccgtccttgaaaaactgaaggctgctcacagctacaacccgaaagagtttgagtggaatctgaaaagcgggcgtgtgttcatcatcaagagctactctgaggacgacatccaccgctccattaagtactccatctggtgtagcacagagcacggcaacaagcgcctggacagcgccttccgctgcatgagcagcaaggggcccgtctacctgctcttcagcgtcaatgggagtgggcatttttgtggggtggccgagatgaagtcccccgtggactacggcaccagtgccggggtctggtctcaggacaagtggaaggggaagtttgatgtccagtggatttttgttaaggatgtacccaataaccagctccggcacatcaggctggagaataacgacaacaaaccggtcacaaactcccgggacacccaggaggtgcccttagaaaaagccaagcaagtgctgaaaattatcagttcctacaagcacacaacctccatcttcgacgactttgctcactacgagaagcgccaggaggaggaggaggtggtgcgcaaggtgaggctgggtgttgcaggcaactgccatgcagatgtgtccttggtgccgtacttagaccaggtggcccggtggtgagcagatgcggcaggtccgccgagctgagtctcgtgacaggcagctcccagttggccgcaggtgggcgggcccaggtcctggcagcctcgtgggctttccctgcggagagtactgctagtaaccagtgatggtatttgggtagatgtcaccgaacgactttgatcactttccaattataattgaataattgggaccacagtgtacacattctgtttttctgttacaaagaatttgagggtaac

SEQ ID NO: 28034 - DNA, 1052 bp, Homo sapiens
atccagcctgcctgtgtggccgtggaacccggtgagcacagaaagtatcaggagggtttagggctgccagcagagctgattagcgtcaccgtcttctgtggctcaggatgtgaatggtggtgatctggagctgaaggatttgcagagtactggctagaactgcaggccctgcaccttgggtagagggaagctggatgggtcatttatgggctctctgtctgtgcagcgtgtgtgctaggtgtgtccatttaatacttaaaacggattttcaggaatgttacatgcctcatgtaatgtggattttttcatgtggtaagtgatgtcctgtcttagttaaggctttaggtgtaagtcagaagtgtccctgggcatctgtttctgtggcctgactcctctggttggtgttggggccaagtggattagaataccacacagccatcgaggtctttttttcccatctgctctttttgcgtggaaggaagatgtgttgtgattgcagcgctgctgaggagcacgtgtccagctaatgggaggaggagggctggcttccctgtgggggggactgtccccttgcctgccgtccttgaaggcacctgcggccagtgactcgaggagcaagtcctgtgcacagaccgcccccctgattcgctcacccccccagtctgggcctgttggccagggcagcacccgagggaaaggctgcagcaaaggagccagcatcatggaaactgttttgagggagaataagctcagattaatctcatgtttgtggaacactgatagcatcccacttgtcttcttatacccccagaatctcaaatttatattacggggaaacagcagttagtgcattttaaaagatgattctggggccaggcgctgtggctcatgcctgtaattccagcactttgggaggccgaggcgggtggatcacctgaggttgggagttcgagaccagcctggcaaagatgatgaaatcctgtctctactaaaaatacaaaaattaaccgggtgtggtggtgggtgtctgtaatcccagctacttgggaggc

SEQ ID NO: 28035 - DNA, 1016 bp, Homo sapiens
attccagtatccccatatcttagttttgtctgttctggaatatcacacaaatagagtcgtgcaaaatacactttcgtgatggcttctttccctttacgtgatatctcggagattcagccacgttgtgcgtatccgtaactgccgagtagtgtgccatggaaaacacgccacattccttcatttattcacactttgcacactggggtggtgtctaagttttggctagtatgaataaagctgtcttgaaaggtctttttgtaggcatattttttcttcctcttaggtaattacctagaagtgaaatttctgggtcctgggtaagtgtgtatggaacgttattaaaacatgctaagtggtcgggcgcagtggctcatgcctgtaatcccaacacttaggaaggctgaggcaggtggatcacccgaggtcaggagttcaagaccagccgggccaacatggcgaaaccccgtctctactaaaaatacaaaaattagctgggcttgggggtgcacgcctgtaatcccagctactcgggagactgaagcaggagaattgcttgaaccctggaggcaaaggttacagtgagctgagatcactccactgcactccagcctgggtgacaaagtgagactgcatctctaaacaacaacaaaaagatggtaagcatttcacgcttccgccagtgatgtgtgaggtccagctgctctgcatctctgtcaacacttggtattgtcagtcttttgacggcagcaggccttgtgggtacaaaatggtgtctcagtgccatttatttgccctcaggagggagtcgccagttcttgcagtaagaaaccactggtgtgcacaaaaaggaaagggccaaggtgacgtgcacaggcaccagcagcatctacacaagtggcagttggaacagtgtagatttcagcaccgatctcgtggtcaggactgtgtgggtaccatcagttcagagagtgggagccatgtgctggattagtcacagtgggctgcctggaagaggc

SEQ ID NO: 28036 - DNA, 1050 bp, Homo sapiens
tggcaggggcgaaggtgctgagcatctgcctggactgtgtggatgccccgaacaccagggactcccatctcctccatcgccactggcgtctgctcggagccagagggtcccctcccgccgtcccctcccgccctcctggccctattgcatgagtccagcatgaagccccgcggagcatgaggagctgcactgtggccgacgcgagcctgaaaccctctctgtttctcgcaacagaaagaagataacacccctggcccaccctcccccctcccatcagaggcaggtagggcagcccagtggcaggaagtcccgcccccatcagaggcaggtagggcagcccagtggcaggaagtcccgcccccatcagaggcaggtagggcagcccagtggcaggaagtcccgcccccatcagaggcaggtagggcagcccagtggcaggaagtcccgcccccatcagaggcaggtagggcagcccagtggcaggaagtccctcccccaccatcagaggcaggtagggcagcccagtggcaggaagtgaggacttggccccgtcggctggtgtggggcagtcttcatgtaccaggccccagtccaggggagacttgggagcttgtggcctctcctgggtgggtcctgctcagccacaccccgtcttgagctgcccttgtccagctgggcttttgtagacttactgcagggtctttgtttccaagtgagttcccacgtagctgcaggcctcagcgcacacccaccgtggtggcccctgccagcccagcagtggccgtgactctgtggataccagactggtcagaagcccccgtccctgagggcaaaggagcctccctcccttcttattgtcatgagtgacctgtggcctcattggagatcagctcagctgaattctgcatcctacacacacacatgcacacacgcaaacgtgcacactcttgcacacatgaacacatgcacacgcgtgcacacagaaacttgtgcaatgcacatgagggcacacacatgcacatcgagtgcacacacacgtgcacacacaga

SEQ ID NO: 28037 - DNA, 1038 bp, Homo sapiens
ccggcagcgccatctgtgccatctgttccaaaaacttaaaaaacaaaagtcggagctgttgcctgcactttccgggtggggctgtggcaggaggggcagcggcgggaggggcagctgcttccttcatgcagggtctgcgggccggcgaggcgggggcagatgggcggaagctgagctggaaggagctggagccttctgagggcctggctgcgagattcatctccctgaattctggctttattcctcctggtccacgcctgctgggaggagccacagatctcggccgcatccggctgcattctgtctccagggtttctggaatgctctgagatgcctggtcggagccaccttaggaagcaggctgagtcctgaacatttgggacctgggcctcgttttttttagtttagaggaaggttccctgcagcccgaggagctgccttcctggatgcggcactgaggactcagaattcaagtctgtggggctgtcgttgtccccaccccgccctgttctcaagtctggtcagcctcatcctcggtgggatgcagatacgcctgcccttctctcgccaggcctccccagcggctcctccctctgctgggaatgcccttccccttctccccctgtggccaactcctctgtatcctgtagcccccccgcccctgtacacgcctcctccgggaagcccacaggattatgtgcgtggctctgctgggctgagctgggtccctgagcccctcctgtgatgtgtgatgccctctgtgtccccgcggcgcccctcctgcctcccaagcctctgggctcctgactgggaagccagggacccccgcgtcctcccctgctcctaccccgctgagagttcagagaaaaccccgttaggcagacagaggatcgcccgcagaaggcgcacgagatgtctgcgcatttttcccagggctcagttaattgaagaacttggccaacgagcacaggaaattaatcgcggcttggaaatgggacgtcccttgcgtatggtttgtctgcctgggcctcggcacca

SEQ ID NO: 28038 - DNA, 1061 bp, Homo sapiens
aggctgggcgcagtggttcacgcctgtaatcccagcactttgagaggccgaggcgggcagatcacgaggtcaagagatcaagtccatcctggtcaacatggtgaaaccccgtctctactaaaaatacaaaaattagccaggcgtggtggcacgtgcctgtagtcccagctatcaggaagctgaggcaggagaatcgcttgaacctgggaggcggaggttgcagtgagccgagattgcgccactgcactccagcctgcgtgacagagcgagacttcgtctcaaaagaaaaaaaaaaaaagaaaagggacccgcataccaccgagggggccaccgagcactcaacgaggggatcaatcagttctgggaggggtgcaggccctgtggctcccagcctgtgtgcaatcgcgggtctgtcttccacgctgcactgctgggatgcccagcctttgaggtcctacattcgtcctagaaaaacgcttttgttaacttactgtctgagacatctctgtcatacttttattctctacagtcttcattgcccctctttgctggcctcttcatatgatttatttattttttttttgagacggagtctcgctctgttgcccaggctggagtgcagtggtgcgatctcggctcactgcaacctccgcctcccgggttcaagtgattctcctgcctcagcctcccaagtaggtaagattacaggcatgtgccaccacgcctggctaatttttgtattattagtagatacggggtttcaccatgttggccaggccggtctcgaactcctgacctcaagtgatccacgtgcgtcagcctcccaaagtactgggatgacaggtgtgagccaccgtgcctggcctcttcatatgatttttaaaagtggctttattgagatacaactgaaacacaggaattgaggtccagttttgtcacccccccgccttagttccagctggggttggccgtgtaagtgctgcccctgccccttcgaaacaatgaatctcagttgtttatcttttgcttaatgaggatgttgaggttcaggtctgggggct

SEQ ID NO: 28039 - DNA, 1067 bp, Homo sapiens
tgtcaacacagcaggggcagcggcctccagcaccaggcccatgtgcttggtctccagagccctgccatgggggcggtcggtttcatctctgccaggccattgtcctggtcctggacaccgtgcaggggctttgggctgggccgtgggggcctccttggctgcctcccctgggatcttggagcagggttgggctttgggaagtgtgcatgcttctgggcttgctgggatggccaagggttggctcttggccggtcacctgggagctcaacgtgcgaacagtctgtagcccagggactctgccttggctggaggtgacgcgtggagacacttgcagaacctgagactgttcccagggttctccaagccagaggagaccccagaatggccaccactaggctctgccagcactgtcgctgcccacagtgagggtgcaggtgtggagtctagagacagcagggagacagaccagcagcactgagcctggagctgaggtctggggacagaactgggagggactcccccagctccgcctccatctcacgaggctcggtgttgtttacctgtgatggcgttttcctcatggggtatcatgtggcgaacgccactctcccctccccagggaggcctccagccatcagggaccctgcactcccctctggcctgagctgctaggtggctcgtgcttacacaggccctggggggctggggcactgtgctgccggccccctcccctgctccctgtttgtggcaggtggcccagagggaggcttcatgggatgggagtgggggccacactaggagaagctccggacaaggctgggccaagctcggaggcagcacggtgtccagaagctagggtggggcgaggctcctccagctctgtccctggcctggcccttggccagactcagcatcctcctagtcaagtcatctgccctgcctggagctgatggtcaggggcccggggtttcggggacttggggctggactggggatttgttcacagtgtcagcaactcctgagcagcctgggctgggaagggtgctttccctctttgtcctcctcct

SEQ ID NO: 28040 - DNA, 1027 bp, Homo sapiens
aaacagaaattctgtactcattaaagaacaactccctgtactccctcccccagcccctggtcacttctgttctactttctttctttttcgttttttgagagagttctcactctgttgcccagactggagtgcggtggtgtgatcacagctcattgcagcctcaatctcctaggctcaaacgatcctccagccccgccttccgagtagctgagactatcccagctttgtgtattttcttttggttgtcgtttttaattttcacatttctgtttggttataactcctgtttctataccaagattttctttccacttggttgacaatgtttgctttcctcttggagctggtccgatagcacctgaaagtctctggattctgcgttcaagagccagcttctcttgtgtatttgttcctttgagaatcaaccagactaccctttgccaggaagtttgatcgtgttctggatgctttgactactgtgctatggactctaggtcttgttttaagtttcacagagaatgtagacttttttttttcatagcaagaaatcgacctggttaggttcaggctgcaaattttgcaccccgttcctgtgtctgtgttcttaggccagtttattttagagactttccagtgcactgtggatctgtcccatatgcgccactggggcccatctgagacctgggcagtggcctatcctgtaggtcagttttcttccctttgccctttagggtcaggaccacgtagagactgtcttgggacgacccaggcgctcacacacagctgtgtgccatcctctcttctcccctctcctcttgtcgcctcccccacactctgactccaggctcgttgccctctggctggaaaccaggggcttttgtgttccctgtgctaggtaggggatggagagtgagagggcaacagggagcccccacactcttgggccaccattcctttagtcaggaggaagattcccctgtctccaagctttttgggccaggacagccattatcactgggttttagca

SEQ ID NO: 28041 - DNA, 1004 bp, Homo sapiens
ttatctgggtagagatgacggtgctggcacctctcctggggcttgttctgaggcctcaatatttcaggaaaggtgcttggccgcttgcctgctaagagatgagtgctcaccgcacgtcaagcagcctgactgtggtagccacatttctgagtttcctgcccagggaaaggcaaatcggctggtggctcctgccatgctgtgctcctggcaccatgagaagcagcctgggtgacagtgacctccatctgcccccggggggagccggcagcagcctccagggccctccaggggtcagaggccactgtggtcccctggcctctcagttctggacagatcccccacctccgcgagctcccaacaggagcctgcagtcaggcccaggctcatgactgggctctcacccggcactctgtgtgatgctgggtggaatgcttgccctctctgagccttcattcctcctctgtagaagtgaggcagatagggtggctcatgcctgtaatcccagcactttgagaggctgaggccggtggataaactgaggtcaagagttcgagactagcctggccaacatggtgaaatcccccctctctgctaaaagtacaaaattagccaggtgtggtgacacactcctgtgatcccagcaatctgggagactgaggcaggataattgcttgacccggggagagggaggttgcagtgagctgagattgtgccattgcactccagcctgggcagcaagagtagaaactctttctaaaaaaaaaaaaaaagaagaaagaagaggaggaagacgaagaagacgaaagagaaggagaaggagagctgataagggcatccacccgggtgggcgggaggggtgggtgtgaggtgtgaccctgggagtgggcaccatccacctgggcggcgggaggggtgggcgtgaggtgtgaccctgggagtgggcaccatccacctggacggcgggaggggtgggcgtgaggtgtgaccctgggagcgggcaccat

SEQ ID NO: 28042 - DNA, 1029 bp, Homo sapiens
attctcctgcctcagcctctcaagtagctgggattacaggtgtgcaccactaagcccggctaattttttatatttttagtagagatggagtttgaccgtgttggccaggcaggtcttgaactcctgacctcaggtgatccacccgcctcggcctcccaaagtgctgggattacaggcgtgagccaccgcgcccagccagataagtcctctcattgtccacactttctgggtgagaaagtgaggcacagagcgttgagcagattgcccagagcctgctcaggagccaggagtttaccttttgcagccacacatctcatctcctgagagcagtggccagaaaaggctgtcctgtggactgagctgaagtctgagtcatctgctccttgccagctgctataggagcgtgctggcctggggtggtcaggaactcctgtacccctgccctcttcctctaattgctgacgtacccacagctccagcatacagcaggtgcttgacagatgtctgttgaatgactgagtgtcctgctgagatatagggctccttctaggagccagagttaatttctttctttcttttttttttttgagacagagtcttgctctgtcgcccaggctggaatagagtggtgcgatctcggctccctgcaacctccacctcctgggttcaagcgattctcctgcctcagcctcctgagtagctgggattacaggtgcatgccaccacgcccggctaatttttgtatttttagtagagatggggtttcatcatgttggtcaggctggtcttgaactcctgacctcgtgatctgcccacctcagcctcccaaagtgttaagattacaggtgtgggccaccacgcccagccaagccagagttaatttcaagaatgcagaggtctgataaaagtcacactttatgaaaaacatttttttttttgaggtggagtcttgatattgttgcccaggctggagtgcagtggtgggatctcggctcactgcaacctctgcctcctggattcaagtgattc

SEQ ID NO: 28043 - DNA, 1028 bp, Homo sapiens
acggagtctcgctctgtcgccaggctggagtgcaatggtgcgatctcggctcactgcaacctccgcctcctgggttcaagtgattctcctgcctcagcctcccaagtagctgggattacaagcatgcaccaccacacctggctaatttttttgtatttttagtagagacggggtttcaccgtgttggccaggatggtctcaatctctgacctcgtgatccgcctgcctgggcctcccaaagtgctgggatgacaggtgtgagacagcacacccggcccacccccagcatttgtcccacctttcctgtgtgaatgggatcaccacatagctgatatggtgcagggcgtggtcctaagttattcctgctaactgactagatgatggaattagcacactgccatcttgcaagcccccagtgattaacatattcaggtgttcagcagcaacaatgttcacatgggaagaaacgggaaaggagatactgtgagccttctgatagaaaggacgtcccatctggagcccggcaaacggtggccgcagtctaactggggccctcaagccacctaagttcagagtaaaccggggaactcgtgtggctgcccctcctgtacagattccgactctgcagggtaaacggcctgggctcttcaataaataaagtgtgaggaaaagaatggaccctgccaagcacagtggcacacgcctgtagtcccaggagcttgggaggccgaggcaggaggatcacttgagcccaagaggtggaggctgcaggaggtggaggctgcagtgagccgtgatggcaccaccgctctccagcctgggtgacagagtgagaccccatctccaaaggggtgggggaacagatagggatgaaaactgaagttctggtcctgaatgagatggcagaagcccaccccaccacacgtcccccactagttacaacaaaaagccctgcacatcaagtaactaacaaaactgaagagtggagaaggccccgtggtgatgttcacacaggcctgggggtgggt

SEQ ID NO: 28044 - DNA, 1030 bp, Homo sapiens
gccttcctaatgtttgtgtcatgtcaggaacctcccttgcccccctcctccctgagtcctaccccttgtcccaagctgtgcaatacagtgataaatgaaaggggccaggcactgtggctcatgcctgtgatctcagcactttgggaggctgaggtgggtgggtcacttgagctcaggagctcaagaccagcctgggcaacatggcaagaccctgtctttactaaagaaaaaaaagaaaaagaaatgaatggaagggaataagtaaaagcatcatttgtaggtgacatgactatgcatatagaacattcaaaagaatctagaaacttagatttttaacaggataattaaatatactggatatacagccaatgtacgaaactcaatatacaaaagtcaattgtatttctataaataacagagtttcattttataggacatcaaatgcctaggaataaattaaacaaaaaatatgcaaagacctctacacagaaaactataaaatattgctgggagaaattaaagaagataatgataaatgaagggagatactatgttcatggaggagaagactcactattgttaagatgtgaatctccgctgggcaccatggctcacgcctgtcatcccagcactttgggaggccgaggcggccggatcacgaggtcaggagatttgagaccatcctggctaacacagtgaaacccgtctctattaaaaattcaaaaaaattagccgggcgtggtggcgggcgcctgtagtcccagctactcgggaggctgaggcaggagaatggcgtgaacccgggaggcggagcttgcaatgagctgagatcgcaccactgcactccagcctgggcgacagcaagactctgtctcaaaaaaaaaaaaaaaaagatgtgactctccttaagttgatatattgggtcagcacaattctggttaagatcccagcagaggggtgtgtgagtgcccgtgcgcgtgcgtgtgtgagtaaactgactgctaaatatatttggagatgcaaaggatct

SEQ ID NO: 28045 - DNA, 1026 bp, Homo sapiens
gggcgtggccggtgctgacttgcgacctcctgctgacgtggcccctgctgtggttcgagcggcgtggctgctgtgccgggcgtggccggtgctgacttgcgaccatctccatgtgctggttgcaggcgatgagcatttccagggctgggcctcttgttagcgtggtctctagggtgtcctgtcgagtgtacctccccgtgggctggcgcatcgtgcaggaaatggggacacggcggtcctcactgtgtgtccactgcccctttgcggtacggggtgccgggtggggatcccaccgcctgcccagttctcctcgtcatgaatgcgccgtggttcaacaaacagcgtccggccgtggcaattctgcacaaaaatgggatggtggtcgcagatttctgaatttagagaaccattaaatatgcaggcagcaggccagcagcacagagcagccgacactcagagggcctttggggatgggttctggaacattctagaaaaactgaactagtttccttggatttgtaggaccagtaaccttggcttggctgttaaattaaacagatggcagtttcattactagaccatcaatctctgacatccctgtcagaggacttgccatacttctcattcaattctgttgaacttcgtgcttacttttattcctttttcagcagtaggcgggcctcctctctgttactagacattgttctcccagtagaaaccatgaaaactgtcatttaggctcagaacatggctgcccacaagttgtgctgggctggcgctgatctcctggggccttgaggtgtgtgctgccttcgtgtctccaaacagcacgaggaagccaacttcacactgacaagccgaggatgcgccgccggccggtcggccggggacaggagactgtaagccccgcatcagccgtgcccggaaatgtgggacgcggcctctggagcgttgctggtgtaacccccctcactcttttaaagagtcaaggattctagggacagccatggcggtgcggtgccgcct

SEQ ID NO: 28046 - DNA, 1082 bp, Homo sapiens
agagtgctgggattacaggcatgagccaccgtgcccagccaacaaagactttctcctatggtttttcttgagtttttatcaatttaagtataacgcatagctccatgattcaagttggtttttttgtatgtggcgtgagatcagcttgaggttcactttttacataggattataaggttgttccagtgctgcttgctaagaaacctgtcttttatccattgagttaccttgctaactactatatacataaaattaatgagaatttcttttatctgtcttttttttttttgagatggagtttcactcttgttgcccaggctggagtgcaatggtgtgatctcggctcaccgcaacctctgtctccctggttcaagcgattttcctgcctcagcttgccgagtagctgagattacaagcacgcaccgccatgcctagctaatgttttgtattttagtagagacggggtttcaccgggctggccaggctagtctcaaactcctgacttcatgatccacccatctcggcctcccaaaatgctgggattacaggcatgagacactgtgcctggcggaaacccaaattttagcatttcacacaagggagagttctttcagcttatcctgatttcttttatgtgtttttcaccttgatttgttacaataatttagatttaaaatttggctttaaaattgggtgattttggccaggcatggtggctcatgcttgtaatcccagcactttgggagtctgaggtgggcagatcacctgaggttgggagtttgagaccagcctgaccaatgtggtgaaaccccgtctctactaaaaatacaaaaattagcggccgggcgcggtggctcacaggcctgtaatcccagcactctcggaggctgaggggggcgaatcacgaggtcaagagatcgagaccatcttggctaacacggtgaaaccccgtctctactaaaaatacaaaaaattagccaggtgtggtggcaggcgccctgtagtcccagctactcaggaggctgaggcaggagaatggcgtgaacctgggaggcggagcttgcagtgagccaagatcatgc

SEQ ID NO: 28047 - DNA, 1050 bp, Homo sapiens
gtgtgctggtgggtgaattcagggcgcttgaactcaggaaggctggacgtgtgtcccgtcgtttattcccggttctcccagccacctccggttcccgacgctgtgagtgcagctttgctggctggtgctgcaagtgtgtttaggattttctgcctgtttcgggagtgtatcggttccgcttgatcagggctgtgttcatgtttctaaaatgttaatggtaagagctcactattgagtaaaagcacagatggtaatttttcccgcaaaaagcttcttagataggggaagttaaaggtgtaagttctcgcagtgtgctgagtgactggctgggtttttctggtgagtaagtgcttggggcaggctgcgggacagccttgtgctctgagaattgttagtgatatcacaaaggtttttatttctgaagggaaactaagggagtcaggatatttaaaaccgcctcggtgcttcctaaacagtggctgttgtttttttccaaagtgaatgaaacatttcaggttaatgttactctgtactttaagtatttctgtttagcatcaccttattaaaagtgagcctggaccagacatggtggcttacacctgtaatcccagcactttgggaggccgaggtgggcagatcacctgaggtcaggagtttgagactagcctggctgacatggtgaaaccccatttatactaaaaatatatacacaaaaaaattagctgtgcgtggtggcacacacctgtaatcccagctacttgggaggctgaggcaggagaatcacttgaacctgggaggtggaggttgcagtgagctgagagcgcaccattgcactccagcctgggcaacaagagggaaactccgtctcagaaaaaaaaaaaaaagcgtgcctgcttgtagtcccagctgctcaggaggctgaggcaggaggagcgtttgagcccaggagtttaaggccaccctgggcaacacagcaagaccctctctaaaataaaaaataataatagtaataatggccaggcacaggggctcaggcctgtaatcccagca

SEQ ID NO: 28048 - DNA, 1027 bp, Homo sapiens
tctgaccccttgagatcctttccagcccgaccccttactttaggggtcagcctgcccccgtaagtcctgttatttattgtatttatattctttttttagttggtccttttttgtttgtttttgagacggagtttcactcttgttgcccaggctggagtgccatggcgcgatctcagctcactccaatctctgccctccgggttcaagcgattctccagcctcagcctcccgagtagctggaattacaggcgcgcgccaacacgtccggctaattttcgtatttgtagtagagacgggggtttcgccaccttggccaggctggtctagaactcctgaccttaggtgatccacccgcctcggcctcctaaagtgctgggattacaggcgtgagccaccgcccctcacgcctggctagtttgtccttttcatggggactttttattgtacgcgggttactctgaaaaagatcgcgattcgtcccctcgccctgcaggcgccgctgccgcctcgcctcgggcgtggaccctgcggctcgggcctgcgcgtgtgcaccccgaggttgtctcacttcctgttcagggcgaccagcgctgcgccctccccactccacagatgaggaagctgaggttaaagtcacttgccccaggtcactccgcaagttgaagcgcaaccaggatactctggaacaggatgcctgacttcagaggagaggcgcgtaaccaccaggcaactggccccacgaaaacaagtcccgcaacttcccttctttggctcctacttgctcccggaagaaaagccttaaacggtattcaagccctttaggatctgatgtcctaggactccactctgggcttccagcctggggtggtactggtccctaggcatggaagctcctcccactgccccttccttcacccggccacctcctcccacaggtgtcttcctggtactcttgcacaggcccgagtcccttaccaccacggccttagcctgctctcgtgctctcagtaatgttttctccatttgc

SEQ ID NO: 28049 - DNA, 1050 bp, Homo sapiens
gggctgcagcgcagagtaggcagatggcctttggccccccggctccgcttcctcaggccctgccgggtcccttccctggctaccccaaggctcaggcatccctggtgacctgtggttctgggctggtgagggcacctgagcaacctggcacgggcagccaccatcctggcctcacctccacccaacactggaactccagcacccccagctacctcccaggacagacccctgtctgaccactgccatgctgacctgacaggctccggcctgcccttggccacccacttggtccccttgcttctgttttctacctctccaggcctgcccactacccccacccctgctcctcctttgtcagtgcgatccctgctgtgctcaggccctgccccccaggcctgtctgtaattctcccagcttggggcaagggaggggttttgcttcttgtacctacagggcagcagaagcttgatgcccttcaacacagctgccagccctgggggtgtggggcccctggagtgtgctctcctccagtgttcagccttctggcactgcaggcctaggttggagcagcctcgtggagtagggacggactagttcgggccctggggtcttgctggggcccataggcatgtggggcaggaagctgggcagagctggcctggctctgagtggccactgggggaaaggcagccttctgtctgccaatctgggtaggcccagtggccaagctctcatgggagccccctccccacttttttttttaacctgcccccattgtttctggttgtgtggtcatttgatatgggaactgaaggccagccaggggaggggcttggccaaagtcacagcaggttgatggcagctccagagctgtctttgcccctttgtggccctgaggacggctgggtctataggtagggcaggggtcaggcagggagtccagggtgcctggaagaggtggccacagcctgtggctccctccctggggtcctgccttccaaccacggcattgcagggaggatgaggctcagagggggtaggtttggaggg

SEQ ID NO: 28050 - DNA, 1497 bp, Homo sapiens
cccgggcgggggcgggcgcgccggccggcctcggtcggccctcccttggccgtcgtgtggcgtgtgccacccctgcgcccgcgcccgccggcggggctcggagccgggcttcggccgggccccgggccctcgaccgggaccggtgcgcgggcgctgcggccgcacggcgcgactgtccccgggccgggcaccgcggtccgcctctcgctcgccgcccggacgtcggggccgccccgcggggcgggcggagcgccgtccccgcctcgccgccgcccgcgggcgccggccgcgcgcgcgcgcgcgtggccgccggtccctcccggccgccgggcgcgggtcgggccgtccgcctcctcgcgggcgggcgcgacgaagaagcgtcgcgggtctgtggcgcggggccccggtggtcgtgtcgcgtggggggcgggtggttggggcgtccggttcgccgcgccccgccccggccccaccggtcccggccgccgcccccgcgcccgctcgctccctcccgtccgcccgtccgcggcccgtccgtccgtccgtccgtcgtcctcctcgcttgcggggcgccgggcccgtcctcgcgaggccccccggccggccgtccggccgcgtcggggcctcgccgcgctctacctacctacctggttgatcctgccagtagcatatgcttgtctcaaagattaagccatgcatgtctaagtacgcacggccggtacagtgaaactgcgaatggctcattaaatcagttatggttcctttggtcgctcgctcctctcctacttggataactgtggtaattctagagctaatacatgccgacgggcgctgacccccttcgcgggggggatgcgtgcatttatcagatcaaaaccaacccggtcagcccctctccggccccggccggggggcgggcgccggcggctttggtgactctagataacctcgggctgatcgcacgccccccgtggcggcgacgacccattcgaacgtctgccctatcaactttcgatggtagtcgccgtgcctaccatggtgaccacgggtgacggggaatcagggttcgattccggagagggagcctgagaaacggctaccacatccaaggaaggcagcaggcgcgcaaattacccactcccgacccggggaggtagtgacgaaaaataacaatacaggactctttcgaggccctgtaattggaatgagtccactttaaatctaatccaggaaaagagtacaaaacgccacattctcacttgtattgggagctgaaaaatgggatcacatggacgcaggaaggggaacaacacacactggggcttttcgggagacagagcgttaagaaaaacagctgttgcatgctgggcttaatacctaggttatgggttgacaggtgcagcaaaccaccatggcactcgtttaccttagtaacaaatatgcacatcctgtccatataccccagaacttagaaacagaacgaaacaaaagaaaacc

SEQ ID NO: 28051 - DNA, 1073 bp, Homo sapiens
gtgcagggactccgggcgtcctgtcctgtccctgcacggcggctttggccccagcctgtagccctctttgcgcagctctgcgcccgcagccctgcatcttccccaggttgtgaggtgatgaggcgaaagtcatcggaaagacgccgactcggtgtgcagggttcctgcgtggaaggagctgtggtccgtggggtcccccgtccctaccttaccctgttcagaattagactgaggcaccattaaaacatagacagcttatatgagtaaacagtgattaattaatgggacagcgctcagcaatggtttgtggtttgggggctactagaaggtcttgaaagaaaggcttgtataaggtgtgtgaggaagcaaagacaattaaataattgggtacagttatgtagtcgctttatttggagtgtctgggtggaaatttcctggttatgtaatcagggattaattggaggtttgtagttgtttaagcttgaatttcgtttcctcctaaggtagtaacttagaaaaaatgcatttgagttaggtttctttttttacatagaggcctagaccactagagccacttcaatctaattgactgctatgtaattattttaactttaatcaaagacactggttttcgcctgcattttccaaatgtgtggcaagcagggtctcacatccactactctgttctgccagcctaacctggcttgaagtaaaatcttaaatttccggtttcttgctgacattccccaaaggcaacttctcccctcccatacattatcaactatttttgtcctttattgcacatttcagaaacagtattttaattaatcactttttcacagagcagtggatggcaatttgtaaaatacttgttttctacttacaaatatttcacatgagaaaaaagcagaaaataatcccctggcactcagctgtaaaaaatctttctgctgtttctccttgtatcctcccttagcacaaacgcccttattaggacatcttgggattgaggttttccttgggaaactttatggggcaatgtttccttagccacattcgggcctttttctagt

SEQ ID NO: 28052 - DNA, 1028 bp, Homo sapiens
agggaagaaggtagaacttactctttatcccactttaaatattctgcttttataaatagagcccccatttttattaattattgaatctggttggattgccacataatgtcttttcatactgctttgcaatacttcagacatacttgtatggaatctgaacattaatgtttcccatcaggatgaaagaataaagggactaagatagtacactcttgaattacaagctaagtctttgtattagtcttttttcatgctgctaataaagacatacccgagactgggaagaaaaataggttgaatggattcacagtttcacatgctggggaggcctcacaatcacggcagaaggcaaaaggcacttctcacatggcagaggcaagagagaatgagagagaagcaaaagtggaaaccccttataaaaccatcagattttgtgagactgattcactaccacgagaacagtatgcgggaagtcgccccggtgattcagttatctcccacaacacgtgggaactatggaagtacaattcaagatgagatttgggtggggacacagagccaaatcatatcagtcttaatttgaatctgaagcttgcccagcattttctcacgtcaccttaatttgcaaaagtggagcttgggtgaaatgaggaatgaaagtaagagagaaagagaaggaggtcatattgagtgtaaaaaatgtggcaatataatacaggagaaaaaatgtttgctgtggaatattaggggaaaaataacacaacaaatgagttctagtccgtgagctctcatttgtcaaccctgttgattttgggaaacatagataagttatctgatctttaattttgtgatttttgaagtgaaaaacactataatattgcataaatataatggaaataatcaaatgagatattaggtgaaagcatttatcttatattcatgtgtaatgcacacgttctttcttcctttctcatccttgcagtcgcattctcttccttttacgtctttcattccatttaggtgtcaaa

SEQ ID NO: 28053 - DNA, 2054 bp, Homo sapiens
ggtatcaagtcccccttccaggtagccattaacaactattccaagttggcattagagactaaactagatggtcataattggtcctgtctaaaatgagagccatggggaatgcccaattatgattggctgtttccttccatgtttgtgtgtgtgtgtgggtgtcctgatgaggtggttctccagatacttgtatctggtatccagattttctctgcttctccacagcaagaaatgatgtagggcatctctaggcttgtcttttgcccctaatccagactcatgggtctcggggattaagggtcctccaccaattcataagaccttcacctattctccttgttaccatcatcacaaaacttctgtttctgattgctcctgctcctctcccatatttttatttgtcttagagaagaaaatacttgaattaatttaggttagttttttttctgagttgttggtacggtcttccttgaccttaatgtttttattccatgttgttatatgtactctgttgggctctcaagaatctttttattatgcaatctctaaaagtaacctaagaagtaaatttttatttgattgacaatgaaaataaatgtctctgcagtatgcaattatgacacatagattagttttgagaaagtatttggttggtatatttaatgttggacagtgcttctttaacaagtgtattaaaccactccaacaaaacttggtaagagaaagagtctccttcagtttccttcctggaacttaagctcatcacggtaggatacccagaatagaaggaaaattggcactttttcattgcttgactggtctgtcttacatctatcctgatgctggcttcaggcagaaaatctctctgttactagctttgaaattttcacaagatattgcagtaatatttagtgatgaagtagggcattctaaagaatatcagtaaggggttttcttcttcctcatagcacccataagaccttctctactcccccacatacaaaatttgtacctcagttttccacatgtgggtgcctggaatctttctcctatctcctgctgatgtgccccattagccaaacccacacagaagccagagaggcataggagaaacctggtgatgtaacccaaacaggcagccctcccaggtggagaacattttggagataggtagaaagtgaatctataggatcaaattgaaaatatgtgacacactcttcatctgcttatttattgagtacacacacacacacacagacatgctactttgctattaaaacacacaaacacatatatttaaaaattagcaaaaattgaagctaaagccaagtaatttcaaacttgacataataaaatcatttggatactaataattcagctatgtgcaaagcacttggtaggcactgcaagcagcagagatgtatgtgaggaaaagcagctgtttccaaagagcgtatagttaagcagtgaaatcagatagcattttatctcctagaaagcaaagtgttaagtgtaggtgaaacttggacagtaggatccagatttgaatgcaaatagcaacttctaaaatcagaaatgtatctttattagcaccgaggatgtgcctatttgaaaacagatgaagcaaatgaggagcaagcattctcttgggaaaaatgtggaccatacaaatccagcaatgacatgattaccgggaccccaaaatgttctgaaaccctgcgtaatgaccacctatgaggcttatgactcctctagagtgaagtttgcttaatctttttctctgatgtcttccttagttatcttctttttaaattagaaaaattaaaacgtagttccttggttttcaacattttttcaagtctggatgttaattttttcatgatactacatgaggtcagactcaatggtaaaatcaattaatgtattttgcttggaagtcattcttgaagtgaaaaaacattctgctatacttttggtttcagcctctctttatgttaatgaatactaaagaaaacaaaagtagccacctagttgcaaagcatgcgcttgttaat

SEQ ID NO: 28054 - DNA, 1095 bp, Homo sapiens
gaaaggtctcaaatcaatggcttccacttccacctaatgataatagataaaaaaagagaaaattaaactcaatgtatgcaaaagaaggaaataaaagagtagaaatcaaagaaaataaaagtaagcaaaaaatagagtagtagataaaaatcaatgaaaccaaaagctggttccttgtgaattttgatataatgataaatctccagccagacatatcaggaaataaacaaatgagagagagacagagaaagagagagagaaggagtgagagagggaacaaatttaccagtataaagaaagaaaggttaatatttgtaaagattctacaataataatgaatgattgtgaacaacttcatgccaataagttcaacaactttaatgaaatggactttaatgaaagatataagctatcaaagcatattcatgaagaaatagattacttggatagtcttatatatatgaaagtaattgaacttatagctaagcacttcctacaaagaaaacttcagactgagatggcttcattgatgaattccacaaaacatttcaggaggaaatagtactgattccatataaactcttcaagaaattgaagagatcatacttttcaactaattctgtgaagccaatattaccatgatatcaagagaagaggaaacattacaagaaaaggaaactacaaactaatatctgctatgaacataaatgaaaaaattcacaaatccaatcctgtaatatataaaaatgataatgcatcataaataaatgggctttatccctgaaatgcaagattgttttaacattcaaaaataaattgaggggacttttattttcacctttgacacataaagaggttggaaacttttattcctgacctttcaacaagaaaaagctgaacaaaccgaaaatcaatgaattttcttggacctgtgagataattgagggctcagggtaaactgccaccagaaatctggaggtgaatacaggtaaacacaaggagtcccagcctaaatggaacagaagctactggagccctaaactgatagggacactaaaaatactaactttgatgaatccctggaggctgaatatg

SEQ ID NO: 28055 - DNA, 1056 bp, Homo sapiens
gacttcttttcagaaatcatgcaagaaaaaagagaagagagtaaaatatttaaattactgaaagagagacacaccaatatagaattccatattcaaccaaattatccttcaaaagtgaagaagaaataaagtctttatcagatgaacaaaaagctgaggaaattcattgccaacagaacttttctgcaagaaatatgaaaagaagttcttcagagagaaggaaaatgatatatattagaaacttggatttacataaagaaaagagcatctaagaaggaataaataaaggtaaaataaaatcttttatttttaaaattcttaattgatctaatacatagctgttcaaagtaataataataacaatatattaggtgattatagaatatgggtaagtggaatgaatgacagcaatgcaaaatataagggattcaactgatatgggggatgatctaggaagctgatattaccatgagggcaatagcacacacaggctttaatgggtaacacttcaacgggtttgatttttggggaagcctcttatagcaggaatctgtccagagattacagcatggggttggctactcagaagggaagaggaaaaaggaaacattttgaggagagggaaatggagagaaaacttactacctaggtgatgtcactcagcaacaaggaagggattctctaggtcagaaaactccaaagtgcgtagcagcttggggtcttataaccacaggcttgcttttgtcaatggccagcaaatgtgaggatatgtaaagcaagcagcctctcagtgactaaaaatctgcttgtttgagctattttaaaaataactggatatgtaaaaatttgagtttggccctgttgggcttttcagctagtgggtctcagcatgcagtgaagaaataagcaatctggggagcagtacacagacattatttttgacttatttatataacagtaaaggatggagggaaggattgggaatgcactattataagtgcaattaccttataatagcctattcccaattccttccctccatcctttgtatgaagc

SEQ ID NO: 28056 - DNA, 1064 bp, Homo sapiens
tgcatttatataacattttggaaaataggaagtaatctgtagcatcagaaatcagatcattggttgcctgtgggatagatggggtttgaaagggtgggaggaaaggcttaaaaagaaacaggtggaaactttgggaatacgagtgtgttatgttgattatggagacagttttatggattcatgaatatatttcaaaacttatcaaattgtaaatttaaatacatgcagtttttatgtgaaatcttgatgtgttttgtctttttaaaaacttgttattagaaggttgaattgctattacttaattattttcctctgttttagactataatcttttcaaagtcaggaatccattctattttttttaacttttatttttaattcagggtatgtgtgcacgtttgttcatagataaatctgtgtctgtgacatagatagacttttgttgtacggattatttgtcacccacgtattaagccttgtactcattagctatttttcctgatactctccctcctcccaccctccaccctcatgtagatcctagtgtctgtgtttgccctgtatgtgtccatgtccctgtgttctcatcatttactccacctgtaagcgagaacatgcagtatttgattttctgcccctcttagtttgctaacgataatgacctccagctccgtccatgtcctagcaaaggacatgatctcattcttttgttacggctgcataatattccatggtgtatatgtaccacattttctttatctgtctacattttctttatcaccacgcctggctaattttttgtatttttactggagacagggtctttccatgttggccaggctgatcttgaactcctgacctcaggtgatccacctgccttggcctcccaaagtgctgggattacaggcatgagccatcgtgcctggccaaatgctagtgatttttgcacattgattttgtatcctgagacattgttgaagttgtttatctccttaagaagcttttgggaggctgaggcaggagaattgcttgaacctgggaggcggaggttgcagtgagccgag

SEQ ID NO: 28057 - DNA, 1041 bp, Homo sapiens
tcctcccactcacttggccacgggccatgtccttgtcgggacaagcgacgctgttagtgacattgtgagagaaagggctcgtagggctagggcggctgttcacccctgggcagccctggtagctctgggtgggtgaggaaagagggggccttgcaggtggggcggcaagggaaccaaaacaatccctcgggcggcaaggaggaggacaggagggtatcccaggaccgtgggcccagggccctgagggctgggagcacaaactgtcctgagcaggcgcgatgtggtggaagcttgggagctcaggagcctggggaaggcctggagcgtcggaagaatggaggccacccagagagcccgaagtctgggcaggggatggaaacctctggcgtccccactcaacagcagggtgccaccacggcggtccggtgcatggcctcgccagcgatggcgggaggctcttggaggccggcggaaggtccagcgcggagacccacagtgctggggcgtggagggggagagcagcccagcagcgggcgagtggctcagaggtgaccgatcggagccccgcggccctggagtggcggtgatgcctggagccaggcgggcgtggccgggcccggctcttgtgtcagccaggtatcactgccgctgtctaaggccttaccgccctgaagacgcctgctctcctctggtctgtgaagctacgcagggtggggcttgtttcagtttgagggagaccgcgtgggactactggacgctgtgggcttttggcttcccgctctctccctctttcccccttttgttgctctgcctcccaaccaccccctgactctgctaccccttttccggctgcctgagtccccatcgcaccccaggacctcctcgtgggggtccaccgctgcagtaccgccaggcagcagcatcccacctcttccgccttgctgcagctccaccaggtccccggctctagccaggccggggcaggccaggaccagacccccaaaggcacaggcccaggttccctgccatcctggttatctt

SEQ ID NO: 28058 - DNA, 1055 bp, Homo sapiens
agatgcccaccaccacacccagccaatttttgtatttttagtagagacagtgttttaccatgctggccaggctggtctcaaactcctggcctcaagggatccgcctgccttggcctcccaaggtgctggtactataggtgtgagccaccgcatccagcctaaagtacagtataaatctaatgttttgtttttgatcttctatctagacaatctgttcagtgctgagaatggggtattgaattccccagctattgtattggcatctatatctccctttagacctaataatatttggtttatattatatatctcggtgctccagtgttgggtgcatatatatttagaattgttacatccttttgctgaattgatccctttatcaatatataataaccttcatctttttttaatcacttttgagttaaagtctgttttatctgatatgagtacagctaccctgcttgcttttggtttctgtttgcatggaatatctttttccaccctttcagtctatgtgtgtctttacagatgaagtgagtttcttgtaggcaacctatagttgggccatgttttttaatccattcagccagtctatatattttaaggggggaaatttaatcagtttacattcaagattgttactgataggtgagggcttctgtcattttgttaattattttctgttttttaaatatatcctttgttcctttcttcccctcttattgttcatccttgtaatttggtggttttctgtagtggtaaaatttcttttctctttctcctttgtgtatgtgctgtaccagtgagttttatacttttttcgtgctttcttgatagtaactatcatttcacttccagatgtgggactctgttgagcatttcttgtaaggctggtctagtggtgatgaattctgtcagtttttgcttgtctcagacatgtcaggcatttagcttcaggacctgattctagttcctgccctgtggtgacaaatagaaacagatccctggtaccctgcttaggtactaagccagctagatgagagcagatgaaaaaa

SEQ ID NO: 28059 - DNA, 1051 bp, Homo sapiens
catcttggctccttcacttacagccccttacccacccccttcctcaaggacttaacttgtgcaagcagtctcccagcacatccaaggacgcaattaactaataagatactgtggcaagctatgtccgcagttcctaggaattcgcccagttgatagcacccagagcccctgtgtttgtgtccagttgataacacccaaagccctgcgtctatcaccttgtaatggatttaaagcccctgcacctggaactgtttgttttcctgtaaccatttatccttttaactttttgcctgctttacttctgtaagattgttttaactagactccccccacctcccctttctaaaccaaagtacataagaaaatctaacaccttctttggggccaagagaattttaagtactagccatctcttggtcaccggctaataaaggactcctgaattcatctcagcatgtggcgtttctctgtaactcactcggttacaacaactgtctatgttcattcagggcactgtggctctacaatcagcaggtgaaaaagtcagccaggcctcgattactcccttcagtttagcaagtttctttaggccctaggttggttcagaggtgctattcaggagtcagggactaaaataaaaaacttcagaaagctaaggttttggcagtgagagtttggcagaagagtgtggaatagatctttaaaaaagtgaaagtttctaaataaagattgaaacctgatgggaaaaacaatagagaaaaatacaaaaattattttcatgctaatgttacttatttatttatttatttttgagacaggatcttgctttatctccctggctggagtgcagtggcctgagcttagctcactgccagctctgcctcccgggttcaagtgattctcccaccacagcctccctagtagttggaaatacaggcacgtgccatgatgtccagctaattttttgtatttttagtagagatggggttttgccatgttggccaggctggtcttcaactcttggcctcaagtggtcagctcacctcggccg

SEQ ID NO: 28060 - DNA, 1035 bp, Homo sapiens
aaaatatatatatatatatatatatatatatatatatatatatatataaaaatacatgttttcagtcatgtagtgtatgtgtgtgtattatctttatatatgctatgtattatgtatatattatttataatatatagataaaatatacattatatatagaaacagacaaaatatacattacacactcacacacacactcattcacacacatgtgcaatgtggtctaaggtattgcagtgtggtaacatgtacacatttcacaagtttacatctttgagttattctggaagactgttatcacctctggcaaggaaggttcattaggaggttaatgggttctaatgtacatgaaacggttggctactgccttgtctgttacccagaggccctaagcaatcaggaagacagtaacaaaatttctgctcttggtaacgtttgcagtgcatttcataggtgtcattaatatcacaagctgagattgaaaagcttctggggatatatgaaaaattaatgggcattagaaaagtaaaatagcatgaggttgtgtgtgtgtgtgtgtgtgtgtgtgtgtgttaaagaatgcatgaagattgtgagcagatgcccaaggggtggagaagagagaaacagtatctctgtggattggagaaaggactgtggagggaagggctgcagtgtaaactgaagtaactgttttaatgaaaatctgtcagacagtagagctacaggcagcactgcttaaatccctagggaaaaagtagagtgtttgcgtttttgcgtagaacatgtatctaatatctgaagcaccttcacctacttccaggtgagcaccaacaatggccccaattcaccttcaagtggattattatcaaagtacatcattatgatactatcaggtcatggcaagtgttataaattgtgtacgcacaaaaattcatattttaaaactctaacccctagttcctcagaatgtgactatacttggagatagggcccttcagtgggtaatgaagtcaaaatgagactgctagagtg

SEQ ID NO: 28061 - DNA, 1028 bp, Homo sapiens
caaaaatgaacacattacattgataaagtataagattgatctaaaataataaaaaagaaatatagtaataaaaattttttatgaattcaagtacaatccagttttctattttaatccatatatattataccaaagtacaaaaaatatataagcttctttacttgaaaaatctccctaaggcttttgctcaacctatcaccacatctgtccatttaatattctcttttttttgccattaatatagaggcccctaaatttgacttcatttttttatttatttgtttattttaaattcataaaattctatgtattcattatgtacatggtgttttgaagaataaatacattgtggaatggttaaatatagttaattaaaatacacattacctcatatagttattttgcaacaaaagcattcaacatctactctgcatttttcaggaatataatattttgttattaactgtggtcaccatgctgcacaataaatctcttgaactcattccttctatctaactgtaattttctatcctttgaccaacatctccttaacaccttcccctcccaactgcccagcctctggtaaccatggttctactctctgcttctatgagatcaacttttttagattccacatgtgagtgaaatcctacagtctttgtctttgtgtgcctggcttattatacttaacataatgtccttcaggttcattcatgctgttgccaatgatgggatttccttctttattatgtctgaatagtattccaatttatagatctctatctatctatcatctatctctctctatatataggtgatatatatatgcatactatatttttaatatatatagtatataccatatactatatatatataatatacatattatatttttcttacagcttcatccactattgaaatcttagttttattttttatcttggttatagtgactaatgctgtaattaacatggaagtgcagatatctcttcaacatactgatttcatttcctttgatatacacc

SEQ ID NO: 28062 - DNA, 1011 bp, Homo sapiens
tagaaaatattttcatttaaaattcagtcttaatattttcagtagtagggggtagagacttatatttgtagttttttatagttttctacatgcttttcatagctgttaaatcatttaagcatacaaggtttcatcatggatcacagggatactgttatttatattttatatttgagtcaatggagttgcaaaagttaaccagttcttaaggtcacaggatgataaagtgctagctttgaaactaagccttctgacattaagccattgaattaattattttactttttgaaataacttctctgtgttaattttcaaactcatctagaattttgtatagcctgatttattgatgcaatggtagcctccacatacactctctggcaggctatcccagaggtcatgaaactaaaaggctcccacaccaaatgaaaatgttcaaattacagcttttgttacatccattttaaaaacagtgaaaagcaagaagaaagatattggatagcttagcacacttaggaaaagctgcaagtaggcagaaggacgaactagctgaattctggttacactaataaacacgtgccctgtttctctctgctgtatcagcctcccctgctgactgcagtacttctgcagcctctctaagtggttcaggctttttgatgtatcacttgttggtttttaaatttctcttgctatactgaaaacaaatatgaataacaaaaacaatccgttcttgcaaagggaaagtgcttctctttgcattctctttgcatttcttcttttttttaatgtttggcttcatcatgctctctggtactgtctggttaacttacacaggctgatagaataggtcagggtatattatgttctgatatatcatatagatgtatgatatagatagagatctatatctatatatagaggagaggaatagatatactctattcagagtagacatatagatctatgtatctctatatagatacttatatatagagagagaagtatagc

SEQ ID NO: 28063 - DNA, 1027 bp, Homo sapiens
ggtcactcactaaagaaaacaattaaaaaactgtttgtgaaactttatatctttaaagtgaatagagatcattctgctattttagattttgctttcagaatcttaagtgcactatcatggcttgcaccatgttctgaagagtagttggccatgatttaacttctttttttaatttttaatttgcgtgaaaagcattttgggcaaaagagtaaaccgtgccttagttgtgttggtattacggggacagttagggtttactgtgatcaaccaccagagttatgtttggtttatctgggtgagtaatgaatgccccaccctgttgtagatttggtgtagattgcaatattctacctgtgcttgactttagaataagacctgttctaaaatgggctgtctacatacagcctgctaaatttttgctttgagattatttttagaattttatgatactgctttaaagtaatcgaagatactcaagtttggaaagcaaggatagtgcattgttattttaggcacgttgggaaagttgtttttgagacttgtatgttagttgatattattggtaaagttagaaggatattgcacactgcactttatttacagtgaaataattcaagatttaataatgagaatttaaaagagtttccttcctaatcctccctattctattttgaataccttcaagttcaatttttaaagacttaaggcttaggaaagagcacatggtcatgtgaacgctaagcaatatttaatatgtatggtaccatttgtttataattgtcttcagtgttgaatattaaagtctgtttcaaagtgagaaataccaatttttcacttcctaagtttgaacaatgggaagaactttgtaagtttaggatttttttattttcatttgattttgactaaactgtattaaataactatgcaggctctattgtatggttcagaggttatgcataaaattgtagaatcaagaatcaagttaacgaaagtgatcttggctgtcgagtccaatttcctactttaa

SEQ ID NO: 28064 - DNA, 1045 bp, Homo sapiens
atatttagattgttttacagaagaaacacttaaatgtgtttgctttccgtattaatacacgattactttgttactcatattagaactatttaaaaatatttatatggatacaagtaaaccatctacctcgataagttgacagatttaaatccgtcaagctagtaaccaggaagcggacttaaagctggtaactaggaagtgaacttcacacttagaagaaacaaaagtgaaagtctgtttttactcagacactttatgggttatctaaaaggagaggtgtgtagtgtatattgcatagccaacattttagccagttttcttctcaccttaaaaaactgtgtgtacatatgtgtttttaaattttaagtatttactatttaaaatttaagtatttactatttagctatattattttcaagatttttaaaacttttattttgcagatggatgtaagtttttttgttgtttgcagcaccacactacacaaaactttcatgattttttggttcgcctatagaattcattagtctttgtcacaatgtagtatgatgaggcaagaggctgcctttcccttttgatgtgttctttgcttgattgctggagtttggccaacccagggacttatgagatgtagtaaaactgcagaaagctgcttttctgaggtttaggtatttcaggtgaggtgcagttggcagcagatgagttaaattctgtgataattttggttttggacatatatcttcagcctttgtgcttcatgtttaccaaagtgtaggagccttagatctcagaaatttgatacatagattcaagttccaaatgaggatactccacggcgcccccccccccccccccaatctatctaacccgatgaaccaagctaggattctttagggcagttattattgggaggagttttgctcccagggaccaaattaatttacagagtgaaatgaacaggatactatttaattaaatgtatccttctgagttgaataaaatatattgtttcactctagggcttagaacagttctttacacatag

SEQ ID NO: 28065 - DNA, 1029 bp, Homo sapiens
ctgcttaataagaatcgcagattattcttctgcacttaatgtttgaggatcactggttgaagttaattagtattcttaaaggtaaaagtgccttgagcactgtgtaaattgactgcaggggtcctttagggattgaattatcacaatacaccaaatttaatatggaagcagggtctttgaacggacattgtttttttttgtttcaggtgtttctctccatcagtgcagcaacatgtttccttgtagaggagctgtctcctccctcaggcttttctggccaacatctctatggaaacccaaagcttcaggtggctaggtgggatacttgcccctcttactcctggaggcacaaataagttgaatcgatggattaaggagttggaaagtgattgtacatgctaaagttgtaatcttcctgtttctttctggctgtttttttttttttttttttttttttttttttttggtatgtgcgtgtgtatttgtgtatgaataattcctataggatttttttgtgggggctaaccatagcatatgaaaacttatgtacaacttaaatatattaagattagtattctttgtacaattttagacatgaaatagaatatcttattgtcctggaaatttcctttgttcctcattcatactgtccctcttttctacaccaccccccacccccacactactgctatcttgacttttttcaagttaatgttatcgtggtatgatttacactgaaagtgtgtaatttgatgaatttggccatacagaacatttctgtcactccacaaaatttgtcctgtatcacctttctcattaattatcaacaccgtcattatttcaggcaactgttgatctgatttttattactgtagatcagttttggctgttctgggtcttcacatcgatttgtttataccaaattttttttttttctcgcatctgactgcttttgctcagcaaaaagcttttgagattcacccatgttttattgcatgtatcaatatgtttctttttactatggagtaa

SEQ ID NO: 28066 - DNA, 1050 bp, Homo sapiens
agctaaaggtagaacactccaggaccaagtgctaatatgttcacaaaacaaattgagattgcacaattttttttgtttgcttgtttaaactaacacctgataaaaaggtacattgctgaaaaatgggaactcatttcttcatcatgcctcaaagtaaatattaaatttatctctttaacaattaattgcacacatacatgagaaatctttatgatacatattttattacaccgtgtacaaaaataatttcacattttagttgggttggaagtttgaaaagaacatagtgcagttgcaggggtgggatgaactgtggtgaggtaagtaaattggacagaaattgggcagaaagatacttcctttttttttttttttaacagttttttatctgtctgaagacagggaagaagaggaatctgaattggaaaacccccactatatctgttgggtttttgttgttgctgttcagtctggaaatgggtggtgtgtggtgagaggtcattaggtcatcagggcagaattgtttgcagagctgggagctacatcctcacggaagtgggatagatgtgctggggaggggtgtgcagagaggagccaggaatgatgtaccattagtggccagggcttgttatggtaacaccaatgttgaaaccaactgtgcattcacatatacaaaagttttgtgtcttaattcatgccagaatacatgcataatcaaatgtctcagttaaggtggagctacagaaacactgggctgaatgaagttctggggttttctttgtcttcgtgtgaggcctctgggctgggtctgggtgtctgatcaagaatgccctgaagttttcccatggggctttggagaacggctttggagctgggcagagctgaggatgagcacagaagaaaggaaacgagaaatggtccactacctgaggtttaaaatcctcaatttttggagggaagaagtgacacaagattttatcggtgccacttcaccagcaagaaacctctaaggccagcagtgcctctgcccaggctttgcttacactcact

SEQ ID NO: 28067 - DNA, 1052 bp, Homo sapiens
ataccgcatgtggcttccacagctggactccagcattcagatgaggggaacgtggtggaacccagaaactcggagacggcagcaaccgtggagccccaagggggtgtcatagcttctgcctggggagtcccgaggtctgagccaccagggaatgccacagccctctcttgttcctgccgctcacagctccctgaatgggggtgtgttagagcttgtttattcctgctgcgcatggctttgtgaatgggggtgtattatggttctagttcgaggggtcctgatgtttgggcccccagaggggtcgcggctcatcactcccatattccagcaattgggagtgtgtaacagctcttttcatgcccactgcccacagctccaggagccagccaggtgcgtgttacagccgttctttgttcccaccgtttggcgagttctgggtttttgtccagtgaccaagaataatgaggtacgtggacaccagagagtgaggaaggcagagaagaatgttattgagcaacagaaaagctcttgacaatgagaggggacgtgaagtggatagccctctgtgtgagggggccccaaaagctggtagccatctttgcagttgagtccagggtttttttaggtttggaatgaggagatgtgggctggaggtagccttggaaaaggcaacattcaattggtttaaaagcattattcggaaagaaccaattgggaaagagtaggcaaaaagaaaagttttcactccagctgtggactctatctatatctagaacaggcagcttggtaggctttaaactgtctttggtttgaaggtcaggtttcaccagggacctgtccctgcctgcctaggagttggtctactgtggcgcctgcctaggaattggtctactgtggcgcctgcctaggaatttgtctactgtccctgcctgcctgggaatttgtctactgtggctatcagaaacagctctgcgcaggcctcctggggtcagtggacactctctttaccaattttggtagcatcatgcagatttgcagaactggcttctagg

SEQ ID NO: 28068 - DNA, 1043 bp, Homo sapiens
tgctgggtggcgccaggaggagagcaccagtgtacctgagcatgtcgaactgtagcagagtagctgaaagcagcatataagatgaccctggtcagctctgtggtttctatggtgtaaagtgggtaggggtttcaggcctttggggttacagagatcagagccactccctcaggtcatggggtcctgtgctaggaggtgtggtcctagggctgtgtgaacattggtggggtttgccattactttatttttgtccatcttggtgttggcttaggcaaaccttagggtctgcgtttttttgttgttgttgttatttttgagacaaaggtctcaccgtgtcacccaggctggagtgcagtggtgcaatctggctcactgcaacctctgcctcctgggttcaagtgattgtcatgcctcagcatcccacatagctgggactacaggtacacgccaccaggcctggctaatttttatgacggggttttgccatgttggccaggctggtcttgaactcctgacctcaagtgatcttcctgtctcggcctcctagggtctgcagttttgttgttgttgttgttttggggcagagcttcgttcttgttgcccaggctggagtgcagtggtgtgatctcagctcacggcagcccccacctcccaggttcaagcgattctcctgccccaacctcctgagtagctgggactacaggtgcctgccaccacacccgtctaatttttgtatttttactagagatggggttttccatgttgtccaggcgagtcttgaactcctgacctcaggtgatccacctgcctcagcctcccaaagtgctgggattacaggcgtgagccaccgcaccccgccgggtctgccgcttttgaatgaaagtaaatgctcttccaagcatttcttgcatgagcagaagagtgtgtagaattctctcggtttgctgtctaaagcaagagggctgactgaccactttagggccacggcctccatccccgccacttcccctcccttcccctcccttcccactccttcttttcct

SEQ ID NO: 28069 - DNA, 1049 bp, Homo sapiens
ggacaaagaaaggacaaaaagtagaacaaaggagatttggtgtaaagaagtattgactaggaacagatgattggctgctagagggtaaagagaactctaaagtaagaaatgaatttgggagaggcccttcagaagccccaagactctgagagattgggttcttgttggagaggttgtgaatggagcccactggatggcagagcagtttatagaagtgctgtagcttgggacattcctgccagtagctcttttgaagtggtgtagagtatgtgctttatcgtatctagatgaatggagtttccaagagaccataggacatattatataagtaattagcatgaccaaaaactgtatttgctttaaagaattgtgacaaatataactgctaggaattatatagtattccagtttcagagttctacttagagcacgtttattttgttttattagtataagggagtttatttttggattataagctaattaggcaaacaagtacagaaactagagatgcataaagatttaattggacaagagagctataataggaatctgattattagcatcaacaagttaaatacatattttatttaaactgcagacatagtgatttaaggatatgatttgattcataaaagttttgtttacctacttgttttccagaatataggcactctaatttaaaaacagactgtgttccaaaagattttgcaagttgggtttttggaactgaaaatacatgttcccatagaaaccatgtttcctggtggtgtgttcttatttagaaatgtaactctgtgtgaacttagcttatagtgctgagtaacagtattttttgggagaaatacatttagagtttctactcatgatgtatttattttatctactaattaatagggatggggaatactcttttacattgtaattaaaaaaattttttttaagacagagatttgctcttgttgcgcaggttggagtacaatggtgcaatctcagctcactgcaacctccgccttctgggttcaagctattctcctgcctcagcctcc

SEQ ID NO: 28070 - DNA, 1047 bp, Homo sapiens
ttgttttcgtaacctcaacattgatatacagcaagagtataataaattcatattttcttgccttgtcttgggccagtgatccctttttttgcatcctcaaaaagttatactgatgttaaatatgccctctttactgaaacagattttaaaaatacccagcattaagtggggtcacctgagaagggaaagaatttctatgaaactctcaggtttttaatttatattgaaattaccaatatttccttatatctgaagtgcatagtactgtattttgcacatagtagacacttaaggatgttattgtgcagtaaaaataacaggaaggaatctgaagacttgtaggtaatcttgacttctttgcttattaatttttgtggtgtttgcaagtaactgaatctctttggacgttgcatcttgcccctttggtttagcagtgggaagaggttgaacccacctccctgtacttaactagagaaaaaaaatccatacaaggagcatctcagagcccagaagaggagctctagatatggaagtggattggatgggaaccaccttggatttggaattgctggtcagggagaggaccatatttaggacatttccagttgaggatcagggcgtatcacaggtcagaagtttcataaatgggaaggtacaaaccttgaaaaacagactagggtcttaatcacaacagaaatggcaacaaaacccccacataattgcaggaaatgaaggttcagggtttcaaatacaggaaaaacacaactggaagatgccagtaacaaagggaaaaaaactttgcaaatgaggtggcttctctaacttaaacttaggatttttctcattgctcacctcttcccatttctctctacctaggtttagctaagaaaattctttcactttttttgttttcttttccacctggccttctccccgatcaccagttcttttcattgtttcattttcagtcaagatttatgaaaacatgaaccatactagagatacacctgatttttttctaggatatttgtctgaatttatagtaaa

SEQ ID NO: 28071 - DNA, 1041 bp, Homo sapiens
atgcaactgtgttgtgctttgtgaggcttttgtaagtggaagtttgtaggtggggcttgttaaagaagtctcattcatttgggagacaccttttgtcctttgcccttctctttatcctacctagaacttggacaggatgatggaggaggagaccatgcagtgacaaacattctgatgcatgttccactttaaagacttgatgttgggtgtccctactaggtctggactgcccattgtgtcttctaagttagaaaagaaagacactccagagtattgaagctgctgtttagttgggaatctgttacatgtagctgaatatagtttctatctaatacatatgatttctgtaaaagatacttgggctgcaatatctcttaaacctttcatgtaatttgtttaggactttttagacttctgaaaatacatattttatacataaattgtcaagcatgttttgaaatgcacattttacaatttgatgtcaacaaagctgaatgcagaacattttaaaactttttattttgaaatttcaaatttaaagttgcaagacttagtacacagaacttccataactttttttctccccaaaccatttgatagtaagttgcaggcatcatgcccctttagcacttaaattcttcaggatatatttcctaataaaaaagatactctcttactatactggagttatcaaattcaagaatttaatattaatgaaatgtcattactaagctgtgcatatttatatttctccggttgtctcaatatcctgcataacatttggtatgggatgcagtcagttccccctttggctcacatgcttctttagtctcctttagggtggagacttcacctgcttttcatggcatagacatttttgaagatgatagaataattatttttcacagtgtccttcagtttgggtttgtgtgatgcttcctcaagattagatttcggttgtgcattttcggcagggctatctcacagattatagagtgtcaggaggcacgcactgccattttatcctattattggtaatac

SEQ ID NO: 28072 - DNA, 1039 bp, Homo sapiens
gtagagaaatgaagtttctgatgtcatctcaaccgattgtcatattgagtaaattgcttgctgttgtggtttctttatccataaaacacataatacgtaatatgtatcaagtgctttccctctaatcagggtgccaattgagatagtgtgtccataaagttggttagaggttattgacagcaaacagttgtaggaatttaatgtggcaattgtactatgatagtatcaaaccagaaaaaaattaactgttggcgtaacagtaatacttttccattaaacattcctgccagtagtgtcataatgcagtgttactggtttaaaactgagaaagtggggagatgtcatgcatttcagcaggtattaaaaaaatactctttaagtgactgtgcagttactgttgagaagaaatgaagtcgtgtatttttaattcttggaagatgtggtaaaacatgagggaaggaaagacaaaataattacaaatggatatacattcaaatgcaggcctctatttaaaaaaatctacctaactgctgtaggaatgtagaagaatagatcagagtgtgagttttcaagggattgttgtagatataaaaaccctttttgagcactttctccattttgtgtgaaatacattgttatttaaaggttgaccacagtttcacttaattctttcaaatatggcagggatttttattttcagtttttttccattcttctttttgaggtataaaatctcttaaaaccagggctaaagcagaaacaaagtcatgctaactttaagtgatacacttggttgcagtgctgacaaaacgtctgtcttctgaaatcgaaatctctaataccaaatacatatacctctttgttgatattagctggaatatcactgtttacaatggactgtttcttttagaaggaataaattttttttttgctgactagaaaaatttagtttttaaactaatatcacatggaagttatatttggggcatatggagaaatttttgtttatgcatacctggtgtgtcagaggctaaactat

SEQ ID NO: 28073 - DNA, 1767 bp, Homo sapiens
ctcaggagtttgagattgcagtgagctgtgatcatgccactgccctctagcctgggtgacacagtgagacactgtctctaaaaaataaaatttaaaataagcaaataactaaaatgaaggcaaaacgtgtccaaaatacaaataagcataatcccaaccatgcaaagataataacagatagtttctctttctgatcatattattttgtaacctgttaccacttccctacttagcaatataccatggtttctatcactgttgaaatgataatgggagtatttatcattggcatcatctgggttagggaaattgaccaatatatattgggaaattggattaaaagtcatttttattgaaggcggtattagttgtaaccttttttggaaaaagaattaatacttaatagcatcaaggctattttttattagaagagggcttgtttcattcacttgtatatttcatttttgtgaaatgagaatcttgttttaaattaaaaggactgcatatttattaagcaattcagattgtatagaagtatttaaatagaaagtgaaagattcttatacttcttcctcctataactcctttcctcagagttaaccactgttaatagtttggcacattctttcagaatttaaaaaatgtatgtgtaaatgtacatctctggttagtttctgaaacatcagtttttaagagttcactgttaattattgtaatttgataatgtctagatggtagtagtatggacagaatttaatacgtatgtaatcgggttaacttcagaaagcagaaatgtcaatgtttaattgtattgatttcaatttttgttgataaaccattctcagcagtctttctgcttattagcttttaataagagacctcatagtaaatacagagattcttctacagtgaaatatatttctgcttactgctttaggtatattttatcaaaaaaatcattgagttactgagtatgaccagttaaaaatatgtttgcatttatttttagataggcttttagaaatacaaaattagttggtactgactggtttaaagagtatattggatataaaatctccataataaaaatcctttcattttgttttacttttaattttgagaaagatagttttgcttttcagatgtgattgatctcactggagatgataaagatgatcttcagagagcaattgccttgagtttggccgaatcaaacagggcattcagggagactggaataactgatgaggaacaagccattagcaggtaaaaacataatttgtataaagcagatataagtacttttaaaaatagaaatcattaattgggttaaattaattttaagaggtaataagatatactttgttactctaaactagtaatatgcttgtgtatttttaaattttatgtaaccaaaatcttcatatttagttttgattgcaattgggtttagatttttaagattttgggatggtgttatgagggattacatttaggtgcatattttaatatttctttcattttttttcttcccctaatcttttttggatgcactgtccaatttgcaacaatttatagcaagggtcagcatcctttttctgtaaagggctaatagtaaatatttttggctttgttggctatagggtttctgttatagctattcagctctggtgtcataacgcaaaagcagctatagctgataaataatataatgagcttggctgtatcctaataaatcttgatttacaaaggcagccagttggtttt

SEQ ID NO: 28074 - DNA, 1028 bp, Homo sapiens
aatcttttaaaattgatctttgaggaggatttcggtgctcaataattccagatacttgtggatgctaaggagcatggaagggccatcgaataaccatcaaaccatttaaggtgtgttatgtcagattatagatgatctggaaaagtaagaaatatgacacagattagtttcctgggctacaaggttgtggctgcaggtgactgatgaacagcagcagtgtaacttgaaaaagtatcagcaacagtgaggtaccactgatatccccaggaagagggatcaactggtcgatgtagtcaggctgtccgtgtggcaggagccacaccccatgcaatgtgggctctcctacggccagatacacaggtcaacttttggtaggaatcacatgtctgacaagtagtggtagcttctgtgttagaaacgtagagttccttaatttgtactctgtatacgattgtggatgtgattccattttgggtattgtgattgtggcagtggtggtgatctgggttgtgcaagtttgatcaaaagctttattctgttcatctcattgaagaacacattagagcactcatccatcacaatggctaaaattaaaaagactgatgggaagtgatgtcagcaagatcgccaactagagttgcttggctatcatttccctcacaaaaaaggaaccaaaacaacgaataagtttattttgtctggagtgactgaggaaatgccctggagagtaccaagagaacagcaaagtccctgtggagcatagagtcaagaatagctccacagggaggagaccaaagtatcctgcctctgccatactgtctcccctgcgaggattgaatcaaagccagggggttcctcttcttataggaagaaggtaagcggagaatcatcagtcctcatcaccaccacaggtgccagcagtcactgctacaagagagttccccagtcctcacaggtcccaagtccagcatgaacagttgctgaaagtgcatgtggctacattcccccacagcaggaacctctttgac

SEQ ID NO: 28075 - DNA, 1097 bp, Homo sapiens
tcagcagagactgcacaagacaggagagagtgggatgacatattcacagtgctgggaaaaaataaaaataaaatataaaaataaaaactgtcagcagagaatatatccggcagtgctatccttaagaaatgaaaaagaagggccgggcgcagtggctgatgcctgtaatctcagcactttgggaggccaaagcaggcagatcacgaggtcaggagatcgagaccatcttggttaacatggtgaaaccccgtctgtactaaaaaaaaaaaaaaaaaatacaaaaaattagccaggcatggtggtgggtgccggtagtctcagctacttgggaggctgaggcaggagaatggcgtgaacccaggaggcggagcttgcagtgagccgagatcgcgccactgcactccagcctgggcgacagagcgagactccgtctcaaaaaaaataaagaaaagaaaaagaaatagagacgtttccagacaagcaaaggtgatggaattcatcaccactggactggtcctacaaaaacacttagaggaaataataggaaatgaaagaatgattaataccatgaaaatatgtgaaaatacaaaactcatcaatataggtaaatccataatcatattcagaataccccagtgctgtaatggtgctgtgtaattccttccgtcctctaatatgaaggtttaaagttaaaaatgtcagaaatatcaacagctacaattagtggctaaggaacacatgaaagataaagatgtggctgggcgtggtggctcacgcctgtaatgccagcactttcggaggctgaggctggcggatcatctgaggtcaggagtttgagaccagcctgatgaacgtggagaaaccccgtctccactaaaaatacaaaattagctgagcatggtggtgcatgcctgtaatccaagctactcgggtggctgagacaggagaattgcttgaacccgggaggtggaggttgtggtgagccgagatcacgccattggactccagcttgggcaacaagagcgaaactctgtttcaaaaaaaaaaagataaagatgtaaattacagcaatcaaaacactaatcatggtggggtag

SEQ ID NO: 28076 - DNA, 1050 bp, Homo sapiens
ttcaactgtgcatggaatattctccagtaaagatcgtatgttagagatggtatcaagtattttaccagatcacaactatataaagctagaaatcaacaacaagaaaaacgttagaaaccaacaaatacatggaagttaatatgcaccttaataaccaatgggtcagtgaagaaattaaaagggtaattagaaagttccctgggacaaaggagcgtggaaacacatacaaaaacctgtgggacacagtgaaacctgttctagaagttcatggcaataaatgcctgcatcagaaatgaggaaagatttctaataaacagattaactgtgcaactcagagaaacctgaaaagcaagaacaaattaaacccaaaattggtaggatggaaataataaagcttagagcagaagtaaacaaatagagactaaaagagcaattcaaaagatcagtgaaatttttttgagaagataaacagaatcaacaaacctttagctagactaagaaaaaaggaaaaaaaaaaagactcgaataaataaaaccagacatgaaaaatgaaacattacaaatgtatcacagaattggaggatcacaagagactattatgaacaactgtataccaacaaattctagaatataggaaaaatggataaattcttgaacacacacaacctaccaagattaaattgagaagaaatggaaaaaataagcagaccacaacgagtgggagaattgaataactgctaaagcctgacataaagatccctagtttctgatggctacattgctgaagtgtgtcaaacatttaaggaacaactaatattaattctcaaactattccagaaaattaaagaggagggaatacttccaaactcattttatgaggccagcattaccctgattcaaaaactagacaaggacacaacaaaaagaaacaggccaatatccctgatcaacctagatgcagaaattctcaacaagattctagcacgtccgattcaacggcatattaaaaacatcatccactatgatcgagattcatcccagagatggagg

SEQ ID NO: 28077 - DNA, 1398 bp, Homo sapiens
gtcatagagtgagcttgttatttttgatggattttgtcctttaggcatctccagaactgactgctgcgtagttgaggaactaagaaaatttttgcacaaagtttgagccctagtaaaacatcttagactgtgagttggaattctaaatggttagaatgtagcattaactgagaactgaaagttaagacaggcttcctagtttctgaattatatagttttaagttatctcagaatttattggattaaggcgacctgagactgtgactctagtctccctgcctgccagagcaaatgtaaattctctcttagaagatagtattatctggaacctttcctcaatttttcatacacaatgtctagtactcaggtcagtcataccagaaaataagatgtgtgtgaaaactaacacaaaaaaatggacaatagaaaacagcacagggaaactggaatacttgtctgccataataataattaatatgttcaaggaattaaaagcaagattgcgagtctgaagaaaactaaaaactgtaaagaacaaaatgtaaatttcagaatggaaaaatataaatgaaactaagaagtcagtggataaatttagcagcattattagacacaactgaagagataattagccaactggtaaattaatctggagaatatttttcagactaaagctatgacataaagatgggagcatcaaagagatactttggatatggtgagtagtactaacagtgtatttgtagttccagagggagagtaaaaggaaatagggcaaaagcatgtttgaagagattactcacaatattccaaacttgagaaagatcaagccatagattcaggaagcaataggaatcaaatagtataaacataaagaatactgcaccaaagtacatcataataaaacaaataactatagacaaagagaaatcctaaaagttgcaaggtggaaaaagatacacgtataaaggagcaaaaacaagactaatagctgactttgatacctttaaacatcaagtcacacataagcagaaataatgtctttaaagtgctagaaataaataactggccatcttgaattttatacctagcagaagtctttaaaaatgaagaaaaactagctgaaataattcttcaccagcacacccacaccaaaggaagttctaagtatccaggaacaaggaaaattctctatctacaatgggagctcagagaatagaagtgggattgaaattcttctaacctgccaagattctctttcctctttaaattcctcaaaagaatagtccatggtttgtctcccctacttaacagtagtcccccttatctttggtttcactttctgctgtttcagttacctgctgttaattgtggctgaaaatattacagtactgagag

SEQ ID NO: 28078 - DNA, 1031 bp, Homo sapiens
ctacttaaagtgaatgtcatcagaaggaaatgggtttagttgagtaccatactgtattcctggagcaaatacctgaaggaattttgaattttacaaataaaaggggcattctgagatttctgccattagtcatgaagaagtaacaggagctggatttataagtctcagtgcatcttagaggattcaaagcatacaaaataccttttctgatgaaaatggtagaaatcaaggtagaaatcaacaacagaaagatatacagaaaatccccagatagttggaaatgaagtaattcacctctaaatatcccaagggacaaaaaaacaaatcaaatgagtaatgtcagaatattgtaagctgaatgaaaattaaaacatgacatatcaaaatttgaggatgaagctaaaacagtgattagtggaagatatcttataagagacatcttaccagacatcttattagaaaagaagaatggttttcaattaatgatagcagcttgcatatcaagacattagagaataaagggcacgttaatctcaaagcagaagtaaggaaataataaaggtaatagcagaaatctgtgaaccaaatatcagaaaaacaatacagaaaattatggaaccaaaaactgcttcttgagaagattggtgaaattgatgaacttctaggtagactaagcaagaaagaagagggaagacatatattacaaatataaggagtgaaaaagggaaacatcactacatactctgtagacactaaagggagaatagtggaatattataaacagcagacaagtatcttgaaagtcacaagctatcaaagctcactagtgaagaaatagataacctgtggtagccctacattatattaaaggaactggaacctgtccaccaaaaaattcagcagctaaatagttttacttgtaaattatattaagcatttaaagaacaaatgataacaattccctataaatttgtacagatacttaaaaagtaaaacttcccaactcattttgtgagctaagcattaccctg

SEQ ID NO: 28079 - DNA, 1025 bp, Homo sapiens
gtagtaaaaagttggggaaaagatatagaaattcttgtctttgagaatcttatagtcttattgagaaacaaaagtaagatttcagaggaatattaggagggtgatatattagtctcctattaggatctggtctaattattaaattaataaaattaaataaatttaaatattgtgattgaattatattaaatataatgttcgataactttagatataaaataaatgagtataaaataattttataagtaatttttattaaatataaaaacaaatattaaatttctaataatcgggtgaggttctaatattagtctaataattaagattgtcacaccacagtgacagtcggtgattcattgctcagtgaaaggcatttatttcagtagatgtggaatttgaaggtatcgttgacttgaaggagtctggaaaggcttcatggaggagtggagatttttgctaaatgggtttattgagatcaagcacttagaacagtgcctggcatgtagtgaacactcattgaatgttggctgttattattgctctgagcagcagcagctgggccttgctgaatgggaagtattatgagaagcagtcttgaatgaggaagatattcttggctgagtaatgacatgatttgctgtgaatatgtggcattcatgctgaaattgtgagcctatcctaggtcttctgcctttttgtgctggacttctttgagtctcttagatggcaccaacactctactttcttcaattatgatagagtgctaattcatccctaaactatattggctagtttaatttttggttactgttaaaatgaatatttattagtaaaaattttcttaatcttcagttaaggtgtttttgtttttgtttttttccttcaataggaacatcggaatttgccttttatgcgtgagctgaggtatctatttgcacttcttgttggtaccaaaaggaagtatgttgatccatcaagagcagttgaaattcttaaggatgctttcaaatcaaatgactcacagc

SEQ ID NO: 28080 - DNA, 1465 bp, Homo sapiens
ctttatatagtgtattgtggtagatttttatccattaccttaaaagaatattggtaattttcttataaaaaatacaaaatatctataaacaaaccagtattttcacatataattggaaaaatcagagaaattaaagaaggaaaacagaggaaaaaatacagtggcaaagaatagtaagtgttcaaaaagatagcggcaatgtgtaatggcagaagtttcaaaaagccactaagcttgcagcgttgttttttaaagtacatacttggatgtgtctctgttttgtgatgtatggagagggcgtttggaagaggaaggtctgagattctctcaccatcttccttgtgctttttgtttctgctttacatttaccttgtatggcaaatgtgaatgaacaaaaagggcactcacatcagagtttcttttatatgttgttgcatttttaaaaaaaattctaacaatgctccagtgccttttaggcttagtatctactcagctttgtttcttactcgctctgtcatggtaacactaacacaaatcaaaagaaagagaaataattttacagttgattccaaaccatcattttcgggcattcagcattccttctggttctaaatgtgttttacttttttttttcttctttagtatgcatagtatcttttccagtgattctgagtatacaattaaattttttaaaagattacttctgttctctgacttatctttccttctggatggctttttccttgtcttttttctggtttcttttttttttttctttcttttctagagattcatgttgattttggggtatcttttcacatttaaagatgaggcagcatagactttgtctggagccatgtatgtacataggtgggcttttcagtttgagttagagttgaaatggatacaactggcggttaaggccacaatataaatgcttttgcttcagattagcagtgtagactaacttttgaaattagtgattctttttctttagaggccttttaaagtagatgtgcatcaattaaggttgataagtttgattctcttctgttccctaaacacttgaatttgaagtctacaggagtaatttagtgaatctgtaaatgtaagcatcatgatttttttaaaagtgaatttatattttcattgtatcttcttcctaaatatttcaaatacatcatcttttgaagtacacaggagtcttttgagacaccctttggtatgtgatactgttagttttttctttttcttttccgtgtttgtttttttttgagacacagttttgttttgtcacctaggctagagtacagtggtatgacaatggctcactgcagcatcagcctcctgggctcaacccttccccagacctcagtctcccaagtagctgagaccacaggcacatgccaccgcgcctggcaaataattttattttatttttatagagacaggatctccctatgtt

SEQ ID NO: 28081 - DNA, 1662 bp, Homo sapiens
attttttttcagtagcattaaagactgctatactacctactggggttcttgtaagaattaagagaagtacttatcaacattattctaaggattaaatgatgacccatttatcaagagagatggtatcccctctctccctttttaaacaatacttcacaaatcaattaatataaacacaaattaatacagaaaaatctgtacacaattgtggatacaacgcatttctatacagtaaggcaaggataaactttgtctttttaggtcacacaaaccataaaaagacaatttaaaattttcaacttttgtttgctccaagcagaaaagaaaaaaatgaattttggtattaaatgacttggaaaatttgtagatgactaattctaccagcagtgtgaaacttcacaaaagaatgaagtagctgttcagctactttgggtgaaaaactggtacctcgttccctccctggtgagggttgttgtttttggatttttttggactcttccatgtaaatacaggaaataacctatcaaaattttgtagaaatgtattctgattaaaagtggcttttcttccttcccatgtccaaataaacgtgcactacacagagtatgagattgaaatgtgtaatgatgataggaagagcaggcactttgtgcacaaactgtgtcaatttctcttccaagttcatacacgtagtagctcattttaactcctatgagagtcctgtgggtgcagctatcatagttatccgcagttgacaggtaaagaaatggaagaataagtaccttgtgcaacgtggcactgtaaataacagagctaaatgcaagtgcgtgatagccacataagtgtttttgtcttgtcatatgttatagttctttaatattttctctatttataggtccgaaaattgtaatcacatttatattttttaacatactttagggatgaagagaagccaaagaaccccatggtagagttgttctatggcagattcctggctgtgggagtacttgaaggtagagttatacatttactttttattgcaagtgaagagagattattattcattcattcgtctcgatagttactatttttttagtggactttatttttaatttgatatattctgtctagtaatttttgttggattgctactgttattcacataaagcacagaattgaatgaaggaaaaggaatgtacagagtgcattatcacatactaattaatactttattttatcctcatgttttttccagtgagagggcttccatgatacaattatgttggaatacagggattaatgggatggttgatagatcctttgaagataatattggagttaaatactgggcttgatatgatgctcactttctttttcatgttgaaagctgaatttagcaacttagcatagtcagggtattatagagttctcactttttcagtgattttaaatgtagatattagttttcaggaaaagattgtactctatcttttgaaaaatcagtgaagagtgatactactccatttaagctaaatacctgtttcttaaaatttggcctaagtagtttctgtttgggttccctaacaagggaggagactctttaaatgtaacttcatgtaataatattaggtcccaaagcataaacttttgaaaaattgtttt

SEQ ID NO: 28082 - DNA, 1016 bp, Homo sapiens
aggaggctgaggcaggagaatgacgtgaacccaggaggcggagcttgcagtgagctgagatcgggccactgcactccagcctgggagacagagcgagactccgtctcaaaaaaaaaaaaaaaattaatttgtcaatccagtgttgaagtctttgtacttggtattagtaagttgctttagtgattgtgttatataaaggtggccttaatacgttttcacttgaactatgtgtttgcttcagtaaaagtaatttatttcagagtactttcttatcactttttacatagatcttcctaatactttctttcaaaccaatggttcttcattagggatgatttttagtttgtttgccaaagtacccccactgcaaaagtccctcaactttttgagaacttctagttcattgtcccctctcagcccttctctgtacttcactccttcctttttcatctaaaacctaaaactctctttccccccttcccttctggcaccccctccctgttctctaaccttcattaagctgttcatcttttctgtgtctgtactgagtacctgaagattgctggcaaaaagtcacagaaatgggctaactgtagtggatcatgaatttgagtgatactgagcttccgtgctcccaatcctataacccaacttgttctgtgtaatcaccattctttctctcatttactgcaataaatattttcgttttttccactcatttcagatctaacttatctcttcattctctgagaaaatctttacctcagatttcatagatttactgtcacattaatgaaacttaatcacaggttttgcccagtccccgaatctaattttacatttgtagttttgtatcatattctaaaaacacaacattcccaaatatatgagcctcaggctccataacctagatctatcactacctctactatatttttacctgctcctacatataataaaggaattacccagttttatatcaaaagactgttctttatacgtgctcagaattccct

SEQ ID NO: 28083 - DNA, 1020 bp, Homo sapiens
ccagaatgttagatccactgatagcttgcattgtgtacctggaaaagctgcagacactcaacaccaacccgtgaaagcagccaggagggaggctgtaccttgcaaagccacaggggcggagctgcccaggaccatgggaacctacctcttgcatcagtgtgacctggatgtgagagctggcatccaaggagagcatttcagagccttaaaatttgactgccctgttggatttcagactgtaacccctttgttttggcctgtttctcccatgtggaatggctgtatttacccagtacctgtactccaattgtaactcttctcaggaaaaaaatcagtcagtgttacagtttttaggttcaggtgagaatccttacataatcttaattttagtagccaaaaggccatgttgaggatcattaattttctcccttcttatagggagtaactagcttgcttttgatattacaggcttgtaggcggaagggacttaaccttgtcttagatgtggtttggactgtggacttttgggttaatgctaaaatgagctaagactttgggggattgttgggaagacatgattggttttgaaatgtgaggacatgagatttggaggggctagggctggaatgatgtggttcagctgtgtcctgatgtaaatctcaacttgaattatatctcccagagttcccacatgttgtgggagggacccaggcggaggtaactgaatcatggtggggcagtctttcctgtgctattctcatgatattgaatacatctcatgagatctaatgagtttatcatgggtttccacttttgcttcttcctcatcttctcttgcctctgccatgtaagaagtgccttttgcctcccgccacgattctgagggcttcccagccatgtggaactgtagttccaattaatcctctttttcttcccagtttgggatgtgtctttatcagcagcgtgataatggactaatacactttccatattgaattcttaccagttgttaatgctgat

SEQ ID NO: 28084 - DNA, 1045 bp, Homo sapiens
aggctgaggcaggtggatcacttgaggtcaggagttcgagaccagcctggccaacatggtgaaaccccacctctactgaaaatacaaaaattagtcgggtgtggtggtgggcgcctgtaatcccagctactagagacgctgaggcaagagaattgctggaactcaggaggcggagtttgcagtgagccgagatcacaccactgagctccagactgggtgacagagcgagactctgtctcaataaaaaataaaatgtcatcatcatcatcatctagttgttcaaaaaaaaaaaaatagtaatcattatcatcatctagttgttcatgccagaattctgttattcttgatattttccttcttacctatctcttatcctgctcagtcaagtcctgttggtgcccttccttgcatatatgtataaatgtatatgtatgtaattttatctcttttctgtatttttacttttaacaaccttcatccatgctacctttatttctggatagattctgcaatagtcttttaacagatgaccacccacttcacacagggactttaaaggtgtttcagagacataaacctgagcctgttattcttagatttaaccattcagtgactgtattagtccatttacatgctgctgataaagacatacccgagaccgggcaatttgcaaaagaaagaggtttaatggactcacagttttacatggctggggaggcctaacaatcatgggctggggaggcctaacatggcagaaggtgaagggcatgtctcacttggtggcagacaagagaagagaacaagagccaagccaaaggggaaaccccttataaaaccatcacatctcatgaggcatattcactaccacgagaacggtatgggggaaaccgcccccatgattgaattatctcctgctgaatccctcccacaatacaggagaattatgggagctacaatttaagatgagatttgagtggggacacagccaaaccgtatcagtgactttgcattatacccagaatgtggtggggaaaaaaattcttaa

SEQ ID NO: 28085 - DNA, 1525 bp, Homo sapiens
ccaactaatatataggaagacctccagtcttccaagctaaaacatccaattggctataagagtttaaattttgtggatgatatactaagagacaactgaataagttaaacatgattatatccaaaataactgcttaaatattttttaaatgatacattttaacttttaaatggtatgcaatttgtagatgagtcagactctccaggaaacatggagatattttttgattgtctgttggaggaaaaaaatttcagatagtaaatacttcacttgtagtgtgagtattcactactaccagtgtgtgctgtgtgttcttttagactattgctatgcacatataagtatttgcatctgtccacactgccccgaaagttgcatttttcactcagcagtatatcatgagcatgcttctaagttagtgtagagctttacgtcagtgtttttaaaatctacatagtgtcacatagtctgtatttataaaattaaattgatttaattatcctgtaaggcagtaactcgaaaaagaactattctgaagaatgtctttgtataaatacccttgcgcacttaggaatgaagtatagttagaagtagaatctttgggtcacagggcatactcatttagatgtgttggcactgccaaatttcccttcacaaagttgtaccaagttataataaagtgctagaaggagtttttacaaagctttaaaaacaaaattagagaaacaatatcgacatgtaccatattagacatctgtagaggttatatggggaacttaacttttgaaatcaaagggcaaatgagtcaaggcaattaaatgactggagctaattttttaactggaataaaaagtttttgcttcttgtgcatagtttacatcctggcttggtttgatattccgtggggaatttgaagtgataggtgtgttttttctgttgtttttttctctccacatttgtgtaatcctctcataaaagcaaggtatcttatacactttaatagaaaaccagctattaaaactcataaaaatgacatactctttaggaactacttttgttaacaggtgagatttctagaattgtgatgaatttagaagcacttgtgctgccaatactgattatgtaagttctttattcactaactgcagaaatctattcctcctgtagtttcattatctagtaaaataataatatgtttagagatatggagaatgacctctgtctcacaagcatggcatactagttagattgtagacaagtagatatagttttttgttgaatggaaatatttttttgaaagaaaaatttctcatgtttcgtattatttaaaattcaaattatgtactgctatactacaatccaaatattgcagagctagacataccattaatattttaaaacatgaatttacagaatgtctggttatctcatcttgtccccatcagctttagaatgagaaagtgaaatccttccactcttgtagtaggaaaaacctgccatcgctgatagaggaaaatgcattcat

SEQ ID NO: 28086 - DNA, 1030 bp, Homo sapiens
ttttgaacatccttttgtaaggtatggaagctatttatatttcctggacttttcatggtctacagaaaagtgtaccccagtttgggtcatttcatttcttgtggccattgtagatttccatgaattaaaatatgtaactatttaattttaatggtgacatttaaagtattgcaataaaatatgaaagtgatagttcttgaaatctactttcttgtttgagtatcataaaatggagcagagaatattatcctaaagaatcaaaagtgttctttctgatgtgtctggggtaatgttttaattcttaataataattttatatgtggattagaactaactcaaaaattcttgccagttccatgtgagatcaaaatgagtaagcaaactttgctaatcaaattttaaaacttgagatgtttcttatatttttcataattttatttaatccgtttcaggtattatccatataaaacaaattccttaaactttagctttcagtaaaagataaccatccagctcaggaaatctcagttcaagtaattatagcattttgaaagagaaatagtattgaataccatttgcttttatttgctgtagagaaaagtagcaactttccagatcctcctcagattcagtttgccagatgtgtgccattcatgctttttttggatgttcaaatttaaatttggtatattcttaacttattgacagatgtgtggtggcattttgtgacacttgaaattatcacacacaatagattatgcagcagtttcgcatattgcagtttataataagcacttcagaactattttatacttctgttctttgttgatttacatacaatctttctttctctttaaatacatatgcttatgtataatttgaggttgtatatgaaaataattttcttttaaaaatgttgaatttcatgcttaattgaacagttaccaaagcatgtatggggattaggggctgggggtaggggaaggaaattacggctatactcattatcagaatttggctcatagcaatg

SEQ ID NO: 28087 - DNA, 1034 bp, Homo sapiens
atctatctttctgtctttctttctgtctctctgtcttcctgtctttctgtcttcctgttttcctgtctttctttcttttgtttttttctgtctgtctttctgtctatctttctgtctttccttcttttttgttttgagacagagtcttgctctgtcgcccaggctggagtgcagtggtgcgatcttggctcactgcaaacaccatctcctgggttcaaatgattctcctgtctcagcttcccgagtagctgggattacagacacccaccatcgtggctggctaatttttgtattttagtagagacgagatttcaccatgttggccaggctggtcttgaactcctgacctcaggtgatcctcccgccttggcgtcccagagtggtaggccgggtacgctggcatctggccatattgcatctactttcatgatattcggaaatgctaatgattacctttttctgatagatacatgcacagaaacagagaaataacaagaattaagagggaagagatcaagagactgaaagattacctcacggtattacaacaaaggctagaaaggtattttaacttttatgaaattaggagataattatcagaaaccatgtatttggtgactagatttttaatttcaaatttgctttgagtgatttataattttaggagtagttaatattgtgtgaatagttttgagttttgcttgaaactaaaaatctatagtagactttaaaaaattattctagtgtttaaaattaaatatctcattgtcaacaggtaatgttcctactgctgaaaatagatacaaagttaaatgaatatagttttgaccttcctttttgcatgaaactaaagattactcttgagattttcattaaaatgaatggtatctgagtttttctccttaaaacaggatacaaactcagctgcctaccaagtcttctcagcagcttcgtaaaggaggaaattgtgtcaggtgtaagatggtatgtgccgggagcctagagagcaatctgtgtgtacagggaatgaatgc

SEQ ID NO: 28088 - DNA, 1052 bp, Homo sapiens
agatatgctcattattaaaaagttttagctatcttaaagtgtgaggaaatcagtagaaatcatttcaaattccatcactcagattatcacagttaacaatttagtttacctttttgccagacaccactgtatatatttatatgtttttcaagataaatgagataattctgttgactttccctctacctactctgcctgtgttgggtgggcttgaattttcttggcaagtagcagagaaagctgtgaaatcagcaagaaacccaaaccaattcactaaagctatcaagagtatcaattcaataaagctatcaagagtatcaattcaataaagctatcaagagtagtaattttaaatttggccaaaataatactaccggtatattcatatatactttgtgcaatagtaaaatactaccattaataactatttgatgtttttcggaattcttaagattaagagaaaattgaccaaaactatttagtatatcacaggtaaaaagtaagtgtatagacctgtaaaccaaagatataaatgcataaacatataaatatttaaaaacattattctgaaatgaactattagctgatgaaatcaataagtcaaagtaaacactgtataggaattaagaaaatagtttctagtaaaattgaaaatatattgtctttttattttcttaaaagattactcttcactgagttgcaaatatgttttagggcaacatgttttctggtatagaaaatgctatttctcagagaagctataaattaagcgcatatattttcctcaaactcatttgtctctttttataactgctagtggatattattgaataactttttttttttgcaagatctgcatgttttgtgttttaaggaagtagttccagcttttgtttgtttaatttcatctttcgcagacagaggtttccttgcagcattacctggttgggcttcagcattatcatttgaactttagaaggaattattacttcaatagaagattgttttacagtgctacaatgtagtattgtgactgtcgcaggcatgcacaa

SEQ ID NO: 28089 - DNA, 1093 bp, Homo sapiens
ggctctaggctgtatttataaaacagaaattatgctggagagaagagcgttgtccgagttactattttacttatattactcttgtcttatccaagaagtatctgaagtccttacaatatagcacacccagatttctttaaaaaataaggaaacactagtgaagattggaatgaagtgtattgcgtaaggttttataaatttctctagaggaagcaggcagagttggctctggaacttctctacactgtctacaagttaaaaataagctgatgttccaggagagtacggttggatcctgagagtaagacctggtagaataaacagtatcgtcagtgttctcagattccttgaaagcaggaactaggtgatattcttttttttttttctgagacagtttcactttgttgcccaggctgaagtgcagtggcatgatcttagctcactgcctgccgggttcaagcaattcttgtgcctcagcctcctgagtagctgagactacaggcatataccaccacactgggctgatttttttgtattttagtagagacaaggcttcaccatgttgatcagtcttgaactcaaattcctgagctcaggcagtcctcccacctcagcctcccaaagtgctaggattacaggcatgaagccaccatgccaggcctggtggtgttcttatttatatctccagcatctagtataataaacgacatatgatagatgttccttgaaagttttctgttaataagttcattccctatggagatttccaataatgaatttcttaggggtgatcctcagtgtaggagaacataaaattttaaagtagaaacaaaatagtcacacaataaggaggcaggccaaatacatggggtgaggatgtagctctttgtcccggataaatttatggtttgactctggtttctaaacctctctcccccacacccctcagactttcttcggaatggggcccaggaatctgaagtttcaaaaattccaccagcgattctatgcaaccacctaagcgtggctctttgtaggctcttacagggtattgtggacttttaaatacatttctagaaatggatgcactgtg

SEQ ID NO: 28090 - DNA, 1037 bp, Homo sapiens
acatagaaatgaataaaagatttatcttagtatagactctgtggtttatattagatatataattgattcttttctcatgaagcacaagcagcaggagacccagaatatctagagcagccatcaagaagtgatttctcaaagcacttgaaagaagaaactattcaaataattaccaaggcatcacatgagcatgaagataaaagtcctgaaacagttttgcagtcggtaagaacttttcttttggctctctgaacatagccatggtcacgacatttcctccagtatagtggagagggacctgtcagggagtcaggagagacggggcccagtgatggctctgccatgggcatgatcagtgaccatgggcaagtcatctcatgcccaggctgtgatttcctcagctgtgattttaaagacacttttctcttaagtttctgtctttctgctagagaattctaatgaatcataatcatagattaaattgaccatttgatctggaacttaaaaagagaagtgtaaaatttagcagtatttctcctgtctctcacccattcctccatctgtaatctgattacatgggaatagttgagaatttaagacctaattgtcataatttcatgaaatgtgtttaacaataaaactactagatactgtagattagagtattatttaaaactactagatactgtagattagagtattattagaaggataagtaggatgttgcaaaactgtttgtgaatattttaagaacgtcctgtgcaaaaacgtcattaggctactctattgtagttttcaactacatctttttatagcggtaaattgagcatgtttggtgttatactgtgttatcagtgaatatggcattctgagagaagctatttcaagaatttgttactactaaaccttttagttcctgtagtcatttatcttttattagtgagcataagcagctctaatgcagattttgtggtagttccttttaatatttgaagattccccttgacaactaaaaagagtacgacatatcataattt

SEQ ID NO: 28091 - DNA, 1086 bp, Homo sapiens
ttacttcagaaaggaggatgacagggagactatatgatatagacaaatacactatttgtctattcatttaattgttttctggagtggcatccacagttagccccattgcatatgtaaatcctgaagcaagtctgagaattcattaaccgtggcttgatcttacagtcagttgcttagcgtcatggtaactacttcatagcggtttttttcatttaaacttagcgtacactagaagctaaattgcacaggtgaaaagtatcttcagactttgggattaaacatttctggattttggaatattagttttatttattatgaatgcaaccttgaataaattgccaaatttctccagatagacctcagtcttcttttccataaaatgaaggtaattgtaggattagtcaagagcattatttgtaagtgcctggcatggcatgtagtaggcactgagtaactgttggtttccttctgttacatcagtcctagccgcttttcaaatatgcaatatattaaaatcaactttaatataagaaaaatttcctggaaagcgtagaatcatggaaattagagaaagtcttcaagtgtttaggcaccctgctttttagaaaaatgtctttaattttaaatggaatacttaggatattttcaatatagaagagtagaccctgagaaaaagtcatgcatagtcccactcactactcatagttaattattgtaaatatgttggtatttatttcacttttattttaatatgtagatttgggatttatttttatagttgagttgcatacaaaattttgtgttgccttcttttaatcacttaccttttataaccatttccccatgttgtaaactcagtgaaaacatttagtggctgagtattattccattgaataattaacttcttgtttatgtatctgctactcaatcgtatatttgtgtctacttttacattataaataggctgctagaaatgaaaacttttttcatatttcaggttatttccttagaatagatttcccatgctagaaatgaaaacttttttcatatttcaggttatttccttagaatagatttcccatggtt

SEQ ID NO: 28092 - DNA, 1062 bp, Homo sapiens
tatacgaaatatttgaatattctaaaagtctattacaggttgagtatcccaaatccagaattcaaaatctgaaatattgcaaaatccaaaacattttgagtgccaacatgatactcaaaggaaatgttcattggagtatcatggattttggatttttggattcggaatgctcaaccagcataatgcaaacattccaaaatctgaaaaaaatctaaaattggaaacacttctggtcccaggtatttcagattagggatactcaacctgtagcctgtgacaatcattatcgaaggttcatatcaacaagaacagtaattgaattgttaatgttttagatttattctcaaattcttcctactttgattattatgtttggtctccccccttccccgtttttttttttttttccgaatttggataataggaagatttttaaagagctctaagagaagcttatgtgtgctacctaggcacacagtaagcgttgataatcttaaatattaaaatacagttgatatttatggctgttatttattcacataagactttggaatgacatgtatatcctcaaaaaaaaaaaagtcagttttttcaagggaaaagtattttaaaataatttgttctcttattctatttataatcttatgctgcatagaaagaacatattagccttcctttttaatgagtatgatattacataactagaatatttcatttaatgtttatcagttattttttctcccatctgtacaatacaaccatatagatcataacatctagacgtcaaagaattacttaagaaaggcatgcattttttaaattaaaaaaactttttaattgaatggattttttgtaatcttgcctgaagcccaaaatgtttatgcttattagagctagaatttacatataagtataatataaatgaatataaaaagctttatcttaatcatatggtcctcttgtacatagcaatatgtacaatatgtgtaaatctatacatatttctatatggtcagatattttctagattttgcttgtatattaaaacatgcattagtattt

SEQ ID NO: 28093 - DNA, 1729 bp, Homo sapiens
catattgatgaactaagctgtgtgcattgcagttgccatttatgtttttgtctccccaaaatggcaattatcttacctattagagtaagttaatattagtaaatcatgttgacaatgatcgtgtaataatttctatctttagttagatttaattgtttgtatttgcagcacacctccaagaaaagctgacagattttttgccaaaactgcttgattgttctatggagattaaaagtttccatgagccaccgaagttaccttcatattccacgcatgaactctgtgagcgatttgcccgaatcatgttgtccctcagtcgaactcctgctgatggaagataaactgcacactttccctgaacacactgtataaactctttttagttcttaacccttgccttcctgtcacagggtttgcttgttgctgctatagtttttaacttttttttattttaataactgcaaaagacaaaatgactatacagactttagtcagactgcagacaataaagctgaaaatcgcatggcgctcagacattttaaccggaactgatgtataatcacaaatctaattgattttattatggcaaaactatgcttttgccaccttcctgttgcagtattactttgcttttatcttttctttctcaacagctttccattcagtctggatccttccatgactacagccatttaagtgttcagcactgtgtacgatacataatatttggtagcttgtaaatgaaataaagaataaagttttatttatggctacctatgtgtttgtaagcaggtatattgtatattagtgtattagtaatactagataaatgaattttgtctggggattaagattggatagttaatagattaatacaatcttttaattctgctctaatgctagcaaattggaaaatgtttaagtctttgacacttaaatttatctatatttttaacaaagttcttgaacttagtatggcaccggaacctgttttgaattcagtcaggtttttactcaagtaagtggttgattttttttaagtcaaactacactgaaacttttatccttttcttagattaatcttactttttaaatgtatttacaatatacagcaaggtgattatttcaagagaatcccaaagtacttgaataagggctattgtaaaatttaaaagaaatatttatatatacacatatatacacatacacacatgtatatatatattcttcataatggaggacaatgttttgcaatatataaatcattctatttttgtaaattgtatatcactttaattgaaaatgttctctactaattaatactgtgaaacaaaattgatgttgtttaactagaagttatgagtatcttaactgcctttattccttttcaaaaaggaaaaagctgtagaacattttgtagatgaaactactgtttaagattaatgaattaatattgtgaatgaaaatcaaaatccatactttaaaggtaatcatgttactaacaacctatttttgaattcataaaaatttctttataaatgatgttttgtgaacatagtaaaatagaccattatactatgtgtatgtttgatacagcgtcgccaaaactagtgttctttattagtgcctctcacaaaagatcctggatggaggagtaagatgaaatattatgctattatatgatgctgtttgtaaaggtattaatgtactagtaaggtgttaatgacaa

SEQ ID NO: 28094 - DNA, 1947 bp, Homo sapiens
ctattgaggtaatcatgtggttttcgtctgtagttctgtttatgcaatgaatctcatttattgatttttgtatgttgaaccaaccttgtatcccaggaatgaagcctacttgatcgtggtggataagctttttgatgtgctactgtattcagtttgccagtattttgtttaggatttttgcatcagtgttcatcagggatattggcctgaagtttttgttgttgttgttgacgttgtatgtctgctaggttttggtatcaggctgatgctgccctcatagaatgagttagggaggagtccctccttttcaatcttttgaaatcgtttcaggagcagtgatagcaactgacccttctttgtacctctggtggaattcatctgggaatctgcctggtcttggactttccttggttggtaggctgttactactgccttagtttcagaactcattattggtctgttcagggattcaatttcttcctgtttcagccttgagagggtgtatatgtccaggaatgtatgatttttttctagattttctaatttatgtgaatagaggtgttcataatattatctgacttgtctttctatggggttagtggtaagagcccacttatttctgattgtgtttatttgaatcttctctcttttcttcattagtctagtggtctcctagtggctcacgcctgtaatcccagcactttgggaggccaaggcgggtagatcacgaggtcaggagattgagatcatcctggctaacacagtgaagccctgtctctactaaaaatacaaaaaaaaaaaaaaaaaaattagccgggcatggtggcgggtgcctgtaatcccagctactcgggaggctgaggcgggagaacggcatgaactcgggaggcagagcttgcagtgagctgggatcgtgccactgcactccagtctgggtgacagagcgagactctgtctcaaaaaaaaaaaaaaattagctcctggattgtgtgattttgatttttttttgaagggcttttttttgggggggtctctatctttagttcagctctgatattggttatttcttgttttctgctaagctttggggtttgtttgcccttggttttctagttactttagttgggatattaggttgttgagatctttccagctttttgatattgtcatttagtgctataaatttccctcttaacactgctttagctgtgtcccagagatgctggtatgttgtatttgaaatttctttatataatttaccatgttaaatataacttatagctaataacttcggaatttgaacctcatagaactgtagtccatagcagatttcatttgatttaaatgactcttattttggttactatgttattccttcctaccccaaaaaagttacgttttgaaataattcagggtagaattcatatagatagaacttcagacatctcaggagaccagtacgcatgaatgaacatgtagggacccctctaatacgtttcacatccattatgatacaacaatgaccatacactttagtagttctcagtgtgtgttctccagatcagtagacagcttcagcagcttgggaacatgttagaattgaaaatttttgagtcccacctcagagctgccagttcagaaactcttcacgtaacctgtgttacaacaagtccttcagataattttgatgtttactagtttcagagccactgcactaaatgaaactattggtagcatttgtgcactgtaaattgatgctgtttaattttcattcacttgtgctctgttggaagcttttttgtgtttccttcacttgggatttcaaggaagtatctaatttttttttttttttttttgctcaattacatgtaattgagaataagataggtatctgattctccaaaagttcagcatctttattttatgatttaaacttgtcgagttatg

SEQ ID NO: 28095 - DNA, 1066 bp, Homo sapiens
aaagtatagcaatccgagttagaaattgcttataatgcattcatctaatcagctcagtgttcttactgaacaaacttttatttccatgtttactcatgtttatttcatcagtttcacctgacattataccatgaatatatttctgttttgctagtgtttttattcttactgatcacatgtccctttttcgtcttccataccactcccagcctagagttaatgaccactaaccaccgtagccacatacttttccatgtttggataaccttatgcagcatatacacctaaagggtggtggtttttttagggggtggtggtggaaggggggagacggtcattgtttttacaaaaattaaatttcatctattttacacatcctttcccctgtcttccccttgtactttccaaccttcagtttcttctttttctaattagctttgtaggagtgacttaaaatataataaagtgaaataacatagcagtgataataatagaataaaaataaacgaaacgtgattggagaaactgcacacatgcacaccaagatttcagatattcttattccttccatgtacagttctcagtgggtatttcagaccttcactcccatcctcagcctctcctattcagtgccagcttctgtaacgctggatgatcttttctttgcctaacgaagaaaactggagatgttaggtatgatcctcctttcaacttttgtgcctcctatctaaattagttgttaaccagcttgtaatgaagggataaacattgataacccaatattatttagaaaatagaaatagaatcagaatatactatgaaatgagcttacaaatttcaacaagtgtccactattttgggagtgtgtttgctcttctccagcagtaatccagaaagctcactttttcccccgagactatctcatacaacatgtttgccctgtagcaaacagctccttattttttcagtaatgtagagctagaccagtattcttctgttgtttttattttgtggagtttttgtgtgtatttttagttttttgaaacagggtctcgctctgtttccc

SEQ ID NO: 28096 - DNA, 1083 bp, Homo sapiens
atattgtttgtcctattaggttcatatgcccctcagtaaagtttttagattatttttctttagtcaggtatcttaatgtgttttaatgttcttgtatttatgaatgtgctccttttttctccccctttacaaaaatgttttctaattgaatattttcattttttaaatctcagaacctcttcacacaaattagtaagggcctcagagaacttttatgttggcaggtatgtctgctaatatttaccacttcagaaattaaaaatgtaattgaaaagtgacatgtctatgtaacatttatgttagcataaatattttaagtgaaaaatggctaaattttttgcctagcccttcttttggaggcttgtagggaaataaaatactgattatatctgtccctgtactcacacttcaagaataacacatagaattaacttggaatttggactagcaaagactgaattattgatcatcttaaaaatggatggaaatcatttttcatggtagtcgtatgatttcttggcaattagctaatttctcaggaaaattaagggtgacagtgtggaaggtaggcatctccgtcagtgtggaaataccaccctctaagacaactgctttatgcgtgggttgtacttcccttgccgcatagtttgaaaatgtctccaggaagaaagtttaccgggtgtgctttactgctctcaagtattgcagccttgtgctatccattgtccagacactgaaaagaattgcttcatatatttttacccaactttgattattaatggcaggaaagttattcagataccaactgttccatgatggttaaatctcagaaatctataattctcatagaagataccataggagagtatctttaaatcttggaataacaatgggtctcttcatacacacacacacacacacacacacacacacacacacacacacacacaaattaaacatggtggaaatttttgacaaatttaaccacattaaatattctgtccattaagattccccaaagatggtggaaagatggcaggttagtgggagaagatatttgcagcatgcaaggcaagatgacaa

SEQ ID NO: 28097 - DNA, 1031 bp, Homo sapiens
aataaaacagtctcagtttccagagcaaatcatatccatctgtactgctgggtaaatgtagttctgattcaaccacatgaataagattacacgtgtttttgaaaatcactatttgctgaagatcataagcaattcacatgctttgtctatggttaattttggtaataagatgcaagacagctcacagatctttaagctatatctagaaatagtgctgattgaatttaagctgattatgcagcttattttggtcgtttgccctcttcctaaattctaaagttcaaagtttaacgtgaaatagttttctcaagtttagctctagccaaagtccatgaaatggcttatgtctgtcaatagttgacctaatagatttgtcctatgttgacactttgttcttttcatactagactgtgcgtatcatgtaggtatgttattttcagtgtgctgtgctttaaaatgggattagaaagtcatggagaattttttgaaaatgttttgatgtgttagtgttttttggtagggttttgggatacatcatttatttattaattaattcattattctgtatttattctagaatgtcatcagtaatgtattgaactaccaatcatgttagtggagataacaaggcaagaccagtatagtgacattagaggcataaaatcaatgggttctataaaatatttgagttgctttataagaactgtgtatcaacaggagtaaagtcatcaagaagaacctcttctaccagtgccatcaagaaagggttcatttatatggggaagctccaacagaatctggatagacagaaataggattctttttcacaggcagggatggagatatgttttagacatggaacatttgagaggataaaagaagcatgaaaccacatgtctggtacctgtgactactaaggcatgtaaataaggcatgctgagagatgagaatgaaggtaaggtggtaaagcaggggtaagattttggaaaccattaaaaaccatgccaaagttcatgaacattttcctttag

SEQ ID NO: 28098 - DNA, 1037 bp, Homo sapiens
ttgatatagcttgtaaaagccaagacaaatttctaccagaattagagatatggcattcatccagccagccatcaaacatttttgaaaaccaactatctgctaggcaccatgctaagaggtagaaaaagctgcctccctacaagagatagaacctttaacctccatacgaaagagctcttaatcttttgcttgaattctccaaagttcagcatctccaactgacattaatatatttttgattcgatgacctgaagacaaccaaaactttaatgagctcagtctttatccctaacctacctctcctactatttcctctcctggttgatggctgatattaatctgtgctagaaacttaataggctgtcaatatataatctttatttaattaatattttatgctgtatctttactctgtcctatccttaaccaaacttcataaaagtcctattgatcacatctttacatgtatcccaaacttctctttacctctgtatttattacctcagttttaggaccacaacatatgctttttgattttttataaaccactaattatttttatatccctacctcttttgtccgtcagctacactcctaccagaatttgcatattatcatgacagtcacccattgaaaagtttttatgattttcgtttgcttagaggaaaaaaccaaaatcctcaggatgcattcagttttcttcacaacccagtaccaagtttatctcttctcaatttattccctttctccatctccatcatcctcattcccctgaatttcatcacatctaattaatgtgcatcatggcttcttcatacttagaccatgttctcacacatagtgggtattcaaccaatgtttgctggtcattattttgaaaaggcaaagggctagattaagcaggagcatatgatcaatcacctgagtgggtcagactgagaagacagtttagttgtttagttgataacttattggaactcttgaagttttatattagaataccatggaaatggaattcataaatacaacttagaaat

SEQ ID NO: 28099 - DNA, 1028 bp, Homo sapiens
tctgaaagcttactttgaaagctgcttctagagaaacctaattattcctggttgggaatgttcttctggtgataccactagcctcctgggtactaagcatgtctgatgataggtgattcataagctcaatgtgacatttcccaatgagttgttttgtcacgggttatccattttgtcagacatgttatttcatcctgagctttaatgtgactatcatgttgctgggcaagtagctgagagtgtcatatagcttgtcaaaaccgtaacaccatttgaaccagaatatgtaattttaaaatcagagctgtgaaatttaaacgaggatcttgctaagtcacagctaattcctttcttacttggtaacctggggtctaatgtaagagtattaggttgccgtcatcagcctttgtaaataagttaaatcaactgaaggacatagtttctggctagggcagggtctgtcacctgttctgggttaagttactgtggggtgcatttgaagatttgaagaaagcagtctgttgagatgacgaacttcttgaatcaactgtgacaaatgcaaaaacccatctgtgtttttttgagtatcattctagtagtcatgcctctagtgttgctttacttactctccaaacatgaaagttagcacatctattaaaaagcaaatctgtaatattagtagaaatcattctgatatagtaactttgcatgttctataaattcagaggagtagaagattacaaaattccaacaccaatacagcatagctatcaaagctgttcttaaaaatagtttgttaatatgactacattttaaaataaaattagaagttctttgtccacatagaattccctttagttaaattattttgaaattagctagtaaaaaggcatttacagaatttgaattagttgacagcacaattttaatacattcctttgtgttggtatttggagtttgtttccttttaaaatgtttataaatatatagatatacacacacatatatatacacacacacatatattt

SEQ ID NO: 28100 - DNA, 1020 bp, Homo sapiens
ggtaacatccttggaaaatatgtgctgggaactgccatattcaaaatacttctaaaataaatggagagtttttttttttttttaaaccaggaaaaaaactcttgtgaagaattagtttctaagtttttggtttctaagtagtttctaagttttctttgtattttattgatctcaaatgttgttgggttttatacatcacgtaacttttgatgttacttacagaatactctaattctatcattagatgtgtttatttctgaaaagtgagtgattgttgaatagaatcccattagcaacattaatgttacaatttaaagacaataatttcttgtagaactatgacgaggatacaagttttgcaatgttaaacatttttggaggtgtacttcccttgagtgggcacagttttagtcattttgatctatttttaagcttcagtttgaaaaagtcatacctcatttgtccttataaatatttatgtcatcttataaccaaattaactcctagattttcatttgaaataactcactttggctgagtgcagtggctcacgcctgtaatcccagcactctgggaggcctaggtgggcagatagcttgagctcaggagttcaagactagcttggccaacatggtgaaacaccatctctcttgaaaatataaaaactatccaggcatggtggtgcatgcctgtaatcccagctactggggaggctgaggcacgagaatcacttgaaccctggaggtggaggttgcagcaagccaagattgtgccactgcactccagcctgggcaacagagcgagactctggctcacaaaacaaacaaaaaaacctcacttcaatagtatacactgcaaaagcataactataaaatggaataagactttatatgttttgcttgacattttatatgccttatatataactttttttacttaaatgagaatagaatacaatatttaaaccaatagcaaggatggactatatgtacaaatcttcactatgagcttcaaaggaat

SEQ ID NO: 28101 - DNA, 1027 bp, Homo sapiens
atatatggttatagaggtttgcataatatttagtcaaatcagatttatttatatgtactttagaagtattctttttaaacagtattcaactttctctgacatatgcagctgcagcaaaaaacgtttactgaaagataccttggaatcatttgtgtacagagtttaaaagttaatgttgtcttatttaccaaaataaaataagaaaataaagatttgatagggccagaatgttaattagactagaaaatgcaactttttattctgtaaatagatcagagtgtgttaaagcaatctgaaaatctgaagcataaatgtagaaaaaattttaaacttctttactctttgttaactcatcaagttgaaatgaaagttaagtgcatttaaaggcattttcagtagaaaacagcttttctttgggagctgctgggcaaacatcctttttttaatgaaatagatattgtatatatgataaaggtaaataaatacagataaagcacttagatgaaaaaaatagactgcaaacactgttatacattcacttgtaggttcttaagtcattttttttgttcttttgttctgtaattgattgctagcaccccctttaacccaccttaaagggcaagcaggaaattcatgttttcgttcatcagcccatccctctgaaaagcgttcgatattaaaacagttttcaaggagcaaaagcagaggaaagaagaggcccagctagactgtagcaaggttagaagatacacgcaagattgcctgccacacacatcgggtcttgttcctgtccagtatttgcatggagatatcaagttaattagggtaggactctgttcttcgctttctatgtgaccttttattatatctgtggctctctagttcatatggtgtcataaagctatgggaaagtctttctagtgtttgacacaaactgcaaaagaaataagcattgatatttccctttgcctgaaggtttttacagcagcaaaatactgcagaggcaaagttgatattgtggtagatt

SEQ ID NO: 28102 - DNA, 1055 bp, Homo sapiens
aatgtaacatattctgtattattaaggaaagaccatagtatatagtaaccacacaaaatgcacacatatataaaattaacatggataagacattcctctgacaatgtaccacaactcaatattagaagaattaatattgggttatgttctaactatgcacaattaactacagatgttccatgcagtgtatcctttgagcaatttttgtttgcaagtatattgttaaaattagggagtgaaaaaggaaagaatctttcaaaggacaaggcatgaaaacaactttcattaaatttatttttcagaatttatgtattttaatataaatgggtaccatatagttttgtgtgtagatattcatttcaaatactgaccttgtaggaaaatatccttatagcttcgcaaaagcaatgaagtgttggtgatcatggtagaaacaattttacgctttcaattaagaaaccagagaaatatttgctggtatgtttctcatatagatgccttgatttgagttgggttcatgggcaaacatatgcttattgtttggtttctttgaatgtgttgaggtacattagtttctattcttgcatggtgagaataacttaaggtctaaaaaaagtgagctattggaatgtcactattatagtataataatctatacactagtataagcactgaatgtattatcttaaagtagccatgttctatttgctttaaataatttacatactaccaaaacaattcaacatcagagtttctttgatgtaacaacggatcacactttctcccaaaggtcaagtggcaaatatttctccaatgaaaaatctacctgtcagttctccaaaggaaaacaaaacaaaacaaaaacaaatacacgaaggtttatacattgcatgataatttgtgagttgtgattaaacggaattgtgtctattacctgaaatctgttgcaaaatagatagttggattcttgttattttttcagttagcatttagcctactcctgcttttttgtttttcaaaaacatgttcagtgttaggaatatttacatgtgacc

SEQ ID NO: 28103 - DNA, 1059 bp, Homo sapiens
aagccactataatctattccacatgggcaacaaagtacatttaaggaataaaactattagactatatttattgaatgatgaaactcaagctggtgttatataaagtgatgaaggaattactgaattctctttttttcgttttttgagatggagtctcgctctgtggcccaggctggagtgcagtggcactatcttggctcactgcaacccctgcctcctgggttcaagtgattctcctgcctcagcctcccgtgtagctggtattacaggtgcccaccaccatgcctggctaatttttgttaaattctcttttccaaagatgcgatactattattctgttgcagcaacaaaaactgggtatacacacaaaataattgaaaacatgatatttatacatctaggctcatgtcagcattattcacaacaggcaaaagatggaagcaatccagatgttcattggaaaaataaaatatggtgtgtacagacactggaatgttattcagctgtaaaaaggcatgatattctgatacatgctatggcatcaaagatcattgagaacattatgctaagtaatataagtcagacacgggaaaacacatgttttgtgattttaattatataaggaatctaggataattaaatacataaaagcacaaagtagatcagtggctaccaggaactgagaagaggaggaaatgaggagttaatatttaataggtacagagtctcagtgtgagatgatgaaaaagttctatagttggactggtgatggctgcgctttacacttaaaatgactaaaatgatacattctatactgttttgtatattcatttcagtacaataagaataatttataaaagacgctaatgagctcctagtcatcatatgacacaaaggtgtcttttaggaaccatgaaattaatttaaaaaaaaagtctactctcatacctacacagctattttccgtctgttatggtaagaaacagaagttaaggttgttaacaaaaataatttggaaagcaagacaggagatcaactgtttgcatcactttaggcgaa

SEQ ID NO: 28104 - DNA, 1093 bp, Homo sapiens
caggaatttattttttcacgattctggaggcaaggagtaccagctcaaggtattggcagggtaggtttttccgagccccatcctttgctttgcaaatggatatcttctccctgtgtcttcacatggtcttctctgtgtttttgtgtcctaacctcctcttcttataaggacaccagtcactggattcaggcccatcctactgatctcctttaatttaattacctctttaaagacactaactccacctacagtcggattttgaggtactgggagtaaggacttcagcatctgaatttggggggagacaattcagcctgtaacagtcatgatatgaattaactgctattgtgcatgagatgtctaacgaaaagacagaaaagaagtgtaaagaagtgattactgagatcaacaaatgttgctataggactgccagtctatagctactgcagatatatatatatatatatatatatatatacataaaacaatgtgatagtgggtgatttgtagatggtaatagaccattcagagaaacaagctgaatattttcttacattggaaaaaaagggggacacaaaagaaatgatttcccagcattttattagattccataagaattctgagcatcaaactatacactgctatatatgaagccagatccaatgggaatcttttgattttacatatcgatcactttcaaaataaggatactagccttatttgctgtgcaatattatcatgacatatatttttaatttattgggtctttcagtttttgtgcatctataaagcctaatagttcagcctctctgtaggcatctttgctacttcctatctgaggaaataatgttttattataaaattacaattttttgtaatttagatctctagtttctaagataagaaaacagatctatcatttggggcaagaatagaaacaaaataaactctcctcttaaagcaagggaaacaactttctgaaaaaaaaaattgaagacacacctttcatgtattttaggaacatttcacttttgctcatcttctgactgcattgtgaaccatcatagctagatcaaaattagttatgttaata

SEQ ID NO: 28105 - DNA, 1040 bp, Homo sapiens
tttgtctacacaaaagccagacagctactctaatgcccagtgaattctgacagtatgttacagtttaatgtgatgaatgatgtaaggacccgcctaaaatgctcacgcagcttcccaatgtcttaccctgacctacaaaccagctcataggtctccatgcatgtgttgtagaaagtgatgtagatggccaggcggggtggctcatgtctgtaatcccagcactttaggaggctgaggtgggtggatcaggaggtcaggagtttgagaccagcctggccaagatggtgaaaccctgtctctactaaaaataaaaaaaaattagctgggtgtggtggcaggcgcctgtaatcccagttactcgggaggctgaggcaggagaattgcttgaacccaggaggcagtggttgcagtgagccaagatcgcgccactgcactccaacctaggtgacagagtgagaatctgtctcaaaaaaaaaaaaaaaaaagaaaagaaaaagaaaaaaagtgttgtagattagttgaggatatatatagggagaagttacttcaaaaatgttattttttataaaagtctttttgactgtgtttctcacccacttaaacacctccagggtagagactgtttcttatttatatatattcagtcttgtatatagaggatcctttcctcatgaatgtttatagaataaagttagacattagaaacaagaatgagccttttgcttcttgttgcctgcagggctaaggcgaagctcatggaataagtctaggatgtttgtttttatatgaactgtggtgtaatagaaagagagcaagaaagaacagcagtaagtaggacaagaattagaagctgataagttagtccttctactttagcttagcatttaaagcccatcccactattcttcagcatatgattcagttgatgtgaaactctcactggcttttcatagctctatacatttgcacatactgttctatatgcataaaaattcttttattcctttttcacctgaaaaaaaatatctgctgatccttta

SEQ ID NO: 28106 - DNA, 1057 bp, Homo sapiens
atatctagaactacactggagaaccgctgatgcaatattaaaattttacaaatgttcctctcaaggaatgtttaattccttatccaatcattttgttattcagatgcattcaaacatgttatggtgttttgctggtaggtgtcctccttctagacctgtggtattttgacttaataatcgtgactcatattcgaccatttaaaacttgcttaggttgacaataggcaataccaagagtctcccttagataaaatatcacagtttcctaaatctgtcgctcttatcttctaaggcaacagaggtcagaggagctatactaaaatcttaactaacaaacattttaaaatacaactgaagaatgtaatttgtaacaaatttgttcacaataatttttaaaaatccctttgtatgtacactaagtaactgaacattttagaaagactatcagtgatgagaaaaatacaaataacatgaaaataaattatttggaaaattatgctacaaaactataaccactgaactcattcaagcatcaaaaatattagttagaagccttgctctaatgttttggaggtttcccaagactttcaaactactaatctcacttcttaatataaggtagagcaagattctgaaaagtctttgagtttttagttttgctaaagctgttgtttcaactgagcctaggttatacaattgttaggctgaggtctcatcaaataactgaacaaatggactaatgaaagcacctcatatctataattatccacagaacacaaaggaaaagaatgggtaatttcactgtctatattacattgggctggtacttttgttgtgaagctggaatattgaagatgcagtgtaataattcagaggttatttatatatcctttaagactgatactatctgtacattgcacattggcatttatttctacagatttattttggtgtagctggtatgggagccataaagtaccagtgttcatttttccagggatgaaatcagaagagtgttagagaatggtcttcttcctcaagctatcagtgtgaatct

SEQ ID NO: 28107 - DNA, 1029 bp, Homo sapiens
agaatttctagactagtaaatacttctctgataataacttaattatagctatttcaaaccaaattgtttaattgtggtgaatcatatgtaaattgttcagatgtaggtcaacacccacgcccacattctagcacctctttcctaattcaagacaactttgcagtgcctaaaagagctgaacagtgcagattagagacataagacaaaaaaaaaaaaaaaacacaaaacaatggtaacataaaaaccaaccgtgtcagaatggtaacacaaaaaccaaccaggagtcagaaagtctctgtaataatgaataggcaggttgtatttatttagactttgcttgattatttcttaggctttatatgtttgtagataacagtttcctcactgctcacgagatttgtggcaagcaaactcatggtgcttctaggatattaaattttctcatctgtaaagtacatgcaatagcatcattattgtctactcattgaactgaaataaggattaaacaaatcaaggactgtaaaatgaacgtgtgactcctcaaatcccatacgggaagaacatgctgtttttcttgatctggttgagtcaaagatcactgatggcaagaatgccttctgtagctgcaggtgaggacaactgagatacggtgcaattgcagaaagtaaataaactttttattttttgagctgttacattatagttctaatctatggatgcctttgtgatgcagcattgtatcattttctgatgaatggctaaggttttatgattctattttatctttatatattgtctgctgtattttcaaatattttatttccatttatagatgcattgaaaaatcataaagcacattgcataaatgtgttacatttgtttttgcttatttgtttatttgagacggagtcttgctctgtcactcaagctggattgcagtggcgcaatctcagctcactgcaacctccgtctcccaggttcgagcaattctcctgcctcagcctcccgagtagctgggattacaggcac

SEQ ID NO: 28108 - DNA, 1032 bp, Homo sapiens
cagttgtcttacatcgctataaaaattcagggaaaaatagaccttttcatgttatgtcccatgtacaaattcattttgtatgcatctttttttttcctcactaggctgttaacccctagagggtaatgactgtgtgttattcatctttgaacctaatagatgcagaaaaaaatattcattcaattaaattggaacaaagtgtaagaaaagaaagtaatcggcagggcacagtggctcacacctgtaatcctagtactttggaaatccaaagtgggtggatcacctgaggtcaggagtgtgagaccagcctggccaacatggtgaaaccctgtctctactgaaaatacaaaaaattagccaggagtggcagctcacacctgtaatcccagctacttgggaggctgaggcaggagaatcgcttgaacccgggaggtggaggttacagtgagccaagatcgcaccactgcactccagcccgggcatcagagcaagactctgtttcaaaaaaaaagaaaagtaatcaagtagaactgttaaatcttacacagattttataagatgccactatatgccttgctattatgcctggagtaaattataatcaattctcctgatggatgagacacaaataatataaacacatgggtttgatatataatggaaattattttaaattgaattttagtgattttttgtggtatttatgttcaaaaagcataccgacaagtcaagcatttcagaaaaatgtttataaatgtatgaaaaagttgtttgtgtggtgctgaacttggatatatattactgcatatcaatgtgaaaacattgtgtcagcttcaaagcattgtgcatatggaagacattattgctattgttaatactgtaatagaattgcctctgcggattaaaaatgtagatgtttatgtacaaaatagcagcaataagtaaaagaagaaattatttatatggattctattaaataaaaagggagtactgttttcagtactttgtgtaatgcagattgctactcatgcc

SEQ ID NO: 28109 - DNA, 1033 bp, Homo sapiens
tctctactctcttaattttactccttttctatttagtctcttttttccatcaccctttttcttcagcttctcctatgtcttcctgcttgaatctaatgattagacctccttgcgttctagtacttttgtctgcttggaatatgcatacacaaacaaaactgttcaactttctcagttccgtttctactattttcgtaatttatgaaaccacagtagatgtaatttgcgtaaacattctcaacatacaaatttcgtttcctgtaattctcggtatcaatttggagtattgtttatctatatcctcaaatttgacaaatgttgattattagaatcttttcctacttctcaaagaagcaacagtttccatctttaaattacagatttctggcgctttatctcatatcactatgaattacttttgctttatttaaaaaatttaaaaaagatattatgtagaaaatacattctggactcagggaatatagagaggtctgagagcttaagaagaatagaaactcatctggctagatggcaccaaactgcatcacttcaggccacacaatgttcattaacacttaaaggactttttttttttgtatataaattatatagccaaaaacaaagtaaaacataacccaccaaaaatattttgttttacctcttggttggcaattttggcatcaagcacacatactttaatcatagtaatacttttcttacagagacatggaggttgctcgctaaatagagcaaagcaaaacaaaacaaaacaaaacaaaacaaaaacacacctttcagaatgaacagggcattcatacagaaactgtggaggtgaagttggcacttactcatctcaaaggacattgtcttttggccaaggctgccatcctgtctgctttgacacttggaaatggcaactgagttcgtaacacaaaactgaatgttgcccttcttaatgtgaggagagaatgaaatagaacacaaaaaaaatggcattcaagaatataatcgccatggtggctcatgcctgtaa

SEQ ID NO: 28110 - DNA, 1047 bp, Homo sapiens
cttgatttatttctgtacttgagctttttctctgcagtaaagtttataaaagataaacagtacccctgtattctatgaagaaacagataatacccccacttgaggttgtttttgaaaattattaattgaaatttaaagtgagaaaaatattaggtttctgggaataatcctacaacattgaaatgaatacataaagaaataaattggttaccacagctcacctctttattttgcacttttgtataacatacatcaaaaaccatattccattagtttccctagaccatcctatgacttctaccttttccttacatttcatattttcatatcagatctcatatttctcaacccccacttctatgtgttttgaccaatttttaagctgcatttctttacagagtactaggcatctcactattttattaatattaggcatattaataaaatgtctatcatcaatattatcaattattaatattgttaatattaactatgttaataccaatattcattatgtgcaactcttaaacatgctatatatgcataagtatttggatagacagattcgattgtaaaggaagaatggacaggataaagccatgtgtacagagtgcaatagtgaggtccagaaaagctggatatttgtctaggagagtttctaatgcatgacatattcggttggttgggataatttggcagtaatccctgtgcttttaaagtagtaactacaaaatagaagtgttgtaccttttgaatttagtatgtcacttctttaaaagtctgtaaaaattttacaagaatttcaatataagttcttttctggaaatgtaagtaacatttaaagaaatgtacagacaaaataatacactaagaattttacacacacaaaaaaaagttctaaatgtttaactctatccagtacctattattgcagtttaacaaaaattgatcacccttgaggtttgtggtactgttactcatcacagaggttgaaaaaccttaattgctagcttatttggttcaaaagaataaaaagaatcagaaaga

SEQ ID NO: 28111 - DNA, 1032 bp, Homo sapiens
gtgtgtgtgatgaggagtggggggagaaaggatgcatcattgtattttttattctaggtttgttttttatttgtatgtagttaccacaatgatattcaaattttaggggaaaatgagaatttttttacttctgcaaatatatttaatacaacccatccaaatttattctaaatacattttgatacaatttgtcaacctataattcttcaagaagtggaatcagcagttggtaataattgcacatctgtggttaattagctcagttggttgaatcatggagctaatgaggccaaagcctgggtttgatctctgcgtgggctggtgagttttgctctattcctgggtcgtagactgcagttcaaacccaggccaagtatctcatggatgcatgccactgaccataagaaactgggcaagagaaagtaacttcaacaggtccggaacacatcttcaaactatatacagcatctgcttgttaatgtatgaagagaagcattagttatgaactcagtactctcacaaaaagacacacaggaaactttctgtggcctcaaatgaaacattgaggaataagtaatattaggaattacctaacgagcacatgggaaatagctaattcataaccacaaatagaatctatttcaaatggcaagggaagcaaaatccctgtcattcccacacattgatttttccttggtagattgtaaaggtctttaaggtgttggatgaagagttctgaatcagctgtgaaataagacaaaagagggaggagagaaagcagatggaaagccaaaatgtcacattcgttttagataaagactagaggatgtagtttagacccacaggtaagtgggctccttaacactaacctcagaattagagacatttcccaccaacatagagtaagaaaacacaggtctccccagtgcgaccagcctcactttgtggcctgataacgctttttgtaggaaggtcatccccaaggagaaaaagggaagagaaagggagtgttgtcatatatggacagatcgt

SEQ ID NO: 28112 - DNA, 1025 bp, Homo sapiens
atgtcagacaaagccttgaaattcatactccatcaagtatgtgatttttgtaatactttaggaacagaataaattttaaaatatttcacaggattgtgaaatttttacccaccagtgtctaggtgtacatgaaactcttcagattttgttttcaccccttctcacccaacctcctttttacaactgctctcagttatgaccagcactttacacttttaaaagtacacatgacttaactgtcataagccatcagaggaaaaacatttggccttatgttaaagaactttttcacatgttttatcatttctacaagattttaagctttttgaagacatggaactatttctcgtgtagcactttacacatatgcagtactcattttttattaaatattaaaggagtgaaagccatcttcacactattctatgattggattatctgtatgttttttctgggccactgaagattaagttgaataaacgaggagctggcacaaaccctgacagatagtagaaagttgacatcctaacagagacaaagaaagaagtataaatgaagataatgaaactcaaaatataaataaaaaataaatataacataatataataaagaatataaaatataaagacgatgtagattaggggtaaataaattctattttttaaaaactgtatggaccttctactttgggcagtaggctacatagacattgaatattacagcaatttaaaggatcatattcttttttgtgaaagactatcttgttccattaaggagatgggacactctgttcaatcaaagtgcaaaatcaaagcctataatcatgacacctagaaaactaaatttacctagaaagctaaaattatgataatgttttctgttttgtaactccaaatatgcaatagtttctaaatatatataatatatatatttagatacatatatttagataaaataatatataatatatttaaaaacatattttttattttaaaaattattttaaatagtctttggttaagtta

SEQ ID NO: 28113 - DNA, 1021 bp, Homo sapiens
caagatcttactgttttatgagaaagttataatgttaccaattccttgaaaccagtaactaaactagttttataaaaattaaaataagcacggtctaactcatacacaattaacttaatagttaatttggttttaattataggctcgtaatactacattcatgcctcacaattatataattcatacatgcatgtatggattcttttttcttttaaaactcaattagaatagtttaattccaaaatatttactattgaaacaaaagcagttcgtgaaaaatttttcaataaactactttttaaattctcatgcatataaatttgtatttagttttgaatatttatgaaggcctttaatggagaatatgcatccttagaactcagcatttaaaacatttatactaaaggatcaatattatttttgactcttaattgcatcagatatttacaacaaattctatattaatagggggcccatgcaagatgttgcccattggcataaacccgtagatccgatcttgtggtgaagtggaccgcacaagctcgcttctatgggtctgtgtcagtgtggtaatctgacaaaatgctatacacagtgccgttcaacaatagttcagtaaaatcctgttaaactccagttgattatatacttttgaagtcattatattttcctttgtttttaatgtttattttaatcattgtctgtcttacaaggcaggcttcaattctcaacaacttggaagcgtttatatcacacccattcaagttcgattccatgtacagtaaattgcataagaaagttgaacctttatagcagggtttggaccaggatctgaatagattctgttcagaaacttcagtgcatactgtagtgcttagtgtacctcttcaacttcagtaagaaaattaaagactaccattggatttatatgtttttattgagcctatttctcctgaaaaaatgaggctgaatgcaattgacttttactattaattgcgactagaactatggcaggttagat

SEQ ID NO: 28114 - DNA, 1032 bp, Homo sapiens
ctgttagtggtgtaatttgtgtagtgaggctatcttacatagatcatctttcagacacaggattaagtagttgttgatgttagaactttaatttaagactccaaatatgaaacatggaattcattaaagagacgtttagatgcaaatatatattaaggacctcaagatactggctatgtggtgctgacctttctagaatgctcaggcatccaaaatatcttaatacctagaacttgctaacaatgtagtgaagaaggaatggctacccccaacacgtagaacatgtgagccttagaaagtgaataccagtcacttcaagcaaaataatttgattggtctacagtagtaaagactctttctctctgtgaaagaaaaatatttgcaaggactaatcaagaagcaatgaataagaggcagtagacatagacctaaaacaaacaaacaaaaagacatgaagagatgaaaaggaaagtgactcatagcaaataggaacaccattgtgtctaatgatggcagttcaacccacggatgaaagaaagggacaactaaatgggtaaacaattgtatctttataaatagttttttccttgagagcctaggatccctttcctatgtgtttctatgtatgtatctcccaatactaggtgtatttatttagaagccaaatctattgatgggccaaatagaatatgattgccaataaatgtctatttccttacagtgtaatggagttaagtgcctcacagaggtcaagtaagatgtgcagtttaaggataatcttacaaaagtactataatgaattgttagaattacagcctcttttatatactatcacctaaagtgaatgagtataatagaagaataattgaagaatggtgaagatgtctctatgattcattatgttagttatgtagaaatcataagaaaaaatctgaccaggtgtggtggctcatgcctgtaatcccagcactttgggagtctgaggcaggtggatcacttgaggtcaggagttcgagatcagcctgaccaaaa

SEQ ID NO: 28115 - DNA, 1028 bp, Homo sapiens
cccctctatgccactaaagatggtgcctactccttaccactcatacttgccatattctttacccatttttacttgactttgtaccccaaagttcctcttgtgggctatgtgtggaatgtgatggcttttaaaaacataaattggggaacaagtgtgaaaataaatatatggacaacattttaaatattctaaatattataatttaaacatcaaaagagttattgtatatgttcaagattgaaagttaaaaagtgaatataaaattctaaataataataactatttcaacatgaacctaaaactgtgcctgttgaacagtgcatagaatattaaatagaattagtaaagagttacttgagtagtgaattacatcctgcattgtcagcctatgatatctatgtccatatattttgtagcctagattcataaaatgtatattttttaaaatcttaacacttttcatcaaatggaatgatttgtttttaatttgattatggatcaatttttaatttgattctagagcctacttaatcattgctttaggttcttaaatttcttttatagaacataggtgagcagatttttagggtttccttttagatggttctgaggtttctgtccatgttcaatactatgagtttataactttacaatattcttttgtcacttgcctaaaagcaggtttgttatttttctttttctcaaggaaagctttagagagagaatctagatcttttaaatttgaaaggcattcatgatacccagttacttcctctaatgattgactactgttgtgaaacctaatgttaatatttaagaagtggaaaattatggattgtattgtaaaatagtcaattaaaagaaaagtatttttgtgtgtgggaatctagcaactttcatcccataatccttaaatcaagtttaatgtatactaaaaatatcaagttttactttgaactattaagattaatacaagactcccatgttttttcagattttcccaatcttcaatgttctaagggatttac

SEQ ID NO: 28116 - DNA, 1307 bp, Homo sapiens
aaacagtgtaaaaattgacatatcttcataaaatgattcacaccatttcttcaatgagctagcttcaattttcattaaatgttgcttttctccacgtctctacatgttaaatgtaactttatgaagtacattagcagccaataatattaacttgtatgtaatagtttacttgtaggaatttgaaagcaggtggaacttgaaggtaattgagattaagtgaatttaagattaaatagcttcattttatataaacagttaatttcatgcatattttatggacaacttaaaagtgaaaaattctgataaggtgaactaaatttttcattattgatataagtaacgtgactttaaatctgttaccttaataattaatttctaaacaaacaaaacaggtataaaaataatcatggactatattcattaggtcaagtaaataagaataaaaacttcctaggttttgtcttggccatataaggtctttgaggtgttttgggttcttttgtgttgattgatagatttaactttgcctctcttctgagaagtttctccctctttgtcaataggtgtctgatgatttgtgagcctcaagtgactactctgtggaatcatctgtccttgcctttgaattagctttccctaggccatgagtcaacattagtagtttatacatccaaattggtaggtctttatgaaattcttctatgtattcgttctagacatataagtgaagtataagaaattatagatttacattgtggttgtttttacagcttctggacatctttgagaaaatacttgggtggcattgaaacactagccaatggaagcatttgattttgtagaattttgaaatgtagtgccttactcatagtacacttcctagtcttgggggtgggaagaccagtctgtagctaacttattactgtcttatacatcatgctaaagcccagcctgggcatttgtaaacctcggggaggtttctactttagacaacagtttttgttgagggattacaccacagtcagttccctccatttctccctctcttcctggcccccctcccacccaacatggagccttttcaactcttcaaagaagtgggaaaaaaaagtagactctttattaatggcagaaaacaaactggctgctgtacttccgaggcagctctctaataataaagcagagtaggcactgcaacaaagaattcttgaatgtactaaatatatagggaagcctatttaaattcaccagaggggcttagaggacaagcagcagaaagtttagaattcaattcaagccatgccaga

SEQ ID NO: 28117 - DNA, 1032 bp, Homo sapiens
aaagtaccccatgaactgtgaaacacctttcctgctttttcttcatagtacttatcacttcctgatattatgttagacaacaagcaaataagtatatgctgttcccactaaaatataagctccatttgaacaggagccttgattattcctgagtatacccctagtgcccagaacctagtagggctttaataaatattagattcatttgttgaatgaaaaaatgaatgaataattgaataaagatatccaggtagagtgtccgggcagcccaacctatgtgaagccagtacaagaatgtttctgtgacatagtgagcgcaattattcctctaaatgatgaacttgcatgagtacacaaggataaaattaagcacgtagtttagatttctgcaagtctcttcctcagattgaggaaaaacaaagaaattgagcttattctcacctcattcttacatgaactaaatccagaataaagcatcatttaaataccaagcacatccctacctcagccactcatggaatactttatctgtaaagggacagatagatagtaaatatttttggctttggggaccgtacagtctgtgtcgccactactcagcacttctgttgaggtgtggaatcagccctagacaacacataaacaaatgggtgtggctgtgttccaataaaatgttatttataaaactaggaaatcagcagatttagtccacaggctgtagtttgctgacccttgaattagagagtcttccccaaatcctcttcccaagttattgaaagaatgcccataggaccatagctccctcacctggttctttcaagaaatgagacaaattcagggatggttggagggtggaacgcctacctgtgacatgactattgagcctgatttctttccttttatctctttaaagtgagtcaggtcttaactttaaactgtctctaaagtggcaataactgggccatgtcaaatactcccaatgacaaaatttcttcttggagaatgaatgagggttgcatacagtggtgtgtt

SEQ ID NO: 28118 - DNA, 1115 bp, Homo sapiens
aataatactttagggtcagccaacttggagaatcctgacatttaacagctgttaaaacttggaaacattagatgttccttctgaacttccagttcttcatagataacagtgttacgaataatacccacttcatattttatggaggctaaatgagatcacgtgtaaaatttttcatgcatcataggagcttgatagatattagttattttttgggacaaatactggacagtctgaatttgtgtgtgaaaagtatcttaagcactgcttgcttatcaagtcttctagactagatgtatgcatacattattaaaaacataattcaattcagttcattaaatatttatctaagttcaactgagaagtgcacagcattatgctagtgactgagagagaagaagacagtttctgcctttctggagtgatgacattttcataaatatctctgatgtaagtagattggagtaggtgttaaattcagatacaaaactagtacaacaatggaagtccaagacagaaaaaaatatctgattggggtcattggaagaatgcatctccaagaaggtactatgtccctgaaggcccagtagtgagtaactttgagaatttctgagtgaatttacttggtaaaaaagtagatttagcaacaagatataaataaattaatcatgaatatagaaataaactttaaacaaaattataacagaaataagagctctctaaaataattagcaatgttaaaaaaacaaacataacttttagccatgagtttaatctttgcatgaaaaatattttattgatttttactggaatgcaaagagatttcttctgtgcttcatgctttaaacatccaggaaactttacccaagtctgaaattgattacgtcagttttttatttcaaggaaaatatgtgtagattttatttgaggtagttttgttttgaaaactatgaaggaattaaacataaatcatttattcctcaaacaatttattcaacaaatattcattgcatgtatgctgtgtgccaggaactcttccagactctgggaaatatgtctccaagaaagcagacaatacccctgccctctgtggaagactgacaaatatacaagtgcat

SEQ ID NO: 28119 - DNA, 1044 bp, Homo sapiens
ttatcacatgtgtaggttgtatctaccaccacatcaaaatacagaactgttccttcatcacagattccttatagttcccttttatagccactctgccctccttcctgtgccctgtccctgcccagccctgacccctagcaactactggtcttttctccatttctaaatttttgtcctttaaagaattttgtgtaaatgaaatcatacagtatgtaaacttttgggattgccttttttttccttagcataattctctgaagattaatccaagtcattttaacagttcattcttctttttttgctgagtaatatcccctggtagggatgtaccacaaattttatttaactacttgcccattgaagtaccaagttggttcctgtttttgctataatcatttctgtacaggtttttgtataatcatgaattatatttgtctagtttaaaggctcaagagtccaattgctaaatcacatggtaacggcatgtttattttataagattgcctgattgttttccatggtgtctgtacccatctgttgcattttgctctttttcactgtggctattagacaatttaaaattacatacataatttttcacatttgtaataatttttcacatttcaaaagaacagcacccagacagttcttgttctcaagaacaggacttgagacagtcctgttctccagtaccaagctcttaccacctcaggctttcccaggtgcctcgatttctagctggagtgtgttctcattattcccggacagatgcacagacttctacagcacagtgagtggttaaaaaaagaatctaaaactaagcaacctgggtttggatgctgggtctgtcccttactggctctgtgatttgttaaggtatttaatgcctttgttcctcagttttcttatctgtgaacagggtgactgtagcagtactgatgtcattaggttggtttgagggttgagtgagttagtacatgtaaaattgggtcccattgaaacccttctaaccctttacccaagagtaggtttaaatcctcatat

SEQ ID NO: 28120 - DNA, 1029 bp, Homo sapiens
actagtcaagaatcatataatttaaataactaaaatcaaggcaataaaagtcaaagttaataactgttatttattaacagttatttaaggacttgtaccctataaacagaaactatacatttttcaagcatctatgatttaccaaaatagactagtattagttaagaacaagataataataataaataacagaaatttcaggaattacataaggtcacaacttaataatacaaaaaaaataatcttttcataaaaacattccccaaaaatattaaaaacaaacaacaaatcaataacaacattaaaataagcaaaccatttgcctaaataactgttgtgacaaaaggcaaactaaaccataactgtaggccatttaagaacctactaaattacagcaccacgtttcaacactgatgtattaccaaagctcttcttagagacaaattcataggctttaacagtctattaaaaagaagtataaaagaatcatgtctttatcacaggaacttaactggactacaataaagcaaagatgaaacttagaaagaacacaaatttaattgcattagagaaattggaaaatcaacaagtaaatcacagaactaatatttttaaagaaaaaaattcgttactattttaaaaggaataagcagcaggaaaaaaatgagaaagaatacaacacgcagaaaatttttaaaaaatactgagggtaatgtttaagaaggtaattgcaaatttctagaagaaatgctagcaaatgtaatttgtataggatgttaaaacaatacttaataatgcagtactacattatcttagcaatacatagatgatttcaataatcaatttataatatttgactatatatagcagcattctatctctccatgtattcaagttttcttataggactcataaatatgttttaatagacttctggcaagtttatacttttgtgaaaattagaaagatttttttccattacattttttacctggttattgctggattggaagagtcacaaaattccac

SEQ ID NO: 28121 - DNA, 1030 bp, Homo sapiens
ggtgtctgacgggttttgtctgcggcttgtcctgctatattagcaattaaaaattaactgtaccatacagtcagttgactataccatacagtgtaccaacagtatacccccctgccccctgctgacatagtgaagacttgtgggaagtatcagaaagagaactggaattaaggaggaaaatcaagatttgtgactttagccaaatgtcttgggttcacgaaacccacataaaatggctcattttgggggatattgtgagaattaaaggaatagaatatttgaaaacactttggtacatttttctaggcagaacagaattgagttttggggagggtgtcttgagttaaagatggtgatgaaaataatgagtcattgaaatagaaggaaacatcctaatttacagtcattaaggactgccatgaaattccaccccatgaaaatctgaaatgggtatatataccttcaggaatgtgtagcttgatcatcaagagattcaagtatactgccacaacacacttatagtttagaccatgatcgtgtggtagagacagttaaaaatatttaatctctcttattctcaaataatgagtataggaaacaaataagaatttaaatatttctgaagatcatcatgaaaatgtctagcatattttgtaaacaacaatttcttggattattagatactttgctgtttgcttttcagtaggcacaaacatattgtgagatgttctgtatttatgaagttacaataaactgtgaaaataacagaatgcattctgggtaagctaaagcagtagtccagatatttcattaaaattcagatccatactttgggttgtattcttattcaaaaatatttttaaaaatattattgtaagtatgtttcttatcgccaatttttaattttcatttgtaggttgtggaaaatgcactagaatcaacaaacatggggactaattcaactcggatatcatgtcttcagagaagtttctcctgccctcctctccctgtagaattaagtattcttcca

SEQ ID NO: 28122 - DNA, 1054 bp, Homo sapiens
agttaactttttcttcattaacttcaggacttttctataaggaaatacactatttgctcattttgctaataacatctgtgtctatttcttggatatcttattttctgtgatcacatctttataagacacttcatctgggtgggttttggtgttttgtttttgtttttgttttgctaaatagtcacttttcctgtctcatgttaattgaagaggaagagaagcgagctgcaagttttatatgagccaggaggcaaaggaagatttccttatatggagtgatacatattattctatgaaggtgatgaaaatattcaccatggcaactgatctgccttacccataatgcaaaataccctatttgcatttattttgccagagaattctgaaattaggatctatgtagtagagaatatgaggaaggtaatatactatttcggttgaaaaggagaataatttttcttttgactcgtcaagtgcagtagtaagaaggggggaagagaagaacaaagagttggatctgtaactgtgaacaattgattgaaataattcactacttttagaccaaccaagaagaagaatagttttgaccagaattggaatttgaacgctcccccaagttgagtatgtctgtgtgctagtggagtggggaagggttgagtcacaatccagttcagcaaatctctgccaggatgtttactttttagctccccttatctgattttccattgtaaatttgtattaaatatttctgataagcagcctcaattcttgtggaagtttgagggcaaataaataatatgtacttatgggcaaggcattgtaatagttgcttcaggagatttaaatgagtaacacaccattctagtactcttggcaagcttaaatccagagggaggagtcagacaattattcgtgcagctatggtaccaggcagagcaaggcaggaatcatagcagatatgctatctgaaaatgtaaggtattctgattattccttccatgccttaactggcatctctaaaccatttttccttccaccttgggaacccctcatc

SEQ ID NO: 28123 - DNA, 1026 bp, Homo sapiens
tacatatttggaagcattttaaaaacaggttttaaccttatgtaaaattacttttatactcgtgttaacattttcatctgtgccttttggtaatttaatttctattatgaatttctggtgcctatgagctagctatcacctacctgaaaggtgcttagaggtgaaggtactgtttctaaaaacacatcactgtgatacctttctatcctcacattttcaagcttgcctcttttctgttctttgtggatataacttaagcaattgtgttattcataaaggtttagaaatttcaatattcccaacactctatgtttctgattttataacagtagccatttttgaaagtcagatgtttggcctgttttatatgaataaagtttatttataaaatattataaaaaataagtaaataaacagaacattaataataaagttttggttcttcctattcctgactttcatataatgaaaattatcctattgatctaagtagaagttatcatagaaagtggacacgtataagactttccttcctttttttttttaataacatatgaggaacaagacttctcttcccatatacttcatattttagaggacattgttttaaaggcttatgtctcactgtaaaattctgtcagccaaatagtaccaatacgttttcaagtagttctcactgataatttagttgaaccagagatcaaatatttgctcccgaattactactggtaatcaagtagttgaacaaaaaattactaaagcatttccgttagatcagtcaaggacagtactgcatctttttttttttttttttttttaagacggagtctcggtctgtcacccaggctggagtgcagtggcgggatctcggctcactgcaagctccgcctcccaggttcacgccattctcctgcctcagcctcccgagcagctgggactacaggctcccatcaccacgctcggctaagtttttgtaattttagtagagacagggtttcaccgtgttagccaggatggtctcgatct

SEQ ID NO: 28124 - DNA, 1071 bp, Homo sapiens
atatttctaaagcccttcttacggattcccgctgaataggtctagggtgaaatcagtgactcttctctcccagattatttcaataattaaccaacttagggagcctctgggtgcttaggaaaccctttgcagatgactgatttccatgctgaggcactaactaacgttgttttttttcccctgggcttcacaaaattgcagacttttagtgtggttgaaaaaaaaaatacctgcttaaaatttgttgtttaattttggtatactaataatatatcttagtatcagaatttgaggtgatctgcgaaaataccgaaaacaatttcttagaagattttagctttccaaaagacctgaagagtattccgtcaaagtctttttaaatggctagtcttctgaaatgcctagtcatttacaagtcatttctatgtgtgattgtattagctgtaacaaatggctacaaattgcttgaagaacagaaatgtgttatagttctggaggtggaagtccaaaatcaaggtattggcaagattggttccttctgagggctgtgagggaaggatctgctccagacccctgtctttggcttgtaggtgaccattttctccatctctcttccctctatgcatgtctaccaccgtgtgtacatttccatttttttaaggacaccagtcactgaattaggacctacccatataagcgcatctcaactaattgcgtctgtagcaaatctgtttccaaacaaggtcacattctgagattctagggaatctgagacttcaacatagaggtgtcccatagaggatggggacacctcaacccgtaacagtaatgatgactgcacattatgagagggactaataagatagtgtgcattggtataaaacatgtacccagagggttctctgtttaactttcaatggcataataacagtatcaacacctaaataactatgccaacatagttatttcatgatcctcaactgcctctgcctaccccaggaatatactatctttatttcaaatatgggtgactttgttaacttcacatctgcttgtcaagtgaaaaagtag

SEQ ID NO: 28125 - DNA, 1005 bp, Homo sapiens
tatttttagtagagatgaggtttcaccatgctggccaggctggtcttgaactcctgacctcaggtgatccacccgcctcggcctcccaaagtgctgggtttataggcgtgagccatcacgcccagccccagctgtacttataaatgtaacatatatgctagtaattcaagtcacagatcaactagaaatttcctataaaattgactttaaccccaattaaataaaaaagggggcctgttatttatactcacaaaaatgagaactgaggcagttattgagattaaagaaaaaagatagttgttgaagaatatagaggttttgcttaaattatattgcttacttcagagtttcctaggataactactcacctctcatcttaattttttttaaggtaagatgaaaaaatcttgttattcttccaaaacatttttgaagatttttgattttttttaagttgtcaaaatatgtaacatatgctgctggttacttaaaaaaaaattctgaactgtaggaaaatagtgtaataaactcaagtaaaaccaagagtttttattcagtggacataggagaaatccacaaatctatttaaatagattgcacagtgtcaacactatcaaacaatttctagcatcaggacaaaggatattgttaagcggttcttacaaaacacatacagttagaaatgtaattaaagtgattctaagtttgaaaaaagataaaaataagtaactctaagtagaaataatgtcaagcttttgattcaatagttagctgaagttaattcatttcaagatagcactcgtctcaaattatttctgaatcagaatggttatctattataaagtaaaaggcttaactgctataaagcctttgaaaatgtacatgaggctgggtgcagtggcttacacctgtaattccagcacttcaggaggcctaggtgggcagactgcttgagcccaggaatttgagaccagtctgggtaacatggtgagaccctgtctctca

SEQ ID NO: 28126 - DNA, 1059 bp, Homo sapiens
cttttaaaaagctttaccgtggtatatctgtttcttgtggattctgtttttcttgtggtttttgtttgtgttgtttttaacctttcccaagtatctaattatttttgcccatcttttcatatttaagaattaatcactttaggccaggcacagtggctcatgcctgtaatcccagcactttgggaggctgaggcaggtgggtcacttgaggccaggagtttgagaccagcctggctaacatggtaaaacctgtttctactaaaaacacaaaaattagctgggcgtggtggtacatgcctgtaatcccagctacttgggaggctgaggcacaagaatctcttgaacctgggaggcggacgttgcagtgagccgaaattgcaccagtgcactccagcctgggcaacaaagtgagactccatctcgaaagaaaaaaaataagagtaaataactttaaagctaattaatgcgaagttctgaaggatttgataactatatgctgataaaacgaggcattgactatttcattaaaagaatttcaggccaggtgtgttggctcatgcctataatcccagcacgttgggaggctgaggtgagagggtttcttgaggccaggagtttgagaccagcctgggctatatagccagactgtctccaaaaaatagaaaaaagagctgggcatggtggcatacaccaatatcctaggaggctaagctgggaaaattgcttgagctctggagcttgaggctatagagagctttgatggcaccactatactccagcctgggtggcaaagcaagactgtctaaaaaaaaaaaaaaaaaaaaagggcaaagaaaagagtttcaaacgtgtcaatatttatagatctttttgcagatacctgtcagcagtagaagataggggtgagcatttggggtaggtgtgtatgtgaatactgtgttgtggaactggaaaaggaagtagagcagggaggaggtagagaaggtggagacggtctcactcttcagtttataggcttttattactgggaattgttctctcagtgtctgttcgtgtctc

SEQ ID NO: 28127 - DNA, 1028 bp, Homo sapiens
gcctcaagtgatacacctgcctcagcctctctaagtgctgggattacaggcgtgagccactgccactggtccttcaacagattgattctaattagccaatcaaagacaaggatccatcacatctaggcatggctttgagcttcacaggccagaagctgctctgtcagtaactcagaggggatatggtccctagacccaattcacttttaataaatcagggtgccagtcctttaattttggaagataaataaaattgcgaagtagatgggatacttacgtcaacaagttggttgggtttcatcctgtaagagtattgtgtacagaaatccaatttgctttgggagcgtggactttgaaagcagcagtactgagtgagatggccttaatgatggatgataatgaggttgatgctttcgtagccacgtttccatctgaaaaccacgtgaagagtgtcagatcatcttcatgtccgttgcatggcgcatttctcctgcggagtgtttgacaccttctgggcttagtgctgactgtccctcctgttgacatcatcgtgatggtagccacctctggttttaccagtactttattgcatctactgaaagagcaacgtgtatagggaagtaaaacaatagttagtccccatttgtattgacattgtggatcccatcaactatagccagcagtggtctctgctcccagagcttaccttcagttgtaacaaacatctacagcttcactttgctttccttctctgtatctccttcaccaatgtgtacatattcatgtcacatgctctttaacgtttctaagacacaacaatacccattattaatctcttactcaggcagtgttaattccaataagactgcaaggcagcagtgcctccagagcctgcactgtgccgggaattggcactgggattgcaagcaccgtggtcattgctaccaagggaggcacagaatcccttcaccccatagtcacgggagcattggcaacaaaatttaccatgccttggcaatttatgctga

SEQ ID NO: 28128 - DNA, 1513 bp, Homo sapiens
actgttaaatgcttccgatcaagagagtgatatgataaaaatggcataactgggagatgaatctagtactgaactcccacatcgattagagtgagttggattggaggcaagaacttgggtgctattttatgtatttatttctaaaatctataattctatataattaggtagacctgtatgtacttttagcacttttcatgttttctaagtttgaattgttgactaaaaaagtgaagatttgatgtgcagctagatttgtcaaatagccttccaaagtggttttggcaataatataataatgtaaatagttgagaatgcagttgtaatcaattttcatttagctgatacgcataggaaatcctggtgtggaaaatgtacaacagtgtatcactttttgtatttggctttgaagccattttggaaattttctaactcccttcaggaggttgttagaattatttttaatttttattagagaaattatcagtttaatttgcatagactgcagagctaagaaaggtagcttagaagggaagcaaatcagttttctgattaaagtgctgccattatttcacatgtatgtagtgaggagtcaccttcctaagagtatcaagttctgagactgttcaagatctgtgtaagatgaccaaggttctctcctgacctttacatatattgaaaacctcttaagcttgctaagaatcactttcctatgctatgaaaaacgggagataactattctatctacttgagttcctgttgaaaattagatgattatatgtgattggtctttgtaaattacaatgtgatagacatgcataatatacgtggcttagttatattactgtctcctagagaaatataagacatacttttttttttggtcaagctaactttatcttgttttctagattgttattttgtgtcagtaagtaatccataaagtgccaacatgggaaagaaacggacaaagggaaaaactgttccaatcgatgattcctctgaaactttaggtatatttcattgattgaatctttaatgtttatatctctaaatgaatatgttttaaaatgtaaaaatggtataaagctgcatattattgttatattatctgcattttaatataatgtttgtatctatatgtcatttaatagtcttctacttttttttttttttttgagaaagaatctcgctctgttgcccaggctggagtgcagtggtgcaatctcagctcactgcaacctccgcctcccaggttcaaacggttctctcgtgcctcagcctctgagtagctgggattacagacacatcccaccacagccagctaatttttttttttttttttaatagtgacggggtttccctgtgttggtcaggctggtcttgaactcctggcctcaagtgatccgcctgccttggcctccaaaagtgctaggattacacgtgagagccactgcacctgactttctacatcttttttgttttttttcctgagacggagtctggctctgtt

SEQ ID NO: 28129 - DNA, 1055 bp, Homo sapiens
gccaagactgtaagactgacaataaagtgaaagataaagctgaagaagaaacagaagaaaagccttcagtttggctgtgtcttaaatgtggccatcaggtatgcttacgttttaagatcaatatgggattttagaaaactctttgaacttactttagaaggtattacctgaaagtacagtatggataaaaggatactagtaacatagatcatgttctctggagaaccagttctgagatgtgtgtataggtggtggagtgttctctggtaccacaccagtaaaagtaagggaagcaagattaagcatagggagaagttgaatgaagaggcagtggcaacagggtctcagccaatcccacagtgatctcttgcctgaattgaggcaaggagctagacctttctacctgtgcatagaccagtcattggatgtggcctgcccctagagcaggaagtaaccttgggcaaggcagctcccttttgttgagactgattcctggggatggatggactagactgtgagctctcagccggccacattctcagcacctgggggaatgagtagtaccttgatctttggcagtgagggcatgtctggctggcacatcacagtatctactctaccagctcacagttattaccgtggtactaaagtcagggtctctcagttacccttagtggtggcaagttaagcttatatgttaggaaattgggctactaggcagtagtcatgaagtcatgaggcttcaagatcaggcagatagccagttttttgttgtttttttgagatggggtctcactctgtcacccaggctggagtgcagtggcacaatcttggctcatggcagcctccacctcccaggttcaagcagttttcctgcctcagtctccaagtagctggaattacaggtgtgtgccaccacgcctggctgagttttgtatttttagtagagacagggttttgccatgttggccaggctggtctcaaactcctgatttcaagtgatccactcaccttggctccctcaaagtgctaggaatacaggcgtgagccactgc

SEQ ID NO: 28130 - DNA, 1029 bp, Homo sapiens
ctattcagatgtgcatggttctttgtgggaaatgtcagcactccttaaatcttgaagacgttaaacagtttgatttatttcccccaacccaaagtcctcaatgttgtgtaatttttcatttcaaattttcttaagcctttgtttattttaaaacccatcccctactccccatcccacagggcagggaggatcttactatgtaacatttacagtatttacatttttacactgtcttttctgattggttaaggtctccttggttcatgaatctttccttgatttgtccctcccagttttagatgatcaggtaagactattgaatttattttattcaagtagattttttttcctgtaagattttgtggggggaagccttgttactctttttaagtttgtatattactagcccatgcagaaatttttcttaatttgaggtagaatgcattttaggatttgaataaagaacagggtaactactttaaaaacaaggatggaaaaaaagatgatgtattcagaattctgtacaagtaattagtttgattggtttccatacagtgaagtattttccttatattaaaattaatacttatttttgttatttaagactaatcacgaatcccttgcacacctaagttcataaatgttaaagagtattattttgttttaatttggttccttttaaatagtagtaggaaaaaagaagagatgttatgagtattggataaatcattcttcaacttcatatgaattatgagacccttggcttgttaacttggcaattaaagtctcaccaaattttattttctgtttttctgaaactgtcatatgcatgcaaagaaagaaaagaataaaaaagaatacaccgtggtgacttacataagtcacttagaaaatgtatttggaaatggacgtatttacagtgtgacacagcatgtatctaataaatttcgttatatttctattacacttacatgtgatgttgccttttgctgttttgttggtttgcttgttttctcattatgtgaagat

SEQ ID NO: 28131 - DNA, 1077 bp, Homo sapiens
atgtggttgaatgttaaggctggtgaacataggtcaggagtggtatacacttaacccagcatgttggtggttcaggaatggctttgtaaagtaaaccatgcctcaactatatttaaagaaggagtaaaagtatgatgaatcaagatgaaatgagttttgcaggcagaaggaacagcaggagtaaaaacagcagtgtaaaataggatggtgattgccagagactggtaacgtatgtagttctagagtttatagtacaaggttatagggagagttgagaaatgaagccagagaagtgagataggaatgaagttttggagggttctcatggtgaggaacttggacttcattaggtatacagtggggagccctgaggagtttaaagcactggggtggcatggtcagatcttcatatgacgtaggttacttgttgatgtatgaaggctgaattttaggacggaaagactagaggtggggaagtgagtttggaggctgttgtattaattcagccagtagttgatgagggcttaaagttgggcaggagatggggagatagaaggaatatttcaggaggtagaattaaccagacttaatgattgattggcactgtaaggtgaggcagaggccttttataagtggatgctgagggtggcagagaaagggttgaggatgattcctgaggcctggcacgacagatgggagtgctgtaaattgagataggatatatagggagaaaagcaggttgagaaaagcaggtagagaaaggataatgacttcagttttagatacatttgagtgtcagatacctttgagaaattaatgtgcttagtctagaaaacatttggatatacatatctgagacctatagcagagaggttaggatgggcccagggcacagatttagaaatcagtacatatgtggcagtttaaactatgagaagatgggatcccttgtgtatagagtctgaagagagaaaaaggagatggccaatgacaggaccctcctaagtatctgagtggaagaggcaggggtagaaagtgaggacaccacaaaggatctcaaagaatctccatgttgaa

SEQ ID NO: 28132 - DNA, 1054 bp, Homo sapiens
tgccttctacacccctgtactgtgagaggtgatgctcagaataacagttgcaaagcccgttaaaattaccacttgtcagattttctcttcatagtgctgatctctccatgacttacgttttaggaatcaccacctctcttctaattttctgactaatgttctgttaatgagagaattgtcttaaccctaaaacctgcattccctgagcattctagacagagggtttattttatgtggtggaacgatgatttttgagattgttttgatttaaaatatatgtcaaatgaggtaatgtaccgatggccaaggtatgggtaatttgagtgcaattcgccagaatccgtgccccttggagggagtaaacatttcaggactgcagctaaaacattgacttacactctcctgaagcccaggcacctggcttacacagtgcactaacataactgaagtctgggtttgatcactgtacagttgacaaagaagcagtaagcagaatggttaaaaagtagttctggagccagactgcttaaggtcaggttctggttgtgtcacccactttaaagccttgggcaagctcttctacctggtaactagtgcctcattgtttcctctgtaaaacaggggtggtgatagtagaatctgtatcagagaggttgttgtgaggattatatgcgttaatacggggtaagtggttagaacagtgccagctttataagaaacatcaagtgttaggtgttattatctgttgttcagaatcagggaagtacttagttacacagtagtgttttatagctgttgagagctgaattgccggcattgatcacaagtgagactggaaaaacaacccggggaacactcttatgttaagtcagtagcaccatctcaaacatacatccaacttctgagggcaacgaacacaggacatagctttttacttaaaggaatcttaacagtctcagcggagtgcttgaggtagtcactaaccagttaattgaaactggcttttacgaaataaaaacacttgccattctttggctagtcttttccacgttgt

SEQ ID NO: 28133 - DNA, 1057 bp, Homo sapiens
cccaggggcagcaaatctgtaagctagctctcaacccatgagatgatgtgttactgaaaactgcctaaacagatgttgagccaataattaattctctggaatttgaggtgagtagtcagccagctggtggcaggatgagaagcggtgggccacagatgtatgtagttgactactagcagctctagggtgaaggtgtaggaattatttgtgtggagtcaccttgagattcaaagaacctttagatttccgtttctaaggcccagagtcattctctttctgaagctcaggtccaattttttttttcttgctctctctgcggtccatatctgtattctcaagcataaccttttagtcatatccagctccccacattgctgcagtgaatctccatactgtgcgttcagctagtactaactggagacagaatgatggagtagttaaaaaaaatgtctggtggcaattctccatctttgtcttattggtcttttgatgttggccaagatacttcttactgagccttggtttccacatctgtaaaattgggatgatagaggagcatcacagggctgttttgaggcataaacgagagaaactctatctagcacttagctcagtgcctggtgaagaattacagcttaataatcttgccattgatagttaacatctttaggatagtctctggagagacttaaacgtgttcattaacaaacattatgggaaggagccagcatagagggagaggttggatatctatgagacagggtcttaagagaaggtattggatcccagagaagcaggcatggcacgggattaagagaatacattacagattgttttcaacagaagagggaacctgatggaggtggtaggaggactgttttttctgaggttgggtcccagtcatggtgatttgctaggagagatgctgatatcaggaggagaaaagtggcaaggtggaaagctattatagagaacaggagacagggacataccagaaaactggtgaacagtaccaagagcctgcgactgcacattgtaaatttataatgacaccagt

SEQ ID NO: 28134 - DNA, 2034 bp, Homo sapiens
gggaggctgaggtgggtagattgcctgagcccaggagtttgagatcagcttgggcaacatggtaaaaccccatctctacaaaaaatacaaaaattagccaggcatggtggcatgtgccagtagtcccagctacttaggaagctgaggtgagaggatcgcttgagcctaggaggttgaggctgcagtaagccatgattgtgccaccgtactcctgcatgacagagaccctgtctccaaaaaaatatgtgtagatcagtgcagatatccttttgagattgtatagaaattgggatagaggcctatgttttctttaatgtaaaataagttctctgaaaaacttagatgtataccttcatcttcctaggtttgactataattataaaatacagcaataattagtaatatttatttcatattctaggtaaaactgccattcaatgcacaacggataatttcactgtctcgaaatgattttcagtccttgttgaaaatgcacaagcttactccagaacagctggattgtatccatgatattcgaagaagaagtaaaaacagaattgctgcacagcgctgtcgcaagagaaaacttgactgtatacagaatcttgaatcagaaattgagaagctggtaagtgtaaaagtttcttgttactatttaaattccaccactttcttttttgtcaaggaaatagtttttaaatttctaggtcagatataatgctcaattacttattttaatatgtatcaattaccattttatcatttttaccatgatatgctgtgatatgtaagtgctttttaaaaagaaggttttcaaattaagaatgactttactgtctacctaatcattagtggttgtgaatagattcaagaaattataaagcactttaggttctctgttttgtgtctatagaagttaatattccaggtgttcatttaaatgaactgtggacctgaataacttgttttggttgataccaaaaccagaccaaccaggatctttcatctaaggaaaaaaattctgatagatatggtgatatgaattgaaaatattaatatctaatgggatcctaagtgagaacaatgcttgcttttgaatcttttctttttcttttttgagatggagtcttgctttgtcgcccaggctggagtgcagtggtgcgatctcggctcactgcaagctctgcctgctgggttcatgccattctcctgcctcagcctccggagtagctgggactacaggcgcctgccactgcgcctggctaattttttttttaatttattttttgtatttttagtagagatggggtttcactgtgtgagccaggatggtctcgatctcctgacctcgtgatctgcctgtctcggcctcccaaagggatttcaggcatgagccaccgtgcctggcctgaatcttattttctattccagcatcaagacacaaattaactgaaaattgattagtttactcctctttcttttttccgttggtggaaggaagcattgtatgaaagaggacaactctgatagtacaggccagctaaagctaagatatggtaaaagatagcaaggaaacagcctagaagtagtaaaaacattgcttgaatattcaattttgtgtctattaattgttgaaagtttaaaagttgggattgtggcaagttttcaagcgtgaacattctagctatgaatggcaattaaacagcaacaatttagggaaaaaaattgtgcctccaggagaagttgaaaaataaaaaattattatttatatattgtacatatactttgtgtaaaaagataaaaaatcataactatattaaagagatgaagcataactaaataaaaaatagaggaactagatgttttacaaatagaggcatgagagatgttaaaaaaaaaaacaaaaaacccaaacaccgacatgatattgctgaatagttaaaattgttaaaaccaaggaggaaaagttttcaattctatagtacttagtacttttagagtgtgtatcagtaatacctttaataaacactggtg

SEQ ID NO: 28135 - DNA, 1032 bp, Homo sapiens
gaaaaggtgtttatttatttggtggaaaaatggatggtattgactttagcatttattttgaattttatagtatgttagaggttaagcattaatttagcattgcttttattacaagaactgaatgcgcataatgcataagccagtaacatgactttggttttttttgttattttttttattttttttatttttttttttgaggcagagtctcgctcttttcgcccaggctggaggtcggtcttggctcactgtaagctccgcctcctaggttcacaccattcacctgcctcggcctcccgagtagctgggactacaggcgctggccaccatgcctgggtaatttttttatatttttagtagagacggggtttcactgtgttagccaggatggtcttgatctcctgacctcttgatccgcccgcctcggcctcccaaagtgctgggattataggcgtgagccactgcgctcggccgacttttaaaactaacaattataaagtctttggattcagcttctgttcagtgtttaacttatgaagctcttgtctatgtagctttctttacaaggtccaagtttattcttttctggaagattaattcagaagttagaaaatatacatatctctgataaccattttaacctcagaggtaccctgaaatgaagggagcctcgctttttgcagaaaaatatttaccaaaatgtatttcttttagaaagtatcaaatattgttttcgatatcaacttgtaagtgatcagcaatcagaatattcacaaacacttgcgctcagggttgaggtgttcagacaccattttatttcattacttttgtccattatgatggcacagaagtaaaacgacctcatccgtccttagtgatttgcattttgtggtgaagattatattttattaaaaataaacctgtcctattcacaactagtcacaatttactggctgctcaaccaaagcgcaccccagtggcccttccggaacctgccctctgtcattccgtgttgtcgttgagcagcatttc

SEQ ID NO: 28136 - DNA, 1041 bp, Homo sapiens
atgtttgaacagaccaattattaggcaattttcttaactgcttctacaagagtttccttatcacttactgaatacccattgtgtcttttttccttagtagttgaggaggaaccgtatattatcctgtcctgaagggagttcctcctagatctggtcagacctttgtatggtaattaattaagatttagatcccctgttaggaaacctgctgggttaaggatttttgataggaaggctatgggttgtcagtggcttcagtgctttcgggctacgcccttgtttacactgacaacaaggtgatattggagtgttacagggttacagagaagaccttcaattatcaattataggttttaaatttaccctggcttttaatggaatagggtacactgtttttcctttactacttctatctctctctttctctctctttgacttcttctttgtctctttctttctctcttcctttctgttgcctctgccagctgcttatgttgctgttttcccctctccttccccttttgatggctttggcagtgtaagactgccacctccttgggtttttacactgcatgcaataactccatggtttctttgtgatatttaatgggcgttcccccagaggttagtaactccctttctttccatattgcagcatgggcatgtaggattagataagcatacttgctatctgtatacacatttattcttcttccctttcccagttctaaggctcgggtcagtgccactagttctgctaacggggcgctggtccctgggggaagaggcttactttcaagtactgttactgtggcataacctgcccttcgtatcccattctccacaagtgaacttccgtcggtatataggttaaggtgaggattagctacggggacttctaagagatcatgtcaggcggcctaagtctggactacaatttgttggcagtcacgctcgattggttccccatcctctgggagaaaagtggcagggttgagggccacgcatgtacatatttgaagcaccagtccctcaatgagt

SEQ ID NO: 28137 - DNA, 1048 bp, Homo sapiens
cttgaagaatgactgacagcttccctaattcttgtccccacttccaacttaggaccaaccagagaaatgcaaatatgcaacaggatgccagtttctagctaggcggcccacagcttccccatgccagctgcctgcaatcaaggcacatgagaaggcttcccccttttccactgtagggcttttccactctgcctgcctttgagttcttggccaaaatgcaactgatggtggccgactcccttgttatagcaagccctgaataagtagacttttcttttctcctttggtttatattcatttagtttccacagaaataaattcaattacatttagataatcaaaataatagtaaaggccgttagcaaaatggcaaaatggagaggaaaaataagaatcttgtattccgtaaaagtttaagaggagtttgtttttcaggatgctttgaatctcctccatagatcacttctccaatttttcctgtcaccacagaaatttacaatattaataaaacaactcgttaaaattttgaactttgctactttcaaactgaaaactttttgaagcttaaggcagttatttctgcaaaagatggcttcaggtttattaatttaaaagaatgcaggcagtttttgaaatattatcatctaagtgacttttttctacatttataaatactctactgtcccatcataattaaaagaatatgaaaagagtttgaaatatacttatagcttaaaacatggaaataattctttttaacatgaataattatcccaccagttttataatctaataaaaatcaaagtaaaagaaaaatgctaggcattttaattatgagaaatcatatgtattctgggaacttagaaacgttacccacatatttgtactccagaatcctcattctagaaattctttcctcaaagatgttgcaaagaagtggagcgcgtatgtgtttttgtcaacatgacctaaaacttataaagctctatatgaagcatacctgttttcaatccaaatttaacggtaatttacttcacatttgaactgg

SEQ ID NO: 28138 - DNA, 1045 bp, Homo sapiens
ttatcagcctaagaagcttttgggctgcccaagcccccttttttttccctccttagtcataaaggaaaaaacgatctagatttggcatcttccatagaaaagaggaataggtatgtttgcctttctcacatggacagtcgaaggcgagtctttgtgggtagtcccatctaaagtgtctaggaagctcctgtggacatggtgctggcgtactgaagtgggatcttctactcctgcttgattttctgaccttctgagagtgagatggtaaaaactgaaatctccagcatggtctgccactagaaccttcattcttgccctgcctgccccacagtgcttaaaatattagaacaatattgctattgctcaagaaagaaccacttctgctagtgccagtgactcgctgtttcttgaaggagttacaagctttgaaaacatgcaggaaaatgatgaggtagaaacattctgatcacctcaaaacagtacctgttcagtagtgaagccacagcttttttttttttttggttattagctagggcagactgatatggacattcaagatgccattcactttatttggacaaagctgggtggactacagattgattttcacaattccactccacctaattcatgatgagaaattctaaagccaggtatggtggctcacacctgtaatcccagcactttaggaggctgaggcaggagaaccacttgagcccaggagtttgagaccagtctgtgcaatatagcacgacctagactctaccagaaaatcaaaaaattagctgggtgtggtggtgtgtgcctgtagtcttagctacttgggaggctgaggcaggaggatcctttgagcccagaaggttgaggttgcagtgagccctgatcatgccactgcggtccagcctcagtgacagagcaagaccttgtctcaaaaaaaaaaaaatttttttaagtaattagggtgttattttttgcctgtataaagtgttttagcaagactttggagggggtgctgtagggggtgttaactgggtaccctttaaac

SEQ ID NO: 28139 - DNA, 1035 bp, Homo sapiens
gctggagtgcaatggcatgatctcggctcaccacaacctctgcctcccaggttcaagcaattctcttgcctcagcctccaaaatagctgggattataggcatgcaccaccacaccaggctaattttgtatttttagtggacatggagcttctccgtgttggtcaggcttgtcttgaactcccgacctcaggtgatccgcccgtctcagcctccgaaagtgctgggattacaggcatgagccactatgcctggcagaaaggactttctaataactttctattgtctttaattttggagaagtggctcttcctcattgctataatttaaatgcatttgttacagagcaagttttctactcataggctgcctcttttaagggaggcaaagggagcttcctttaatcatcccattatgagacaattcttttgacttaaaatttgctgcaacctgtgacctgggaagagaccatctaggcaccactgtttatcttctaccatctcatttctagtccagccacccgggagtgaagtgatctgaatctctcaaatgccagttgcttctttttaatcttgtcttctaggaaaacaatttatcctcctattagcaatataaattccagtgatctatccttggaaaagcctattcaaacataaaaatactgactttgatctgataacaacttcataagtatatactaggattccaatttaaattttggcttgtgactttttgaatcagttccttcctcctctatttcttaattagtagacccatgagaaatcaaaatggatgaaaggaaggggagatatgtacagttgctgaatgataggataacttaatagttcttcttgcattaggggcagaggagctgtgaaagagaagggcacactttccttaaatgcctgctctgtgtcaggaactatattagatataactagttggttccacttcagaacactgctagacctgaaccaggacctactgactcataaaagtttagagttggaaagaatctcaaaggtcatttagtccagc

SEQ ID NO: 28140 - DNA, 1036 bp, Homo sapiens
cttcagaactttactccaatgacacttttcctatgaagctttctgtgattcttccatttaaaattgcaccctccccacactttgtttcatttccctactttattttttgtcattacacttatcaccatttggtattcaatatatatttgttgatcatctactgtgtgctaaggatcattctaggtcccagggatgaaaattaaatggaacagtcaaaactctatcatgatagaatttgcacatatattactaatttatcttgcttctcaattgtttcccattcactagaataaaagcgttgtgataacagggatgctattggttttgttcagtgctgcatcgctagtgcctagaatgcctggcaaatagtaggctcttaacaaacaccaagctgttgtctctttttttttcctttttttttccaaataaaaaaaagcaatccttgctccaagtgtggaatagattgctgcagtgtcatactttagaccttgagggaatctgcagcctgtgaaaactgaagacacaattgaattgctaattaaagatcggaaccagttcaattctatgatcctctaaggaaaggattttaagtggtgaagtagtattaatctcactttccagactacttatcatggcagagcaaagttctccttagccccttccaagacctttagaccagcctgagagctgagtgatgaggctggctgctccaccaattgccccttccttaggggacatgtcttttaacacttctttctagaccagtgcttcccgaaatatagtctcttgactacctgcattagcattgatcaacttaaccactgaataagaatctctggaggtgggcttctaaaaatcttcattttttacaaactctggaggtagttggttagaatttgaagcttgcaattatttgttttaaaatctgagttagtgcgtctggatccaggaggattaaattactgtacttgatggcagtatggcaggaagcatccgggggtaaattacaatgtccaggagaggattagaagctttc

SEQ ID NO: 28141 - DNA, 1040 bp, Homo sapiens
tgggagggacctggtgggaagtaatcaaatcatgggggtggttagccccatgctgttgtcctcatgatagtgagttctcatgagatctgatggttttataaggggcttttcccccttttgcttggtgcttctccttgctgccaccatgtgaagaaggacgtgtttgcttccccttctgccgtgattgtaagtttcctgaggcatgcccagacatgctgaactgtgagtcaattaaacctctttcctttataaattacccagtctcaggtatgtctttattagcagcatgagaagggactaatacagtaaattggtaccaggtagtgggatgctgctgtaaagtgcctgaaaatgtggaagtaaccttggaattgggtaacaggcagaggttgtgaaacaggagagttccctgacctccttcacaggacatgtgacaagggtgtggctctctgttcagccactgtgagggagggggagcacacagaggggcagaggcaggaactagggtgagcacttttgggctctagccccgtggcagtgtctaggggtggttgtctgtgactcccaaagaccagtggacacatgttacagtgtactcttttagccttgctctccaccgatagcttaagtgttaaccagctcagtggactctatgcctttttgcaagggcagagggccagtgtgatagccttctggatcctgagctcttgtctagcatcctggaagaattgggtcacacacagacttgaaggatgaatgtgggggttttattgagtggtagaggtggctctcagtgggatgtatggggagctggacaggggatagagtaggaagatgatgttcccctggattatggctgtccagttgccaatctcctctctgaccatacccagctgaactccttttgatgttcagatattccttctcttctctccttctctgctgtgctattctgccactcttctgctcctctgttcatctggttatggagtctggggtttgggatttatatgggtacagaatatggggatgtggtgagc

SEQ ID NO: 28142 - DNA, 1033 bp, Homo sapiens
ctagcttatccatgtcatgctctccagagagcaattccaccgtatccttctttagggacttaagaattgctgcaactgcttagcaagcccccagctgagcgtgagatactgttatgggttgaactgtgtttccccaaaattcatatgttgaattcctaacccttagtacctcagcaggtgactgtatttggagatagggtctgttaaaagaaaaaagtgattaaattaaaatgagcttattagggtaggacctaatccatgtgattggtacgcctctaagaacaggatattgggtccctgggaagaccaagtgaagacacagggagaagaggaatacctgccaggcaaggagagaggtctcaggagaaacaaaccctgctagtctcccgatctcggacttctagcttccggaattgtgagaaaatacatttctgttgcttaaaccacctagtttgtgctattttttttatggtatccctggtaaactgatacagatactattttctattctgtatgggcaccctcatttccacaaattgggaagtgtccgctggtttcttggtttcatgcttcgtgacgcttattgtactcagcttggagcttcacctgaaaatccgagaccagaggagacattctactccgtcatttcttctttttcttcccttttttttttttttttttttttaagatggagtctttctctgtcgcccaggctggagtgcggtggcgccatctcggctcactgtaacctctgcctccccagttcaagtgattctcctgcctcagcctctgtagtagctgggattacaggtgcgcaccaccatgccaggctaatttttgtatttttagtagagacggggtttcaccattttggccgggctggtcttgaactcctggcctcaggtgatccgcccacctcggccccccaaagtgttgggattacaggcgtgagccactgcacttggctccatagtttcttttaaccagcttacataaagatgtgagtgcaaaaacttgtgatttaccatgactg

SEQ ID NO: 28143 - DNA, 1297 bp, Homo sapiens
ctgaggagtttaaacccatagaagtgtattgtcacagacactgaaagattctttgagattcttctgtaactcttgaaatgtgaagaaggaaagaagacaagggcagtacagggttctttgaacagtgggattgtgggtaatttgacattgccttctccccttcagctctgacactgcaaacacgcaactcctgtacatccctctttctgctgttttcaccatgtgctgaatgccaccagccattcgaattaactattgcattccagctaggatctctgaggcaatgtcctcatagttatcacactggatagaattccaggtggaatctctgagaaaatatcctaatggttattgcgttggatagaatgtcatgatttcatgattgttttgctttgaaaacaaaaacttttaatctgcataagagcaggctcagggaggtgacaaagctgttgcctaatatgcagagagtgatgtatggttgagagcagagacttcaaattttggccctgctactcactgggtttgtggtcttaggctggttacttaacttctctgaacttgaatttatcctgtaaaatggaacaaaatattaatacctgctgattgaggctgttaggtggatcaaatgaggagtgcctatagagtttttagcagagtgtccagtacatgaataaaggaccaagacattaataagcatggggatgataatgatgatgcaaagaaatttagtgttttctgtgtggtctcagaaggtggagacagacctggtgtttgggtgaatagaactagctgagattggaatacttcccatgtggtgggtccccagcagagcttggcatcacttctctctcttagtcaggatattagaagggatttaagagaggggcgggattttcaaaagaagacatttatgtggccaaaaagcatatgaaaaaagatcatcatcactggtcattagagaaatgcaaatcaaaactgcaatgagataccatgtcacgccagttaggatggtgatcattaaaaagccaggaaacatgctggagaggatgtagagaaataggaacacttttacactgttggtgggggtgtaaattagttcaatcattgtggaagacagagtggcgattcctcaaggatctagaactagaaataccatttgacccagccatcccattactgggtatatacccaaaggattataaatcatgctactataaagacacatgcacgcatatgtttactgcagcactattcacaatagcaaagacttggagccaacccaaatgcccatcaatgt

SEQ ID NO: 28144 - DNA, 1050 bp, Homo sapiens
tagaacttaaagtataattaaaaaaaaaagaacttaaagtataataataatactaaaaaaaagaaattgtggtatatatataccatggaatactactcagccataaaaaggaacaaactaatggcatttgcagcagcctggatggaactgaagactattcttctgagggaagtcactcaggaatggaaaaccaaatattgtatattctcactcataagtgagagttaagctatgaggatacaaaggcataagaatgataaaaaagacttggggactcaggggaaaggctgggaggggcgtgagggataaaagacttcaaattgggttcagtgtatactactctgttgatgggtgcactaaaatctcacaaattactgctgaagaacttattcatgtaaccaaagaccacctgttccccaaaaacctatggaaataaaaaaatttttaaaaaggaattccgactcgtttccctgccctaaaaatcctctgaactctcccttttcatgtttccctctccaataacctatgccaatctctgatctttgtctccatatttgcttttcagaatgtcatatggttggaatgtcatatggtaagtcatcttttcagactggcttctttcacttagtcatatgcatttgagattcctctttgtcttttcgtggcacaatagctcatttcttattggtgttgaatcttattctactgtttgtatgtaccaaagtgtaataactcctacgcctactaaagggcttctcagttgcttcccagttttgacaactttccatcaagctgctatgaatatctatgtccacattttttatggaaataaaattttaactaatttgggtcaaagtcaaggagcacacttactggaatttatagtgacaatatgctcactttagtaataacctgccatactgtcttccaaattgttgtaccattgacattcccaccagtcaatgaatgacagttcctattgctcctcaacttgccagcatttggagttgtcagtataggatctttttttaaaaggaaaagaagaaaaaa

SEQ ID NO: 28145 - DNA, 1074 bp, Homo sapiens
aaggagaactacaaaccactgctcaaggaaataaaagaggatacaaacaaatggaagaacattccatgctcatgggtaggaagaatcaatatcgtgaaaatggccatactgcccaaggtaatttacagatttaatgccatccccattaagctaccaatgactttcttcacagaattggaaaaaactactttaaagttcatatggaaccaaaaaagagcccgcatcgccaagtcaatcctaagccaaaagaacaaagctggaggcatcacactacctgacttcaaactatactacaaggctacagtaaccaaaacagcatggtactggtaccaaaacagagatatagatcaatggaacagaacagagccctcagaaataacgccgcatacctacaactatctgatctttgacaaacctgagaaaaacaagcaatggggaaaggattccctatttaataaatggtgctgggaaaactggctagccatatgtagttgtttattttttaaagaataagaaactgacaagtctaaaaaactgcccagttacatggtttaaaagtagctctctcattttgcattcctgccaccaaggtatgacagttctagtttctccacatccttaccagcatttggtggtgttactattttttatttttattgttctgataggggtgtattgacatctctacatctcttcttggccttataaatattctttgaaaatgttttttaatagctggtgctatctactactagactttatttgaaacctaaataggtgagtttttaaactaccaccataaccaataacagttattacctgttgaatgacctttcaacaattctgttttcactgtactcacttactgagctttatgaactggccagggaaaatagcttacaggttgtctctttatttaaaataagtcattcatattttgcccttgtcttatccactctctcataggcttgcagagagagagagagagagagagagagagagggatttaattaaaaatgagtacatctgaggctcctgctcagagatcccagctgaagtggctgtgttgatttt

SEQ ID NO: 28146 - DNA, 1051 bp, Homo sapiens
gacttcggcagcaatgcaagtttaccacatatactggctttctggtctatctcaacatgtcttcccaccactcactttttttttttcttcatttttggcccatactgaggggttgccagaatattttctcttatttttttaaacaaattcggttttatgtcaagattactaaaattaattttgacatggtattgcccatggtaattttgtgtatgttacaattcataataaattaaccagagtattttttcacaggctcctacccactgcatatttttatcatctaacacatagaaaatgtgtcagtctgttagattcaatgcaagtgctcagagaagtctttgtaactgtactttagattttgagaattcattcatggttccaatacatggcattttacatgtaacatcgcaaatgggtttcattttaagcattctttaaatatggagcttgtgaattacaaaagaatcttttattttacaccagaatacttcacatcttatggaaactcatcattgattttatttaaaagaactagtttttcaagaacacctaaacatttaattatcattaaatcaattaacttgtaacctcaggattatctaactatcaatctggaatgtccagtcaagacaatgaaatattaaacatatttaaggggttataaatatgtggagggaggaactaagtgacagtattgaaaactttaaatatatggggattacattatattaatgtatttaattggtatgtttattatatatggattatgatatattattagaagtttaaataaacacaaaaaatattaaattttataaaagggtaaataatgaggctaaatataagttaaacataaaatatttgattagcttttcttcataaccctataagtacttaggttacatagtataataaaatagaatgtccatgtgcataaatagcacaaatctgcaattagtagaaatgacctgaataggccaggcccagtggctcatgcctgtaaccccagcactctgggaggctgaggtggacagatcacttggggcca

SEQ ID NO: 28147 - DNA, 1653 bp, Homo sapiens
gaataaagaaaatcatttcatcaagtgttaacattgatattgttttggttagtgggagtacggttgattttttgtctccctttttttcctgttgttttccctaatgagcatatatcactttgagaatggacaaaacaagaaagttttgaaacgtagtatactcacacataatggtttccctgtattgatctacataaatgtgtgattttattaagcggaagtctattagtacaaaaatctacttcctattacagtttgtcacttcaggcagttattaaggtctttcccaccttaaagaatataaacctatttctttagttctgcagcctaagttaaaaggtgaagtaagtgctaacatttctttttttaagaaagagcatcaatttcagcacagactttccacctagcactgaaaatgtcactgggaaattgtagtccttaacctaaaagcttaaaatctcaattatacggatgaatcagttgagactcatgaataatatgaaaaggtcttttaatcataaaaaggcctggacaatgaaatgaatcactttgaggttagctatttttatagaaaatgagatttttttttttcaaatagttgaaagcgtgaatggtgcaactggaaatcattccaacagtgcaggaaaaaatagagctataaataaaatgaagaaacaagtaagcaactaggaaacggaagagcaagctgaagcagcaatagaggctgaaaaaccagcagtgaattcaagacaggaatctgtaagtgcactcaaaagatgacataaacagagagaaaagaccctcttcgtaatgtgtggacccatgtgattttcagaatctggttttatgtactgtaaaagaggattataagttagggcctttggaaagaaataattttttgccactatttctattttattgtattttgatatggggtctcactctgttaccgaggctggagtcagtggctagatactggttcattgcaacctcaacttcccctggctcaagtgatcctcctgcctccgcctcctgagaagctaaaactacaggtgcaggccaccaggcctggctaatttttaaaagtttttgtacagatggggtttcaccatgttgcccaggctggtctcaaacttttgagctcaagtaatcctccgaccttggactcccaaagtgcttggattacaggtatgagccagcatgcctggctgctattatttccaaaataataacacaaataattattagaagtaataataatcatataatttccagattctaataactcattttgaaaaatatggttttcatagctgattgaagaactacagattgttagacaggtattaaccctagtaaaggtgtgataccttcatggagtcaacctaaaaacgcagacaagagagcaaaaatcccagtcttatgggaatttctaaaactggattgtcctttagttttctaaaagtgctttttcatgcaacatctacaaaattcaactcattctacaagtttgatgtgcagaggaaaacaattatttttttctatcattgatctctccttcctcttgggaactcacctgctggttagagggggatatgtgcagccagtttaaagcatgcaccaatctgatgagttaggccttcaaagcagcat

SEQ ID NO: 28148 - DNA, 1032 bp, Homo sapiens
tgagtgttgtcttccctgaggtttctttctcttactcttctctccttgctcaaatttcagagttgtcatccacaattctgggaaaggtgatgtttcacttgcttcattcaataaagatggggtttaggggggtgacacaaggtatggctaccaatgtctaatgctggtattatatcctttatccagtatgctggggagaaagtacaatcattttgctttacttcatagctatctggttcattaaatcccatgagtcttggtaaattatgaagcaattattgattttgttgtggtcaacatcaagatatatattgattttcccaccagtcaatagtttccagaggcataatcaatattgatgtttgctgaacatgtgtgttaatgtcagtgtgggtatatgtacttagatctctacactcagatatttattttatactctttctgaacgtttttgtaaaaaactattttctcccaaagatcctattattttttggctgatttattcagttcttcctttttgctttacatttttaatctcatttattcttccccggattgataatggaaaggaaaactaaggctttggaagaagtctatttgcctttaatgaaccggttgggggtgagtcttcctgatgagattgtgattaattgcaaagtgagtattacttcttgtctccatcctgtcggttcgatagaatgacaaaaaaagttgaagactttcactctccattccagcatctaccagaccaacataactcagtaagcacatctgagaatccccctcatttactcccagtacttttttcaattatgtggaacatagacgaacaggtcaaacttggatttagacaaagttaaatgatcaactacatgatgcaatttaatgggcacaaaaataaaaaaaaaaaaaacctcttactgtcttacataatagcctaaagtctaccagtaggaatttattataaatatcctcttagaaaattcagattgctcctgagtaaattagaatatcaggaaactcacccttagc

SEQ ID NO: 28149 - DNA, 1465 bp, Homo sapiens
taattgatggccataagtcccagtaggcttaccagattcttccttgggagcaggaagtaaatatgacaacagaccaagactaaagtgataccaacatggaacttcagtctgttcaaataggaagatgggccaggacccatcttagagttgtggtgtccagtatggtagccatgaactccatttggctctttaaattaatgaaaatgataaataatttaaaaactggtttctccctcacaccagccacagttcaagtggtcagtagccacatgtggctggtggacatcatattggagagtgcagattattatacaatgttgtatgtacgcattattgtcatcgtggaaagttcttttggacaggactggcttacagtcagagctttcactgttagaaagtgaccagtctaactgattagaaagcaaggggtcactagcagcattggttagttagattgaaggtcaataactacagtttagctaggtttagaaatacaagcagaacatgatctggataataactctttgctgcttaattgctaaccaaaaacagccagatagtgaccgttttggaggtgaaggggatgggagattagattggcttgtctttcatatgaaaccactcttgactttgatgtgaagtttaaagatttgatcccttcctaggtcttctgcatcctattttaatatgctaccacttactttagaaattctcatatctggattttatgatgattggtctggtgctccacagacctcaccagaaactttaacgctacgtgccttgggctttcttgctggaaaatatcctgtgtagaacactctgtctgcctctaggtaagtgtcattttcggggagggaatctccctgaggacttctgccatttcagatgagaaagcccagaattattcttacagcataagatgccacatagtggttatgatatgaatataagaaatgacttagaggagatgcggggggggtgctgctgcaaatatacattcaattgcttgagtaaaaatcaaggcaagaaaggtgggcttaaattatagaaaggaaaatgtggggtggatttctgaaaaatgtgagtggcttgtaggatttcgccgtgggaagtttttaatcagaaaaattgaatacttgatgaacatctcttacctggtcaattgcaactatcttccaaatagactttttgtcattagcattcaccatgactgcctcttccccacctcacacacacacaacagatatgtccatgttctaatccttggaaggtgtgaatgtgaccttatttggaaaagatgttttgcacatataattaagctcagaatgctgagatgagatcatcctgaattacttgagtgggccctaaatccaatggcaagtgtccctgtaagaaacagaagaggagaagacacgcataggagaaaaggtgaggtgaagatgagggcagagattggcataat

SEQ ID NO: 28150 - DNA, 1032 bp, Homo sapiens
gaggtgtcttaagaagattcctagagaagggtttggaagagaatctttagggacaactgttggttggggataaacaaggggatgcttcctccctttcctcaagtcactagtgaggttgtaatagggttgtccagagaaacaaccagtaggatatatagacacgcgcgcgcgcgcacacacacacacacacacacacacacaccacagaaagagagattggctcacacaattgtagaggttggcaagtccaaaatctgcagggtggagggtaggccaaagatccagggaagagctgattttgcagctcaagtctgaaggcagactgctggcagaattctcccttctctagaggaggtcattctttttcgattaatgcctttaactaattagatgaggtctacccacattatggagggttaatctgtttttcttaaagtctgctgatttaaatgttaatctcatctgaaaatgactttcaaaacaatatctagactgttttgaccaaatatctgggtactgtggtgtagccaagttgacacatgaaattaaccatgacatggggctttaaggagtttgctgggaggactttctctatgtacctggaattttggtgggcacacagtggattatctgacttttacggggcaaattaaaaagacgagaggcagctggccagtcactcttagggcagaagtaaaaagaaattgcagttcccttagggttggcctctgtcgctttgttttaagacaaacattgcaggggtgtttctcatggtccagctatgggctatgtcagcaaaggctggcttggaattctcttggggttttgtccaagaaggctacctgcagaggcaaaaaggtctcagcagagaggatctgcctgtatcagtgcattcctggggctgatgaggaatgagggtacatgatacctacagtcagaataaagacatgttcatccagtgtcttagtgtgcttgggctaccccagcaaaataccaaagaacaggcatattgcttgataggtagaacaacaa

SEQ ID NO: 28151 - DNA, 1045 bp, Homo sapiens
agtccactgactcaaatgttaatctcctctgggaacacactcatagacacacccagaacaatactttgcatccttcaatccaatcaagttgactctcaatattaaccatgacagcggaggagctgttgttgatacaggagggtgtaatgagtttatacattgaaaatagccctgttgctgtagaaatagcacatggaagtgaagtggtgcccaggatgccacaggagcaaaaaggtggccatgcaaatcctggcacaagagagaggaacttggatgagaggacaagggcctggagactagtggccagattcaagagacaggtgggacctaaaatggacggaactttgggaggaattgggtaggaaggggtggttaagggaagacagcatcatgggtcattctggctggagtaacaatgtttgatggtctcttcagcaagtgaggggacacagactgaagacagggtcaaggttagaacatgacttggctgcttaaacgcaaggacaaaggttgggatctccacagatggacacaatggaaagagggagaaagacaaaagagtttggagtattagcaagtcatacaaataaaatgtttctaaaatgctgctttacacatcattaggagtttaattatggttattttcattctctgatctgcttcttctgttctttttctcttccttctttctttttccttcctttctttacagaattttatctcagcttgctcaagtttaattgcagaaagtctcacatttttctaccttatgaatctctaagatcttttccagagtttttacaaagggtttatacaaattttggtaaaattgagtaacttttccaaaagaccagatacctggaccagctggtaatttgtcataatttaaaattatttttattttaatgcacctttcactctatggttttgtattttaatgcatctcttaactatacatggttgatttatagtgtgactttggataagttatgtgacccttctttgcttttgtttcctaatttgaagaatagattagtaaaaagat

SEQ ID NO: 28152 - DNA, 1298 bp, Homo sapiens
cggcctcccaaagtgctgggattagaagtgtgaggcaccgcacttggccaagtttctatactttaatgagtgaagaaatggatgaattcaaatatattggtaatgacagagataataaacatagttgcataatcaaaccactgtctccaacggccagttgctagaagtaggaaagacatctaagtgaaggaagacagagcaatcagattctgaccttccatattttgcaacttatttttttattcattcaatataaacttagtaagctcctactatggtccaggccctgtgttttgcttttatatcagaatctcggtcatcaagatgcttatagcttcatggaggagagatgtaggaaaataaaaaagcctgctaaagcacacggataacagagggttttcacagaaatatataaaaaatgttgtggggacagagatatgaactcacctcgttcatatccaggtgagtaagtcaacagtgatgaggaatacgagaaagtcccagtagattttggcggcaacaaattattagcaataaaaatataagaactagtctttggctctgtagagtgaagagaaggacaattttgaggaaaaaggaagaaactccgtgagagtacttagtattaggttggtgcaaaagtaattgcggttttgccactaaaataatggcaaaagtaatggcaaaaccacagttacatttgcatcaacctaatatgctggattaaagtttgatgctggaatttcctctttcctgggtctcttaagtcacaacagatgtggaatcatagcaaaaactctgtaaccaaacttaacgcataagaccaacgcacaattacagacaagagtaatcagaggacagacacaaaagggtggaagtttacatatttctcactcccgcaggcagtgttctgttgacaatttctaactctgttttgattctgtagtgacaatagctgcttccccacccccccccctttttttttttgagacagggtctcactgtgtcacctaggctggagtgccgtggaatgatcacagctcactgcagtctcaacctcctgggctcaagtgattctcccacctcagcctcccaagtagctgggactacaggcatgcaccaccatgcccggctaatttttttattgttttgtagagatgggatttcgccgtgttgcccaggctggtctaaaactcctgagctcaagtgatctgcctgccttggcctctcaaagtgctgggattacagatgtgagccaccagcctgcttccccttttatttgtcctttttataactgc

SEQ ID NO: 28153 - DNA, 1646 bp, Homo sapiens
tcccaagattcaattatctcctgccaggtccctcccacaacacgtggaaattatgggggctacaattccaggtgagattggggtggggacacagccaaaccatatcacctgtgatctccagagacttccagggcgtggctcatttccactgacacatttacagagatgttgttagtggtgtcataccaaacatagctgccttttttttttttttttaagacggagtctcgctctgtcgcccaggctggagtgcagtggcgcaatctcggctcactgcaagctccgcctcccaggttcaccccattctcctgcctcagcctctccaagtagctgggactacaggtgcccgccaccgcgcccggctaatattttgtatttttagtagagacgggctttcaccgtgttagccaggatggtctcgatctcctgacctcatgatcctctgcctcggcctcccaaagtgctgtgattacaaccatgagccaccgcgcccagccaaacatacctgactttctctttgcctttcttctgctggactcccaccttgtcctgtagctattctagggttctagagaaattttatacaagggacagtctttgctcctggctatgacttcttccccagatccgtcttgtgctcctctctagtaaacttgaccgtaccatgaagaagcacaaatgatgaccctatgatctcacctcgtctggtaaagcccagcgacagtccagcctgcacctttcttcttctccacctggacctctttgattctcctgagctgtggactttctaatctgaaaatcctaccaacctaccttctaaaattccagagggagatgactcaagatagtgtctatgcaattttcttctggtttttctttagtgaccaaagctgtaggttagttatttaagttatactttatgccctgaatagacatattggcaaatgaaaatgttacctgtccagactttccagcttccctccagcaggtcttgtcacttggtcttttttctttccatcatgcggaaggcttgttcttccaacagtttcttgcctgcttcaccttgggactcactgtgtgcctttagaacttgtctaatcagaaattagattgctattcttggccagaaagcagagccagagaaattcggacctagcctcattagaacaggactttaatcagttgagcctaccagccacacacaggctaaacatatatattctatataaataactacacaaacatatttatatatctttttaatgtgtgtgtatgcactgaagtttgcaaagaactgggatagaaaagcaaatgcatatgatgattaatgaaaccagaattttaagtggttccttgttgtatatttgctgacaacatattattttcctttttggagtggagtgtgtaaacctctgggcaggaaagaactatgaattattctttcccttctaatctacataaataagagattctaaaactgtgcttttagccatttaccatgcaaatagtcaccagggatagaactgttgtagatctagaatatttatttaatggcagctgctacaggacacatgctttttgagttcaatggcctagaatctcctcacccttaccaacccctcccttttaaggttcatttcttgtga

SEQ ID NO: 28154 - DNA, 1020 bp, Homo sapiens
tgtatttatttctgggagagaatgttttagtaacagggagctgtgaggtgggggagaagtggttggaattataataatcagcttggtttattgaatcacaataatgaatctctccctttgtcgacgtatggctagttatcctcagattatcttaatgatatcaggcagagtgtgccgttgatccgtgcttgaaaagtaaaaatagttgacagtcaaactgatctaatcttgaatgctgtttgtgacagagggaacgattttgtgaaaaaagacgaggtggtttttatgtcgtgcaaaaggctgaaataatgctttacattattgctgatatcagttccatttaaaaagtttaacaaagtgagttgtgtttaaatgattcctctggggtgcgctcctattaactctattaaatagcatagatacttctggaagaaggctgtttgtactctatgcactggcagaagtgaagttaatttctgcaccataatctcacacttctcctgacaaacacacaaacacctaatgaccaccagccaaagtctagcaaaccaaaacctagtcccagatactgcacagataacatggctgaatctacaggagatgtattttaaatcacaatcttagggtgagaatattagcaagttgtagacagagacactttaattttcccttctcatatttacagaggcttatagagcacctttcttaagataggcatgttaagggaatgaatatgtgaatgattgcatgcctgcatgacggaagccattctggaggattggaccagggacacatcttgaagggactcttggtattttaacgtgggtgggatgtgattcaaagaaatattaaatactcttgctaaaatggagccaataataataataatacaaataacatggagctaataatattacagtagctagctagctagtcaggcatgagcaaggcaggagagggctcctctgtgcccatcaggaatgtcaggtgactatcaggtatggtcaggtggttgttaac

SEQ ID NO: 28155 - DNA, 1035 bp, Homo sapiens
gccctcagtatctgacacatgttgagttcagagtaggtgcacaagaattgaggggagaagtctggaagggatggacatttaggaagatggaggatctgtaaaaccctcttgtccatttttcaccagttgtccttgttttcaccagtttttatttcatcaaatatcccccctagatttaaaactctctgtttagctcttttaaatccaataaaacactaaacagaggataaatttagctcctggtagagggtctgcaaatgcagatgtagagcatgtgggaagatttccaggagctttagcagaaagtaccatatattgggcattagctttggaggctgattataaaagtcattttctgtttgtgattttgtaatcttactctcaggtgagctgtggtcattgctgacaggcaggtccatgcacaacaaccgtatcatggtgccttttttcatcaatcatgaatatttttgtgggggggggctttttttttaaagaaatcaattgaaagaaaaggtaaaataggatgatctgtgctagtttgagaaacagattaaagaatactagaatactttcaaaaatttattcaaagagattctaagaagaagacaaaaaggtttctcttttcttgttgtaaagattctaaactcctttgggaggctgaggcgggtggattacctgaggtcaggagtttgagaccagcctgaccaacatggtgaaaccccgtctctactaaaatacaaaaaaattaggtgggcatggtggtgggtgcctgtaatctcagctacttgggaggctgaggcaggagaatcacttgaacccaggaggcggaggttgcaatgagctgtgatcgcgccattgcaccccagcctgggcaacaagagagaagctctgtctcaaaaaaccaaaccaaaccaaacaaacaaacaaacaaaaatattctaaactcaccaaggcattatcttgagggctgctctcataagacagaaggatgcccctggacacctgtgaagtgtatgggtgtgtgtgtgtgtgaat

SEQ ID NO: 28156 - DNA, 1737 bp, Homo sapiens
ttatgaggttttgttgaaattagcgtctacatttcaatagctctacgttcccacctgcttgatggcggcactaaagggagcccctcaaaacctcctctgctattccaggcattccaaggtggccttgcaggacagcaaggaagaaatttgctcctggactatgatttcaacctcgcctgctgtccattgcctgtcatgaagaaggcatcgtgatgaggtattgctttcacaccctctgagagaataggactgccacatactaccataagcttgatggcttaaaacaacagaaatgcattctctcatggttctggaagtgagaagtcctaaatcaaggtgtctgcagggccacactccctctgagggctctaggggagaatctttccttgccccctccagcttctgatggctcctggtgtttcttgcttgtggtagcatcactccaatctctgtcttcatcttcagcattgctctaatctctgtctccatcttcctatggccttcttccttcctgtgtctagaatctctttctcctttctcttgtaaggacaccagtcattggatttagggtgcaactgaaatccaggatgatctcattctaagatccttaactatatctgtgaagacctacaaaagacctattttcatatggtcacattcatgtgtactggaggttagcaattggatatatctttaaaaattatttatttttaatgtttgtgtgtacatagtatgtgtgtgtatatatatatatatatatatatatggtatatgagatattttgatacaggtatgcaatgtgtaacaatcacatccgagtaaatagggtatccattgcctcaagcatttgtcctttctttgtgttacagacaatccaattatacttagttattttcaaatgtacagtaaaatattgttgactgtagttagcctgtggtactatcaaatactagatcttattcgttctatctaattatatttttatacccattaaccatccccactccttaccccagctacccttgccagtctctggtaaccatcattctactctctatctctatgagatcaatttaaaaaaaatttttagctctcacaaataagtgagaacattcgaagtttgtctttctacgcctggcttatttcatttaacataatgacctccagttccatctatgttgttatgagtgataggatctcatttttttatgactgaatagtactccattgggtatatgcaccgcattttctttattcatttgtctattgatcagcacttacattgctttggatatatcttttgagaagacaccattcatcccattgtagggacaaaggcaactggagaaaagagaaagaagagaataaataagggtacggaaggagtgggggcacttgtgtcctactccctttctagagtatggcagagccaattctcaaccctagtaagggagtaggttaagtcagaagcctaaggacttgcgaatccagcatgaacagagcaacttcagggcttaagtggaaaaggtgactgcgaccatgatcctagtattattgaggcggcctgtgaccttggggtggctaccaaatagtacccaaagttgtagtggagagatccatgacccctattctctcagaggatctgaaagccatggagcaatatctcatcaaggtgccttctgtggtacaggcagtggacagcagatgaggttgaaatcaaagtccaggagcagattt

SEQ ID NO: 28157 - DNA, 1791 bp, Homo sapiens
cttgggcataagaatagcttcatggctccaagtctgatcatttgtgcataggtcagtatattgtgaccaatctccttaaaggctgttcatcccgtggtagaaataataaagtatccaacactgagagtgttctcgacattgttactccagccttgggaagaggtcttcgatgcatggctgaggccaattgcacctgggtgaaagtggcaggtgcaaaatgaaagtgaggagggttgtgacaaagtgtctcagaggtgccatgtttgaacccgttcactctcaaggtgaacaatgcttcgacaccgaggccaagtgtttacagaatgttgaactaccgctgggaatgttgggaatttcttgctatttttcactgagtgggagcccaagtgtctgcgtttgtgttcaggctaaagacattgctgtagaactcggagaaaatggagtgggagatcaaggaaactgatcagcctctcccagaaagtgaaagcaggggatgtactaaaaatgctctgatggaccctatgtttcctagattcttccagttactggtctggcaaagggaggtggtggtttgaattaatgagaaggggttactgggatgaaaacaaggtcttttatccttactgtaactatagagtttggttaagaaaaatagaagtcttaacacagccctgcaggaattaatgaaagagccagacccttgggcaaaggggcagagttggaaaaaggctaaaagaagaattcttagagctgaggggccaatgagcacatgtagacacctagaaaaatcaactttagtgtttcattctgcagtggtggattatttaacctctttaagtctcattttcattgacaataaaacggaagtaaatggtagtaccaacttcccagaatcttggtttcataaagcccttaacagtgtgctaagcactcaggaaatgttatctcttgttattattacttgtcacactgactaatatcagaaaatcatgaaggagttgtgaattcaagatatctttcctctctcctcgtctttgcctcagttgaaaagcctcaacctagtttaaggatctagcctctaagactgatgaatcatgctgtagcaaaagtgaatagacgtgattggcattcactggtgctagccagagaattaggttccccatgataaaaatggaatggattgggctggcctcatctgattagagaaatctgcccttattgctgctatgtgattatgaggctggacttcttggacagcctggtggaggtcttgggagatgtgggtaggagtaagagctaaaattcgttgaagtacttggtgtgtgctgggcacaatactccttgtggggttcagtgaggcctcagatgcaacatgaaaggggattccaaaaactcagtcatcaagaaaaatatgattttgatgcaatattaaaaaatagaaattaatacaaaaagtctatggtgagcaaagtagcaaaatttaaagtaacaacaaaatcactgaaagtgccatgttgagcagtgttggagtctgagacaaaaggaaaaatcagttacattattcctgtctttatttataattttgatattttgttcagtaacattttttgcactgtgatttaaaaaaaatgtgcactcacatactgcctttgttactgagtttttcacatctgcttaaattttatgcctaaggagagtgcctcccttgccttctcctactcccactgcttccctatataagaatttattggccaggtgtgttggctcacacctgtaatccctgcagtttgg

SEQ ID NO: 28158 - DNA, 1008 bp, Homo sapiens
ttgctatggatcagtgtttgttgtgcatatcccattttccttcttttgaatgtgtctgttggaatatcctatgcatatatcaccattgtatgtggaatatgggatgaaggagttgagaatttgtctctttagttcacagatattcatactgagagaaaccgtactcaatgtgccgcttctgaggaaatacaccccaggagactcacttacccctggacatgactaaaatgatgggatcttgaaccttgagcttgagctgaatgccataataggtgagacttctgagaatatcttagaggtcttaaaaggacatgagtgtatttttcacatgggaagaatataaatcaacttatttattttagctgtatatggtaagataaagatagtgataaattagttataagtgatgtttattttcaatcaaaattcagaagacaaataaaagattcaggcttattgaatttaaaaataaacctgcttcttatcctttccagatggcaaagaattctaacattaaatccaacctcagggcccctgcttggtgctcacacatttcaaattggaagtgtagggaagttattgtttcgtagaagagaactttagccattgaggggaggaaaccaatagataaattcttctctttttcttggctaacaaaaaaataatcccgagatgtggatgcagtgtttattacagctttcagccacaatcccaacaaggtgtgcaatcagtcacatttagtgacgtccaggtcagtcacacatctcctactcctttcttacttgctttcttctccttctccctcactcttcactcccattccttaagcttggatacctttatagcacatacaccctctacttcaagctttatttcctggtggtcaaggctaagaaagaggccatttgtagagatttgggatatctagcagtgaagggagaatatatatctccccacaagtccaccacacacatgctttgaactataaaaacttgtggacctgctcca

SEQ ID NO: 28159 - DNA, 1048 bp, Homo sapiens
atacagcaaacacacctttgccaatgggagcaagtaatggggaacaaaccaagctcaacttgttctggaaaaaaaccctgttgttttattattatttagaaagcacacacaacaatttattggggaaaaagaaaaaatgcaaaataattgagcatacaaatttattttaaaagaactggtgtcacttcccaagtcatatctatgtgagctttttaaacttttgtatttcttatatctgtattcataatcagagttatggatatagatatatggaaacacatcacacactcctcagaaatcctttctccaaaaatctgtagggaatgcatcctttttcttcctacaggcgtttccttggatcacgccacagtctcttttctctgagttcgtctctgatgacaagtaaggatacttgtgaaggaagatttccccttagttcttgactttttctttatttttttctgattcttcagtgagattcccagttcttccatgatagcgttgaaagagagacactagggaacatgagatacagaccatcagcttaattaagcctatcgcatgtgccgttgacctgcctcttgcctaggtatttatgaacacaagatattggcttgaaggcagctctgtcacaattggccagttcccatcacctcctcctccacccgctggccacccaccttttctaatcggggaaactgagatggcaagttagctgggcaaactttgggatttcattcacaaatgcagtagtataaaactacccagttaaagcaaactcagggctctcaaaatagataacttacctttgctgagacaccaaaatagagttaaattaagtcatttcccccactgagatgatccaaacattgataggattatcaaggcatacggacacttcagtaatgctatagaaaatgaacaaaccttctctacaccaaggctttgtttttttctcccatgaaaccttactttgttcctaaaataaaatctaattcttgatgactttcctttctgataaaaaaaaaagaaaaaaaaacaattttaa

SEQ ID NO: 28160 - DNA, 1049 bp, Homo sapiens
gatatgagccagcacaggaggacaaaggcagcatgattccacttatatgaaacatctaaaatagtcaaagtcatgaaaacagagaggagaatggtagttgccaaaggctgggaggaagggaaatgggggcagttgctgctcaaggggatataaggtttcaattatgcaagataaataagttctggagatcttctgtacaacattgtgcctatagttaatatcgtcttgaacacttagacatttttaagcggttagatctcaagtgtttttatcacaataaaaaaaaaatcctctaaaaaccatagcctttggtaaaggttatagaagtgcaagcatacttttttaaccttagcacacaaaatggatatggttgaaagtcaaatgacagtgtgccaccaggtaatgtgtctaagttgtaactgccttacgggaagaaatttgtgttctatgtttgcaaagtactaaacatctagtgtgtttcttgtgtatcagcatgcaacatgtgtatttgaaaatgttcgttttgttccaaaaataacttgatgtagtttagagaagtagtagttttaatttttctatttttaaattttttctacttgatttcaaaaccaggcctagaatttaggttctaggtgtaaactattggcctatcagatgtatgtctcttaaaaaactggttctttgaataaaactttttatctcttttaagcataagtgtttataggatttgaatttcacttccattttcctgtaatacagaaacataaaaactcatgtcatgtgtgctaattttctttcaaacagtaagttgtggcttcagtgaattgggaggggtgtcatgccacacaaagaaaaacgtcagaaagttttttatgaactatacttaaaaaatgttatagcaagtacagatgcttctcacttactatggggttgtgtctcaatacacacaatgtatgctgaagatattaaggagaaattgcatttaatacacctaacttacagtttagcctagcttaccttatacacacatggaacacttacactagcct

SEQ ID NO: 28161 - DNA, 1050 bp, Homo sapiens
tttctatgccatgattttatttaattatcatagtaaatgtataaagtccataatattaccttcattttacaagtaagaaaattgaggcttagaaatttactctaaagaatacataattatttattgagtggctactatgtgccaagcacaatgcaagatgtcttgtacactattatgggatgagattcacatgatcatacctgtgttcccttgaggatgatctgtggaacactggtctgtcaagatgctgtggggaaaaaaatctgcaatctaataggcttcagaagtgctgaatacttttctactttgttgaaaattctcaatgcgcaaaaacttgtgacgcacactgagatagcatgtagtaaaggaacatttagagtgacgctctatgggttatttaactatgaaaattctatttgagaaacatttgccaattgaacacattttgaaaaacacccctacaaaactttgtgttccagaaattttgtcccactgctacatattaagaaattgagactgagaagtttggtaacttgcctgcagtcattcagcatgtggctctgctagaacctgaatctaagtttggctgttttagaaaattttcttctgcttctaaaatctataactacaggtcgatgatggatatctacttctctgttagtaaagctgaatttaaattgttgaaaggatcaaatgtaatgtatgtgaaaacattttgaaaactataaaataatacataaatgtcagaattaggtagtatacagtctaaagtagtatagaaatattaacttttgaaagagatcatttctttatccaaatctctgaattacacttttaagtaatagtctctgcagaaagttaagttttgtcagttattgttaattttgattgtcaatacttcatcaatcacacttgaactcttttggtagcatttttggtttattaaattgtctttgggagagtaaacttaggaaatttgtggtttctatatactgaatccatgaaatatgaaactaagaataatgtcatattcatcccaacatctgattc

SEQ ID NO: 28162 - DNA, 1037 bp, Homo sapiens
taaagaagcaagaaggtagctgtaaatcttctagcccaatcattctgcaggaaagttatttggaggacataaatgataacaataataataaagttaatttctccatagcacatatttctaacaccaggtagttagcaggaagtcacattggctgtgtattcatggtaaatatggaagatagttgaactttatctgattagttatattcatattaattaaaagttgaatatataaaatgcagctttttcttttttaatgaatttgttgctaaataaaaacattaggacaattcacctaaaatctggattttttttattttcttagaaaatggaatattccacaatcttgttctcaaattcctacatgtctacaactctctgacttgaaaggcagctgtctcttttaggtatgtcatgtggtctgtaattttccataattgccaccgttccctactacctcctggcacaagcatgctttgctcacttatggtatctgcttggcctctgtaagcattttagtttgtgatccctgcatgatgtggagagtcatattggatcatccctttcaaatgacaaaaatactaataccaacaagcaaatcaaacctacctggggtccttaacgatatggcttgactgttagctatgatttctggacttgcccagtagtctagacagtccctgattcttctcctttggaatgcttactaacaaattaccaagggctcacttgggaagagcaggttcccactataccaggaccttatatgatacagttttctttctttctttctttctttctttctttctttctttctttctttctttctttctttctttctttctttctttctttttctttcttccttccttccttccttccttccttccttccttcctttctttctttctttctttctttctttctttctttctttttctttctccctttctttccttcctttcctttctctctctccctttctttctttctttccttccttccttccttccttcctttctttctttctttctttct

SEQ ID NO: 28163 - DNA, 1025 bp, Homo sapiens
tgacctctcccagggagctacaggggaagtctagttggcatggacacctttgagcagggagggcagaactttctctctgacagaaaactgttacttggtaggggacttggtaagttgaaggtataggaagtgttataaattcctttgaccccttgctattctcactagagcacagtaatagtaaacataatgggagcaagaagagcagcattttgctgttatttagagctctctttcgtcgtttaaaaagtttgctgttgtggggctttattgtgtttcacagttagagttctaggctacttgggatgctagggaaattagagtttgcaggaagacccaaaatgtggctaaggaataactttttttaataggtagaaatatctgcagacagcttcagcaccttaaaggtgtagtgagctttcttttttattttttgagacgttgtttcactcttgttccccaggttagagtgcaatggcacgatctcggctcactacaacctctgactcgtgggttcaaatgattctccggcctcagcctcctgagtagctgggattacaggcacctgctaccatgcccagctaattttttgtatttttagtaaagacagggtttcaccatgttggccaggctggtctcgaactgctgacctcatgtgatccacctgcctcggcctcccaaagtgctgggattataggcatgagccaccatgcccagccggtatagtgagttttctatcactaggcaactgcaaggagtatgtcatgcttagacgagtttcacataaggagatgcttcaaccaccacgttctactctctagaccaaccccttcctatcacatatgcaggtcctgaggtcagggacagcaaatgacacacagaaggtggcagagggttagtggaagagacagcacagaattgagggctctttcttctttactgcagagttctgtccgctgcatgccacgctcagtaatgtttattttttgttagataaaaaagtagaatgttgggagtaaattaca

SEQ ID NO: 28164 - DNA, 1065 bp, Homo sapiens
tccagcactttgggaggccgagacaggtggatcacttgaggtcaggagtttgagaccagcctggccaacatggtgaaaccccaactctattaaaataaaaaaattagccaggcatggtagcatgcacctgtaatcccagctactcggggggctgaggcaggagaatcgcttgaacccgggaggaggaggttgcagtgagccaagactgcgccactgcactccacccagcctgggcgacagagcaagactccgtctggaaaaaaaaaaaaaaaaaaagtgacactttgtcatttaaaggacactttgtaaatctgggttgagcatctctattctgaaaaatcccaaatctgaaactttttgagcactgacatgttgtcccatgtggaaagttccacacttgacctcatggcatgggttgcagtcaaaacttttttcatgtacgaaattatttaaaatactgtataaacttacctttaggctatatgcataaggtatatatgatgaataaataaattttgtttagacttgggtcccatccccaggttttctcattatgtatgtgcaaacattctaaaacctgaaaatatccaaaattctaaaaacatctggtctgaaacatttcagataagggatccacagcctgtgcatagatcctgtgtacagtggcaaagtcaggtctattgctttttcaaagaacggcacagcctctttcccttacatttgtgctgaacatcttgaaggaagtagaatcttctctgccttctgctagcccatttcccagtactttaaaactctttgatattgctgaatgagataaatcatttcagatattttttcagatataccaaattctatcttgccagtgcccctctgtcctgtgagccttgcaagtgaccttccttgtttctgacaaggaccatgatgaatcactagcttggggtatcttgtgtctcttcacactattgattttaggaaaatactttctgcagcttgcaaagccgtaatgtcatttgtctttagaacatcactgtccaaagaagaaacaatcaccatgctttacacata

SEQ ID NO: 28165 - DNA, 1030 bp, Homo sapiens
cttgcaattccaggactttgggaggctgaggcaggcagatcacaaggtcaggagttcaagaccagcctggccaatatggtgaaaccctgtctctactaaaaatacaaaaattagccaggtgtggtggcaggcacctgtcgtcccagctacttgggaggctgaggcaggagaatcatttgaacccggagggtggaggttgcagcgagccaagatcgcgccactggactccagcctgggcgacagagcgagactccatctcaaaacaaaaaacaaaacaaaaaaacagctgccccccaaaagaaacaaacaaacaaaaaaccccaaacagtccactcaatgctgaggtgacaactccatttttggtaatctgaatatgaatctttgacaagggtgtttttagagattattttgtttacaactgttgttttccttttattcacatgcacatttaccaccattaatacttttttttttcccaaaaaaaactttagccccttctctgttatagactaggtatttgacttggagcaggtaatttagcttctgaaggttttgttcttttcataagtagagtgaagagttgaacttcatgatctttacacctattggatctattaaaatctatttttcactggaattagagtatttgagatttgataataaaagtactaaggcttcctccaaaagcgaggcagaaatcagtttcattactatgggtaagtaattaaaaagacctcaacaatgaaatgcccttgacactaaaactaaactcatccaacttaattctcctgcggtgcctccgaagacattttgaaaagcttcaggcatggctgggaacactgtccttcatcaatgcggactcagtattagaccagagtctcctgggatttttttgttcttaattctctaactaaattccaatatcaacacgttttcttgtcatctgtttctatctcatcaagtacaggaccgaaagaacaaaataatgatattcaagtattctggttaccagaattcttgattaaggaac

SEQ ID NO: 28166 - DNA, 2071 bp, Homo sapiens
tcttttgtctgagcaagattatgtctcaggttcactggaaatgacaaccaacctttctgtcctcctgagttattgtgttctatgtttcctttcaagacatggctaaggttatagaaccaaaactgcaaccctcaatagctgcctatctctggaaattaaaaaaaaaaaaaagccttttcacctcattgtgtatgaataaaaccttgtgaaataaggattttctgtttttattatttatagatttgattacttatatcaatattctcaggattctcatgttgcagagaaactgaagtttaaatacattgtattgctacccttgaaaaagttcacagaaattgcttgtatgtaaaaatgcaagttcatgtaaccaaagtgcatatttgaccacatttaattgatttttttaaaaattagcttaaatagcattacatatctctcccttaatattatcactctgaattatagagttctgatgtacttttttgttttacagatttgtttttggtttcctgaaaagaggctagttaatctgaactccttaaaacttcttatactggtttaccaatgagacaagatagcattgacacataatgtttaaaatgaagatttaaaattatatgtaattatgttgagttagaattttggcaaaatttttatataaacagtttttacactttataaggtatcagttgacatggaatttccatgtttctattacgtttcagatcgtgagctaatgtaaaatcaagaagttaactggtggataatcttgggatatctgggttgcttctcattaagagataatattggcatgatgattaccattagtgtgtgtatgtctgcttatacctataaatgtctatatacgtcttattatttctatatgttacagagaaactgtaacttagagtcatgttaatgagcattttggttttgccactttgaagatgatgttcaaagaatgtatgtgtctctagggggttgttttatgcaagctcatgtgtataaggtaatggggtatatttttgtttacaaagtgaaaagaaaatatgttccaaagtatgaaacagtatagtgaatggcaaagcatgagtgtgtgtggagtatagaaggttggaggaaacagaattttatttacctcggagtataatatatgcacgtaatgagtctgaataaaaacaaggaaatgtgttaaaattttggcgaagtttacccagctttaattggttcattaataagatagatattttaagttttgtgaatctttttttctgccaaatactgcattaatgtaacactatagttttattttctctcttttaaaatggaatatttagcctgctcttaacaagaagataaattatcacttaccttctatgtcatcgtctcagacactttcattcccatcatcaacacgtggtttctgctttactctcatgtttttctgaaggttttgctataaactacagtctggaaatagcctttgtcagagaatggcagtatcagagcctcatggaaacatggtgccaaaaaatactcttaacctattggcacttcaaacagtcattggtatagactttggatattaaggtgtcacttagatgactaactgtactagaggatggaatcaggattttcaggactctttttaatagtccaggagcagaagacctttgaaaaccaggtgttgatccaacatccactagttataagacaagtaggattaagtgaactgctgaggggaatctaattgtggttatatggctttaatatcttattataagatatcttgggatacctgggtcatttcttttattcttttaataagatatggtcttttaataagatattattaaataataataaataagataaaaaggtattattaaataataagataataatatattatcttttaataagatatagctttacatatcttattaaaagaataaaaagattcattctcttcctgatctctttaactctctctttggtaacctataaatgacacattctttatatggcaccttattctccctgaccactcagaattcacagacaactt

SEQ ID NO: 28167 - DNA, 1025 bp, Homo sapiens
aaaagaacaacgactgtatttcgtttcaaagtcacatgggatcattgcctaacaggtccacccaaggatgatttaatcctctagaggattgtacttttgtttgttttactattttctattgtctaaggtcaagactatgaaattacatgtggacttagatattttttgttcaacagagacctaactgatgcaagtctagtacagaagatgacctcaaaggttatggttttattgcttgttgaacaataatcaattttgtctttaactcagatattcatttccattagcttctcctgttggactatataaccactctttctgtgattcttttttgaactagatttaccatccagatggttccttcattaaggagttaagtgtatttttggcacatgcttacattatgtttgcatgagagtcgtgttgataactttataaaattatatactgacaaatgcaaagtggcataaatgtaatcacatttggtccttacagcatctagataaggtaagtaggatggtccccagtttattgagaggaaagagatcctaaagttagtaagatgtacccagaggggttcagaaccagtctatctcatgttctttttcttcaccaaactgcatttccatcaatgagatgatgtgaaagaaatgaaagcatgtgggcttatttctccattttacatcctaactctagactttatatgggtcataaggagaaaacattctcaagcccaaaataaaaggagaaataatttaaaaattttctatcatcactaaaatcctgatttctcactcatttagtggcatgtttgaagtgtgagttgcccaagtggatccctcttggatctgctgggttccatttacaaagacaaagagcctctgctctggcttccaggatcctatttctcagtttctctggttcacctagcatggagcagcttctcctgcaagtcaatgtcacaaggctagaatgggctgtctgcaggagtagaaacaaaataagccttcagcgttttttgtgca

SEQ ID NO: 28168 - DNA, 1043 bp, Homo sapiens
gacatttattgagcacttatgatatgtcgcatgctgttctaaatcccttgcaaacattaaattttcactataacctttattcttttacagataaagaaaaaagatgttaaatgggatccccaaactcatggggggacaggcaatattcaaacccacaaagttggtgctagagtatatgccgttaaccataaagctgtgctgcttctacaccaagttattggtctgatgatttaatagtcacaataatagttcaataaaggttaatattcactgataatttactatgtgccaggcactataagcattttacatatgtcatcttttttaattactgaaattaaacttttgaaataggtatacagacagggaaattgaggcttgtagagaggtagaataacttgcctaaaattttgtagacattaagggaaagagtgagaattctaattcgtgatgcaaactcagatttcacctcatgaccatagccacatgctacagtgacttggactgtttcttatcaataggatatacttttttgaaaattcgtatgtgttttcattaattcgctgaatgaccaatttgatagagaagtataaggactggaattctaataatctgacttttccataaacttagtttagaaaggatgggcattctttctcaaggcgggctccatattgggaaaggcaataaaatgattcaaaattataggtctaatttgtgcccttcaacccaaagaagaaaactatttgttcgaaaaaatatgctaccccttgaaatacaatgttttcttagatggagaaaatgtttacattaactatattatagcactaataaactaccactgattttcctccccctttcagttttgtgctcgaggcctgcttactgaatgactgtcatcattttaggtaataggtaatgtaatagaaactggcctgtgttcaaattttcttcttccaaatgtgtttctgttcacattttatgtatatctaaagcctggatgaaatcacattgctcaatgaccctaagaaaatctttttacc

SEQ ID NO: 28169 - DNA, 1098 bp, Homo sapiens
tctatgtcaggtttacgacaggtagcagattataaacataaataagataaaattaggatgcttagaaatttccagtcttacagacatgtaaacagatatttgaaatataacttgggattcagtgcttttgcttccaaagtgctagtgaaccctctggtggtctcagagagctttaaggaagagggaaatttgcgtgcggtcgtggagaatgagggagttcaccaccgtgaaggtcgtgcaaaggatcatccaaagtgaggtgccagcctcagaaaacaggagtcaggagaacatggggatattgaagaaatgatagattcttcatcataactcatgtgagagtacaggcagtgagggaagctagtgcctgagttaatgaaaatgaaaatggctggatgatgaagagttttgaattagaagaaattcaactttattatgtggacaatggagggtcactgcctgactttaaataaaaaggggcctgaatttttgaaaaattctggacaataagcagaaagcagaggggggtggtgccagtaaaagaaagttcaaatgggggcgggtcagagatagtggctgatgaggactggactccaagcaggcatatttccatcctgcaccctgaacaagcacatggagcaagctttattaagcactcatcaatggggattcatagtccctttcccatgacataatccactctattggtacaacctctaaatgaattcctctttgttaacttacgttagaaacttttctaaacatttacatagctacttatcaagttggaatcatattccatggtcattttcaattgtggtcatagtcttattagagctggaaaaatgaaaatacatgtttaatattgtgattggattataacatatactgataagatgatatttcttttaaaaaaaagttcccatatatttgatgataaaaggatcgttagaaaggatcaacaaacaaaaagaaatgtgaattatatacacatgcattattaaattacttcagaatattcagttagctttatataaaagagcatttttatgctccatctgatgagtttaatgactatttgatactttcgttctgttt

SEQ ID NO: 28170 - DNA, 1047 bp, Homo sapiens
cagagtgctgggattacaggtgtgagccaccgcacctggcctgggtatctttcttgacctcgcaaacctaaaaagctactgcaggcttcagtgctgtttcttgtctccgccctacacggtacatcgctacttcacactggcaaagagaatggggcattttgattaaaatacagacaaatgccatctggccgagtattctgacatcttatctcctgagggcactgttgacatctaaagagaacatggaattggcattaaaggaaaaaatggggtggtcaaaggcagaatcaaggtttagggcaggagaatgagcacaagttacatttctagtacatgaccctagctgcaactaagagtcaacattttcttccccactggttattgaaaggctgactaaacaatcgtagctgagttacaacaaatggtcttccccagtacgaagatacctacacatgcgctctgggcagccctgcctcacttgtgttcctgagctggtctttctctctaacagatgctccctcagggttagactttggcctgtttaattcactgctctattcataaagtgtctcgaacagtgccaagcacatagtatgtgctcaataaatatctattggatgaatgaagtttagccttccgcactctacgaggagtttggcactgaattattttcttttctgtcatctatttgtggatgccctctttaaagaaaggacaggaggcagcttatacaaaaatagatcttgggctaggcgtggtggctcacacctgtaatcccagcactttgggaggccgaggcagatggatcacctgaggtcaggagttcgagaccagcctggccaacaaggcaaaactccatctctactaaaaatacaaaagtcagccaggcgtggtggcaggtgcctgtattcccagcttcttgggggtctgaggcaggagaatcacttgaacctgggaggcggaggttgcagtgagccatgatcacaccactgcactccagcctggcaacaaagcaagactgcatctctatatatatatattttttta

SEQ ID NO: 28171 - DNA, 1185 bp, Homo sapiens
tttgttgaacaaaattcaaaatactgttgcttaaagtattaagattttttaggattataccttacttataggcccgtcattcatttggcatgaaattttgagttttattcactttcactttcctttttttccaaagcaattaaaaaaactgccaaagtaagagtgactgcggaactaaggttactgtaacttaccatggaggattaagggtagcgtgtggtggtctacaacatagttatttgggttttagtatttcatttagacagcaacacttacctaatgtttaaaggtaatgtctttgcaacaccaagaaaaagctttgagtagtagtttctacttttaaactactaaatattagtatatctctctactaggattaatgttatttttctaatattatgaggttcttaaacatcttttgggtattgttgggaggaggtagtgattacttgacagcccaaagttatcttcttaaaattttttacaggtccatgaaaaagcagatgacttgggcaaaggtggaaatgaagaaagtacaaagacaggaaacgctggaagtcgtttggcttgtggtgtaattgggatcgcccaataaacattcccttggatgtagtctgaggccccttaactcatctgttatcctgctagctgtagaaatgtatcctgataaacattaaacactgtaatcttaaaagtgtaattgtgtgactttttcagagttgctttaaagtacctgtagtgagaaactgatttatgatcacttggaagatttgtatagttttataaaactcagttaaaatgtctgtttcaatgacctgtattttgccagacttaaatcacagatgggtattaaacttgtcagaatttctttgtcattcaagcctgtgaataaaaaccctgtatggcacttattatgaggctattaaaagaatccaaattcaaactaaattagctctgatacttatttatataaacagcttcagtggaacagatttagtaatactaacagtgatagcattttattttgaaagtgttttgagaccatcaaaatgcatactttaaaacagcaggtcttttagctaaaactaacacaactctgcttagacaaataggctgtcctttgaaagctttagggaaatgttcctgcttagtcattttagcattttgattcataaagtacctcct

SEQ ID NO: 28172 - DNA, 1050 bp, Homo sapiens
ttgatcaagctggtcttgaactcctgacctcgtgatccacccgtctcagcctcccaaaatgctgggattacagactatagacgtgagccaccacgcttggcctatgttcccttttgataaggacaccagttcaaattggatcagggcccaccttaatgacctcactttaacttgattacttctctaaagacctcatattcagggggctaggcgcagtggctcacgcctataatcttagctctttgggaagctgaggcaggcagatcacctgaggtcaggagtttgagaccagtctggccaacacagtgaaaccctgtctctatgaaaaatacaaaaattatctgggtgtggtggtgcacacctgtaaatccagctactcgggaagctgaggcatgagaatcacatgaacctggctgggaggcggacgttgcagcgagccgagattgcgccattgtactccaaactgggagacagaatgagactgtctcaaaaaaaaaaaaaaagacccctcatattcaaataaagtactgaggtactggggttaggactccaacagatgaattctggggggacataattaaacctttaacatcacctgatcccatggaatatatttagagttgatgtgtttgtctccccactagagtgtaagccccatgaggaagagaccactgctctattccccgtgccaagaatagtttctggtacagagaatatgctcagaaaatactttttttttttttgagacagttccgctcttgttgcccaggctggatcttggctcactgcaacctccgcctcccgggttcaagcgattctcctgcttcagcctctcgagtagctgagattacaggtgcacaccaccacgcccagctaatttttgtatttttagtagaaacggagtcaggctggtcaggctggtctcgaactcctgacctcaggtgatccacctgccttggcctcccaaagtgctgggtggcatgagccaccgtgcccggccagaaaatattttatgaatggatccaagcatggtttgatcttcccaagaca

SEQ ID NO: 28173 - DNA, 1051 bp, Homo sapiens
gtgaagctccggctctactaaaaatagaaaaattagcctggtgtggtggcaggcacctgtaatcccagctacttgggaggctgaggcaggagaatttctttcttgggaggcagaggttgaagtgagctgagatctcgtcattgcactccagcctgggcaacaagagtgaaactccatctcaaaaacaaacaaacagaaaaaatgtgctttgtccgaactgagatgtgctccaattgtaaaacacacaccagatctcaagacgtcatagtatgaaaaaaaaatgcaaaatatctccttaagaatttcaaaatattggtcacatgctgagatgataatattttagataaatggggttataggaaatagagtgttagttaatttcacctgtgtccttttacgtactgtggctactaggaaatgtaacatgacttatgtggcttacagatcttggttggatggcactggacatgtggctgaggcgaggatgtctcctgtggattctcttgtgccattctgagattgctcagaggtaccggttgttccctctgaaccaagagtgatagtgcccaggtggggaccattgatgagttggacatgtgagaagcagggagccagcacggggcatacctggaagatataaaaagtagagaggagtcacaaccacgtgaacatatttcacacctctgatctgtgcacttaaaagtggtgaggatgggccgggcgtgctggctcacacctgtaatcccagcactctgggaggccgaggcaggcggatcacttgaggtcaggagtttgagaccagcctggccaacatggagaaaccttgtctctactaaaaatacaaaaattagccaggcgtggtggtgggcacctgtagtcccagctactagggaggctgaggtgggaggatcacttgaacccgggagacggaggttgcagtgagctgagatcgcgccactgcaactccagcctgggtgacagagcgagtctccatctcaaaagaaaaaaaaaatggtgaggacagtaacttttatttaggtgtttttaccgc

SEQ ID NO: 28174 - DNA, 1099 bp, Homo sapiens
ggattacaggcgtgagccaccacgcccggcatagaaatcatttttaattggtgcttattttaaaaagcaagattgaggcatgacatatttatgtgtgtgtatatatataaacatgcacacacgtgtgcacatgtatgtttaaatatttttaaattaataaatttatatactataaaagtcaccatttaaaagtgtataatctagtgttttttagtgtattcacagagttgtgcaaccatcaccaccttctaattttagaatatttttattaccccccgcaaaagaaaccctgtacccattaccagtcactccccatttccctcttcccccagccctggcaactactaatttactttccgtgtctatggatttgcctattctggccatttcatataaatggaattatataatacccggtcttttgtgattgctttctgtcatgtagcattatgtttttcaggtttgtctaagttatagcatgtgtcagtgtctccttcctttttatgactgcataatactccatgtatggatataccacaattggctgatccatttgagttgttcccacactttggctagtaatactgctatgagcgctgttttcacttctcagaaaactccactcttaggagtggaattgctgggtcatatgtcagctttctttatccttttgaggaaatatatattttaaaaaaattcaacatttaatgataaatctaattttaattttaataatgataatctagctctatttgaaggccattattctttctttctttcctttttctttctttcttcctttctttctttctctctctctctttcttttttctttcttatttctttatttcttttttgttttttgtttttttgagatggagtctcactctgtcgcccagactggagtgcagtggcacaatctcggctcactgcaacttccgccttccgggttcaagagattctactgcctcagcttcccaagttgctgggattacaggcacgtgccatcatgcctaactattttttgtatttttagtagagatggggtttcaccatgttgcccaggctggtctcaaactcctgacctcaaatgatccac

SEQ ID NO: 28175 - DNA, 1044 bp, Homo sapiens
taactggaaaacttctttaaaatagtgaaagatagtttggcttagaaatgcttcccatagcttcgccatatctcattccacttcttggtgaatgcagggatgcctaaagtaagggagaatgcaattgaccttctctttttaatacaatctttattcaggcttgttggtacaatgggagctgtgcagagaagtccccacaaagggataattagaagtctgaaccaatcagaaggaagctacaagatggggcatcataattggttcataattcatggtccatagcaaattcactgcacaactcgttttctagacgaattcaggtggttctgttgttgttattttctccctctgtggtcgctctgggcagaattcagggcatcatttttatatccagatattagatggcaccatcttttattcccctcttttcttttttctcccacctcagatgcaagtaatttcttttacctcaatggcttgaaaagactttatatgaggggaaaagagaaggatcaataggactttgtgaatttaacttttatgcccaagaaggaacttttgtttgacaaatgctgaaagtcatcacaagattctccaaaacacatcattaaaatgacttattagatattttgggattacagtcagctcccaattcagtactgggcaagaggatgcacagactctggataattaaacaccactgataggtgttgatggatacacttattactagagagttaatcgtgaagaggaaaccaatttttccccaaaagcatttagaagaatctattcttagaagattcttagataattcaaaggattttcttttcttttctctctctcttttttttttttcctgagatggagtctccctctgttgcccaggctggagtgcagtggtgcaatcttggctcactgcagcctctgcctcccgggttcaagcgattctcctgtctcagcctcccgagtagctgggattacaggcacccagcaccacgcctggctaatttttgtatttttagtagagatggggtttcaccatgt

SEQ ID NO: 28176 - DNA, 1035 bp, Homo sapiens
aaaaccaaaattgaatttaatgtagaaggctgtttaaaatgagagtgaaaatggaaccgattttcttgctgggttagacactgttattataaaatggcttctctctttatggctcagaaacaaaaacagaatgaagagttcacttccaaaaaagcaaactcccctccctggaggctttggacctgatggatggcagagactttatccacaacttctgagatagatttaggaagaaaatcagcctgtcattgaaagaaaccttgggaaagaaagctcttccctacaaatagggcccccaggaccctccgctagtgaagccataattaacaatggaaatgggaaatggcgcgctttcttgggggtttgtatttcttgggggttttccattattttcaatggtggttattttcaagaccgtaaagaatagctgtaaaataattcacttctttcctttaccccagattatatgtataaatatatatatatatataaaaataacatatagatgtgtgtgtctccaatgaactttgaggtttcagacacaaaaaccaaaaatattcattctggtgcattgaacttttattactgtgaattgacttttcctcagagtgacatatatgctaatttataacaactttaatgcagatgtgctttttaattgaaaagaatcaaaattaactttatcttcagaatattacaatactcatgtgcaaccttcagtgaatccctactggtaaggaaaacagaaattgagagttctataccgagaagattgagaatgcaacgttgttggactaaagctgtcctttgctctcatgggggtccctgggatggatgggtgaagtatttgcgtgagggcctggtgcctcctggagagtcacacacaacacactcagtccaccttcctagctcagtgaatctgttttcacatagtggaaaaaaaaatccctgtctccagtgctgtacctgtgggtggacaactcggccaagaggcaccatgtctccaaatagctctcctgtctccatatagaactg

SEQ ID NO: 28177 - DNA, 1041 bp, Homo sapiens
agattccatgtataagtgagattgtacactatttgtctttctgtgcctggcttatttcacttagcataatgtcctctaggttcatccatattgtcaaaaatgacagaatttctgtctttttaaaggttgaatagtattccattatatataggtaccacacactttctttattcattcatccgttgatggacacaatagccatttcctggctattgtaaataatgctgcattgaacatggggtgggggtgcatatgtgtcttcaacatactgatttcatctcctttgaatatagacccagaagtggaattgctggatcacatggtagttctacttttaattttttgaggatccatactgatttccataatggttgtactaatttacattcccaccgacagtgtgcaaaggttctttcttctccacatcctctccaacatgtggtatcttccatctttatgataaaagctgttcttacagatgtgaggcagtatctcattgtagctttaatttgcatttcccttatgattggtgatgttgagcatacctattggccatttctttttttttttttgagagggagtctcgctatgtcaccaggctggagtgcagtggcgtgatctcggctcactgcaacctctgcttactgcaacctctgcctcctggattcaagcaattctcctgcctcagtctcctgagtagctgggactacaggtgcacaccaccatgcccagctaatttttgtatttttagtagagacggggtttcaccatgttggccaggatggtctcaatctcttgaccttgtgatctgcctgcctcggcctcccaaagtgctgggattacaggtgtgagccaccgcgcccggcccctattggccatttctatgtcttcttttgagaaatgtcttcagatcctatgtgcactttttaattgggttgttttctggctattgagttgtttgcattcttttttttttttttttttttttttttttgagatggagtcttgctctgtcacccaggctggcgtgatctcagctca

SEQ ID NO: 28178 - DNA, 1030 bp, Homo sapiens
gcagccccatcctccccagcagtgcaaggaagaaacccaagagtccttgactttgaccctccccttacccccagagccaacccatcaccacattctgccaatttgaccgctaaacccctccaacccctgcactctctctgtctccatccccacacctggtcccagccacatcacctctgtcctggacttctgctatgccctcctaaccgactctcttgcttccgggatggtggcccgccactctctcctgcctggccgtcagagcgagcttttcaccctcgcaccgcatcatgtcactttcctgcttgagaccttcggaggtttccttcatttgccaggcagactccgtgcatggtcgccctgtgtggttcagccccagcttgcttctcctgccttgtctcctagccacatggcccacacacacagcgctgcatccctccctgtgctcagtccacagccttcgggcttgctgtgctctctctgcctgtgggggctgtgcacatgctgctccctcttccagagtgttttccctgctcctctttgctgaacctaagtgtcttcagatcccagagcaagatcacctccccatgggcacctgctgttccctgacctctgccatccagtcttatcctatcgatcctatctgcctaccacgttctacatcctggggcctgtcccatttgcagctgtttatttgttttggggttgtttgattaacatctctccctctgggctgtgagttccagaagagtgggctctgagtcccttttgctcctcacaatattcccagaggccacacgatgcctggcatgtaggtgctcaataaatatttgctcaataaacaaatgaaaagatcaagtgggccctgatcagagtctcagaaaatggataggtctgggataagcaaccggaataggtagaacattccaggtgggatacctggctggattaaaggcagggggatacctgcagcctagcacacatatgacgttatcatcaccaaatggccgtgccttacggcagggaggga

SEQ ID NO: 28179 - DNA, 1030 bp, Homo sapiens
ttctacttatgttactctcagttcttatattctggctgttcagcattggtgtaagttctgattccaacagtgtttcactagtgaaattgaactcccttttctaatcatagaagattcaaattgtgcctgatcagcctccagacacctgagccaagagaaagatttgcagtaaaataattagggtagaggtagcaaagacaaggtccagaagccaaatatgttattatggtggcctgaaatttcaaaaatttctcccagtgtaaaagtggtgattggatatggatagagggaagagtacctctcattttaaagtaagccacaatacaatcacttgtcacttgacggggatacattctgagaaatatgccattaggcaatttcatcacatacttacacaaacctagtggtgtagcctactacatacctaggctgtatggcatagcttattgcttctaggctacaaacctatacggcatgttactgtactgaatactgtagcacttgtaacacaatggtatctgtatctaaacatagaaaagatacagtaaaaatacagcataaaagctttaaaaatggtgcacctgtataggacacttaccaggaatggagcttacaggactggaggttgctctgggtgagtcagtgagtgagtggtaagtgaatatgaaggcctaggttattactgtacactgctgtagattttataaacaactgtacacttaggctacactaaatgtttaaacatatttctttcttcaataataaatagcttactataacttttttactttataagctttcttattttttaaaacttttttgttgttattgttttgttttgtttttgttttttgagatggagtctcactctgtcacccagtctggagtgcagtggcgcgatctcagctcactgcaacctccacctcccaggttcaagcaatgagacagagtctcactctatccccaggctggagtgcagtggcgtgatctcagctcactgcaacctctgcctcccaggttcaagcaatcc

SEQ ID NO: 28180 - DNA, 1058 bp, Homo sapiens
ctttgttgaatacatgtattttaaatatattctcccactctgtggcttaacttttcactcttaacactgtcttttgatgaacaaaagtttttaatcttttttattttttgagacagagtttcactcttgttgcctggggtggagtgcaatggagtgatctcagctcaccacaaactctgcctcccaggttcaagtgattctcctgcctcagcctcctgagtagctaggattacaggcgtgcgccatcatgctcggctaattttgtgtttttagtagagatggagtttttccatgttggtcaggatggtctcaaactcccgacctcaggtgatccacctcccttggcctcccaaagtgctgggattacaggcatgagctgctgcgcctggccgaaagtttttaatattaatgtgttttaatttacttattttttctctatgattatcacattttttgtgttggttaaatagacctttggctacttcagtttcatgaaaatattttcccatgctctatcacaaaagttttactgttttattaagttaaaccatatgaaattactaatagtcaacataaaaaataggagtttcatatggtttaacccaatacatttaatctatgatctgtctggaattgattttcatctttggtgtgagtcaggggtcaagattttaaacaaatttaattgtctgattgtcaatttcttatgaattggatgactgtatatatgtgggtctgtttctcaactcaccattctgttctattgttttttttcattcttgtaccgataccttactgtcttggccactagagttttatgataggtcttttataaattttaatagctccgaagtgttcttcaagattgccttagctactcttagcccactatgtttccatttaattttagaatctcttgttttagaattattgctttatatatatttaagttgacatgtaataattgtacacatttatggggcacatagtgatgttttggtacatataaagtatagtgatcagaataacaagaattagcatatccatcatttcaaaca

SEQ ID NO: 28181 - DNA, 1072 bp, Homo sapiens
aaaatattaaatacataaatatatatttatatctaagatataattataatagatattaaatatacgtaagtacatatatatgcattcaattatggaataaagagtgtttgacctggccgggcgtggtggctcatgcctgtaatttcagcactttgggaggccgaggcaggtggatcacgaggtcaggagtttgaaaccagcccggccaacatggtgaaaccctgtctctactaaaaatacaaaaaattagccaggcatggtggctggcgcctgtaattccagctactcgggaggctgaagcgggagaatcacttgacctgggaggtggagtttgcggtgagccgagatcgcaccattgcactctaatcggggcgacaagagtgaaactccatctaaaaaaaaaaaagtgtttgactttaatgagttattacttcctggcttaaccccttttactttacagaaaagacataaaaaagtgaaattacttgtctaagttcacaataatggctgactgtgacaatgctgggcctagacttcagatctaatcattctaagtgtagtggactcggagatagctgagatagaggaggtggcgggggagaagtgctaactgctttattctctcatctgaaagctttaagtctgttaaaaatagaacttgcctagtcaaagtaatactctcagctattattattcaattataccttggtgtgaatgagtgtgacatccttttctgagaaataacccattaaagaaccacagaggagaaaagagtagaggctggagaaagtgcaggacttgaaagacaaggagtctaaccatacattttatctactcaaaatgtagagcagatgcaccagaaaatattaacagtggctatctctgggtgttaggataagagttgcttttgttttgttttagtttttttatattttccaagttttctgcctaatacacatattacttttatcattcattctttgttatctaacacagattttttttttttttttttttttttttgagacagagtcttcctcttgtcacccaggctggagtgcagtggcacaat

SEQ ID NO: 28182 - DNA, 1040 bp, Homo sapiens
cctgggtctctgccccaaccgaaggttctagaaagagatatgctgctctttgtcaccatcttttcctcactcaggaatgccagatttagcaagtaaacatacaggatgcccagctacatttggatttcagaacaacaagtactaagccgtgatgtgctgtttccccaaaagccaattttcactgagtgtcttgcacgttatctgacaatgctactcccacgccaccaggcttcctggtccagccacccacctcccctcacctgtggcgggtgggcaggggggcggtgatcaacagcctcctctgcctgcatctcaggatgttaagaggataatgagagaatagatgggtagctgctttccagaaaggtcattaattagccctgctggttagcatgtggttccagtgccccagctgtgctaaaggccttcctcttagcatccagttcaaaccaggagacatgaccaatgagactagagagagtttggtgtcatttcctcctggtgcccagagccccttctctgatgggtttcacataattttgtttcgaccctcttttagaatcaaaccaggctgggtgcagtgactcacccctataatcccagtactttgggaggccaagacaggaggattgctcgaggccagcagttcaagaccagcctgggcaacatagtgaaaccccatctctacaaaaaacttaaaaattatctgggtgtgatggtgcatgcctgtagtcccaactacttgggaggctgaagtgggagggctgcttgagcccaaaagttcaaggttatagtgagccatgattgtgccactgtactactccagcatgggtgacagaatgagacctgtctccaaaaagataacaataaattgaaataaaactccccagttcagcacctcttgcttttactagaggcaaatatagtgtttaatggaagatgtggggagaaagccacatcctttctaatcaagtgctcctactcccggggatattggattgctacctttgagtacagtgcttgctaagaagctggtaaca

SEQ ID NO: 28183 - DNA, 1054 bp, Homo sapiens
gccagaatgccttcatcttcagatcacttaatttggttctcatgggtaagtgctgctttttatcttagctcttatagaagcaagctgtgatgccatcctcactgagagcactggcaggaagtcgcaaactcatttccctgactagaggacccagtaccaccctgcctagtgtcaggagttaagtggaaagcaaataggaaacctacactagtagtttagattcaatgtagattcctgtcctgttgttaattttaggaaaacaaatgagtgacttaaggcaataataatcaggactatcctcgccataatttgaagagtaatttctcctaacacgctttcttcctccccaatctttgataaatgtcttttacctctaaagttgattaattagcaacatgcttattcatattctgtgaatatttctaggatggacaattgcctctgaggacattccctcagccagcccaagtacttaaacaaaaacaaggaaattctttgatgttaaagatctcgtgtgtgtccgggcgcggtggctcgcgcctgtaatccctgcactttgggaggccgaggcaggtggatcatgaggtcaggagatcgagaccatcctggctaacatggtgaaaccccgtctctactaaaaaatacaaaaaattaggcgggcgtggtggcgggcgcctgtagtcccagctacttgggaggctgaggcaggagaatggcatgaacctgggaggcggagcttgcagtgagccgagatcgagccgctgcactccagcctgacagagcaagactctgtctcaaaaaaaaaaaaaaaaaaaatctcgtgtgcgtgtgtgtgtgtgtgtgtgtgtgtgtgtgtgtgtgtgtgtgtgtgttttgaggcatagtttcactctgttgcccaggctggagtgcagggtgtgagctcagctcactgcagcctccacctcctgggttcaagcgattctcctgccttagcctcccaagtagacgggattacaggcacccgccaccatgcccggctaatttttgtatttttagtagagacaaggtttca

SEQ ID NO: 28184 - DNA, 1081 bp, Homo sapiens
cagctaattttttgtatttttagtagagacagggttttgccgtgttggccaggctgatctcgaatcctgaccttgtgtgatccacccacctcggcctcccaaagtgctgggattacagacgtgagccacgacgcccggccccagatatatttttaagtggaaaaagcagggcagaacagggaccgtacatattgttgttagtgtcagctcccaaatggatcttattttatctcagatcacagtccttgcaccatgtgctgctggcaccaatgtagagtaaaaaccatctatgtgggcatttttttggcacaagaaaaatctcaatctgataccaataaatgtgtgttaaagaatgtcagacttagagtaatcattgcaagttgagcccagataaaactattgcctctctaatgtgttttcttccttctagtgtatatcagcctcgtgtttggtatttcatatgattcgcctggtaagagatgttttttggcttcactaaattttgtataagagtgaaagtgttggggcaaccattcagaggtataaaatgtgggagatttgatttctgattgtacatctgttgcctgttttattgggattctttctctgtaaaaggagctaaaatgagctaactctggttttttgagagatacaaaactagtctaagaaatgaacactagagatcatttttaaacttctttaaagaatattcaaactcttaataatctcactaataaaagaatgaggagacacagactgtgccaaataaaaaatggcccagaaatatttactctttaatttacattcttccaccctgatgattccagacaaaggacaataatttttttttaactaaacttcttcctacgtatataaatctgtccacaaaacttcactaagtattaaatatgtgtccaaccttgtgctaagtgttggttgggggtgaagagttggcagttgagaaacaaaggcctgagtcctaaccacaggaaacttcagtgatctttaaaaatttaaccgtataaggcagaatttggcaagtctggctttaatgtctcatttatcactgccacttcccacc

SEQ ID NO: 28185 - DNA, 1022 bp, Homo sapiens
tgaatgaagcaggtgagggttagatagggttagagggtttgggacatgttaaattccaggtgtccgtaaggaatctaggaggagacgtggggaaggagctggatgtgccagtctgttgtccaggagagaacccgcagctagagagagagcctgggagtcactggcttcttggtgcatgttgaatgccctaagaccagatgaggtcacctgggaatagacactcagagagaaaacaagacatccagtgacagagcccaggaacattccaaaatttggagatctggcaaatgaggaagaaacagcaaaatcgactgagaaagagcaaccagcatggtagggagagaagcaggtgagagtgatgtcccggtagctgagagaagaactttccagaaggtgaaagtggtctactgagtccagtgctgtaaatgggacaattgaagaggactgactattggatttagcaacattgtgtccttgataaaagtagttttaatagagttaggggcaaagagctggttggagtagattcaagaaagagtgggaggagaaaaattggagacagtgaagagagctcattcttccaaggaatttttccaaacagggaaggagattgtgtgctggccactggaggggaagcttttagtttgttgggtcgtaagtttgtttgtttactaactcctcctcccaaacagaaatttacagaaaaacatcattactgaaggctgtatttgagctgctaggaatcctcatttattaaactgctagtaagaatgtattttaaaaactgtaaaacatgatacaaaagttattattcatgaaagagccttcatatcatcttttaaattctgaagtgaaatgcaactacaggaaagaagaggcaaggtgtttaaagggagatggctgggcacagtggcttacgcctgtaatcccagcactttggaaggccaaggcaggcagatcgcttgcggtcaggagttcaagaccagcgtggccaacatggtgaaaccccatctctactaaaa

SEQ ID NO: 28186 - DNA, 1044 bp, Homo sapiens
gatgaaggctgaacacctttctgttacacagacatcagaacaataaacagtgtgatcccaaaccttcttcccctttggagtgagaacaatcaagcctcggaactccctgctgattgttttctcaggaagtagccaagtttccacctgttttaccaaaagtgagaagctatgcaagtctccctcaaagaagcccttctaaatgtcccaaccgcagtgttaggggaaagaggtcccaatccataccccaagagagggttcttggatcttgcgcaagaaagaattcagagcgagtccgtaaagtgaaagcaagtttattaggaaagtaaaggagtaaagaatgactactctatagacagagcagccccgagggctgctggttgcccatttttatgattatttcttgatgatatgctaaacaaggggtggattattcatgcctcccctttttagaccatgtagggtaacttcctcacattgccatggcatttgtaaactcatggtgctggtgagagtgtggcagtgaggacgaccatcttggttttggtgggttttggccggctttactgccatctgttttatcagcaaggtctttaccaacggtatcttgtgccaaccccctatctcatcctgtaagttacaatgcctagactgtctgggaatgcagcccagtaggtcccagccccattttacccagctcaagatggagttgctctggctcaaatgcctctgacaccaatggaagtatctttaatgttctgatttaccagaataaaaataaggtaggatctataaagaaattactttagttgtaaaccaaaataaaattctaagccccccaaccaactgaatggatccctcctctcagccaagggccgagtaaagtaaagtaaacctgaaacactagttcaggccatgatgggagtgagtggtccagacgtgcctcacgggaccttcctacctttggaattcaggcacagctggccagcactaatattaaaacagaaaccttaagactgacaaaaagatgctttgtagcactaatac

SEQ ID NO: 28187 - DNA, 1019 bp, Homo sapiens
gtgaatgcgtcatgttgcacatcaagtcagccctcattctttgattattacccgagataggtcaagtaccgctctctttaattatccaaatactgtacctgatgtcaaattcttgtttgaaactcaggaagcaaataggttcagataacgtggcctctgtcactatctgcttgccatctgacgtgccctcaaccagccaaactcagaaaccagacaggtttggatggtgaggggtcttggaaggatagcctgagaccagcattaacataggctcagcagtaagcactgtgacccaatcctagggcagactgatatggggggattttagcccagacatctggagaaacaccttccccttgtcaagccttaaaactaatggtttgtctcttttattaatattaaggccctaaggaaaagctctattcattcatttgacaaatgtttattgggggcctgttatgagccagattcttttctggatattgaggatttagcagtgaacaaaacagattaaaaacttctcaccttgtggagcttacattgcagtaggagacagaataacaagatcaacatgtaaaatagacagtatgttaagtaagtaccatggaaaaaaattatgcgggaaaggaggtgagggggatgtcaggttgaggagagcaggttgctgtttttaataggatagtgtcttgatttgcatttgctagaagcagagcctgggatgtgaattcatattcaagtgtgatttattggtgggggcatcttaggagaaggggaaagagggaacaggtaggtacagggagagagaaattaagcaggcatgtggctctcagctgagcctgatcccaaggggttctcggaagcgtgaactgtatcctcaagtcagcagccagtcagttactggtggtgatctatggcatggcctccagatgaggcagcccccttttgggcaagggcagttccttatgtgtccggagttggttcctgccaatgggttcgtggtctcgctgacttcaagaatg

SEQ ID NO: 28188 - DNA, 1029 bp, Homo sapiens
tctctctctctttttttttttttttaagaattttcataactttttagcctggccatttcctaacctgccaccgttggaagccatggatatggtggaggtcatttacatcaacagaaagaagaaagtgtgggattataattatgatgatgaaagtgatagcgatactgaggcagcgcccaggacaagtggcggtggctataccatgcatggactgactgtcaggcctctgggtcaggcctctgccacctctacagaatcccagttgatagacccggagtccgaggaggagcctgacctgcctgaggttgatgtggagctccccacgatgccaaaggacagccctcagcagttggaactcttgagtgggccctgtgagaggagaaagagtccactccaggacccttttcccgaagaggactacagctccacggaggggtctgggggcagaattaccttcaatgtggacttaaactctgtgtttttgagagttcttgatgacgaggacagtgacgacttagaagcccctctgatgctatcgtctcatctggaagagatggttgacccagaggatcctgataatgtgcaatcaaaccatttgctggccagcggggaagggacacagccaacctttcccagcccctcttcagagggcctgtggtccgaagatgctccatctgatcaaagtgacacttctgagtcagatgttgaccttggggatggttatataatgagatgactccaaaactattgaatgaacttggacagacaagcacctacagggttctttgtctctgcatcctaacttgctgccttatcgtctgcaagtgttctccaagggaaggaggaggaaactgtggtgttcctttcttccaggtgacatcacctatgcacattcccagtatggggaccatagtatcattcagtgcattgtttacatattcaaagtggtgcactttgaaggaagcacatgtgcacctttcctttacactaatgcacttaggatgtttctgcatcatgtctaccagggag

SEQ ID NO: 28189 - DNA, 1060 bp, Homo sapiens
cagaattcttgcttgttattcttttgatgtatgtcagcaataattccagaaaccaaactttggagaagataggaaaagggtgaaactcttcaaaaacctctgggtcctccaaccagttgctgtttctgagacgtcccccaagataaacgtacaggctctgttttcagggattgtgatggttaaaatgctcttgggatcactgtgacccgacctgtgacaagaatgtaacatgcccattacccctggcagaaacggtcccctcctggatggtggccgtcatcctcatggcctcggtcttcatggtctgcctggcactcctcggctgcttcgccttgctgtggtgcgtttacaagaagacaaagtacgccttctcccctaggaattctcttccacagcacctgaaagaggtaggtaggatggagtgagatgtggatttgaaaaccttgatcggaaagagctttcctttctagttagggctgcccaattccagacaacatgttttccaggaaaacacacacgcgcgcgcgcacacacacacacacacacacacagacacgcctcttgtgtgctggtccattctcttgtaaccatgtcaggtgaaggaacagccccgaggaaaggggcgcggggttgtccagtatccctctctgcacctagggcatcgctccttctccagccttcactgcccaaagccccaggtccctgaggagcaaaggtgatggttctagggcaggaggggaaaaacagagctcagtgtggaagaaagagaaaactggaggctaaatgccaggaaatcaccagagggagagaatgggaggaaagaaaggaacatttccagttttggaatatacgagagcgattgaaattctgggtagtgtttcctggactttaggaaggctatttgtaaaagggttaggaagaagaaacaatgcacctgactaatgataacaggactgaagaagccctaagaaatgaaactctggatagtcactgacactagagaatgaaaagattccaagcccggacccaaaggaactatctttggtctcatttcccagga

SEQ ID NO: 28190 - DNA, 1026 bp, Homo sapiens
tttggacgtaacaccattgtaagtcaagaagcatctctatctatctatgaacatacaatgtgaaatcaaattgaggccataaaacagttgaacctcatcataagagtgactcatcggtgtcacttctaagaccaagaaaaattctatttttatgcagagaccatttgttttttaattaaaagacaactctatttcaaagaggaaaaaaaatcaactcttttttcagctctctcagatgcagaaatgtaattatcagcatccctgtgctgggagcaatcattagtttttttagatttttaaaatatacttcattatgtttcactgtattcattctttaatcagggatgtgagggatagaataacatttagaatatctgtacagtttgtatataatgttcttatttcttgttgcttttataggtggaaaaaatctaaaatctcctcaaaaagtagaggtcgacatcatagatgacaactttatcctgaggtggaacaggagcgatgagtctgtcgggaatgtgactttttcattcgattatcaaaagtatgtgactctacttactgatttgtcagaatgacctgaataatttttacaagtttaacaacaccataatttttagatttggaaagtgtttggtttttctattttttagaaatgttacgcctattttacataatatttttaactttgtttctgtagagacttagtcaaatacatctttgggtgttgaagcaaaaaattggggatgagggtggtagacagcgtctctaacccatagccattccttctttcttctgggtgttccagcttcttttttttttttttttaattattatactttaagttttagggtacatgtgcacaatgtgcaggttagttacgtatgtatacatgtgccatgctggtgcgctgcacccactaactcgtcatctagcattaggtatatctcccaatgctatccctcccccctccccccatcccacaacaggccccagagtgtgatgttccccttcctgtgtccatgt

SEQ ID NO: 28191 - DNA, 1041 bp, Homo sapiens
aaaaattagccgggtgtggtggcgcgcgcctgttgtcttagctactcaggaggctgaggcaggagaatcgcttgaaaacaggaggtggaggttgcagtgagccgagatcacgccactgcactccagcctggtgacagcgtgagactctttaaaaaaagaaattaaaagagttgagacaaacgtttcctacattcttttccatgtgtaaaatcatgaaaaagcctgtcaccggacttgcattggatgagatgagtcagaccaaaacagtggccacccgtcttcctcctgtgagcctaagtgcagccgtgctagctgcgcaccgtggctaaggatgacgtctgtgttcctgtccatcactgatgctgctggctactgcatgtgccacacctgtctgttcgccattcctaacattctgtttcattcttcctcgggagatatttcaaacatttggtcttttcttttaacactgagggtaggcccttaggaaatttatttaggaaagtctgaacacgttatcacttggttttctggaaagtagcttaccctagaaaacagctgcaaatgccagaaagatgatccctaaaaatgttgagggacttctgttcattcatcccgagaacattggcttccacatcacagtatctacccttacatggtttaggattaaagccaggcaatcttttactatgcattaagacctctgattcaaaacttattagaacagtagcttctgctggaatttgcaatcactgaagtcatagaaaataggtaactatctaattagagaaataattgttgtattttaagatctgagagtgtgtacaagttttagtatacatgccatgccagaagatagtgtatgcaagaagtcttgggaccagaaaatggcaatgataggagactgacatagaagaagaatgcttccctaggaaaaaggtcgctggctttggtgcaagaggaagaagaatgttccactggaagcctgagcacctaatcagctctcagtgatcaacccactcttgttatgggtggtctctgtca

SEQ ID NO: 28192 - DNA, 1029 bp, Homo sapiens
ttgtaactaaaaattagaacagctccctagaattgtgaacttttaagagtctgactagaaatttgcaacttataaaaaagttacttttaaaaatataagttagggctaggcacagtggctcatgcctataatctcagcacttttgggaggccaagacaggaggatcacttcaggccaggagttcaagatcaaccaacctgggtaacatggccagaccccatctctatttatatatatatatataaaacttagagtttttatcttcccctaaaagaggccgtgatatttgcagcagcctcaaattgctcttaaggggtttaggtgtgcagaagctttcctttccctacccagtaaccatgtgactactaacgtggtatattgatttattttgtttgctgtctgtctcccctgccccactgctggaacagaggctccaagaaaacagggaccttattattcattactgcatccccagtaatgaaagtacttagaaaataattattgaatgaatgaaatctaaactgtgaacctgagggtgtttgtggcagtgtttgttttactgaattgtagaaggacataaccgtgttttcagtgtttctatggaacaaacttgtacattttatttcacttgtgttttgtcttaaaccctactgctggaaacaattttatgtaataagcaatgggcccaaaagtctaggagtttttttgtacttagtgaatttgtatgcaacagagatgctgcagctgatgcctttaaaaggtattcatcatggaagagctgaggcctgtgcttggtgttccagagcccagggttgagcatcctgaaggagccactgcagccgtcactgtccccagagcctgtggagatagagcctgtttgctgctttttcttcccgctcttaagacatggctggagctcagtcttcattgaatgaagtttgctgtggtattgcatagccttgctttcttgaactaaactgtttgcccttcacaagtagttcttctttcaggattagttcgttccaagga

SEQ ID NO: 28193 - DNA, 1035 bp, Homo sapiens
ttacatagcacaggaagaggctggccatcccaccctcatctgttattatgcaaatggcacctctacctagcccaggccttgttgcctgcttttttactgcacacgtggcaacaaagaaaagggaaaagggaacttcaatattgaatatacctgacttccaagtatccctttcctattggcacagctgctggcattcgcctatgcaagcttccagtttgcttatctatgtttgcagcttgagttttcaggctctttttgttagaaaagaaatgatttggggcttctttttattaaaaggcaaaccttactgaggactcttttatcctcactaactgcctaaataaattttgtttaggtgttgtatcaggatctgatgctatctccaggtagacagtgtcagaattaaataggaggatacccaaccagtgtctgctgcagaattgattgccttcttgttaatggggagaaatcactacgcatttggtcacagaagtcttctgtgtttattgttgtggcatgagagcagaggaaaaacggtttgagatttttcccctcaaaaacataggggaaatcttcatgatattggacttggcaatgatttattggctatgacaccaaaagcacagacaacaaaaacaaaagtagacaaatgggactacatcaaacttaaaaacttctgcatataaaaggaaataatcaatggaaaagacaacctttggaattggaaaaattatttgcaaaatatttgctttgatagattagcagataaaatgtggtgttcacatgccacggaatattattcagcctttaaaaagaaggaaattctgaggccgggcgtggtggctcacgcctgtaatcccaggactttgggaggccgaggcgggcagatcacgaggtcaggagatcgagaccatcctggctaacacggtgaaaccccgtctctactaaaaatacaaaaaattagccgggcgtggtggagggtgcctgtagtcccagctactcgggaggctgaggcaggagaatggcgtgaacccg

SEQ ID NO: 28194 - DNA, 1063 bp, Homo sapiens
cagaagggcaggtctgagccctgtgttttcagccgtgcagtggccagctgtggctggtgtccacactcccatgtgctaatggagatgcccaaagaatgtgtccaaagccagtccctgcaggtgcttctgcaacgcacttctgcacactctgctcacttagctgggacaagggaagctggagaacgtgtgtgctggtgtccctgggcaggctgagtggaagagcattttgtcactagcagtcaatccacaaacatcactatggctggtggtgggccaggcctgacctcacttctgccactgggagttgtctggacttagcacctccaccagaacaaatgagggggcacaactacaaactcagcagttcttttgcacagagagaagcttggccagatcatacacctaaccctcaccaacctggagtgcccaggggagagaatccagccctgctgttgtgaacacacagtgacaggattgtctccttgtgtaaaatgtgcagacattggtctcttagaacttcgaggacccaaactgtactttgatctgagtttctctggtgaattatacaatgtgcatgcttacttaataaatgcttgataacccctcattgatagcacatcatgagtcacagtcctagcctgacctgtgaattatatgaaaagcctgaacaaatagacttacatggcaacacttctcagttattgtgtttaaatatagtatgggcatggtgctcacgcctgtaatcccagcactttgggaggccaaggcaggcggatcacctgaggtcaggagtttgaaaccagcctggccaacatagtgaaaccctgtctctactaaaaatacaaaaattagccgggtatggtggcgtgtgcctgtaatcccagctacatgagaggctgaggcaggagaatcgcttgaacctggaaggcggaggttgcagtgagttgagattgcaccactgcactccagcctgggtgatatgtgcgagattccatctcaaaaatgaataaataaataaataggccaggcgcggtggctcacacctgtaatctcagcactttgg

SEQ ID NO: 28195 - DNA, 1037 bp, Homo sapiens
tagcgtatgccaaaattccgactcccagaaggaaaacagatgttcctcataaagaaaacacattgtgcaaacagtgtagggacggtaagccaccttaccagtttgggaatgggagggataaacttgaaatccaaattcccaggctgggcgcggtggcttacgcctgtaatcccagcactttgggaggccgaggcaggcagatcacttgaggtcaggggttcgagacaggcctggctagcatggtgaaaacccatctctactaaaaatacaaaaattagccaggcgtggtggtgggcacctgtgatcccagttactcaggaggctgaggcaggagaattgcttgaacctgggaggcagaggttgcagtgagtcgagatcacactactgcactccagcctgggcaacggagcaagactccgtctcaaaaaacaaacaaacaaaaaacgcacacaaattcccagatgtcagctaagggttgacctggaaatcaggcccttcaaagggcattagtgttaggcctgttacgttagctcttctgcagtctgtgactctaaattttaggaattccaattgaatgctgaaataaacccaaagggaatttttgtccttaaaatcgtgtcttcctctgccctggcagtccaacaccattaaacagaagaaaagaaaatgtaaaaccatcaagtaatactattattcatagatcatacaattacttttatatttttattttttaattttaatttttcagagacaatttcactctgtcacccaggctggagtgcagtggtgcagtcatagctcactgtagcctccaattcacaggctcaagccatcctcccactttggccttccgagtagctgggacttataggcatgcaccaccatgaccagcttatttttttattattattttctgtagagacggagggagggggtctcactatgttacccaagctcaaactcctggactcaagtgatcctcccacctcagcctcccaaagtgctggaattacaggcatgagccaccatgcctggcc

SEQ ID NO: 28196 - DNA, 1961 bp, Homo sapiens
ctggagcttcctacaagagcatttggcccatctgagaccaatgaatcccctgcagttgtgctagaacctcctgtagtatcaatggaggtatcagagccacacatcttagaaactctgaagccagctacaaaaactgcagaactgtcagttgtatctacatcagtaatctcagagcagtcagagcagtctgtggcagtaatgccagaaccatccatgacaaagattctggattcctttgcagcagcaccagtgcctactacaacactggtgttgaagtcatctgagccagttgtaacaatgtcagtggagtatcagatgaagtctgtgctgaaatctgtggagagcacatctccagagccatcaaagatcatgttggtagagcccccagtagcaaaagtgttagagccttcagaaacccttgtggtatcatcagagacacctactgaggtgtaccctgagccaagcacatcaacaacaatggattttccagagtcatctgcaattgaagcgctaagattgccagagcagcctgtagacgtaccatcggagattgcagattcatccatgacaagaccgcaggagttgccggagctgcctaagaccacagcgttggagctgcaggagtcgtcggtggcctcagcgatggagttgccggggccacctgcgacctccatgccggagttgcaggggccccctgtgactccagtgctggagttacctgggccctctgctaccccggtgccagagttgccagggcccctttctaccccagtgcctgagttgccagggccccctgcgacagcagtgcctgagttgccagggccctctgtgacaccagtgccacagttgtcgcaggaattgccagggcttccagcaccatccatggggttggagccaccacaggaggtaccagagccacctgtgatggcacaggagttgccagggctgcctttggtgacagcagcagtagagttgccagagcagcctgcggtaacagtagcaatggagttgaccgaacaacctgtgacgacgacagagttggagcagcctgtggggatgacaacggtggaacatcctgggcatcctgaggtgacaacggcaacagggttgctggggcagcctgaggcaacgatggtgctggagttgccaggacagccagtggcaacgacagcgctggagttgccggggcagccttcggtgactggggtgccagagttgccagggctgccttcggcaactagggcactggagttgtcggggcagcctgtggcaactggggcactagagttgcctgggccgctcatggcagctggggcactggagttctcggggcagtctggggcagctggagcactggagcttttggggcagcctctggcaacaggggtgctggagttgccagggcagcctggggcgccagagttgcctgggcagcctgtggcaactgtggcgctggagatctctgttcagtctgtggtgacaacatcggagctgtcaacgatgaccgtgtcgcagtccctggaggtgccctcgacgacagcgctggaatcctataatacggtagcacaggagctgcctactacattagtgggggagacttctgtaacagtaggagtggatcccttgatggccccagaatcccatatattagcttctaacaccatggagacccatatattagcatccaacaccatggactcccaaatgctagcgtccaacaccatggactcccagatgctagcatccaacaccatggactcccagatgttagcgtctagcaccatggactcccagatgttagcaactagctccatggactcccagatgttagcaactagctccatggactcccagatgttagcaactagcactatggactcccagatgttagcaaccagttccatggactcccagatgttagcaaccagctccatggactcccagatgttagcaaccagctc

SEQ ID NO: 28197 - DNA, 1467 bp, Homo sapiens
gatgttagcaaccagcaccatggattctcagatgttagcaaccagcaccatggactcccagatgttagcaactagctcaatggattcccagatgttagcatctggcactatggactctcaaatgttagcttctggcaccatggatgctcagatgttagcgtctggtaccatggatgcccagatgttagcgtctagtacccaagattctgctatgttgggttcaaaatctcctgatccctataggttagctcaggatccttacaggttagctcaggatccctataggttgggccatgacccctatagattaggtcatgatgcttacaggttaggacaagacccttatagattaggccatgatccctacagactaactcctgatccctataggatgtcacctagaccctacaggatagcacccaggtcctatagaatagcacccaggccatataggttagcacctagacccctgatgttagcatctagacgttctatgatgatgtcctatgctgcagaacgttccatgatgtcatcttacgaacgctctatgatgtcttatgagcggtctatgatgtcccctatggctgaacgctctatgatgtcagcctacgagcgctctatgatgtcagcctacgagcgctctatgatgtcccctatggctgagcgctctatgatgtcagcttatgaacgctccatgatgtcagcttatgaacgctccatgatgtccccaatggctgatcgatctatgatgtccatgggtgctgaccggtctatgatgtcgtcatactctgctgctgaccggtctatgatgtcatcgtactctgcagctgaccgatctatgatgtcatcttatactgctgatcgttcaatgatgtctatggctgctgattcttacaccgattcttacactgacacatatacagaggcatatatggtgccacctttgcctcctgaagagcccccaacaatgccaccgttgccacctgaggagccaccaatgacaccaccattgcctcctgaggaaccaccagagggtccagcattgcccactgagcagtcagcattaacagctgaaaatacttggcctacagaggtgccatcatcaccatctgaagagtctgtatcgcagcctgagcctcctgtgagtcaaagtgagatttcggagccttcagcagtgcctactgattattcagtgtcagcatcagatccctcagttttagtatcagaggctgctgtgactgttccagaaccaccaccagagccagaatcttcaattacgttaacacctgtagagtctgcagtagtagcagaagaacatgaagttgttccagagagaccagtgacttgtatggtatctgaaactcccgccatgtcagctgaaccaactgtgttagcatcagagcctcctgttatgtcagagacagcagaaacatttgattccatgagagcctcaggacatgttgcctc

SEQ ID NO: 28198 - DNA, 1029 bp, Homo sapiens
ctaaacagcgcacagtattggatacctaccctggtgttagtgaagctgatgcaggagaaactctatcttctactggtccttttgctctggaacctgatgcaacaggaactagtaagggtattgaatttaccacagcatctactctcagtttagttaataaatatgatgttgatttatctttaactactcaagatactgaacatgacatggtaatttccaccagtcctagtggtggtagtgaagctgacattgaagggcctttgcctgctaaagatattcatcttgatttaccatctaataataaccttgttagtaaggatacagaagaaccattacctgtaaaagagagtgaccagacattagcagctctgctcagccctaaagaaagtagtggaggagaaaaagaagtacctccccctcctaaagagacactgcctgattcaggattttctgccaatattgaggatattaatgaagcagatttagtgagaccgttacttcctaaggacatggaacgtcttacaagccttagagctggcattgaaggacctttacttgcaagtgatgttggacgtgacagatctgctgccagcccggttgtaagtagtatgccagaaagagcttcagagtcttcttcagaggaaaaagatgattatgaaatttttgtaaaagttaaggacactcacgaaaaaagcaagaaaaataagaaccgtgataagggggagaaagagaagaaaagagactcttcattaagatctcgaagtaagcgttccaaatcttctgaacacaaatcacgcaagcgtaccagtgaatctcgttctagggcaagaaagagatcatctaagtccaagtctcatcgctctcagacacgttcacggtcacgttcaagacgcaggaggagaagcagcagatcaagatcaaagtctagaggaagaagatctgtatcaaaagagaagcgcaaaagatctccaaagcacagatccaagtctagggaaagaaaaagaaaaagatcaagctccagggataacc

SEQ ID NO: 28199 - DNA, 1035 bp, Homo sapiens
tgcttcaaggctctatagctctagattttggtggtagcaaatttatcgggtggagggattgatcggagagggcagatcctcaggttcaacacaagaactggattggaaaaggtcattgtaggttgatgtgagcatcttgggtacatagcccattgcccttaatgatggtttcttactgtttctctgggttgtttgtcagatagcctttaattttaattatttttccttccctttgctaccttggcccttttaaattcttgtgtttaacctaatgctcagccttggtactccattcccttctccttcccctctttgctactattaaaagtcggagaagtggaattcaaacgttgaaatttccacggggctatagttgtatcttaataatgccaagtgtcaaaacaaccccattaaaatgccgcctgattaaataatgtgctgctaaatatagtgcacatgaaaacagcaagactgtatatatatgtaaatatatatatatatctgtatctttgtatgtatctctgtatctgtacctttgctgtatcttttaataaacagtttacttttatttaacttgttgtgcaaaatcacgcttgggggatgtgggagggtggagtcttaataggggggtgggagttttaattactatagattagttgtcatcgcctcttgcccttggtttccaaagcccagacttttgccaaggactggactaggtatctgatgcccatctggacatttttcttgcagttcttggatatgtagatcagagacacctgtactcttcactgtaggttcccttccttggcttggccatatcatcatcttccagtaaacacctccaattctacaaataaatcctgtttataaaatcagaaagtgaacagaacccaaatcagaaactttttgatagcagtacttttctccccaagctattcacagctgacattttcactttttttttgtttgtttgacctgcagcattttgagagaacaagttctgtacaatgaagctggacatgataactagccagt

SEQ ID NO: 28200 - DNA, 1171 bp, Homo sapiens
atttattatttatacaattagtgttatatataccaatgttgtgaaatacttttggtaacacttcgtgggagcattaacccttttgattccttgttagagtttgaaataaaggcttctagagtaaaaggagatagttcttttaaatggtcaacctttgaactgaatagtaatttttatctatgcctttttcattttaataaatataaatggagtttgtggttctttgttgttgagcataaaacatttaggcaaagatcacagattttatctccataagagggctgaattagctttgctgtaatccctaatcccaccaattgtcttgcatatgaatgctctttgacatgagtatgaatggatagacattgtggatgaagcagcataaattcatttcttatggaaaaacaactcatcagactgtgtgcggtactgccatagcatcgtcttcatactcagaaaccagccagcatcatcctcagtaaggagtgactacagaactttgactgtatttgtgtgaatttgatttataaacaatgaaataaaatgttggaaaactaatattttaaaaatagtcctcaggggcattaattcttggtaataaagttagtagaggtttattgagtagaagattaggatgtaatctttgacataagtggagtagtaactactcaactattagtgtggagttttcatggatttagtatcaatcaaatgttttaggggtccagaggtagtattgttaaggtctagtgaatgcttagatgttaagatcatctttatgttaagcagtttactggtttgtatttatcaaatcatatttccacatcccaatggaattacaatttttttaaatttataagctctaaatgtataggaaaacttggagaaaaatgaaaattttaattggaaattaaacacataggtcccggcactgctagaatgtgtaatatacagccttgttattctttccttcctagattctcttatgtggttaacgctgaatttctctgaaccatttagtaggttatctatttgttttcccgttgtacttcatttagtctattatacactagagaattttgtatgatacaataaaaagattcgtaattcactttttaaagccaaccaaacacataactgggacattctgtggcttttatttttgtagttg

SEQ ID NO: 28201 - DNA, 1044 bp, Homo sapiens
tcttgtatgcattaacctctttatattttaatatttgctaaatattctaaaatcatgttttatatacaggccagatgcttttaccttaggtctattttcttataattaaagttttccttttatgcctgcttttgagatatctgtgattaccaataatagaaaataattttctggttataggtattttccttatctgactcaccccatcctaacaattatctttagctcttttatatcctttcactgatattctaagaagtctcttaaaatattgttctttttatgtcaacagttgtgttaacaaaaggagtaaatggatttagaagaatttcctaaatgagaaataaaaatgtaaaaggctcacttaaatgtattaatataggtcatgaaatgcatgttatatggtgccagttgcattatggtaatttcattatgcctcagacacctttgtaggttttataagaagtagttgtctgctttcttgctgagggagagagagtgaagaatttgggcagtttttatttacctgagatttgtaattcaggacactttttatgtaaatttcaccttttagagcaaaggtgaaaagtcagtaaacatttcccccattatcatacctagaatattactacagaattatttttatacactaggtaacatgctagtcttatagtgtattggtagaaactaaggcttgttggtgacagcttggtaatagtattctacagattaaagattctctttttcccagtttttggaggggccttttaccatcattttggtgcctttcttatatttccagtttctgaatattaaacgacagttaagattctaaagctctattgtccaatacagcagttaccagcccctgaaaaatcaggtttttaatcacactagttacatttcaagtgctcagtagtgatcactgtaagaagttgtactgggcaatgctgctctaaagggtagctgtggtattatgagtgtttcaatactgataagtaacatcgggtttgacccttaaacattgctgctttggggattgta

SEQ ID NO: 28202 - DNA, 1847 bp, Homo sapiens
ttttttagtagctgtgcttttagatacatttcaaaatcttattaatgggattcactaaatgttgtcaaactgcttctttagaaagtttaggcaaacatttaatgttaaatatgttttaaaagttaaatatttaagtctgcttttcagccatttttagtgaattattaccagtgatgttttaatcaggtaattttacttagttaactgagactacttcttttcttcagattgatgcctgggctcagctgaactctattcctggccagttcacaggaagtacaggagtacaggttttgacacaagaacagttggccaatactggtgcccaagcctggattaaaaaggtacacagtatatgcacatatgaaagtgtcgaacaaaaagtttaaattttttggaaactgtttattaaaactgcatgaaaagaccagtgactctaaccaaagttccaagtaaatttgctatgtgtatatgctccagggcggacactgaagacggactggattcatgagaaaatggcaaatgtataaatgtggctcaagagccactaacttataaggttattttaaaaattgttactgctgcttttgaaggggtgatttaactttattttgaacgctaatagtgtatcaggtgctgttcagaatattccacagttcctgctggactactaacctaatcatttcaaagcagtggttctcaaatttttcttcatcatgggatactttattacaggtttatttttagtggatcactgcccccaagagccctctaccaccttaattttccattcctctattcctttgccctcgcaccccacccgcttcattagtgcctgtgccttcttgtaagatctcttggcccccgttcctcactcctcttgtgacctgtagccccaggaccttttggttgtcagctgctggttacagcaagtggttgggaggccctagtattagctctgcatgtggtgatcttgccatgggactggaagcctgagggaggatggctggagtggggtgggctgtggtgaaggggatgggatggagattaatctgtggaccaccatttaggccctagtggcctctggtgatccacaggctcaatttgagaaccactaatttcatgacaaaacagatatgtaagacctaaaatcaagggagagaatggacgcctcgtgctacgaagatgtaggtgcatctggtttcagattctgcagtgagacctgtgaactccacctacggctgcctcatcattgggggagtcttaggtggctaagaagggcattctgaagaaacgcgttgtggtgaagggacaaagcttggttggatgggtgatgggaaatttgttacaggagtactggcagcatagcagtgctgaaactgggaggccgcgtggtctaatggattgggaaggtttctttatcctgttgtactcctgactccttgtgtaatcatgggcaagtaactctttggaatttcaaagtctctgaggtgtctagtggtaatcagtaacgtgatggttacctatagagagttgctatgagtgccagtgaatgagctgaatttctgaaaaatgagacattggttgctttgtgtattttaatcttgtaacatttatttcaattttgatagctttatctttgttgatcttactaacaaattaatatgaaacatcatgtatactcattatgcctgcctttttttgggaagtagttgcactgatgtgtatagtgagtacacagttagattcattaagaaattacaatttctgcagtttgctgagggttggtgttagaataaagggtgaaaatgtatatagcaaaatattttaaagattggattaatctt

SEQ ID NO: 28203 - DNA, 1030 bp, Homo sapiens
aaataaagcttatgggtgttaaaataggcacataatacagagtcatgtacactgctaggtagaaacttctgaatgtgcttccattacaaaattttggtctttatctaatgatgtgctgatccataatgtttgtatacttataaatgtgttaataacttaaataacttttaaaaagtgaatcttttactgactcaattggttttcccctaaaataatttcttctggtatttgcagtcttgtaggcagttaacagactttaataactttaaaatgtttagtagcaccttgaaaaaaggcttcaactttatattttatgtaagatatactttgggaagcaaattattttgataaattatgagataaagatatgttcagaccaaattttaaattatagataaaagtagcacttaaaggaaaagattcatttgtatagaattactgaagaatatttgatgctagtatcaactaaaaaagaaacttttgaaaattaaaaatgggccacaacatgtagaagtcattaggcagctgaaaatttaggatgtatgatccatgttaaatatcacaaatattgtctactcattaaatgtttagttgtgtttagaaaacctgtcaaacgatcattttggctcttctttagtatagtccagcatctgccttatgtgttaaaaaacacatggaataccaacatcctccgtgttctttttagtttgttgcagtgtatttttagattacaaaaaaagcaaagttttatcagtagtctcattaatcagtaaaacatttaaagtagttcgtttaaaagaaattttatttctagaatggaatgatttggatgtgacctgataaatacagtttgttattgtggtctcattaaattaatcagctttttcacactggggtaaagaaacagatgatgatactagggaatggaaacaaaattggaaacctgggttatttggggatttatattgtactctgcacagttgcccttttttttaggcgtgttccctggaaaagagggacggatgaacct

SEQ ID NO: 28204 - DNA, 1050 bp, Homo sapiens
gcctcagcctcctgagtagctgggactgcaggcatgtgccaccatgcccagctaatttttatattttcagtggagacggggtttcgccatgttggccaggctgatctcgaactcctcacttcagatgatctgccctcctcagcctcccaaagtgctgggattacaggcgtgagccaccgcacccagccgtgattgggaagttctgagtttagttagctgttcagtgaatgtttgagtacacgctgtatatgcctggcattgctctaggtgagtagccttgaaccaagatagaatctcagccctctaagacttctatgcttttttaaaaattctcgagtttttcatacagaccatcatgtttataaaggaccattttcattcctagaatttataatttatttttaacttgtatttctttcttttttttcttttttgagacagagtctcgctctgttgcccaggctggagtgcagtggcacgatctcagctcactgcaagctccacctcccgggatcatgccattctcctgcctcagcctcccgagtagctgggactacaggcatcagccaccacgcccagctaattttttgtatttttagtagagacggggtttcaccgtgttagccaagatggcctcgatctcctgacctcgtgatccgcccgtctcggcctcccacagttctggaattacaggcgtgagccactgcgcccggccaatgtctttcttttttttgagatgatgtcttgttatatcgcccaggatggtcttgaactgctgggttccagcagttctcctgtcgcagcctcccaaagtgctgagattataggcatgagccaccataacttgtatttgtttattggcatggaacttctaaaacagtgatgaatgcttgttaccctttaattccttccttctttccttcctctttctctttctttctctctttgtctcttctttctctcttttgtctcactctgtcacccaggctgagtgcagtggcatgaccatgattcactgtatccccaaccttccaggttcaaggaatcctc

SEQ ID NO: 28205 - DNA, 1165 bp, Homo sapiens
actttcagccctccgccaccaccagctccagggaagagagagggactggaaattgagttcagtcacgtggtcagtgatctacttaatcatgcctatgcaatgaaattgcaaacgaaagccctggaactgtgaggttcggagagctgggttggtgaacccatgatgtgcagaaaggtgagtgcctatattgcacagaggaggagagggcatggaagctctgtacttcctctcccccatgctttgtgcagtgagtctcttccatttggctgttcctgagttgcacagagcttttccatgttcggtgagttgttctagtcaattacttaacttgaagtggagttaggggaacccctaaatttgtagtcagcctggcagaagtgcaagacttgaggctggcatctgaagtggggaagtcttatgggaccaagcccttgatttggggagtctgcactaactccggtagtgtcagaattgaaatgaatggtaggacacccagttagtgttggagaacattttttagaactcagtctgcctatagtatttttgaatactgtgtctatacacagtatagacttagtacctgcccttaagctagataggtgaacaagcaattataatttagctttgtaagctattcatggactaagtcagcagcctgtactttttttttttttttttttttttttgagataaaatcttgctgtgtcacccaggctggagtgcagtgagatgatcattgatcatggctaactgcagcctcaacctcccaggctcaggcaatcctctcacctcagcctcccgagtggctaggaccacagttgtacaccaccacacctggctaatttaaaaaaaaatttttgtagagatgggatctcactggtctcaaactcctaggctcaagcagccctcccacctcagcctcccaaagtgctgggattagaggtgtgagccactgcacccagcctggattctatctgatgctgaagtcggtggcttgattctgtcaattcagcctctgaaaggtcgtttgaattcaccctttctagccccactgctctggtcttagtccaggcctttatatattttttcactttactactttgctcttaatggttgctgcttcctgactcgtctggcttctctgttccacttcattttacactca

SEQ ID NO: 28206 - DNA, 1076 bp, Homo sapiens
tgttatgtgctgctcccacaataagatctttccccgtgcttttatctcctaaggtggtggacctcaagccttttggtatcaaaacccttgtgtcctcttaagtgattgaggtccccaaggaacttttcttcatgtggatttttgtcttatcattgtctgccagattagaaattaaaaccaagaaatttacacttaaaatagctgtaataaacctattacatgttaacataaataacatttttatgaaaactgttcacaaaacaaaaaaatttagtgaaaagtggccttgttttacattttttgcagatctctttcatgcctcactgaataaaaagatggctgaattccataactgctcctgtagtcagtttgttgtgaaacgttgttttggttgaaatagttgaagaaaatctggccttatacagatatgtagttggaaagaacaggagtcttttagtggcatttccagaaaattgtggttattttgtgatactgtaccaaaacttgacactgggtagtttcttaaggattggttgcagtgtagaatctgaagtcatataagtgaactttttatcctctgttacaataaaatctgttgatccatcctatactttgaatggctattttacccctgtttgatttgaccaatacatacaacatcatgtattggtcatttggaaaatactgggtcactgagttatgtaaatcttacaaatgttgacacatttcattaaacaatatcacaaaatcgtgtttgttatcaccacccatcttattagaaaattctttaaatgttgagaagcagtctagctcataatggcagatacaagttttccaaaattctaattttcaccccaaattcaaattttatcatgaacagcaagtactgtcagttgtttttcttgcagcatcaggcttgctttatttttgagaaactgtgccagatacccaaatctgaataatcatagttttttttggttgttgttttgccaaataaaaatcgagttcctgtaaaaaaaaaatggctagtttagctcacaactcaaatgattgcacagtgattttcttggacattg

SEQ ID NO: 28207 - DNA, 1059 bp, Homo sapiens
catctttactgcttcagaggttactagatttggaaccaaagtgtactttttgggatgcggtaggtttctggttttaaaaaaggatgtctggtattgattaaatctatagttttgaactttctaatccagcagctctgtggagtaggtactgatacttggattttataaccagggcacaaaatggttaagtaacttatctgtggtccgacggctagtaagtggcaggtctggtgtttggatccatgaagtctgtttcctgagtctgcactgttcacagtatgcgatctatgtaataccgctccttatgtacattgtataataatagctccctgggaatgtatgtgtgaagttcccatttggaaggctggcatcgtagtactgcactgatagtggtggcagtgattgtgaggtgggttgggttctggtgcctatggcaggggctccagcaagcagatggttagaagacagatagggagcaaggataggaggatgggctgctataggggccagacctcctgcccaggatatttctggtccagttcgaaagttggacctttccttcctagagattggctccacttatggctttataataggacctcttccccttctggagtcctttggagcaagatgcattttcacagttttctcccaacctctttacttgagtctagcacttactgcctttgaacttctctgagggtttttactaccaactagaaatgaaagaaaaagttgaagagggagatggtattcaaaagataagtgatacaaattggagtcttttaggattcatattattgaaacgcaatttgtcaacctccctaagagggtcacatcactgtggtgtgggcccccccaaggcatgtcatcactgaggttaggatgggctctctgccatgaggagtaagccagtgcctccagctactggctagaaacagggagtgttgtcaggagatctgcactggggctgaaggacatccccgcctacttcccttttgctcttcttactatcagtctttactaccgcagatccctttctagggtccacgacctttg

SEQ ID NO: 28208 - DNA, 1050 bp, Homo sapiens
gatgaacctggagagcatgctgctaagtgaaataaactagaaaaagaaaagaaaaatattgcaagatctcacttatatgtggaatctgaaataaagctgaatatgtaagaatagagtggctgagtggttatcgggggaaggggaagtgggagatgtaggtcaaagttgcagttacataggatgaataaaactagagatctaatatttagcatgatgactctggctaatattgtattggaaaatttgctgagagtagatttcaggtactcttaacacacacacgtagctatgtgaggagatggatgtattacttctgactgtagtagccatttcactgtgtatatgtataacaaaacatcgtgtcatgtaccttaaattatacaataaacaaagaagaggtgccggtttgaaggggcgaggacagagcgtggacttgcggaaagttaggtggccttggtgatttaatctctcaaaccttcggttttcttatctgtaacacgtattagagaaactgtgtcttgtcggaacctacccctcagtgggggtaatcccagctgtttgtcctcagctcatttctaactgaactgcaggcttctcaagagcagccaggatgtcaccttttcatcacctagcaccagctcaggacctggctcattaatttattgaacaaatgaatgtggcagaaaatttgctattggtgttggactgtgtttaaactttgtttcatgtttatcatggttaaacctccatcagaggtaaacaactatgttaattattacatcaaacttctgtacatcttgccccaaatgggatcatttatttgttcaggataaaatgtttttgaagtttttagcacacctgatagttgtatttcttctagattgggcttggatattgttattactcaggaatctggttgaatgtttgattgtataactctgcctttgacatatgtaattaaatgagtttgtatttaatgtgttccttgaggcagccaggtgtatttacctcagaactgttgaaggcttgccatgtctctaggactcattg

SEQ ID NO: 28209 - DNA, 1082 bp, Homo sapiens
aaatgaaagcagagatgcaggccgccagtcaggggaaaaggaagaaacttacagtccgctgctgcagcttctgggtttttttttttttttctcttccattatccttcaggttgttgcatacttccttttgattttcggtttccataatgtctgtttctccttgtgcataaacaattcctttggattatggcatctagaaatatatatattttgaatcacagtactgagtcacttggccacattaaattctttcttagaacaaaatggaatagagaaaaaataaacattgttatcctgattaaaaacctaattccagccgggcatggtggcttacacctctaatcccagcactttgggaggctgaggcaggtggatcacctgaggtcaggagttcgagaccagcctggtcaacatggcgaaatcccatctctactgaaaatataaaaaattagccaggtgtggtggtgcgcacctgtaatcccagctactcggagaggctgaggcaggagaacctgggaggcagtggctgcagtgagccaaaattgtgccactgtactccagcctgtgcgacagagcaagacttcgtctcaaaacaaacgtgattccataaaaaattatctttcaaccaggtatttttcttataagctaattgattaattagttgactgagatcagtagttctgatttctgttctcattctagactttaggttaatttgaagatcacagtaataaaatctaacatctgattcatggggaggttctttaacagtttaaaacaaaacatgaaaattgtggctagagtttcttttcatctcttcatcctcagatagctgatgataggtgataaagtgaaatagatttcggagggggcagtcaacagtaattcagggtgtctctgatataattaatgataagctaagatacagaaatactctggttttacttactaggtttcctattaaaaacaatgtattgcctttcttttagtaagttttagccacaaggctggtttttgtaaggggaaaggttttggaagatttttaggcaaataggatagtggtccaagaaaagaaagaaaaa

SEQ ID NO: 28210 - DNA, 1837 bp, Homo sapiens
aattaagtctcttttaagccatctcagaacttttgggccgggtgtggtggctcacacctgtaatcccagcactctgagaggctgaggcaggaggatcgcttgagctcatgagtttgagaccagcctgggcaacatagggagaccttgtcgatacaaaaatttaaaaatgagatgggaggatggctggagccagggagatcgaggctgcagtaagctgtgattgtgccactgcactcttgcctgggtgagcctgcctaaaaaaaaaaaaaaagcttttggaatttatcctgtcttatgtcaatcctcactagaaattgttaagtgaatcaagtcattttcccactttcaagagaaaagcatgttgaatataattcagtgatgccttcattaccttttaaaaatgatttaaagaaaatccataaactgaaaagcactgtgccaaaagctttacattaactcattcttccccatgagatgattctgttactctctgttatagatgagggacaagctcagagacattatgttactcgtgcaacagaacgtaactcataagtgacagagctgagtcaaactgagatgtctgattttaaggcgtgtgttcttaactatgcaagttttctctaaaaaacttaattgtaggatacaggtatttatttgtgttccatttaattgcggttttacccttaagatgcctcaatatgtattgggcatctactttgccaggcacatcattaatcctattcaaccccatagctacctatgcagtagatgtctcaagatggtgcatgaggaagcacacccagagaagctctagtcctcacccatagtttacagcttagtgcatggtggagctgagagttaaacctatatcatcttacactaagttcctttttaaaaaaaattctcctgggctgggtgcagtggctcacgcctgtaatcccagcactttggtaggccaaggtgggcagatcacaaggtcaggagttcgagaccagcctggccaacatggtgaaaccccgtctctactaaaaatacaaaaaattagctgggcgtggtggcgggcacctgtaatcccagctactcgggaggctgaggcaagagaattgcttgaatccaggaggtggaggttgcagtgagctgagatcgcggcattgcattccagcctgggtgacacggcaagtctctttcttaaaaaaaaaaaaaaaaaaaaaaaaaaaattctcctataccatgctgaagttttgagtttattatgactttgcagaagcaattttgaaatctgctttattgatttgtgacattagaatgaactatcagtattagtgaacattagtgctattgaaacaactgttttatgttgtcacctttttaataacttaaatttctagccaatttttgcaatgcagtattgaacttttgggtacatcttcatgagtttttagtctatttaaattctcaggaatttggcagaaaactctgatgtgataagtgtaatctgggacaacttgtgtatgtaacacccaacattcctggcgtgtagcaactagatagttagcttcttgacaaataggtgggagttggaatcagcaaaatattagttagttaacatgagagggttggtgcagaagtacccacagcagaatagatcatggtaagtgttttttattaagaaattcataaaaattgaaaaaggtgaattcatataagtacttctcgagtgtttgggaggtatttcctatacttgaactgtatataatagatataagtgcatagataacacatggaaatgatgattaaaaagttcagtatttcagtaagattgtgcttttacatg

SEQ ID NO: 28211 - DNA, 1052 bp, Homo sapiens
agtaataatttctcttttggtggagtaaaatcaactcttgtttgtttttgttcaggggtgttttagtttgattttactacataaattttccttcttggcgtgtcagtaaataagaaggagcatttttagttagcacatcaagcattcttgaaggcataaagaatggaattctaatggggaaataatcctgtcatcttacgtaaatatagtattatgtaaatataatacccagttctgtgtattccctttattcccatagaaggaatactgtatttttatgtaattttttgttttctaatgtgatttcttgtaatgtttaatatttcatccctaaaaggaaagacttcctagatgccatttttgtgaaaagacattgtgtagtgtaagaactgaaaaattagtaatttgtctctgtaaatgtcacaggctgcaaaacgggaacttgaaaggcaacgacaacttgagtgggaacggaatcgaaggcaagaactactaaatcaaagaaacaaagaacaagaggacatagttgtactgaaagcaaagaaaaagactttggaatttgaattagaagctctagtgagtgaagtttggttatactttgaaaatatactaagatggaaccattaaaaacagtaataatttttattatctttcatttgttcaagaatgataaaaagcatcaactagaagggaaacttcaagatatcagatgtcgattgaccacccaaaggcaagaaattgagagcacaaacaaatctagagagttgagaattgccgaaatcacccatctacagcaacaattacaggtgaggaaatatgcctcttaaaagctattatattaaactggcatccttttctctaattcatttcatttacttacttattcagtaaacattaagcaactgtcttgtactaggcactgggaagcaaaaatgaagtagacagggtccttgtgtgaaaagtagcctgtcaaggagacaaactcagcaaatatttactgagcactgcttcgggccaggtgcttttgcagtttctgaggctacagcagggac

SEQ ID NO: 28212 - DNA, 1045 bp, Homo sapiens
aattctcgttccctctgccccagaaattctatttttctccttcctctcattcttctccttcctcttttgggcacatgcacaaatatgtgtgtacatggatgttcactgcagtggtgttggtaaaagcaaataaacagcccaatgtccatcagtaaagggatggcttaaataaattatgatacagctaaaaaatacaatgaagattaaaacttatgtagatcacatatacacataagatttccatcaaaaaagcagaatatgtgcagcataattgcattttggttcgaaataaaactatatatgtattcatgtgtttatgtatagttaacagttttgaaatatatatatcaaactgttaacaatggttaccactgggcagtaaagaaggggctttcgtgttgaattttatagacttctatgttattttcatttttataaatgtatctaatttgtaatttttaataaaacaaaataaattcaaggacaagtatattagagagtatctactcaggactgtaataatgtttattatatctcagacctcccaaatatgtaatgaaatgtagaatgtactactaggcataattcgttggcttgcagaagggacagcagtgtttcgattttgtactacaaaatgcattgtgatactccaggtgccattcagctgtgttatctttgtgaggataacagtcaatgcaaaaagatagatattgacatctaatagcaacaggtttgtatttttttaatttcatgaattttgcagttaacaaatgatgagcatgagacatgtagtacaacattactgtcagtctccctaggttgaaaaatccggggttcacttatacttttgtgggcacagtcatcagattctcagattcctcaaacgtctttgggacatagcttactataatatgttcgatttttagaagtctaacattgtgacagtgttttttaatgtaggcagtcttagccttaaaaatattttgtttttagaaaaacttagcctggttttatccaaaactataatttttcatgtttaacaaaa

SEQ ID NO: 28213 - DNA, 1065 bp, Homo sapiens
tagaacataagaaatgagaagacctatgctcactgctgttttgttgaagtttatcttgagaacacaggctgagtgtctaaatcagtacaatcttttggctttcatgggccacattgcaagaattgtcttaggctgcacataaaatacactaacactaataatagctgatgaacttcaaaaaaaagcttgcaaaaaaaactcataatgttttaagaaagcttacgaatttgtgttgggcctcattaaaagctgtcctgggccacatgcagccagtgggttgcgggttggacaagcttggtttaaatgcttatccttggactggtacaggcctgaatgcatccagattgctgagggagcttccaaaaaataaccatgccagggctcatccccagagattctgagaactctactgcatatacagccttcagaagtctgaccaggtggttctgttaggtagtcaatttcaggaaccgctgatctaacctaatctctttttcacgtcaggactaatcctaaatcatttctagaaaatatcctcttaaaaatatccaaagaagaatggacttctttagtagttatcagtcattagccagtcagttcattctggaaattgtttgtcttagtgttactcttataacaatttttaactcattcttttccttttcttctcctgacagacatttttttaaatgtagccaacaatacctttttcctctaccttccatagatttccatagattaaacatcagaaagtatctcatttagtaacaactggccataatatcactgcagttttgagggaccagtatacacgattacagggttggctcaaatctggcccaatcactgcctgttttataataaagttttattggaacacagccaggctccttcattcacatattgtgtgctacagtggcggatttgagtagttgcaacagaggtgaaatttgccagcctccaggttggagctttagaaagagtttttttgtttgtttattttttgtttttgagacggagtctctctctgtcgcccaggctggagtgcagtggcgcgatctcggt

SEQ ID NO: 28214 - DNA, 1096 bp, Homo sapiens
ctcatttaactattgttattacaaatgataatgatcatgtgaggatgtttctccggggctttgcagttacagagtatttccctagcctgtatttcatgtaccctcacaactaaccttaagtggcacagtattgttcccattttatcaatgaggaaatcaaatgccttttcctctcctccttgttcttttatttatttttctttttgagacagagtcttgctctgtcacccaggctggagtgcagtggcgtgatctcagcagctcactgcaacttccacctcccaggttcaagcaattcttgtgtctcagcctcccaagtagctgggattacagactcaatgccaccacacccagctaacttttttttttttctttttgagacagagtctcactctgtcatccagtccagagtacagtgatgcgatcctggctcactgcaacctctgcctccgaggttgaagcatttctccttcctcagcctccttagtagcttggattacaggggtgcgccaccacacccagctaatttttgtatttttagtagagatggggtttcaccatgttggtcagactggtctcgaactcttgacctcaggttatccagccacctcggcctcccacagtgctgggattacaggcatgagccactgtgcccagcctcctccttgttctttcactgtagaaagccacattaagtatactaggtttgtgttgcacaggctcattggttgccatctttttcttttttctttttttcctcttttatttatttatttatttttttggtactttactgtgggtaaaaagctggcatattagggagtgcttgcttttttttttttttggtactttactgtgggtaaaaagctggtatattagggagtgcttgttattcatggtgttgtgcttttccctccaggtggcccaccagcacgaatgagaaaccagaaacggataactgggatgcatgggcagcccagccctctctcaccgttccaagtgccggccagttaaggcagaggtccgcctttactccagccacggccactggctcctccccgtctcctgtgctaggccaggtaaaggcagccagtga

SEQ ID NO: 28215 - DNA, 1006 bp, Homo sapiens
agcataatccagatagggcctatttccctgggtctacctaatctaaaatgccagttaatgatctcatgatagttcataaaatgtctgctccactgttaatcctccactaaaaatgccagtcaaattggaaatggggaggtgtcccgggcaacttgagagtgaaaatagaaccaaaatataaagggcacacagccagatgcaacagaataattgtgacctcctggctttttgaaatagagagttctagatggtcagacaatgactttgtgaagaggctggaaggctttggcctccacttttggaaataaacaattgttgggaaacagtgaagcatccagccctcctgctgtgctgcctcagggccctttgtggctgtgtgtgcttgtctggcctgtgcttgttggagaggtgccatgctcacgtctgccctaattgataacaaagcgcaacataacgagaggtcctttatgttattccacacaagggtgaaaaggtggaggggctacaagctcaagccctatatccttggagagccaaaaaagacaaccacttaaattttaacaaaaatgatgtcatcaccgtcctggaacagcaagacatgtggtggtttggagaagttcaaggtcagaagggttggttccccaagtcttacgtgaaactcatttcagggcccataaggaagtctacaaggtatttttgtatttatctgcttgtatttgatgaaaacaatattaggcgttatattactgtttgcactagttaagattcacagacaggagttgcgggattagtttgtcttctagatcttttaactgcaaaagttatagtatatagagtaccaaaagggagcctcttatagataagtgcattctttcttctctcatgaaaacctatgtgccttgtttttcattgccttatgcaagaaggaattcagctctgagacctggaacactcttgtgcattagttggagattatgactctctttatgcttattacccagtgctg

SEQ ID NO: 28216 - DNA, 1080 bp, Homo sapiens
tttggttaccaagaaagatggtgactggtggacaggaacagtgggcgacaaggccggagtcttcccttctaactatgtgaggcttaaagattcagaggtaaacccacattaactgtttcctctccctttctgtgcggtgattctctttgtggggagtcacgatgtttgacagcggaactttgttgggttttgctaagttctggaatgtgacagtaaatccagtgtgacctgtcattgtttgatcttgtcatttggcactgcgcagtaagcactggcttcccccaagcagaatgccatcagggctaagtggaggctgagtgtgatggggctggtccgcatcagctgggaggataatgttcagtattaagctctcttcctgcctgtaactgacttacgctttggagtaaactttcttgattagatcattatggtcattgatttttaaatgcccaagaatggtagcaatattttgcctgtataaacagaagtattctggtgataatcgccccagaatattggatattattagaaagtttttagaatttctggttttgcccacacagtagaaagacacaagatctaagggatgggtacacttttggctaggccttagaatctccgttgatcaggactgaatttaagtgctgttatccgtatgaattggaagtgctctcactgttgttaaatagagccctaaaaatttgatcacataaactgtggtcttaagatagtgcaagttgaatggaatggtggggtggacctaccacagagcatgggagtcagtcttgtaggagccacttgcacgttagtggagagtttcagggtataaatggagtcatttaacagatccaatgcacatttaaaaaaaccaacaagaattaactccttttttttttaagtgttgacagtcaattcacagttattttctttttctcctcatacctcctaggtactgagagagaaaaggctggcagggagcctgtaggggccgctttctcaggagtgagcaagtggacaaagttctctctctctttcaaatgccagtagtagagtgtatactgggctcttacatgtgcggct

SEQ ID NO: 28217 - DNA, 1188 bp, Homo sapiens
taggagcagtgaaaacaaagcattattaaaagggaagatttttaattaggtggaagttgtttaagccctcccttcaacttacgtgttttagggaatgtggaacctgggaaattcgttactgaaattccttttgtttactttccttgtcttggggaggtagcaggtgacactgaaagaggcaacctgtaggcaataatatttgctcattctgtaaccctttgaaacctttgaaatgaagacttgccctcccctttgtttttgccatagttgccaagtatcttggttaacatggctgcaagtattaagtgtatttcttttaccatttttttttatgtcctgtaataacatagcctttggatgtggagcacccatttttcactctagttcagatcaacagagcgtaatttggttaaaataataaataaccttccttgaaatcttcgcatgagggaaggggggcaaaaaaaagaaaaaaagccctagaaagtagataataaaggtgaactgcctcttggagaaagaggccccatggcagtagatagaaggttgtaacagtggtgacttatgtacaatggcgaagttatgttgaggagatccttgacctaaataaagtaatattaaacaatagcttctcagttatttgttcaaaaacctatctgtagcttgtaaatgtggcacaaacacaaagacttccaggttttagaccagtttgcttgctttcagtttaggaaaataggattctaaaataggatgaatgtttggggggaaacgaatttaaaaagttaactctaggcttatgaaatgaaaaatgcgactgtgagcttgcacaccggtagcaggccttggagaaaccacagttctaacccgaggcactttgtgcttctgttgcaagaagggtattgaagctcctcagttcaaagttgcgtatcttccacgtttttagattcttaagtgtatacctctttacccctttaatatgatgtattttcctttcctccccaaatcatttgtgcatcttggaattgaggaaaatgctgtgttaggcaactttaacagcggatatggaagttaagaaactatagttttccagcctttggactcccagagctgctctcctgttttttctccgcagtactcagcctggagagcattcttagtctgtttggagaatattaactcctccctgtc

SEQ ID NO: 28218 - DNA, 1188 bp, Homo sapiens; identical to SEQ ID NO: 28217

SEQ ID NO: 28219 - DNA, 1188 bp, Homo sapiens; identical to SEQ ID NO: 28217

SEQ ID NO: 28220 - DNA, 1050 bp, Homo sapiens
atttgtagattgtacagctaattcctttaacttaatgttttaaagttgtgggagttgataaagattggcttagatagaatctatagctgtgatgactgggtcaagtatagaatacacttaagacttactatttttccccttctggtggaatgactaattaacactgataaaaagaatgaaggcagaaagcgttgaacttggatggtgagaacatagatacgtctggtcttacagctgacccatcagggctttgctgtatgtgaagcctatgcctgggacttctttttacttttaatctctgcattttatccatacacatccattcacatgatcacacaaagatttcaactggtttttatcttacgtgctgtttgcagtcttactttgttaacagttgttacatatccatcttgtgtattttcaagcacaactttttaaacacgcatgatcttttatcaatatcgttaatgtttcttcctgtcagtaatgtccttttcactgaaggtagtattgcatagtgattaagggcaaaagctgtttagacatatagatgtgaggcaacatcctggctgtaacacagacagctgtggcctggggtgagttatactacctcatggcttcagttttctcatctgtaaaatggtcataataattgtacttatctcatgattgttataaggattaaagtaatgcacataaaactagacacagtacctagatggtgttaggacttaggttagtgtaagatttttttttttttttaaatttccattatttataactcacttatctttgataaacagtcttttacaagcagatagtgttgagcctcttgaattcttattgagttacacaaatgtttggttaagattacatagtaataggcattgctgctctgttatttcatatttccttttctttttgagacagtctcgctctgttgcccaggctggagtgcagaggtgtgatctcggctcactgcaacctccacctctctgggttcaagcgatcctcttgccacagcctcctgagtagctgggattacaggcg

SEQ ID NO: 28221 - DNA, 1384 bp, Homo sapiens
taaataatgtttactagtcatctgattagattttattaaaaatttagatgattcgtcctacataatgtcaaagcatttgtttaaaaacttggaagcttttgggggtggggaaggtggtcatagaaatatgatcatcttcaggatttggcaggtatgaagtgatacaaacctcaacttttaagatttttttttttttttttgcttttctctggcaatcaatcttatttatgccagccgttgacacttagaaaggatttaaatcacttttcatagcataattattgtattgcttaatgctttaaaaaggcacgcagatgggattgagacatttctatccaggcagttttttctgcattagacctaagaacctaattttgtagggcagtagtctctaggcattatgtttagctccttttgtcagtgagaagtgtgttgtaaagtttctaatactgtggtctgttttgaacggttttgagaagaggtagctttagtataatttataggacttaaaaggaaaatgcctagaatcatcagaaaaagcatggaaaaacattcttctctgaggttgccttattggaaaaggagaaatcatttagaagttaatgtgtggaaggcattaggttgaataaaattgttgttcgtattgatctgtcagctgcaattacaattaactgaaaatttagtatttgtctctttttcaggagagaagccgtcaaattttaatacatttaattttaggtatatttaaatgtctgttttgcagagtgattatcttaatccagaactgaaaaattcctgatggtcctactgaagatttatctaatggtccacaaatgtctgttttgttgaggtttggcggacataataataaatcattttttagtcttctgaaaacttttctcctcctccctcttttctctgcttcttatacccttcaacaaaaagcattaaaaggaaaacataaaatcacgcctttagtcagtgccgttatcctctcagaggttgttttggaaatactgcctgatgaaaaggaagagaaggaaattgcttcttttaaagtttgctttttatcttcttgcagcatcttctaactggcagaaataatacaatttttgagttgttttgtaagttggatatttttagttttgtgtggaatgtcgtgtttcccattagggcagggggcgtctcacaagatctaggttactgtatgacaactatatccatttactggagtttaagaagctttataacaatacatttccagagactaggcagtacttggttttctgtatttaaattttctgagggtagatgataacatctagtaaacaccacctgcctgttccatccaggaccctaactggccataaagttacccccaaac

SEQ ID NO: 28222 - DNA, 1038 bp, Homo sapiens
aatatagtctttctgtaggatggatagcatgtttgagaggtgccaaacaagaacttttggggttagtagtgtgtcttgtggagggtattacaggactgtgtaattataggactctaacttgacatggcttggcacccacttgcagctagtgggtacagggtacaaaagatgttagagaaaagctctacagattacgtacttctgtgtcttcgtatgctcaacactgtcctttgtcctccatgaaagatgaaggaagcaaattatgtatgtactttctttgaccttctttaatctctgatactttttagattgcatgattttactaggcttgtatttagggaaattactttcataaatacttttgtagattttgaatcaaaactcagtctttttaatttttttgtagtctataaactagtttcattatgatggacttgattagtccaaagttaattttagaaattgtcaggtagcatagtgtcttcccatgatcaggaggctttctgaaggactgagtctgtaaatgaaaaaataatttatgtatgaatagcatgtatttctgaagagcttagagtgccttgtagaatttttttctcaattttattcttgaggtttataatttgggggccaaatagatagagctcatcattttcttgtttggaagttgaggctgcgacatgtccaaggttatgaagtctcttttgggaagaacagaaaccaggtctccaaatctggactcatggtttgttcagatgtgtctggacaaatggttgtcaatgttttgtcctgttttttcaaaggaactgttcttcctttgggacaaccttttggtgtttgggaaagtaataagatcttggatttttcaaattaacattaagttgtaagaactaaaattttctttgaaccacattactgtgtaattcactgataattgacatattggctgggcagcctatctcttccatatccagcgtaaatgaataggaggtgtttgtgattttttttttctccctttatttaacattgagtcctagtagt

SEQ ID NO: 28223 - DNA, 1032 bp, Homo sapiens
ctgctgcttttatctagtaattttgatatgtaagtattaatgcatttttaaaagatgtctacattgaaacatgttcttcccagtgtcctgcttatgatgctttgttcagattttttgtaagagaccagttagtacactgggggtgtatattgtgtacatgtgtcattttagttaggcattgtaggccaaatgtgattataaatgaagttgatgaacattaattttgttattagtgagttttttgaattgtaaatggatttccagtttaccttctgttgtctacagcttttttaattttaaggtttgactaattgtatccatctcattgtacagtgttttagttgcaagcagaaagtagaatttggtataaagcaggttatttctatattgaaaggagtacagttgaaattgtagatttaagattgttaaaatcatgacaattctaacttgtctattctaacctattgtgtacaatctgattttttaaaattgtaaacatgtatgatcttggtttcatgtgtttttgaaagtgttattgtttaaaaaatgaaaaaagcatatctgctaaagagctgtcagttttcattactgactctgtaaaatacactgttctttgtgtactgtgtgttattttgccagctgctgcattagccttcaaaagtatttggaaacttaagatgaactacatttcttgcaaagtacattcctttctgtggtattttgtcctgtaactgaagtatagtaattattttatggaaatgttagcaattctgtaccaactttgaataaaatgaaaaatttatatttctgtgactaagtattttcagtatgaacactgccacaatgtagtgttctgggtctcagagttgaagaagagtttgtacctcagtttcttttgcccttggcccatgaatggtttccagtgaatttccccctactaatttttgtcatttttaatctttgtaaacactgactcacaggtattgactgagaataggattatgtgtaaaacatagagtaaattaaaatatt

SEQ ID NO: 28224 - DNA, 1391 bp, Homo sapiens
tgcttagagccccttttgtttagctcttggacctcctggactggtacacttggtttcatgcctttgctcttaattttcatctctttgctctttctagggcagtttctaaactttatcttccaacccttctgttgaaaaagaataaaatttctgttgagtttttcaattttaagagctcttttgttcctgaaatctttttttatagtctcttattcttgtcttatatcttgtatcttctcatctctgaaggtactgtcgtcttccactcccgctttatttacttcaagatagttttttttctgtgttaatcttccatgttaaaggcttttctccgatatatgctgatctgcttatttttaatagggtggagcacgctggcatcacgattgggcctgcaacggcctggctgtttgttgggttaagtcctgcgatatctttagaataagtcaagctttccaaagaaagttttgagttttaaactgaaggataaaaggccttttgccatgactgtgagagccaagtggggaaagaacacaggggccccatcattcacagcctgcattttttccttaatctctttggtacagtactaccatttagagctgtgcctgtgccctccaatgcagagccctcttttttatctgccgcagagtataaaccttcaaatatgcatctcaggatccaactagtccttaaacttttgaccaattgtatttattttagtgtcacttcacccccacttcccagaggtgcccagtgttggtatggttgattcttagtttttcccattgttgattttctgcttctacttcctttcttccagaatgttattgctaatgtttcttctcgtattcttgtaaggttgtacctgaaaaaaaaaaatcctgcacaatatgtgcatcaaaacatcacattgtttaccttgaatatatatcatttttatttgacaatcatacctccataaagctgaaaaaaatctctttacagtagttctagtaggttttcaggtgggagcataattaggtgcttgtgttgaatcctctggcttgcctggaaattctggtactcaccctttaaccttttgaaggttgaaatttcagagcctattgcccatttctgcccttccctgagataacatgttgcctaccagaagcacagttggagttttaaagttctgcttatttctaagtgctaagcgatgaaaattgttcacatttcaaaggggccttaaaagctgcgtagttggctgggcacagtggctcatgcctgtaattccagcacttttgggaggctgaggctggtggatcacttgagcccaggagttcgagaccagcttgggcaacataacgaaaccccatatctacaaaatacacaaaagttagccacatgtg

SEQ ID NO: 28225 - DNA, 1024 bp, Homo sapiens
cgcctggctaatttttatattttcagtagagatggggtttcgccatgttggccaggctggtctcaaactcctggcctcaagtgatctgcccgccttggcatcccaaagtgctgggattacaggaaagaaccactgtgcccagcctactccatgtttcttaaaaatggcctatataatatgattcataagcaaaggagtacagcatttaaattttaataagtgttttctatctttgacctttacaaagcctataaaggttacttttctagtcacttcaagttataacttcaggttcaggcctgtagaggtaagtaatcacatttgaacatgtacttaggcatctttatgtttcttagtgttctagacttgtccttattgaattttattctaatttaaaaagtagtttctgtgttcgataatttttattccttaattacctagaggactgaaactcctgattcaataaattgttgggcaaaagaggttctctacaatgaagaatatttgatcaaacagttcctgtggaatcaatttcatagttgggctttgcttatgtcattaggcaaggctggcacttcacatatttttatgtagatggttctcccaaggtctgctagaacttcagccactttccatgacacccatttgactgttgaaaagttagggctcacagattttcagattgctgtgagaatgtcaatgcagaattcacagggacagcctttctatttgaaaatttaaattgcaaggaaattttttaaaggaagtaagatttggaattaagattcagcaaagaatgggaaagacttttacatgtacattttcacaggttttgacagttctgtgtcttggctctaccttccctgagtcctgcctgctcttgagtgttgtataactctttgtaacgtgaggcgggcagggtgtaggtagatgctgcatgctgttgaatgttgtggattctatgtgtgctttattttctggggaactagggtgtggtagtgctagctgggtatattggaggcca

SEQ ID NO: 28226 - DNA, 1047 bp, Homo sapiens
atccgttcattaattcactgtatttgattatgctacattttatttctataatactcgtgaacattctccacagtgacttttgggaaatgaggatgtgagaggcaagtgtagtttgaagttacccgaataaagatttggaattgggcgataacgtttatgtgtctgcagtgtggagcttaaggttagtctgatattctcttggcttcaggcagtggccccataatcactaaccctaaccatggcagtaccaggtattttgttcatttggcaaattctttatgtgcattaatccatagccacagaaagtgttagaaacatgtaataagtggattatgtactgggagacttgcttttctgaagtggttgagaagaaacagtggttttattggttacacgtttagcattcaaagttttggctctttttgaacagccctagaggctatgacacgtatccgaaattacggcaaggcgctgatttgaaacctgacagtggtgtgcgagagccagcttttggctggctaatggagtgagcctagatgtttctgagagtccacattctatcatggtactgttggtatcgtgtgtttgttgcttttacgttttgtggggagaaatggtatgtcctagtggtgtccacaggtctcaggttgattctcacaattgtcgtggttcctggtctcaaggagttttcagtctaatcagagagttggctgcataatgctaacctaggcaccggctgagggagtgtgtgtgaaagtgcccagcacagcaggagtaaagctaagcctggggctgacgggtaggtatctctgttccaatgacttcactgtgtattgggcaattgcctctactgttctcccatgcccagccccctccgccccccaaatcaaccgccttatcacgtacatgcccagtaggctggaagaaaagagtaggtaagggagagcctgttgctttagggttatctgggaaatctgcccagaggaggaggagagtatactttggaaatgatacctgatgtttattattatatcaagactgtttcca

SEQ ID NO: 28227 - DNA, 1032 bp, Homo sapiens
gacctgctctgtttgaatcctggcagtgaccacttcatagctgagtgaccttgggctaatgacttaacctttttgagtctctcttcttaactacattaaattgtacgactcaaaggaggcaacgtgtaggaaaccactttgaagactcctagaggagtattgttgctggggagagggctgctggaccccaaccaacactcggcaccactttctcttcttccctttcctcaattgccacacggagtggagctgccacttctctttcatcctcttcctcaaaagttgtctgaaagctgtgaaagtactttgaaaattagagtcttatgaaagacacttcttttttaagttcagaaatatgaggtttctgatatatctggcttcctgtttccatccttgggtattctttttacccttatcacatcatagaatccaaaagctttgggtgtatttcttaggattattgagtgagtgctgagtatatggagaacactttcaggagggctggatgagaattgattagtgggcagttgagttggttgttggcatctgtaaacacactttctcttagaacatgttgagactcctaggctagctcacaagcttctaaccctgtgaagcagttgaatggaaaatggaagaaagcagtgcttgctatgaacaatatcataagtaagaccaagacagccccagaggtgctatttgaataagttgaatacttgactgtaaggaagggcaggcttggacttcctgtggactctctggagggaggggcatggagcactcggcagtggtggtgtctgggttacttgatggccagagcatgtcatgctcttgctagagcctccctcctgatgcatggcatttcagcagcacattactctaagcacagggcttcaaatggaatgaagcaagagaggaaggcttctagggaaactggacaaggccaaggaagaggcgggagctcagagaaaaactacctgctatagacttcagtgtgttgggaatgttggcagacagggtgaggtcataact

SEQ ID NO: 28228 - DNA, 1055 bp, Homo sapiens
tgggattacaggcgtgagccaccacatccatggaatgctagtttttcttacatccctgccaacacttggtgtggtcagcctttttaattttatggcactttagtaggtatctctttgtggttttaatttgcatttctctcatgactaatggctttaggcatcttttcatgtgctgctttgccatcgtatgtcttctgtgaaatgtctgttcaaatcttatgaccattgtttaaaagtttttttaaattaagttttgagagttatttgtattctagatacaagtcctttatcagacttctaattcgcaaatcttagtggctttttattcaaagagcagtttttaattttgatgaaatctaatttatcaattttttctattatggattttggttttggtgttgtgtctaaggaaactttgcttaatccaaatttacaaaagcttctaagttttatagctttatattttacatttaaatctgtcccattttgagttaattttttaaatggtacaagtagggaagaaagttcggtttttttgcgtgtggatactggattattttagcaccatttgttgtaaatctctatttttgtactccattctagtcttttgatctctctgtgtatctgtacatgaatatcatactgtcttgatggccatagctttataataagtcttgaaatcaggtggtgttagtccttcaacttacattctctatcagagttgttttggctgttttagatccattatgaactttctaatcaatattctagggttttgattgaggttctactgaatgtcaatagattttatttcagtaaaataaataatagatctcaatttttgtttaacttggagagggttgacatctaaattttgagtcttcttacccgtgaacaagatatacctgatagattttgtttctttcagcagcgttttgtagttttgcataccttttgtctgatttctctgcaagtattgaatgtttaattcaaggtctgattatttgttactagtatatagaaataacattgatttttgtatcttgcaatcctgc

SEQ ID NO: 28229 - DNA, 2081 bp, Homo sapiens
gtgcatgtatatttaagattgttacatcttggtggacccattattatgtattgtctctttttattcctggtaattttctttgctctgaagtctgctttgtctgatattactgtagccacttgagcttgcttttgattagtgtttttggttggtatatatttttctgtccttttatttaattatatgtttacttgaataattattccactaggcttggctttaagagtaaatggtcacttggtaaatttacttacaagttttgaacctctttgccctttgtctggaattacacaaaatgccatcccttttctcataagttccttccttgctgaatttgttccttttcaacttgatcttcccagcttcctgtgagagctccacatttcatgctaacaccatcacggtcaaagatttactctggacctgctccgtgttcgtctctattcggagtgctagggttaacaccagagcctttcttcctatggcaactgtgctttagtggagtgaggcagacagtaagcaaatgcatactgtgccagtggtgagaacgtactttgtggaacaaaacaaagccttgagtgagggcaatggagagtgaggggccttggtggagctaggagggtgctgctttaggagagtgggcacagaaggtctctctgagagggtgacatttggacagagacatgatagaagcaagagatgagctatgtggaagttgggcggagaacatttccaacagaaggaccagcgagtacaaaggcctgggaggggaatgtgcttgggagtcctgagaaccacatgtatgcctagaacaaggcaagcgatgacgaaaatttcatagttttaaccagctagaacattgcaggattttgaaatactgccctgaaaactgacctttagtcacataatggtccaaatcagacagtacaagggaggcttaaccttttaggtctgagaggagccaggagtgggtagggatgggctctttccttgcactgtcagccagcaggctgctgaggaccttgtcaatctttgaagaccagtgagccgtgcgggatgcccgtcgacattagtctggtttgagtgatgagtggtaaattctttttcttacttaaggttccagtaattttctttttgttccttgtccgtattgaacatagttgtagaccagtcccatgcctttcttaatcttttcccatgtttgtgggctcatggttctcttaggtgtgttagttcacagggaaaatcctttgaaaagttagaagagtatctaatagatgttttcacacacacacacaacattaatgaatagtttggaaaattcagtctcgtcaatggattagaagttttcccccatgctttctagtacttcacaccatctgtaatgtcacagtgtgtttttgctgccataaagctggtttggattcatattttcacaagagtgtaatgggaaagaccatagaaaaagggagattgggcttaacactgcaattctgtttagctggtcagctggtagtttctattttgacaaggttatgtgtgtgtatgtgtgtgtttgtgtgtagttgatgtctgtctaggaagagtaaaatggaaacactgaccaaaatagtagaattattacaattcaaatgcagacactcacaagtttttattttattgcaggtatttcttggtggatttttatgcacccaccgcagctgttgaaagcatggtggagcacttgtctcgagatatagatgtgattagagggaatattgtcaaacaccctctgacccaggaactaaaagaatgtgaagggattgtcccagtcccactcgcagaaaaattatattccacaaagaagaggaagaagtgagaagattcgccagattttagccttatatgtaattccttcacatttgggcagcatggacgagaaggaagaatttgcaagtttggcctttatataagcatgtgttgcaggtgctgtttgatttttctaaggtatttttagcccttgatcccctttgcttgcgagaggtggggaactgctcactgacagcttctctgtaacctgcagtaccagtggatcgttcttg

SEQ ID NO: 28230 - DNA, 1026 bp, Homo sapiens
gacattattcagagtcctaatttcaaacatcccgctcttccctcctagctcactccctcttataccctggctccaatcccattccctcaaccctacagggccccacttatcctactggctatccattgtctctcctcatgccctcactgccctcctcaccctccttaaatttcaagtctactgctgcaaccaactctccaggcctctcttgatgatactcagactctaccacagcctgcacctatgggctggatgtgcctggggaaaagcatatctctgctgactggtctcatgaccacaaccacacaggggcctgtggtgctcctgggggcagcatggctccccagacctctaccttcccaggaaactaggtccttctttcccttctcaaccttccagtacctttgggccctcattttacctctgctaattggctttgttccctattttactgaaaaaatggaggaatcagaagaaatattccacaaatgtttgaaccacttccgctgttctgtgtctgtgactgcaccctccagccccgctccggggaatgttcctgatgctgcgtctcattgaggtgggggtcaggggaggggtgctcccatctcctgtgcccaaggtccggtcccctcggacctgcttgggggcttcgctccgcaaacttcccctcaccctgctgcatcatcaaaatggtcatgcagtttgatggtcattcccaccagcaaaaaacttgatttttcctggaaaaaaaagaggccaggcaccctggctcacacctgtaactttgggcggctaagacaggtggattacttgaggtcaggagttcgaaaccagcctgggcaaaatgttgaaacccctctctactaaaaatacaaaaattagccgggcgtagtggcatgcgcctgcaatcccagctactcgggaggctgaggcaggagaatcgcttgaacccgggagatggagaaggttgcagtgagccgagatggcgccattgcactccagcttgggtaacagagcgaaactctg

SEQ ID NO: 28231 - DNA, 1078 bp, Homo sapiens
cctgacctcaggtgttccacccgcttcaacctcccaaagtgctgggattacaggggtgagccaccgtgcccagaccatgactcacattttctatgctctggttgttttctggcttgtaaacatggcttttgcctgctgagaacacttttcctcccctgctcactgggaagccttcctgaacccaaactagcctaggtcctcttcaagctctcttcaggagcttccaaaaatccttgctccttctcctgagcatgtacttgtttgcaagtgattgttgatatgtctcttccttacttttggctaagggttctttctgtgccgtggaccatcctaggcagctgatgaagtctatggatcttttgccagagttatgttttaaatgcataaaataaaacacactgggttctagttcagggcaagttggagtaagcacactccaccctgactcccggtgaatgttgctataaaacccatacaagaatgtatggaatagctacttaaagactctgaaaagcaaagggtagccagcaaattggtaaagaagacagaactcaagtaccgctgaactggtggtgagttaccatttttcccccctccagaatcacctggtctggattcagtgcagtctgaaaacccagaagtgggcactggtgcagacagagagccccagaggagccccctagtctggcttgaaggagcagaaaggaagtctcctaatacttagaaggagtgaagaaaccccctgttttgttttgctttttcttttcttcattctcttgtgtcccagcgcccaggcactcctgtggtagtaggggcacaagagctcacaggagcccaaaactctgaggcaggagaatctttcctgaatcagaggagctgctgtcccaagagagtgaagaaaatccctaatgctttttttccccactctgttatcctactgcttttccctggacacagatacagttgtgggaagtatatagcagaacaggctaagtaaagccccggctttctggccagatgaccaaaaaattgagctcctgggaacaggaaagtactaggaagtgggaagagctgggaa

SEQ ID NO: 28232 - DNA, 1083 bp, Homo sapiens
ttatataccaataggagaggaaaaacactgccaacacactgtgacagatgcctttaatgacagtcctgaatgacatatgaatcaatgacatcagattccttttaagttaatcttcatctcttctagagatttggcaatgaaacaagtaactcggcaatagaaagtaacacagcttgtccgactggtgggtatcttcctttgcgaggtttctggtgcacttgattgtttctttgcaagaaaatatggactcctgatcattctttctgtgataaatgtcgttcactaataccacctttgcatcctactgcttggtttctgtacctttctgactacaaaatagcttgttatttcagtgctgaatcgtagtgaaatttctttggggagattcctacacagtagttaaactctgaggttaagctaacaaatgcacagatctcaatcaaagtgataacaatgtgaacagctacagctgggtggatgcacatggccgatggcttttgaaagatactcctgattaagatgtatctggatctcagcaatgttagcctgtgaaaaactgtgcctcttaaaatctgtggaatacagtaattctgtccaattcagtaatttgggagggagagttcttctgcacttatgacatgtttcgtgaacatcctttgtctgctggggaatgttctagggcttcagtgggaaacaggctgactcccctgcccacatggagctcacactgagtaaggagaacagacaataagggaataaacagaacaatgttcatgttattttaagtgcaaggaaggaaataaacaggaggctgagatggagcctcacagtgggacgggtacaggatgtacatgagcatttgtgatgagccttctgatttccaactaagtcaacacttggatttttgtctctaagagtcactggcagcctgcagggcgatcacctgtccctaggtttgcccagaactgaggggtttcacgggatatgagccttgaactcctataatgggcagacccaagcatactagtacagttcgtccccctatggagattctaactcaagtttccttgtagtttaatattt

SEQ ID NO: 28233 - DNA, 1049 bp, Homo sapiens
gtcacatccaaaagtgctaaattatttctaagtgtataatgagattctctgtccctgaagccgaattttggttgcagcttgtcagagtttcattcatagatatggctggtcaattgagaacattctagagaacacttttgtgatggttccttcctcttgaggttctgagctccatatccttccacctcagaccccacatccaggacctaccatcttgaatttaagtttttgccccttggcccagagtctaaggaaattatgagatccatagacccaatccatacagtgcttttgcttttgaatgccagcgttggcgtttcttgggtgctattttcaaggcggatttctaggttggatgttaaagtcatcgtttctcttctccagttgacttcaatgacctgttgccggtgggcccgggacaaaaagttttgggaaggcaaaactggggtctgatttggtaggcatggcatggattatgtaagtgtacaggtctgcatttcaaaatgaaaaataacaataataattagggtttctctgggctcctcatgtccaagccactcttgcaaaaccacctttggatgagcctgaagtgtcagcaaatcagaaacatgtggatttaatttcctttgaaatacaccagggggagagggagctgtgggacttggcaacctgcttcttcgggtttgccaaaccccaaatatctcacactctgtgagagctctacgctggcccccagcagtctcgtctggccagcccagcctctgcatttcttgctgtaccgtctaggtctcctctaaccatgattcccttctctgggtccatttcagctgccagagggatgctaacaccgcccacgtgctgcagcaggactttggaaggggaaccagcactgtaatgaagtgttgggttggctcaagtcttgtctggaccacaaaccatttttcaaccactagtgtgcctttaaaacccaaaccaactgtgagagtggttttctactttgattctagatgggaaaatattttgcttttttggtggatgacagtgtcagg

SEQ ID NO: 28234 - DNA, 1061 bp, Homo sapiens
tcataagtcaaaatgagtttaacattacctgacctactgaacattataacagcacagcctaccttaaacttgctcagaacactaacattagcctacagttgtgtaaaatcatctaatacaaaggctattttataataaagtgttaaatattttatgtaatttattgaatactctcctgaaagtgaaaaacaggatggttgtatgggtatacttgaagcattttatctaccgaatgtgtattgctttcacaccattgtaagttaaggaccatctgtataatttcacatttttctggtagccatattttaaaagtttttaaaaagcagatgaaattattttaaataatattttattgaaccaaatgtatctaacatattataatttcaacatgtaatcaattgaaatttttaatgaaaaactcttttttgctttattaaatcttcgaaatttagtggcattttgtgcttacaacacatctcagtttatactaattccattttaagtgttcaattttcacatttggctagtggctactgtattgaacagctcaattctgggacattgtcctttttatccatatatttgaagatttatttttattatgttgaaaaaagtaattctgtataatttatttaatttccatgatttctctggttgtttgaatttatttaatctcattttatatatttactttcttccttcttcttgattttgttagccagaagtttatatattgcattgttattttgtttttcaatgaaacagctgttgcattatttatcagttaggtctatagtcttctattttataatttctttttttttttttttttttagtttcactctgtcgcctaggctggagtgcagtggcatgatctcactgcaacctctgcctctccagttcaagcagttcttgtgcctcagcctccaagtagctgtgactacaggtgcatgccaccatgcctggctaattttttgtatttttttaagtaaaaatggggttttgctatgttagcccggctggtggcaaactcctggcctcaagcgatccacctgccttgg

SEQ ID NO: 28235 - DNA, 1034 bp, Homo sapiens
acccacccagtgagcaggactaaggagcctccagatttgtcctttctgcctgcctggcatcctcaaagcatgcagggatgttgctgtctgacacgcttcctcccgaagctgaactggctgtcaagaacaaaaatctggttattgatatcaagatcagatgctgcttgattttgagggatatggttgcttgagtggctttggtattccaaatagagattagggatgggccagatgctggttggggggcataggggacagtggatgaaaaagcaatctattcatggattcaccaaactctttatttcttaacaagtattattgttttttgataagtaagacattttcactgttaaaaaagggggaaatatgaaaacacacaaagtagttaataaagctactgatacgtgggtaattaaataatgctaattaaataaaactactttgtatgtggggtaactgataccccagacagttaataaaaataattccaatgctgagatgaacactgtgtttggtcatttctctgagccacttcccaactatcctaattccccagctacccagtctctctccaggacttcccagaccttcttatggttcagaaactaataggtcaacacccagtacagcaaaatatggccttttgtttttttcttttgggtgcatatgcatatgtgtacaccctacacataggaatgatagaatatttaacagctggttccgcatgggcacgaccaacggggtggacaggagtctgggaggctggcttttgctgtactgggtgttgacccattaggttctagaccatgggaaggtctgggaagtcctgggttgtgggggagttaggaggactggggagtggcttgggaagtgactatttatcatttattatgaaatgtttttaatattttattttattttttttgagacagggtttcactcttgttgcccaggctggagtgcaatagcccgatctcagctcactgcaacctccgcctcccgggttcaagcaattctgcctcagcctcctgagt

SEQ ID NO: 28236 - DNA, 1121 bp, Homo sapiens
tgctggcaatctatggtacttgtggacacggcacccccacctctgccttcatcttccatggtctaactctgtgtgtgtgtgtgcacgtgtgtgtggtccaaatttctcctttttataaggatatcagttatattgaattaggcctcaccctactgatctcatttgatcatctctgtgaagactttacctccaagttaggtcacactctgaggtactgggggttgggattccattatatgctttttaggggaatgacgttcaacctataacactctgtgaagctcacttttttctactttctagataaaataaacagaaatagaggttctaatggcttcctttggcatccccacagagagtggtctgttgctcccacggggtgtatgtactctcctatggaggccactgccttatcagttctggccctcctcctccccttatgatcactcacccctagttctcactaggagcagggggatgtgggatgttgatatggtttggctctgtgtccccacccaaatctcatctcaaattgtaatccccatagtccccacgtgtcaagggagggacctggtgggaggtgattggatcttgggggtgggtctcctcgtgctgttcttgtgatagtgagtgagttcttacgagatctgaaggtgttaagtgtttcgcagttcctccttcacatgctctctcttgccttccaccttatagatgtgactgcttccccttctgacatgattataagtttcctgaggcctcctcagccatgcagaactgtgaatcaattaagcctctttcctttataaattacccagttttgggtatttctttatagccgtgtgaaaatggactaacaccagtgtggagtagacgaggaccgtaggaactccacctgagatcttcagaagattgatttaacgggaaacttctggtgtcaggatagccaagtgagccactggctagcctcctctccatcttctcccttgctctgaacctcagaaataatactaaagttgtgtgtaccacacaactttttttttccagatagggtctcactctatcacccaggctggtgcagtggtgtgatcacggctcactgcagcctcaacctccagggctca

SEQ ID NO: 28237 - DNA, 1076 bp, Homo sapiens
cttactgggtcaatagctctttctcaaaagagctgcacaaagcagattatgtgtgaattcagagaatgatctttggtgccaagctgtgttggatttgaaatgtcctgtcaagtttcagattcacagcttgacatttatatggttatttatgtcacttattaactgtggtatgtttgtggcaatctagttatgattgccctcctagcttgtgaatagcaagaagagattgctttgtgacaagagctcaccctgggatgttctgttgaacacaacttggggaggatggggatcgaaagggctgatggctttgttatgtattatttttgctctgtgatgttctagaagcttttgccccaagaacactggttgccaggtattctgctgctctgggtccaggaaaaggcaggaagaagcttgtgaatctgcttcaggtgcatggtcttgaacagcctttgtttctaggagatgcggaggcactcagagaaaagccctggatttctttaaggtggtttggagatttggcctgagtaggggattgtggagaaccaatattttgcttttggagaaatttgtcttaatttttgacattctggcattaaaaacaaagatattaaactgtgatttttagcttttgcctgctgtgcaggggtactgctctgtgctgatgggcatgtcctctctaatgcagacctggaatgaaatgaactcacattccaaggcttctggttataatgtttgccctccctccaccttccccaccctgtggagctttagggtaaaaagggttatgatgtggagctttagggtgaaatgggtaggatgaaggagaggctggggcaacagaagagaggagctttgggttcagctcagaaccaaatctactgggcttctccagctacagatgaggttcttaagagggcgctctatcctgacacttccagaagaaccagaaaaaaagtttaaaagcctatctgggccaggcacggtggctcacacctgtaatcccagcactttgggaggctgaggcaggtggatcatgaggtcaggagatagagaccatcctgtcaaacatggtg

SEQ ID NO: 28238 - DNA, 1056 bp, Homo sapiens
tactaatcaagtccttcacccaccaagagagggttgctgaacgtttaccagcacaccgctgtaaattccattactctttctttctgagaaatgacttatttttctctgttttagcctagctaacatccctgtctgagagaggagaacttatttttccctattttagcttagccaacaaccctaatgcattggacatacacttccctttgggaaatggccccatcttggtctctgagaccttttctctagttcttctaccctctggggacttcttatctggaaacatttgtggctcttcttcctcctgccttcagatgccagtgtgtgccaagcttaagccttcttttctgtgtgtctttctccagagagctcatgcatctcaaggcttctgccagctctggactgaaaccccaaaatggacatttccaatcacattcctctcccacaggctccaaccttgtatctcctgacagttgtccacagtgtcactgctgtagacctttcccctggtgcatctccctggccattgcctcccatgcagcagatttgagaactcatcttccttcccaggatgttcaggtcagctccttctctcagcagcaactcccctctcagccaaccagacttacctcctgcacctttaatgggcccttctctgaattcccaaagctgggtgccatattgtgctgggtttacttaaagatatccctcatgttagtctccccatctccacccaatctgtcaccccaattttaagctcctcttcctgccccgcctttgagtgcacactccttccccagtctgtcctgtgcacccccctccagcttcctgaaacatcatggcagctccatgcttgggggctctcaatcctactacattccctctacaccaggttccttgtctttcttggtctttatgatctggctctatgaagtgaatgttatttccctcaaacctcctgcatgaatcattcccgtgggacggttttcctgttttgaatctgggccataatcatgtgcaggaactctctctcatacaggctctcaagagcctgtg

SEQ ID NO: 28239 - DNA, 1030 bp, Homo sapiens
ttctatatataccaagatgccctctacaggcatctagcaacttcccagtagttcgtgttacctctctgctcaaaaccctctcactcagaagaaacgccaaaatctcacaatggcagcactatggaacttggcccaggtacctctgtgatgccatgtccttcagccacactggcctccggcgagctccgcctttacactcactattccttttacctaaattggctaactttcccacatccttccagtttcttcacagggggcccttccctggattgtagcaccccaaccctggtgtgtccatctctttggccctccatagccacatcctcatctactgtgcctaaaattgtgtcccctaaaagttatattcaagacttaacgcctaagacctgtggatgtgaccttgtttggaaataaggtgtttccagatagaatcaagatgaggtcatacaatcaagatgaatcaagatggattcaggtgggcctaatccaaggactggcatcctggtaagaacagagaaatttggacatagagacccccaggggagaaggtcttgaggaaggaggcggcaatgggagtgatgcatcgaggcaagcatcctagtccatttgtgttgataaaatacctgagaatgggcaatttataaacaatagaaatgtattttctcacagatctggaggctgggatgtccaaggcacttgtgggttaggtgtctaacaggagctcggtctttgtttccaagatgatgcctcgttgctaccagagaggatggatgctgtgtcttacgtggtggaaggggcaaaagggtaaaaatgggcctggctggttccctccagccctttgtaagacactaatcccattcatgagggctccaacctcatgacggaaccacctcctaaaggccccacttctgtgactactgccaggttggtgattacgtttcaacataggaattttgggggacacatttaaactgtagcagcaaggagcacaaaggattgcagaatccaccagaaatggagaaggaga

SEQ ID NO: 28240 - DNA, 1061 bp, Homo sapiens
aaaaaaaaaaaagttactacggagaaataaacaggccggcttcacctccaacctagtggggaaaaaaagcctaagagggagtgaaatgaaggatgggggagcagaagtctccacccctccctttggccctaggcactccgcattgttgtgcatggggacctgagactttctttgacccgcacgggcaactcagcctgccggctttctgagagctggggtgcaggagtggggattaacaccccctaatgcagccctcagccatgggctgagagattggtggataaatacccggcttcctggacgacaggcggagggacttccccttgcctttcaaggtatggggaatggaccaccagcagctgcaaacctgggcgctcatggcaaggcagaatctcccgccttgccccacacctgctgaatcaaaatctgcgtttccgctgggcgcggtggctcatgcctgtaatcccagcactttgggaggctgaggcaggcagataacctgaggtcaggagttcaagaccagcccgggaaacatggtgaaacaccaactctactaaaaatacaaaaattagctgggcatggtggctcactcctgtaatcccagctactcgggaggctcaggcacaagaaccgcttgaacccaggaggcagaggttgcaggaagaggagattgcacccctgcactgcagcctgggcgacagagcgagactctgcctcaaaaaaaaaaaaaaaaaaaaaaaaaaatctgcatttcaacagaatccccagctccctcctacgcacctttaagtttaagaagtggtagtcaaagccaagtgttctcaaggtgtggctggagaccagtagctgtcacatcatctgggaacctagaaatgcaaactcaggccaggtgcgatggctcacgcctgtaatcccagcactttgggaagccgaggcgggtggatcacatgaggtcaggagttggggaccagcctggccaacatggcgaaaccctgtctctgcaaaaagtaaaaaaattagctgggtgtggtggcatgtgcctgtaatcccagctactccag

SEQ ID NO: 28241 - DNA, 1047 bp, Homo sapiens
cccctgctctcatggaaagaaatgacgctttcttggcgagagacagacgacagatgactgtgtgatgtcagatgctgaatgctaagaagaaaaataaactggggaagtggggtatggaggaaggaggagggagtgctattttagacagagaggacactgacagcgtgaccttaaagcagaggttggggtgaagtgagcaagctggtgggaagggcaatctggggcatgggcctgtgtccaaggcatgggaaggggacaggagtagccagaggacagagtgaccagagatacagcagggtcaggccactgataggattttgctctggcggggaggggaagccactgagcttcctcccagggaggctgtgagcaagggaacctctgcctcacccattccaagaattccccgggccgtcagcaagcacaagagccagtgtggatgcccgcaccattaggcctgagatcagttcctgccgttactggatgtggagggtttggatggtgctggagggagcacatcttgatcagcatcaggaatacttggttctgtgaaacttgcaacttctgcattcaagggtccctgataggagttggtatgaataaagaattttcttcactgggtgcagtgatgcatgcctgtaatcctagcactttgggaggctgaaggcagaaggatcacttgagcccaggagtttcagaccagcttgggcaacatggcaaaaccttgtctctccaaaactacaaaaattatctggccatggtggtgcacacctgtagtccagctactcagaagcctgaggtgggaggatccctggagcctcagcctggagctcttgcaccactgcactccatcctgggtgacagagtgagaccctggctcaaaaaaaaaaaggaatttttttaaggctttggtgatcgtcacatttcttggacttatgcacagaaattcagtgagtaagagttgagagttgggcggggcgcagtagctcacccctgtaatcccagcactttgggaggctgaggcaggtggataacctgaggtcagga

SEQ ID NO: 28242 - DNA, 1045 bp, Homo sapiens
agaaggaagctccttgtttacataggagttatagcagcactgctctcccagttcaacaaaaactggtctcactggttacctgtggaaccccgactccctgagatggctctcggcagccttgccttctgcctgtttctccagcttatctcttgccaccgccactccctcaagctggcaaagcaaccgggtcatgccatttcagtcaaggtggaatgccacaccatgagcacttgggaagtcctggccaagtgctggtctgttccattttcgtcctgtctaaagggcactaacagtgccccctggcaggtgcttcactgagcgtttgagcctgtgtcacctggcctccctgactcactgtgccactgtgcagcttcctttcagtggcatgaaaagaacacccttacaaagatgcctgacttccagaaggaagacatgtcagtgtttcaccgtgaaaaatgcaactcctcgtttgcttggtgggagacgtgcttttaaattggctgacttacatttctttctagacaaagacatctggcattctgaagtcagcattgtactctgtgcaaaagtagggtgactgtctcttctaggaacttttaaaggaaacatttaacatttttattttacgggctaaataaagcgttttaaaaatgaaacataattctgtccactccccacccatatggttaaattactccttttttaaagcattttaaattgtggtaaaatacatataaacaaattgtggtaaaatacatataacataaaatttaccatcttaaccatttttaagcatattaacttgtgtccatgtgtagccttttggaatttttcatcgtgttccctacacagaatgcttctaaatcatgccgtgtcctggggactgtcatactgtcaggttgtgtaaagtcaaaggaaacaaagatattttcttgggtggagcaacagtgacacttcctgatttctattaagcttggatgtagtttgaatctttttttttcaaacatactttatacttaacattttagtattttcttttaaggtc

SEQ ID NO: 28243 - DNA, 1031 bp, Homo sapiens
cggtggctgatccctgaaattccaccactttgggaggccaagacagaaggattgcttgagcccggaattttgagaccagcccaagcaacgtagggagaccctatctctacaaaaaaaatttaaaaattagccggtcgtggtggtgggtgcctgtggtcggtcccagctaggctgcagttagccctgatcatgttactgcactctagcctaagcaatagtgagaccctatctcacaaaaaaaaaaaccttagaaaattatttataaatagtttttctgttatttaagtttatagagttagttttcatattgtaattatgaaaactatgttgtcaatctgagtctttaacttatgatatacgacagatgattaatttagcagaatcaaaagccagccttgctgcaattctggaacattctctgttttccacggaacagaagttactggcagaacttgatgctattataggcaagaaggggacgaggatcatcatttggaatcttagaaggtaaacgtggacatagatgttgaccgtttgggaagtaaagtgcacgtgcagggtggtggtgttatattcatctctcgttacacacagtagaaatacatggaaaggtactcattttttggtgtagttactgatttgtctttgcccaggatatgttatagaggccatttcagcttcaatttgagatattttcatcttgttaaaaaaaatttttttttgagacgaagtctcactcttgttccccaggctggaatgcgatggcgcaatctcagctgactgcagcctccgcctcctaggtttaagcgattctcctgcttcagtcccccgagtagctgggattacagtcgcctgccaccatgcccggctaacttttgtattttagttgagacagggtttcaccatgttggccaggctggtctagaactcctgacctcaggtgatccacccgccttggcctcccaaagtgctgggattacaggcgtgagccaccacacccggccaaaaaaaaaaatttttttctatccctg

SEQ ID NO: 28244 - DNA, 1038 bp, Homo sapiens
ttcctttttcttttttttttctttcttttcttttctttctttctttcttttttttttttttgagatagcgttttgctctttcccccagggtggagtgaagtatagcgccatctcggctcactgcaacctccgcccaccgggttcaagcgattctgctgcctcatcctcccgtgtggctgggattataggcacctgccaccatgcctggctgatttttgtgtttttagtagagacagggttttgccatattgaccaggctggtcttgaacttctgacctcaggtgatccacatgcctcagcctcccaaagtggtaggattacaggcgtgagccactgcacccagccagtttgcacttttttcttgctgagtagtgtttcattgtatgtatggaacccagtgtgtttacctattcaagacatctaggtttgtagttttgggatattacaaataaagctgtaaacatttgtgtacacagttttgtgggaatatagtcttcatttttctgaaataaatatctagaagtgtaattgctgtatcatatagtacttgcattttattttctaagaaatgccagactgttttcctgagtgttttcctaccagcagtgtatgagtgttacagtttctccacatcatccaggatccgttttctttctttttctcttgcctttgcacccccaaccccccactgacgtgcaccatgtgtaggtttatttatttgcttacctttttaatgacttacagtgtttgctggcttatcttgctgtgaagttaaattttggttctttctaaaaattatttttacagctacaaaaatgcaacagagttcgattttgaaaaggataaatatgatatcagaattcccgaggatttagatgagataacagggaagaaggggtacaagaagcaggaaaggatggaccagattgcccctgagagtgactattccctgagggtatgtattcagctctctttgtggaagtgagaaaatcattgaatgctggtagtattaggagaggtcatgttacctgcttgtga

SEQ ID NO: 28245 - DNA, 1394 bp, Homo sapiens
gctggtggattgcttgaggtcaggagttggagactagccatggtgaaaccccgtctctgctaaaaatagaaaaattagctgggtttggtggtgcgcgcctgtacttccagctactcgggaggctgaggcaacgagagtcacttgagcttgggcggtctcttggttcttgcagtgagccaagatcatgccactgcactccagcctgggtgaccaaatgagactctgtctcaaaaaaataaaaacaaataaaaataaaaataaatgtgatgagaatcatacaagataaaatatagaaaaatatacaaactataattctttaagggtaattattttgagcatcatgtcttatgcttaaaatgctgatttcattttattttttcaggcaaacaacatgggtgttggagtggttggaattatagagtgtaatttccttaagccaactcataataaacaagatttcgactatactaatgagtacaggtatgttacctatttaaattattgactgaggttcctaggaaatgtattaccaagaaagcaggaactactctattttctgtgaatctcagaaataccttattagtaaagaaaggtttgaatatactacttgtgatggtgtaggttacaattcctagaatggaagatggttatattagttttctatgtaagtcccttacctacccattttcttaaagttcgataatgtaattataattttgtaattaaaataaaaatccacaaggtggcaaaacatttagcttaagagaagttatgcaagtattttgaaaataaactttaaaaagaagtcaataatttaaataggtaaatagagggcctggccaatgctggcctatagacgtggtctctggttgacatagggtgtgtggataggttggagctggtctgtagagggagccttatgttgttggagctagcagaagactgctggtgggcaaagcatggcctgatgggcacagctgaagctcctctgggaggtcactgggccctagcaaaatagtaacagagtaccagaacttgggctggatttggagcctagagacaataaattggtaactgaatgaatcaaaaaagtcagccaggtgcagtggctctttcctgtaatcttagcactaagggggcccaaaggtggacaaattgcttgagctcagaaggttgagaccagcgtgggcaacatggcaaaatcctgtctctaccaaaaatacaaaaaattagcaaggtgtggtggcatgtgtctgtggtcccagctactcaggaggctgaggcaggaggatcatttgagcctgggaaggtggagtgtgcagtgagccaagatggcgccactgtactccaacccgatgacagagtgagatcccgtctcaggaaaaaaaagacca

SEQ ID NO: 28246 - DNA, 1081 bp, Homo sapiens
tggatgagaacatgagatatttgtctttctatacctgacttacttcacttaatgtaatgtcctccaggtatatccatttatatccatgtcattacaaatgacagcatttttgtggttggataatatcccattgtgtgtatgtaccatagtttttttattcatttattcgttaatggatgctgacaaggatgtggagaaaggggaaccctcgtacactattagtgggaaagtaaattagtatagttgctatggagaataggatggagtttcctcaagtaaactaataatagaattaccatatgattgaacaatcacatggctggatatatatctaaaagaaagaaaatcagtatatttgaagagatacctgcactctcatgtttattgcagcactgttcacagtagtcaaaggttttatgaagccacatagccttgttagtaagctcaagagtacaggaaaggaaatttatgtcagtctcttatcatagaattaaaagtcttaattaaaatattggtaaataccatccagtacatgctaaaagaataataacattaaaaccaagtgggttgtgttctaagacaatatgggtggttttaatgtaagaaatgagtatagttcatcatattgatgtttaataagagaaagcccttatggtcatatacatagatagagaaaaagcacttgcaattatttttaaaaggaacacctacaaaaactgtgaatcaaagggcataataacagagtatttacacacacacggcaagctacattactaatggggaacaattgatagctttccttagaagggtgggagagttaaggataccagccattcactaaatattcttgaggaaataactaatgtaataaggccaaaaaaaaggggtgggggggggcaggttgaaaaggaagacataaagctctattacaggttgagtatccttatctgaaatctttgagaccggaagtgttttggtttggatttttttgtattttggaatgtttgcattatgcctactggttgagcattgcaaatctgaaaatctgaaatccaaggtactttcatgagcatttcctttg

SEQ ID NO: 28247 - DNA, 1070 bp, Homo sapiens
ctaaacctgtttcacctttaaaatgcagacagcttctcagcttgaattcacagccttttccttacacacaaggtctctgtaatacttctcctttcctccttatcttctgttcttggccctcctctgtacccattagcagttctcagctacctctccctgctccatattcacttcgctaagctgttttaacccagggattccctgacaataccttcttccacccttcatcccctcttcatcctgcctgacctggggaactgaacttagatcttctcagaccctccgccctgtgctgtcagctcccctcccccggtccacatgtgtgatccttgcttgttgatgggtctgtctgatctgtgggctccctgagggtggggactgcatgaagtcatctttgtgaccccagagcctgacacagggttttagtacagagtctctcacttactgcctgctgagtgatgcgtggtaaagggaataatatttaagtcatagtttatactatttgggctcaaacaggttttggtaatgctgttttggtgcgtgtgtgtgtgttttttttgtaggacaaaagatatcaatttttaatgaacataaaagttatgtccaaggagtaacctgggaccctttgggtcaatatgttgctactctgagctgtgacaggtaaattcagctttggcatttacttggaatttctttgtatttacttggaattttctgaagagaggtatttatcgtaacttagccaagatttatcatagtctaactttgattcttttgttcttgttttcatactcattcttacaacataatcagaaattggaaattaattaggacaagtgccttacacgaagtttgtacttagtaaatctttttttttttttttttttttagacacagtctcactctgtcacccaggcaggtgttgtggcgcaatctcacaatctcagctcactgcaacctctgcctcctggtttcaagcgattctcctgtctcagcttccctattagctgggattacaggcacatgccaccatgcccggttaatttttgtgtttttagtagagacagggt

SEQ ID NO: 28248 - DNA, 1055 bp, Homo sapiens
taaaatgataggcattttctcttagataaatttaacttttggctgggcacagtggatcacacctgtaatcccagcactttgggaggctgaggcgggcggatcacttgaggtcaagagttcatgaccagcctggccaacatggtgaaacaccctctctattaaaaatacaaaaattaatgatgtggtggcgcataccctgtaatcccagccacttgggagactgcggcaggagaatcgcttgaacccaggaggcagagggtgcagtgagccgagatcacaccactgtactccagcctgggcgacagagtgatatcttatctaaaaaaaaaaaaaaaaaaaaaaaaagaaactttactatttaaaccctttcaatgaatgctttttcattcattaacatgtgtatggaagccatagcgctaaagccaaagataaagctcctttattgtttttattctcctcaataaagcgcatttgtgacaggattagactcatggacaaacttgtggaagcagcagtggtcaaaatcaaaaggtcagccaagtagcaaggactagataggtttattgtccctatgtccctaggaaggcaaggggctcagcccagcaagataaggctaggcattattgtggccacagtgttctcagaggagaatgtctgctcattgccgtggctccaggaccatcctgtgcatagagatgacaacatagcccagggttgggccaaacgggagggcactgtcttggtttgccactgagtcccatcccagctgagccagggagggcctgagaagggcgtgaatcacacatgcagctgtgtgggtggggctttaaagaacactgcggaacatgtgcgaatgacactttggcccaagaagtctcaggactaagaataagtagttgtttaggttatatttactaaagttagttattaaaagttattcactaaacccagtaataaatccttttttttttttttttttttgagactgagttttgccctgttgcccagctggagtgcagtggcacgatcttggctcaccactgcagcctccgcct

SEQ ID NO: 28249 - DNA, 1034 bp, Homo sapiens
cctgtgtctgccacttctactggatacagagccacttagcacatccttctgccgtcaggcagcacagcctcctgtttccattcttcccctgcagctgatgtccagttacccctctgatcctgtatagttccttctccaccaagccctctgcctcccaaccttcccataaactgagtcacgaggagagctgggaagggggatgcagaggggagtggtggggatggtgagctggacagaagcgccctgtgcctctcagcctctcctgcgccaataggtcttctttggcaagttcataatatgtgtatgggttgctggctttaacgccctcttaaaatctctcatttctttctgcagattagcaatgtattttacaatttttctgtttgtttttatgtgacggaaggtattccttgaactatttttggtattaaattatttttcccctcttgatttcttctgaattatttaccaagcttcttgaagatgtaatcttttgcaaacaagaatagttgttgaaaattaagactctgggtttttatttatttatttattcatttgagacagggtcttgctctgttgcccgggctggagtgcgatggcatgctctctgctcactgcaacctccgccttctgggttcaagtgattctcctacctcagcctctcaggtagctgggattacaggcatgcgccaccatgcctggctgactttttgcatttttagtagagacgaggttttgccatgttggtcaagctggtcgaaaactcctgacctcaagtgatctgcccgcctcagcccgccaaagtgctgggattacaggtgcgaaccatcttgcccggcccaacgctctggattttaaaaaagtattacctgtgtttcgacgctttctatatatagaaaccatatctgactgccttttacagcagccagcagagtgttcacaagaccgtcggtaatgaacagaacacaggttttgaaacttttcgatgactggttatggtttaagttgactgttataaatgtgatggtttaact

SEQ ID NO: 28250 - DNA, 1045 bp, Homo sapiens
ctcaaatgatccacccgcctcagcctcccaaagtgctgcgattacaggcgtgagccaccgcgcccagcttgcccatgacattcaaaaatgccactagacattgcccactgtcccttgagaggcaaaatcgcccctggttgagagccactctatagaacttccattatatcagtataggatcttgccaggcagctcagttccgtgtcttggctctgtattctgtaaatgtcagcccttgacttccagaattcttcatttacttgccaaccttatgtttgttaatgttgcagagacgcctggagacgctcagggcagtcccccagagctaaagcggcccagactcgatgaaaacaaaggaggcacggaaagtctggacccttgatgggacctcggcttctgctcgaagcctaccaggctcccggtgtgtgcagggagacggtaaagctggaggtgcctgagaccagggcttccatggagcgggacacactgtaaatggatttctataacagaagtgacatgtgtactgatttttctccagaaatatggatgctgttgtattcagtatccatttttaacttgggacatgaacgttttaacgtagtaaatcctctttttgatgagtttctgaaactggagcggttcaacgttatccagtgtgaaaatcagtgagtcctccctggcatcctcgtgaaagtgcacacacttcatggagggactccttttcaataagaattaggaagatgagaaagtaatttgagattttactctgtcgaattttagagtatttgaagtgattgttagatttcacttctaaggagttgattgattaaactttggaaggtagttgtgtttgttttctgattttaaaggtgacgatgcttattcttttagtaactaagtgaagtgaaaaagatgggtatcacccatcatcttcccaccagaagtaaccctcgttaatgttgtagtatatttccttagcatttttgtggatctatttattctaaaaagagaattgagattttatttcatatgcaatttggtatct

SEQ ID NO: 28251 - DNA, 1026 bp, Homo sapiens
tctcgacctgctgacctcaggtgatccacccgcctcggccccgcaaagtgctgggattacaggcgtgagccaccacgcccaccaaaaaaggtagttcggatctgtgctacaacatgaatgaatcttggacattatgcaacttcatataaatgcagtcacataatatgtggccttttgtatcttttttttttttcatttaacataatgttttcttggaggtccagccacactgcggcatgtatcagaatgcatgtggcgagtatactatctctgtatggctagaccatattgtgttcctccattggtctattgatggacatttgagttgtttcttccttttggctattgtgggtaatgctgctatgaacatttgtgtagaagtgtttgttgagtccctgctttcacctgttttggatatattcctaggagtagaattgtggggtcattattgcattttaattagaaggactctctactctctgaaatgtgttggtgacatcattgtctgtggctttttgaggattcctgtccatcatttcacattttctgaattctccagtttcacctacttgaaggtctcccatagaaccactcatggactccaaggtgcctgttgtgaaggccttgacccctctcacatgctgctcttgttttgcactgaaatactaaataagaggaacagtgctttgccgttgtcgggggctgagggggaaggaggagacagagatggggtgaagctgtcctttttttttttttgagatggagtcctgctttgtcgcccaggctggagtgcaatggcgcaatctgggctcactgcaacctctgcctgcctgcttcaagcgattctcctgcctcagcctctcgagtagctgggattacaggtgcatgccaccacacccggataattttttgtgttttagtagagatggagtttcactatgttgcccaggctagtcttgaactcctgagcccaggcaatccacctgccttggcctcccaaagtgctgggattataggcatgagcca

SEQ ID NO: 28252 - DNA, 1072 bp, Homo sapiens
atttcaattaaaccagaaattagtaagggagggccgagaagacacggctgctcagaagctgttcgctgtttgagggatttcccggagagcctgttaaaagatgcgaagtggtgggtgtaccgctcagccacctttaaaccggctctgtgcgttctggctctggaaagcaagtctccaggcatttgggctcagaattgctgggccccgagtttgggcgggggtggtccttctgggggtcaggccttgagcagcttgcactggtggcaggtttgggagcagttgaggggcttcctgtgtgtcttttggagggggtgaccctggaagttggcactctggaagggagctgtttggccctagagttttggaaagggccctgaacctgttcggtccccctcggaaagggaagggagcagtggcttagtccctccctcctccattcgtgcaatgcctggggtaggggtagacctggagccggtggactcatatccttggaattcgtcaggacagctgctccggggccttggccctcagtcagtctggggctgaggagtagggaagctgggaacttggggcagaggaagaagatgcgtttagaaagacctccattatgcaaactggagtccatttatgcaaactggtcacccttccagtagctccaaagagtggcagtggagtggcatcttgattgatttaacctcttctcaggggacctgggtctgcgagggaggatatggctgcggggttggaataggatctgtctgagctgccagggtcagggtggtggccctagggaggttttagggccagggtggtcccgggctgtggcaggggctctcagatcgcctcgggctctcagctgcaaggtgaaaaataccatgaggaattgatctgccaagggcggtcttgtctcaaagcaagtggattgctggggtaaagaatctagagaccagcttaggactctgggaggaagaaaaaaaaaaaaagaatagcatagtcctaaggaactgcaaggatcaccagattaacccttcatacctggggaaattaaggccagacatgacacaggcctttc

SEQ ID NO: 28253 - DNA, 1601 bp, Homo sapiens
cttcctcacccccacccctccggcaggaaaccacaggctgggttggggacccctggtgctccaagagagcagtgagtgctgggagccgctaaccccgaggcgcctagcacagactcttctcaccccttatttctgaaataaagcccttccttaggtccagatgaggaccacgtgctcagtgcctcactttcgtgggagtgtatatcactttacagtatcaagacaattttctttcgttacaaatctttatttagtctctgcgtttagaccaaagtagatttttatgggctgagtgaaaaaacctcgcccgcattggtttctgatggaacagctggcagcgccacggccccgggtggggtggcctagaggcaggggtgcttgggaggaacatctagcacccgaccacctccaccaggtgggaaagggacgtttgcaccaaatctccgccggcaaagcagaggctttggggaattacagaaaaactataatgatctaaaagagaacaagttatcttgaactgtgcgggtatttgaatcatacagaaaattgtcctgtgtgcccaatgcacttttgcatgtagagccagggccttcgaggaagctttcaggagatcccgggcagcggagtctggtctggagtttcatttccgtaggtgcagatttctccccaagtcttcccgccatgggctttgcaagaagccagggcccagaggccacgctcaccgttaacactgcacagggcaaaggtggctccaggacaactgcccaaccccaggaacgacccagcagcagagaaaaggacagctgccagggtgcctttgtcgctttttggaaatcagaattcctgggtccttagttaagtcttacttcaccaaatcccaggaccttcacattttggttcttgccattgctaacagttgtaaatgctgccgccacgaggcctgggaggaaggacccgctggtgagagcacagggagtgctgctgtgatcacggtggtgatgcggggtgagcgcgatttcccgggattaaaaagccaccgctgcccccgtggtggaggctgggggcccccgaataatgagctgtgattgtattcccgggatcgtgtatgtggaaattagccacctcctcagccaggataagcccctaattccttgagcccaggaggagaaattaaaggtcatccctttttaaattgaggaatagtggttttttttaacttttttttttttaggtttttagttgccgaatagggaagggtttgcgaagccgctgccctgggccgaggtgcattttacgcttccagaggtcgaggcctccagagaccgcgatgcccagggcgttcccggggaggctgagagacccagggtgctctgggtgactgcacggcgactcctcgggaacccactcgtggctgcccgcttggaagggctttgcggccccgggaacgatctccaggatctccacggctggtcaggttccccgtccctcgtatcccgcgctgcccgggggctcctgcctttggttcagtgctcgcggcaccaccgcactcaggacggcagtggggggctggggctggggctgggcctggcccagcgtgggtt

SEQ ID NO: 28254 - DNA, 1542 bp, Homo sapiens
aatttctgatgaataacgatagtagtaatagctgatacatgctgctcttttgtgttccaaaaactttcaattaccttcaatgacattatcttattaagtaaagatgtctttcatgttgattcagtgttaaactttatgttaaaagatcatagagaatgtaagcccctagatctgctataattgtgtggaaattcactacaaagtgattttttgttttgttttgtttttggtctaacctctactaaatgactatccaaattctttatttgagggtatggaaatgattctttatgggttataagcccatccccattccaagtcttttattaagccttatttgaacaagtgttgaaataaatctgcttcgtatggcagagctaaaattttagttttttttttgtttacactagtaaacaagtgattgttgctgccaaactttggtactaaaacaatgacagagacaaccataaaatgccagttgtctcctcagcccagggtccaagtgttaggcagtagagaggcaggctttcagcctgaaaactcccgttggtgggcacactcgcacacgtgtccacacacaaagcatctagacaagtttctatctacgtggatgaggtagagttggggcagcaatgtttttccatgcgtgtttactaaatgatttagttccatgtgctgttttggttaatgcaattattttacttttatttagggaggaggaagaaaaatccccgtgtaaaaatgtagctgctgtatacatttttaagtatccttgggttaagtttcctcaccaacatttcacacagttatatagcatctaggtaactagtatacatgttcaaataaatatacgtatgtaagaaatagctatttatgagacacataaaagaatgtcttatttgagattgtggccagaaacaaccataaacatatcgatgatgttgtttggaggtacaagacctaatcctttcacttttgaaataaagacaaaagacaacataattatgtttgttgacataacttgaaccctgaaacccaaaccatcttgttttaaaatccttaatttaccatactcagcaaaacaccccagagtaacgtgcattttcagagtgccaaacaactctccccttccacacagaatatatgcatttagtgctgtatttatcatgtgtaggtttcttggcaagaagaaaagctattcagcaaaacataaaaaagctcttagtaggaaagctatccattttgtagttagcagggttttgcaaatactaaaatatcacatggaaggtctgttttaataaggctgatgcatgagacccagggagttttatagcgacaaccataattttttttttttttgtgaggtagtcacatttctctcagtgttcaaaagcgtggatagatacgtaaatacaggaaacaccatgtcaaccataattttgacttaaggtcaggactgttttatcattccaaaatttgttctgtaaagacatttccgttatttgaaggctgtttcacttcctagacagctctggagttttc

SEQ ID NO: 28255 - DNA, 1059 bp, Homo sapiens
accctggctggagtgcagtggcacaatctcggctcactgcaacccccgcctccagggctcaagtgatcctcccacctcagcctcccaagtagctggagactataggcatgcaccaccatgcccggataatttttgtattttttgtagagaaggggtttcgccatgtcaccaaggctggtctcgaactcctggactcaagcaatcccccgacctcggcctcccaaagtgctgagatggcaagactgagccactgcttccagctgttatgttgtttcctaagaagcacagctctccacttctcctaagcaatgaaccggtgcctgtcagcacattgggccgcacagtggagtagaggctgggctgggagatattctagcatgtttgagaaaatgagccaggaggagtgggctccagcccaaccccagtggccagtggctgaccctgccctctccactcccaggtcatccactgcagtggctacttgaagatcaggcagtatatgctggacatgtccctgtacgactcctgctaccagattgtggggctggtggccgtgggccagtcgctgccacccagtgccatcaccgagatcaagctgtacagtaacatgttcatgttcagggccagccttgacctgaagctgatattcctggattccaggtgagttcggcacctgccacagtggctgtggccttctggaagacaccggtggtggaaatgggtccctgaaagctgccatcttggccaaatcataacaaggaataagtcataataggaatgtggattaagcaaaaccaatttatgaactgaaagaacatatgtcagccttaggactcaagggcttgttttactttatttacttattgatttacttattttatttacttattgattacttattttatttacttattgattacttgttttattttatttacttatttgaatcactagagtttgaaatgaaaacatgggctgtgagcacaggttgggcttttttgaaggccatgatgtcagagctctgcctcctgcgtccaaggaggactttagaacaaacag

SEQ ID NO: 28256 - DNA, 1026 bp, Homo sapiens
tcaacatttcccgcctgagccttttagcacttgattagttggcaaaaccaatattagtttaaatgaaaggcagtctgcagagtggcgtaactcactgagctgccatgcccccacagggtgaccgaggtgacggggtacgagccgcaggacctgatcgagaagaccctataccatcacgtgcacggctgcgacgtgttccacctccgctacgcacaccacctccgtgagtagcacgcccaccccagccacgggaggtagctggtcagggaggaggcgctgaggacagagccgggggacgtgtcccttttgttggtgcaataatcatccatgatacacacttgaatctcaagccccaagtgtggcttcctccaccccgtgattaagtacggctgcctgttgtcggttctcaagcagccacgcgcaccctttcagggagactctagcaggtgtaggatcaggaagttgcctggattctagattgtggatgtggaacctaaactctgtgatctggacaccatttgcgaataacagcaacagtggaagactgctagttatggagctcttactgctgtcgggcactaagtttaagtgactaaatacattaccagcccagtgagggagggtctcactgtcatgatcctcattttaccagtgaggatgctgaggtccagataggttaagccgcttgcccaccttcatacagctggatggtagcggagttggaagctgaacccacgcagagccctgcctccgactgctataccccagccagctaggggaagcccagggaggccaccattccacgatgggagaggtcatcttgggacggggtgaacaaacaccaatttgatttgccaacggaggcggtttgggaacatcaggatatagaggcggatgctctagtcactgaaatgtttaaagaagtgacacttttcttttacttttttaaaatctaaaaaaaaaaatctttttgagacagagtcttgttctgttgcccaggctggagtgcagtggcatgaacttggc

SEQ ID NO: 28257 - DNA, 1146 bp, Homo sapiens
caggcgcccgccagcaagcctggctaattttttttgtatttttagtagagacggggtttcaccgtgttagccaggatggtctcaatctcctgacctcgtgatccgcccgcctcggcctcccatagtgctgggattacaggcgtgagccaccatgcccggcccgaagcagggatttttttccccatttgctttggaacagtcatgaagcccacagtggtgctcagtcagtgcctcctctgtgtccatcatgggtagatgctttcacttatagactctgacctgcgggcagtttggggagctgtgtccctctcgtgcccttttcccaggtgatcagggtgagactcaggggacacttgtccaagggcagcagtggagctggggcaggaccaaagtccagcccattggctgtcgtgctgtcagccgtcaccaccacaccacaccacaccacggggcttaaccttggagatgtgggctggtggctgttctgtaggatcccagccctcctgagcttgcctggctcaccagacccacaaggtgattttatttgaggggtcttctgtggtttatatgatgaagccactttatctcacaggaagtttccagatattgaagttgtccaaggggactctgaaagggcaagcaggcacaggctcaaaaaggtaggcgtgtttagaaattagacggggcatggctttcttttccaaatgagccagaattggtaattcaaagaaaacagaaaatagcaagattgacagtgattgctactgtcctgtgactctgaccttagctgtgctagagaaacaaccagaaaagactgcaccccagccaggccggtgggttggtgtggtcttggagttcaccatgagtgtgcctgcctcagtttcccctggcagctttgagagggaggggaagcaaggatagtctcagatgatggggagttctttggttccagcgtgggaaccacctgcagggctgagcagcagcctcccctcagagcactcaactggaatgtcacacgcctctccaaagctagaactctctgggaagacagtcaactcccaagcagggtcttcagagtcggggtcttcatggtatggagctttgtgattgtggaggcctcactctccttcccaggtacagaacctg

SEQ ID NO: 28258 - DNA, 1050 bp, Homo sapiens
ggcacccactcatttgtttttggactctgtggatgtgcctattctggaagtttcatgtaaagggaatcatacaatgtttgtttctattttaatgtctgttgatctgatggatggatctgcctttgagttaaacaagggagttgggcatttgttcatcattttgcccattatatttattctttgatctttgcctatattgcttttagggtctttgtgtttttatcaatctgtacgaaccccctatatattaaggtgaataactccgtgcagcattttcttttgcaccaaaatattttgatgtggatgagaaagagccatctgcaaggtgaaaaggaaccgtaaagggccacagacagcccaggagtgtttgggcagagactgggggctttgcccagcggtatgacaggaaggctgaatttttgttgcatatgagcctcaaaggctgaatttttgttggaaatgcaccttggggagtttccttcagccccagctggtacagtcacagactcagcccctttggccacctccccagatctctgctcaggcagctgctagttaggtccaggggccagtcctgccttgagaagcaggaatgttctggagctgaggacccagacatccaagggtgtctttctagacttgtgctatcctcctcttccctggagaagcttcacctctccactgcccacctgcgggttctggcactttcctcccccacctgcctcctggaaggcggtgaggtggaattgtggtttatgggtgcaccgagcctttggctgagctgcttagcggcctggagtttgcacccaagcatagaagacaggcccataggcccaattttcaggaactctgcagccaagtagaggtctttcctacataaacaacatagcaaattaatgggcccaaggaaaactgggattaatgggaagaaaatataaatggcaacaaacagtttcactgtgaataccctcatgttcctgaacagcaaacatcagcaacagcttgacacttggttgaatgcacttaactgactactttgtgtaaataact

SEQ ID NO: 28259 - DNA, 1033 bp, Homo sapiens
gttacaaattaatcatggtgaatatttggtcctttaaacactccagaaggtcaagttcagtcgcaaatgcctttttttttttgtaaattaaaaaaaaatatgtttttgtagagacggggttttgctatgttgcccaggagctggtctcgaactcctggcttcaagtgatcctcccacctcggcctcccaaagtgctggaattacaggcatgagccacggtgcccagcctgcaaatacttttaaggccattagaagcaataggacagatgtctatctggggccatatattactttccacccaccatagctattgtacgttcaatcaccttgctccaggctgtgacccttgccatgccgccagccccatgatgaaaagagttctcgtttgcactttacatggggtgaggatttaggctctaggtttgttcatagaatgactgtgtcttagaagtcaagtgattctgacaaaactgtcagggagaaaacagtttagccctttagttattcttcctgagcaaatgtgtgggctggttctccaggtcgacctctccttgtgtgaacatgaccctgctgagttggttctttagggcagagatgggcccccgatgtgagaatgcacaaagctggtggtcaggctcccagacctgtgaagagtcccggactcttgcctcctggggtgctaactggagaggcagctgggccacaggtgtgcatgttggatgcaggtggacctgatcaatggtatttctgcctgtctctttttcccttggtggctttcctcatggcccacgacctccccgagcaatgtgtttggggttttattggactggagagagctctgacctggctcagcatttcctggggtggcccagcctggggctgcagatggcttttataatgagggtgagctggccttgtctcaaatcccatccacatccaatcccagtgaaaagacacactggagcactgagaacgccctgcccaagggctggggccagggaagctgctcggcctccagcgcctgctggacatg

SEQ ID NO: 28260 - DNA, 1147 bp, Homo sapiens
ccaactgctctcaaaatgtgaactgacttttttttttttttttttgccaaccctgtgtcacttagtgaggacctgacacaatccctacagggtgtctgtcagtgggcctcatggtaagagtcacaatttgcaaatttaggaccgtgggtcatgcagcgaaggggctggatggtaggaagggatgtgcccgcctctccacgcactcagctatacctcattcacagctccttgtgagtgtgtgcacaggaaataagccgagggtattatttttttatgttcatgagtcttgtaattaaaccgtgattcttgaaaggtgtaggtttgattactaggagataccaccgacatttttcaataaagtactgcaaaatgcttttgtgtctaccttgttattaacttttggggctgtatttagtaaaaataaatcaaggctatcggagcagttcaataacaaaggttactgttgagaaaaaagaccctatcatagatttacaagtgacaacgtggacaggcgtaacagagtgtgtatgtacttgaaaatgtgtactagtgaaaacgtccttgtctaaacaaacttcgttttcataacctagaacatgaaggaagattcttacacgagctggcttcaggacggccagggctgagtgtgaagtcagcagagctgttactgtggcaacctaatattgtgacctccatcttgaagagtctgcacatttaagctggggatagcgtttcttgacttctgtgaggctccggcaggggaagaggaagcattttaatacatatgcctctcttttacaaaaaagaaaaaaaaatcatcgtaggccctaacatgtaccatgttgacaaaaatgccagatcaaatggatttgagaaataagcccaattcaaggctggctcagccctccacggggcctcccagggaaaggaattcctttatgttcttggaagcccttttctagaaaagccattccattcatacctttgtagagcagtgggctgggtgtggagggcagcgcggagggtatctgcaagagcctgtattttccgcctcccttgcccccactccttttatccttttaaaagtcctatcagccctgccttcgtcccttccgccctaagccctaagagtgggggaggtttaata

SEQ ID NO: 28261 - DNA, 1040 bp, Homo sapiens
cggggggtgtgcaccggggtcaggggacgccggggctgcacccggagagggggctcgagggagtggaggccggggtgcggggccgcgccagggctgaggagtgggatgggtatgttgtggatgcgggggaggggaggctccagtggctgcccgacctgtttaagccaagtccggcctcccttccttggaggggtgggaggcggattgaggagggggctctgcctatgttcatagctgccaaggccaacctttactaaccagcagcacaccgggagtcccagagcgctccacagccgctacccagtcgacttgggaaaataagataaggccgtttttattaaattatactaagccttcatgcaaaagattttaaggtcaatcacatacattcacgggatgcaataatgtttttttaaataaggacaggaaacagaaattgaagacagataagcaccaagaaggctgcctctaaaaaggctgtgccaggaaggctccctatggtgttcttgctacatgtgggtcaacagtttgactgtaagcatcctaacaccagtgggaaaaggaaaacatcaccatgatttggtgttcttgtctccaagggaagcataattagtcctgacacagaggcttctcccatagaacctcatttctttaaaaggcattatgtaaagaacgtgttctgaacagctgcgaagcacagcaaagaattccatccagtggcttcctattctggccctcgctgaaaataggtggcaagatgcagcaaaagcaatcatgtacaccacgtccatgtcttaatctaaggatagtttttgtttgtttgtttttgagacagtctctctctgtcacccaggctggagtgcagtggtgcaatctcggctcactgcaagctctgcctcctgggttcaagcgattctcctgcctcagcctcccgagtagctgggattacaggtgcccgtcaccatgcctggctaacttttgtatttttagtagagacagggtttcaccacgttggccagggtggtctcgaactcctgacc

SEQ ID NO: 28262 - DNA, 2602 bp, Homo sapiens
caaaaccccctcagttgcagagacctttcaaaatatatgcactctcctactgggcgatgcggtccttaggcgttcttgatgatatttaatggtttatagagtattttatggcattcacctaaatctctttccattttgcccaagatcctggcgagggaaacaaggtagaaattttacagattttactcctccggagagagccttttccttataactacgactctagttaggacattttttgttgcaagaaatttgcgatttatcctaaggaaaatgggatatagtataaggatacctagggtaagaaacttcaaaccccttagagacccagctactgctccgattgctcaaggtttcgtgctctgcgctcaagggctgcgttttggtgtctttgttctgcccaattttcttattgtctaattttcctttttttcttttaatttttggaatatttcagatatcaaatacagagggggagctaaccaatccatgattcagattttacagacgtgattatttaatcttttgccaaatttacttcagatactctttttttttaaagaaataaaattgctctcagttccttcccctccttttctagagatagccactgcgttgaggtttgtgtatatctttactttgcatattttatactttgatcaaggtgaatccatacacaatatatattattgtttgtttttaaactttaatggcattaaaatatacatgcctttttgcaacttgctttttttttttttgctcagcatcatattttgaggtttatatatgaacaaattgaatgattgtgttatctttggttcattcattttaattgctggtatagaattgcgttgtatgaatataccatatttatttatacattcccctgttgatagactttgaacttgtttcagtttttgactcttaaaaacagtcctgcaataaatatctttgtacttgtctgcttgtgcacacatttggaagtttctgtaggaagtacacctaagtagtagatttgccggattgtaggctatgtgcgtcttcaatttaaccaagtatcacagaagctctcgaagtggttgtaccaattttcactgtcactggtgttgagtgagaacacaatttcctcacaaccctgctaacactttatgttatgagactttacatttttgccatctctttactgaccagcttccttatgacttttggttgctgctaaatttgcttgtagccaccttggcttctcttgtagccctgtgtcagcctatggatttatctcttatagctaattggcttagtctttatctcctttggttctcataagattaattccaatgaacatttgttgtatacctaatgtatgtcagatcctatgattgatgtatagatagaatttccatgatatgttaaatatgtacctctttagtggcaggtgaggtgatttaattaaaagtattttttttcttatgatgaatgtttaaaaaatttttcttttcctctccattttattgtagtatttgataaattcaaaatatatgtaaaacatatgcaagctgtatagcagaacaataaaatgaacacctatgaattcaccactcaatccaataatcaaaatgaccagtattgaatgtgcttacttccagaggtgactaccatcctgaattgtgtatattatgccttgtttttaaaaataattttatcagatatgtatacatccctcaaaaatgtattgtatggtttctgttgtttttgagtggaaaaaatcatattgggtatagtttcctgggacttgcttatttcacttgatgttatgtttctgagttactaatattgggtatagatgtaagtcattaattttcactgctgtgtaatattccaagtgtgaatataacacagtgtatgcattcttctgttaatgggcattttggttgtttctaggttttgctgttatgaagttatatactttttggttcacagttgtaagaatttttctaattttcacactggggtatatgagccccagaggagtaatgaagatttgctaaggaatgtgtgggtacaaatgatgttaatgaatcagtttctagatcattacattccataggtactctttcctaaaaatggtaatgcctgaggcctcctgctagtgctactttcttaccttgtgtttctaacattgcactttacataagacaggcaaaccacaggttcttgtggaatcttactatggcattgcccaaagggggaaaactcccttggggaaaacaaagggattttttttttttttttttttttttttgagtgaagttttgctctttttgcccaggctggagtgcaatggcacgatctcggctcactgcaacctctgcctcccaagttcaagtgattctcttgcctcagcctctgagtagctgggattacaggcgcgcaccaccacacccggctaattttgtatttttagtagagacgggatttcaccatgttggctaggcacgtcttgaactcctgacctcaggtgatctgcccgactcggcctcccaaagtgctgggattacaggccaccgcgcctggcctacaaagggataatttaaaataccactat

SEQ ID NO: 28263 - DNA, 1399 bp, Homo sapiens
agaatcgaaatctttaagattttgatcctttttatttttaagaatatggtatgtatctctatttatgtaaagttttagtgtagttttgtaatattctccatagaggtcttccactttttcatatgttaattctgatgttattgtttttgttgctattataaatggtggtgttcttaaagattctatcttaacttatttattgttagtaaatattttaacttattgttaaatagaaatttaatgaatttttaaaaatattgaccctttagtcatccacttgataaacttactacttctaatattttttctgaaattcctttgtgttttctgtgtggataattatatcatttgcaaatagtgacagttttagttcttctagttatttttgcttttaatttattcatttttttggtcttaaatgtgctggcatactttatacttacgttcaatggaagtgattagggttgttcattagaagcgattatagtgggcatagagttcttgttctcaattttaaagagaatatttctcagctgagaataacatttgctgtgaatttttgtagatacctttgattaagttagggaagtcttttcagttgtcacatgcttttctgcatttgttgagaatatcttgtgtcttttcttctttaatctgttaaatgtaatgaattccgttttatagatttaaaactgttcattttcttttatattctttcttgagataaacccaaattggtctttatagattatatttttatgaactactagattgagtttgctcatattttatttagatttttgtgtctgtttatggctagaatcacttctcatttttctttattggctgtcttatctgacttgggtattaaagttacactgactttataccatgagttagagaatagttcctctttttctgttccctgggagagtttggattggagtgatttgtttcttaaaagcttggtggaacttaactataaggtcatttggatctaatgttttcttcttggaggtttagtagtaattagcagttgaacagtcataggactgttcaggtattctatttcttttagtcagttttggtaagttttagaaatttgtcctttcatcaagtttatggtatggttttttttttttttttttttttttttttttttttaagatagagtctccctctgttgcccaggctggagtagtgcagtggtgccatctcattgcaacctctgcctcctgagttcaagcgattctcctgcctcagcctcctgagtagctgggattacagccgtgcgccaccatgcttggctgatttttttgtatttttagtagagacggagtttcaccatgttggccaggctcttcacaaactcctgacctcaagtggtctgcccacctcg

SEQ ID NO: 28264 - DNA, 1052 bp, Homo sapiens
ttaattttggtttatcctatcattaactgagagaagtgtgttgcaatattccaccattactagtttctaacagatttcctgtagttctaacaatttttgttcttctgtattttgagacttttattagctacatgcaagcttaacatttttttcctagtggctcgaacctttactatattgtgatcttctctaagtttgcttctttgtcttagaggctttttgtctgatcccgtctttcttttggtgctaatttacctggaatattcttttctttcattttactttgattttttttagtgtccttacattttaagtgtctcttataagggacatactactggatttttcttttaatctcaccagacaacttctgtcttttaattggttatgttccaggtgtcttggttggtgtttgactcagttttagatattaaaaaaaatctaaaagtatttttattttacctttgttcttgacagatcattttgatggatgtacaattgtaggttggtgtttcttttctgtcagtagggtaggaatactattctgctgttgcttatacaaagtgtgctgccagttttatttatgcctttttttttttttttttttttttttttgaggtggagtcttgctgtgttgttaggctggagtgcagtggcgccatcttggctcattgcaacctccgcctcctggattcaagcgattctcctgcctcagactcccaagtagctgggactacaggcacctgccaccatgcctggccaatttttgtatttttagtagagatggggtttcaccatgttggccaggatggtcttgatctcttgacctcgtgatctgtccgcctcagcctcccaaagtgctgggattacaggcgtgagccactgcacccagcctatttatgcgttttttgaagaaaatatcatttttcttttagttacattggattttctgtcttttgtgttacatcatttcacttctaagtctagatagagattatatttatcctattttggatgcatgtgtttcatgattctgcattttgtctttcatg

SEQ ID NO: 28265 - DNA, 1045 bp, Homo sapiens
ttaattactttttttttttttttttaagatggagtctctctctgtcgcccaggctggagtgcagaggcgcgatctcagctcactgcaagctccgcctcccgggttcacgccattctcctgcctcagcctcccgagtagctgggactacaggcgcccgccaccacgcccggctaatttttttgtatttttagtagagacggggtttcaccgtgttacccaggatggtctcgatctcctgacctcgtcatctgctcacgttggcctcccagagtgctgggattacaggcatgagccaccatgcccggccgcatttttaatttctaaaagttctgcctggttcttttttgatatgtccagtcattcttcatgttctcatgttatatgctgatttttgtgactctatagctattctgtagactatatcagacattcccaatgtctgatatccttgaggagggggatgtctaaatttattgcttttttgtttttttttctgttgtctctcctcaatgtagctgtcacctcatgtgtttggtgatcattgattatgaacttctgtttgatctttgtggtgatcttgagagtctaatttgaggatgcttgctttctgaaagcatttctatcagctttgtctgggagccagaaagtttagctggcatcacttttgagttcctacattttgcttctggcccagggctcagtgtcctgatcctattactgctcttggcaccactacttgtagcactaaactgtagccaggtttaatttctagctcaaggtttgttgcttttgcgtggagagggtgccttcacatgttcccctatttctatgagctcagcaaaaacatccaaaaagtgtttttttttttaatctaggatatacctttttcctcccaacagtacattcccccagagtgtatagttgaccataactgatgggatcagaagctctttattttaatatttaattttagtagtatatttttgtttgattgtattataaaaaattttatggtaccaagcaagctttcttggtgataccaaca

SEQ ID NO: 28266 - DNA, 1027 bp, Homo sapiens
ttgagtattaagaactaatagacattaggtggttgcagaataagttttgtttaggaaggacaagcagttgggtatgactggcttctaggttgtgtgttgtggagtgactggggataaaagcaggagcaagatcacaaaaggtcttctatgcttatattagggaagttggactttattctcaagctgaagggaagctgttgcatggttttaagcagtaaagtgatatgatcagagttttagaggatgccaagattgaaggcaagtctgaccagttaggagactgcttgttaaattagttcagaggagaaacagtgaaggcagtggcactgggcatgaagaagtatatgtgtgctaattttagatttcttagggaagcagaaatgacaagagttagtggtccattggacagaaatattgaaggagactggggagtctaggttgactcccagggtttaggtttgggcagtaaaatgacatgtagaacaattaactgataaacagcatacagaaagaggaaagaacttcatttcatatgtttgtttttgaggaaaagatgtttgtttttgaacttcctgattcagaggggcttgtgggacatcttggttaagatcctgtagtagttctagtagggtctagaagtcaagagatacaaccccgcctggaaggatttgggagtcttcagcatttggaattttggaagccattgtttactgcagtgcatatgagataatttaaactggtacatagataaacacttgaaaaaattttaatagataggaatttaatgtgtatgagaaacataacttgcacatctaacctttgataatcatggacattatcacttaggccaagtgagctcaataaaagggaaatattaactaaaaatatatgtgatacatggaaatggcaaaaatcacggtgaagctatgcaaacgatgcaagttcagaaagtgctgtgttaagtcatgggtgtggtggataaattcacccaaggagagagtaagagtgagaagaaaagagagttgac

SEQ ID NO: 28267 - DNA, 1033 bp, Homo sapiens
cccccctaaatttctggaagactagagatataaagcactgtatgtttctgtgagaatttcacaaattcttgtgtgtgtgtgtgtgtgtgtgtgtgtgtgtgtgttggtttggtgaattattcctcactctgccctctggtgtgtgctctttatttttacttagagccactgaatttgcttttgaagaaaacatttacttttttcagtcttctttggggtataccccctttttaaaaaaacagtaacaaatgcacatggtaagcaacagagtaggaaaaggtacactcgccagctctgacccatcctctgattcatctcttcagatccttgtgtattcccataatattttatgcctatacaagcatttatgttgaaccagatgaaattgccatttttgtaagtcagaatataggcagttttatttggtttaatgtaatgtatatgtctttttctttaaatgggtaggaacatactacatacactgttgtacatcttgcttttttttttacatttaagtcttggagcttgttttggatctgtatatagagacctaccttgttcttcatggctgcacagtgttttactgaatggattgcctatgtaatccattagtttgtattatattagtatatagtttatatatatatattagtttatattagtatatagattattttatttacaatgttaaattatagatatattagtatgtagatttccattttaaagattatatatacctatgcaatgattatctttttacttatgttttacactcaggttcaaatatatctgtaggacacatttctgataaatttattttactcatgatatatgaatgaaagaacatatcattttaattacagacactttttatttaaaatgtatgtttattcagtccgtggttattactcactgcatatttgtcagtgactgaccattatacctgaatcttgcttttgttccttagttggaagatctggaaacttggggaatagttgttatttctttattgatctggtcatatcctgaa

SEQ ID NO: 28268 - DNA, 1035 bp, Homo sapiens
ttgcattcatatactaattgtgatatttataatatatgctattataacgctgtttgtagtgctatatattataagtaatgttcagcattgattcaacaaatattggggttctgttgatggataatgtcagaaatgagcaaaaacagcctctgtgtttcagacagtgggctggcattgtgagggccttgtagtgggaaggaatttgttgcatttgtggaactgatagttgctagatggcctgaatacagaggagagggtagtatgttcataggctaagccaaggagggccttgtaggctgtgttaaggcttttggcctttaagagcaataagaaagtaaaggattttaaactgaggagagagagcatgattagcacttaaaaaaaaaatttgagcatagtgaaaatggatctgaaggggatgtagtgtggatgtaggttaggaggctgttgcagtagcccaggccagagatgatggcttccagcagaatattgacagtgggaatggaaaagtagaaggattcaagagtttagaggtgaagctgacagaagttgctcgtggttggtgttggaacttgagagtgaaggtggttggaactgttctgacgtttctgccttaagcagcatcatggattatgggcctactcactcacattgggattgctggaagaggaataaatttgtaggaggtagaactggacttcactctcggacactgaatcgaagtgcctttgaaggccaggcatggtgactcacgcctgtaatcccagcactttgggaggccgaggtgggaggatcaccagaggtcaggagttcgagaccagcctggccaacatggtgaaaccctttctctactacaactacaaaaattagctgggcgtggtggtaggtgcttctaatctcagttactcgggaggctgaggcaggagaattgcttgaacgtgggaggcggaggttgcagtgagccaaagtagcgccattgcgctccagcctcggcgacgagcaaaactccgtctcaaaaaaaaaaaaaaaaaaaaa

SEQ ID NO: 28269 - DNA, 1032 bp, Homo sapiens
aacacttggccaaaggtaggtttcttctgtattttatattgagcaaataatgccatacaacattgtgaaaaatctgtttatagggtgtgtttgttcataaaaatgctatatgaaattacgtagagctccagaatgtgaaaggggagtcatcagatccatgatcagcgtggggacccagccacagcactgacaggctgtgcgtgaggacaggtggcctgtgggcatcttgagtcttcagggtgccttagtgattgagaggtcatctctgcgtattctgggtgggtgtgcctgaatgtgaaaaatgacttaaaactggggaggaagtataggaggctgtctttataggaggcaggaaaagatttcttaacacacagtgcacaaatcagcagtgaagacaaccatcttgatatatttggctatatcgaacttaaaaacttgtgtatgtcaaaaggcaccatagatgaaatagtagtttgagaggagataatttgccacatatataactggtaggatttacagctggaatatgcacataattcctaaagtaaataagaaaccccgtagaaaatgggccagtaaaacaagtaagcatttcacagaagagtaatcctgaatggccaatagaaataagaaactatttcggtaggggtggagccaagatggctgaataggaacagctccagtctacagctcccagcgtgagcgacacagaagacaggtgatttctgcatttccaactgaggtactgggttcatctcactggggagtgctggacagtgggtgcaggacagtgagtgcagcgcaccatgtgtgagctgaagcagggtgaggcatggcctcaccggggaagcgcaaggggtcagggaattccctttcctagtcaaagaaaggggtgacagatggcacctggaaaattgggtcacttccaccctaatactgcgcttttccaatgggcttatcaaacggcacaccaggagattatatcccgcacctggctcggagggtcctacgcccatggagcctcgctcattg

SEQ ID NO: 28270 - DNA, 1056 bp, Homo sapiens
aaaataaaaataaataaatttttttttaagtggagctttaaataagatatagaaaggcacatgtatttcatacttcattcctggttttacgtaatttaaaaaaagctagtgcaagtagaatcagaatttgaaggccttagggaatttagtctaatttgatacttccattactgctctgcggatagccttcattagattaattgtaggagtttattttgtttaatttttttaaatgaactttatattataaatatcacatgattaaagagaaaaatagaatatagcaaggtataaagtaaaagggaaaagtcagcctggagaccttgtttaaaagacagatttcttcgcttttcccccaaattgtgattcaggtggcctaggaatgtatctaggagtgtggagattgtaaaattccccaggtggacttctgcatccagattttagaatcattttttaaatgccttattttacacatgaagcaattgagtcccagagaggtagagtgatttttgcaaggtgtcattgcaaataaaagacaaaactggtggttctgtttgagggtgaccagtttgttggtattttcattatgagtcattcttttgcttgaaacaaaatctttgctgatccttgaacctggtgtttgacaggtgctatatcaatatttgtaaaatgaatgaatgaatgatagaattccaaatactgaaacccaaaccatgatactggttttccagaaatacttcctgctattttaatatattatcaattaagaaaaacagttattaaaactttttgaagacctggcgctcactcctgtaatcccagcactttgggagggcaggacgggcagatcccttgagttcaagaccagcctgagcaacatggcaaaaccatatctttacaaaaaattagttgggcatggtggcatgtgcctataatcccagctacttgggaggctaaggtgggataatcacctgagcccaggaagtatgaggctgcagcgagctatgattgcgccacttcaaaaaaaaaaaaaaaaaagaaaaaagaaaaaaactt

SEQ ID NO: 28271 - DNA, 1097 bp, Homo sapiens
gttgtagattttcattctctccttgttttctctcctaagtctttttgctttctccaatgcctgaaagtcccttagtctacatttttagtgtatgagtctttcctgctttttcttcttcgggttgtacaaagctgagctgaacagctctgtttgaccggcagatgttgttatccatcataacatgattatgtaataagatggtgagctccttgaagacaggtgccacctttgattcagatttacatattgctgtcatcttgtcaatgatcacatgtgatggaatgtcagacaaagtttgtgtaacattttgttgacaccatcctaaaactaaagacatctagaaatgtaaaattgcttagatttacttttcagttttctaaatttgaggtccttactatcagcttaaagtaaatttgaaatcttttaaagtctgtgttgccaatccattgattactatgtgtgtgtgtgtgtgatgacttttataggtcgaacagcaaataaggatccaattaaagccttttatgaaaacaggtaagttaatagcaggtcagtagctgctactactaggaatggctttgctgcatgaatttaagaatcacttatgtttgacgctttaggagctaatagcaaccacagtaaagttggagatggaaggaagagaggtagttttttaagtgtccgtgttatcaggtgacctgtaagttgtcagatttatttcgctgttttagtgaaccatatagatataagctcagtagcctaatcctgtgggaaaagaggggtgaaatgttaattggacattactatgcttggatgggaccagtttggccatgaaactcctggcagcacagagctaggacatagcctgtgccctgtgcccttcacctctgtcttggaagtatctatggcaaaaaccacaattacttttgcaccaacctaatatttccagcttcctgatgtctttcaaaggctaagatacttcctattagaaataggcaacagatagacttgagtatgctcacaagaaagcaatagcagccagggttctacctttacttatttggcaattaaaacagattaaatgtttttctgcattcttg

SEQ ID NO: 28272 - DNA, 1050 bp, Homo sapiens
gactgtgacaacgtcattggaatggcattccttccaagggattagcacttaataggatctatgttatggtgtgtttacaccataattagccttttttaaaaaacaaaaacaaaaacacgatttgactctttttagtattagccagcacacgccaggcccttagtgcgtactagtaaatgcttataggttgattgtctgatgtgttcagcaggattggtttggttgtgtctctgactatccatatgatcagaaatttatataattcctaagaaagtgaaacacagaggtataattttgccacaggaatttggggatatgcagttgttattttaatattataaaaaaaatcaacctttagataaaatttatttcagtatttctctttgtatgtaagtgatcattgttttcactgctattcaaggaattatctgaagccgaaaaccagtttaagaggattattgaacactaccccagtgagggccttgattgcttggcctactgtggaattggaaaagtatatttgaaaaaaaacaggttagtagaaatgacactactttaagctctaggctggtaactcatttaaaatccaatgtgataatgatccattttctagaattattttgatatctcctctgtagcacactatcataattgtgatttactttgaggacctgaaatttcactatcagtattaattgttaaagcaaggccagtcattgcagttcttggtacttcctgattttaaatctaataagtcaacaatatagtaatttgacattaaagatttaatagtctagtgtataatcatctatagatagtgagtgaattgatataaactaatgtttttaaaatctgattgtttaatttttttgatttaattattttttaaaaatctgtatgaagatggttttaaataagaggtatatatgtgttcaaagacatcatgagtgagttaggaatataaaagtctgtcctctgaactctattgtagttgtaatccttacctgcagtttaatattgaagctgttctctaaatgcctcatgtctctt

SEQ ID NO: 28273 - DNA, 1048 bp, Homo sapiens
gataacatgctgcagcatggatggaccttggaaacattatgctaagtaaaagaagccaaacacaaagggcttgtgtgagtccattcctatgaaatctccagaataagcaagtctgtatatagtgacagaaagtagaccagtgattgctgggcctggaaggttaggggaaaatgaggagggactgctaatgcgtatggagtttctttttgaaaatgttctaaatttagaccgtggtgatgtcagcacatcctgtgaatatgctaagaacaccgaaccgtacacttcatttgagttgtatagtgtgtaaattatgtctcaacaaagctattataaaaaatacaacacagggattcttggatttacctctcttcatacaagattgggatagaggcataggagctattgataacaaaaagccagcactggaagcatggcatgagtctcttgggggcttcattagcagtggaataattctccagggagtccacaaacaacagtggcagagctgcaaggaggaagataatgggagtgttaggattctggatgaggtgatgttgggcaagaggagcctggtaaagtcctcaggattaccctaagggttattctgccttacttgacttcctcttaatgcttatggaagatttctgagagctgtaaattataaaatgcgatttgatgattgtaacaggacaaaattttgattctttcgaaattctgaaaaaaaattttgtccagtcctctttttaaatctctcttatgtctcttatcagccttccttttaaaaggaaaaactttaaaagttgtatgtagtttgttgttggtgaaaaaatttagtcattcttatgctgaaaatattttgatggcaagaggttattgaaatcacaagcatttttattgacagattagtattgtaatggtatcatttttgtttattttgttttagatgctgttagagaaatttgttgaagaatgcaagttccctccagtgccagatgccatttgttgctatcagaagtgccatggatattctaagatccagatatacata

SEQ ID NO: 28274 - DNA, 2061 bp, Homo sapiens
ttcatttcctggaattttcttcaataaaacgactattgggtggacttacatcatgcacatatttaccataagagaggtccagtttttatgttcagcaaaagatgaagggaggaaaggaggaaaggagggagggagagagagaaataatagagcactagtgagataaatttaacatcccaatagtgaacactgcctgcctgcattcccctcactgaccacaagctctgacgtggatagggaacgggaatgtgctattttttcattcggctctcataaatcttttattgtgtgagtattctacatggtcccttattctggtgtttaaagatcctaattttcctgcaacatgatctctgcaagctaactctttaatccagaagcaagcagtctaggataattttgactctgagcaatctctgcttcatttgttgacttcatttgttgactaaggccctcggaagaagtgaccgttttatattagaggcatgatggagaaactggacagagctcctttttgctggctgttcatcaggagtggggcttcaccgtcatttcagtaggagtctgtatgagattgtagtcacctgttttctaatttggagagtggagaataaaagtaggcatactgaccaccttgatttttgtagagaggggtgaggacccacattttggggaataaggaatgttattttaggtgttggggaatgggtttacccatttcctcttttagacacatttgggaagattctgcatattgttgatgttttattactatggaatccatataaagaatcataaaatcttgctagtttatactaattggaatgaaagtctttatgaattagtgaaaacattgtttgggtttgtttttttttttagagatagggtcttgccccatcacccaggctggagtgcagtggcgccgtcatagctcactgtagctttgaagtcctgggctcaagcagtacccccacctcagcctcccaagtagctgggactacaggcatttaccaccatgcctggctaactctttttttttttgtaaagataggggtcttgctatgttgccagggctggtattgaactcctggctcaagtgatcttccagccttgtcctcccaaagtgctggggttacgggcctaagccaccatacctggcctcattgttatatttttaaaggaatttaatgctatactttcatctcctaggtctaataaaggtaactatgatagtagaaggctttggcccacattattcaaatctaatagacaagaattattataattagcctaacaatgttaaatggtgtttctaaaatgcccaatagcttgaacgaatctgttctcaactatttaaatgtttttgctgagaatataagcaaactataatcagctggctttcagagatgtgaaactaaatgtgattttacagtaaataatttccctcctcttctgatttgggttttgtttttattacaggcttagatgccacaggaactttcttttctcgttatggagcatctcttaaactgcttgattttagtatcatgactttcctctggaatgagaaatatggtcacaaactagactctatagaaggaaagcaacttgattatttctctgagccagcatcattgaaggaagcccgttgtttaatatggctgctagaagaacacagagacaagttcccagcattgcatagtgctttagatgaattctttgatataatgggtatgtggactgagtttagacttatattacatttaatcttaagggggaaaaaatctgtgaaggacctagcttgtttaaatatataacaaagaaaatagtgaaaattattatggtacaatcagtttatgtggggaagttagtgattaacagtagcaatttttttatatcatgaagcttttttactttatcagttaaagagatactcaaatgtaggtatgttatgctaacaatacacaatgttcttcccgtcttagatattttcacagcatcatgggaaagattgcatgttacactgacagaatctattagtaagtggtttgatttatagca

SEQ ID NO: 28275 - DNA, 1065 bp, Homo sapiens
gctgatttagaatataggactagtacagctgaggttgagaccaagtggtagtcaaccgcctgtactaagcacccaccataggctgcattgtggctcatctgggaaacaaagataatctcagactcatttcatctaatagtatcaactcttccaataaacggtagagtatacaaagattctttcttcaggatgccatgctaactctgccttctccaccaaagtatagaaacatagaaaaggggtaaaaagaatgctctgttttttcttcaatatgtataatgaggtcttactatacccacagattggtagtgtttttgatcttctcaattaggagtagtcaatttatctgtcactttcaatagaccagattcatgaggtgctgagattcatgaggtgctgagattataaatttatcttaggctcatcctttatttttatattaaggtaatgattagggtttgattggaatcttttgaatgtttcagactacctttttaaaaaatctttaaatgcagacgctgtctttaatattaaacataaagatgtcagatgaagaacggtcaaactttcaaatttgggaaaagaacttaaaattcaggagacttattttctctctgcccttcggttttagagtttttgttatattaataattaaaattttctaaagtgtctctagtggcaagtttacaagataagcaattccttaaaaatagttggatttttgtgtgtatgtgattatgttaaatgtctcttttgctcatgtttagatgtttatttgaccgtaagtgcttttaatttttaaaatttctaaagcagttttatattatactttttcagtgatcctgcagcatatcctgacatggagtctgatatacgttcatgggaattgtttctttctaatgttacaaaagaaattgagaaagcaaaggtaagttgtaaacatcttttaatcccatcaaaatctttatgatagttataattctcgggaggctggtgtcatattgaatctatttcttttttatctattattatcaataattttttttgttgaaagtattatgagct

SEQ ID NO: 28276 - DNA, 1079 bp, Homo sapiens
gtagctgagattacaggcatccaccaccatgcccggctaatttttgtattttagtagagatggggtttcaccatgttagtcaggctggtcttgacctcaggtgatccacatgccttggccttccaaagtgctgggattacaggtgtgagccaccgtgcctggcctaatttttgtatttttagtagatacggggtttcaccatgttggccaggctggtctcgaactcctgaccttaggtgatctgcccacctccgcctcccaaactgctgggattacaggcgtgagccacggtgcccagccctgtccatagttttaaagtagattcctataaaaggaatttttaactttgaaaagggatgactaggatctctagaaatgagtgctgaatatacaatttcagcagacatgttttatgtgataggataaacgcttgctagcacagctacaagagtaaagcaagagtagaacaaacctaataaaacttgcctacaatttaaattattgtaaaaagaagaagtagatgcacaaagggcaactacggaagactctgatgatcatatgaagtatctagtaacaaagacaaacatgaacgcaacatgactgagaagaatgtcaagctcttcatctaaaaaatgacaagaaagccaagcctctggaagtcaggaatataatactggcatttgatacatatacatatatatgtgtgtatatgtgtgtgtatatatatatatatatatatatatatatttttttttttaattaaaaaatttttttcttaagagatgaggtattgctatgttgcccaggctggacttgaacttctgggctcaagtgattctcctacctcagcctcccaagtggctgggtttacaggtgcatgccgctgcacccagcacgtctatcttttaaatcctttattctgatttatgatttttaccgttttagattgttacaacacaattcaatttatgaatgaaaaatttcttggcacataatttaagaaagatgatattagggtttagcaacaaaagtttctatccaaagaaatgtgcctatgttaacctttagagtaagtgcgg

SEQ ID NO: 28277 - DNA, 1036 bp, Homo sapiens
aggaggaagggtcaccccttgtgtttgcgccatgaaggcacactcctttttacctggtgggtgttgaaaaaatatttgaaggaatagacctgaatgaatggtaattattggtaggggtgggaaatggactaaatgacctagtgagatctttgttttgagatctaagtataagatcatctcttaaaccttttaacaatattttggtggaacctattagaaacttaacacattattgtgtgcaagatatctaaaaataagtccagttttttagaggcagtaacatttaagataatttaaaacattccatattagtgtaatgtcttgttagggaatgtggacagtaaaaacgaccatttgttaaattttttttcccctccaaaatattgtctgatgtttgctccttcgtgttacttatggagagttactgtttatgacttaaagatatgggggtggagaggcctaggtaactgcaacaatgtatttaggtaatttacattaggtttttagagggctatgactatctgcaaaaggaaaattcaagataccttgttataaacatggtatacagtgacctttggcatgcattttgttttgtaactacacgaagtgttaatttggattgaatctttgttttcacttgaaaaccttttttttttttttaagaaatagcttggaaatttaggctgccctgaggtgttttcgtgtgtctgtttatggttgacaagtatctagttatgagaagaaaatgtggatagaattaactgtattataggcgagaagggaattgccttataatcttgtgccactgaacacaagattagtagaagagtgggcttcacttgtgactttcttggtatttgtgattaggcgtgtgccagtttgtctttgctttggcattagctttcctcatatttgagaaggctttcacgtttcctgtacacacacaggaagcagtttcacccctccccaagaaaaaacttatctaaacccagcaaaacccaaaaacttccagaaagtctttatcaagaatttagtt

SEQ ID NO: 28278 - DNA, 1024 bp, Homo sapiens
tttgggaaggcacattccatccctttaaagacaaacctggaagttgcatacatgatttttcttcataccctattggtcataacttagtcatgtggccatgtttagatacaaaggagtctgggatatgtggtctttgataggtgactatttggctgaaaatttgggtctactgaagaaggggagaatgggggatgattaaacattgcctgttacacttcaaaatgttttgggagaagcttccagaaatagactttgaaaatacaatggattgcattagttaataagtttattttctgtatttaatcattaattttttaaactatggtatgtgaattcaaatagaccgttatgcaaaatataagtaagtggtcagattagaaaaatgtagctatacttttagtagtgaagggattttgggtctaataacagttattttactgacgctttattttctgatagaaacatggttcttgattgctgtgcttgtatcacgtaagcaatatttgaaatctgagcttttgcatttagtgttaatagtccactggaccaactgaatgtcttcttgctcataccctcagcaaacaatgctacaataacactcgcatgttgtcaggatgtcataaagatttgagtcaccgaacactgcaagaaggatgatagcagagatatttaaacgtacatttactatctagtatgttcctcttgaattcctgtggatttgaaaaaagagaaatataaatatctaagattcccttaaactatgaaatattattagctctagtacagacttgggaaaactaatggttcccaaacagtcttctggagaacttgtcaaagttaagagatttccaagctcagatgcctctctttctgtaggtttagagtgatgctctggaatctgctttctttttttttgagacagagtctcgctctgtcgcccaggctggagtacagtggtgcgatctcggtttactgcaagctccgcctcctgggttcacgccattcttgtgcctcagcctcccaa

SEQ ID NO: 28279 - DNA, 1695 bp, Homo sapiens
caaaaaatttttgtttcattttagagtccttttaacagttaattttgacttaaaagtttgtttggataaaaataggactctagcccttaagacaaatactgtctgttgaaaaatttattctgatttggttattttccctcgaaaaaaacaactgttaccacagtggtgttttttactttatctttacatcaaatgttcgttattgagagacattgcttctgtgatataaaagattgttttgtaaaagtttgttgaaacaacaatggtaagatcctataggatctcattgagtattttacagtttaattttttttttttgtatttcgttgttgtggttctgtagtacaatttaaaacatcagtaaagctaggtaaatttacctaggaattggcctgaaggcccacagttactcagcaatattagagacagctatgcaaagggagaagccaggcgttttaagattcacgggagacagtttgtaggaaggctgtttgctgaataagacaaagatacagacatgcaaagtaaaggatgtgggcctatagggaaggtcaaagaataaggaaagttcacttgagtgagcagaaatggaagagggatttaagcaaatagatgaacaagaattgtctctcctaaaaaaaaaaaacctacacaattatttgatgatttattatgacttttggggtagagaccacgctagtcacaggatctgcaagccctgccacctggatgatctggctccagctggctcactgcctcttctcaccagtctctggatcatgtgactgtaccggctcctagtctttgcatatgctgcttccttggcttgggatcatcacttctatcagctcttctatcccttctatgcgctcttcgttttaaaaatctcatgtgtccttgtactcttccttcataacgcttattacagttgataattttttagtgcttatttgattaatgccctccagagatgaggaccagtagtgttttgctctctcttgcaatctcagtggttggcagggtgcttggcacatagtaaacactaaataaacatttgttgaatgaatcagtgaactacatgctttggtctttactagttggtctcaaggaccaaaaacctacagtaggaagatgtttgttggactaagagattagcaggaaatatgagagctttgaggaaaaaggaaaagatgaagttttttaaagataggattagaaagttctatgtagtcaggagaaagaaaattattcgtggaataattcaacaaatgcacatgaaatgcctactatgtattgagaattagatactggaaatgtggagtggaaagattctgtcttctgtattaaaggagtgtataattgtagtagtttactgaaatggggacagtccttagtggttgtttggagcaggtgtaagttgtggagagggatcagcctggatcaggatattcttcactcttctagccgacacagtgaagttcattcagcagttatatctggaatgtagctctggcatttgtagtagctttcaggtgcatatcgaatataagtgctatagccaggtgtggtggtccgcagtccagctactcgggagcctgaggcaggaggatcgcttgattctgggaggttgagggtgcagtgagctgtgtttgtgccagtgtactccagcctgagtgagtacactttgagtgatac

SEQ ID NO: 28280 - DNA, 1511 bp, Homo sapiens
gagagcgatctccaccattaagaaagctaattgttcactttccccaccgcttttgcagttaggatgcaatcctgtggcctccatgactggcagtgcttgcctacctcagaggccagtgatctgcagaggcaggcggtatgtagaatctgtattctctagtcaaggagggatggggatgggatagcagcttatcttttccataggcagcagtgactgagattccagttgcaacacttagtgcctggtgttggtatcagtataagttgcagtgactgagtctcatttggtcttcactggaccatatctgtggtttgaattttggatgttcttaactatgtagctttccagcctggtccccatggggttttctgtgagttgcctaatacactttaataacttcctttcagcttaaacaaagccagagccagtttctttgtttgcaactaagaacctttacttggaagatgctaattaagacaatagataattccaaggaactctcctgggtcaggtttacctgcatgtagattagaatttactgagaagagttcacagcatatattaagtgaaatacttagaaacctgtttattgatttaattagtttgctgaatttgagtgcctcttcttggctgcgatatgttttaggtgttaaggatacaggagtgacaagattgacaaggtccctgcactcacagagcttatgttccattgtaagatgtagagtaaacaagaaagcaaataacataattacaaaaagtgataaatgccatgaaaaaaataaagatggggtgatgtgataggtaatggtgtatgtgtgtgtgtgtgtgtgtgtgtagttgtatcttagtgtaaaacatttaaacttcagtgtcaggaatcatggcttctgcttttgactattctgaatttgccttcctactgtaaacatctagaaaactggacaaaacacagggaagaactgttttcagatatcagataataggtagcacagaactgtgatccctgacagatgggaaccaagtgagatgagccctgtgatggccagttttctgcttgaaggcacttttcacacctcagtgcaggaaggggatcccagataaagccacgtggccccactaagttgagaaaacaaagattggagttaggggtaaccaagggtggttgtcatttgaggagcagagttccagagaggagggagctatactgagaaagagttcttatacatctacttagtggtccccttaaatgtttgattgtacatgtataaggtgaagtttcacaaaagaacagtttctgggggagctgtaagcagaaaaaatctcagagtttacagagggctgagaattatttgagtaccttgtaaccagagtggaaatgcaggattcattgagaccccagaagagttatgtcttggtagtggggctaaactagtcctgaagtaaagactcctagctttgcctgaaaaaagcttaaaagcaagccttcaaagaagcaaactaatctgaaacta

SEQ ID NO: 28281 - DNA, 1044 bp, Homo sapiens
gaagttagagtagttgaaaatcagtatttgagcagagcagggactatggtagaagaactttattatgtagcagtatgtttatctcttgctaaatgacaatatcaccacagagttagtagcttaaaatatacacttccatttattatctcagtttctgtgggtcagatgtctgagcacagtttagctgagtccactgctttagggtcttagaaggctgtaaagatgttggctgaggctgtggtctcatttgagacttaaccacagaaagatctcttctaagctcatatggttgttggcaggattctgttctttgtacgctgtcaatcagcaaacatttgccatcagtttcttgccatgtggtcctttctgacacacccacttacttttgcaaagccagtaaaagagtcaccttgcaagaggtgtacatcttaacgtgtcataaccatggacatgccatgccattacctttgttgtattctcttgcttaaaaacaagtcacaggtactgcccacactcggggaatggtgtgcacaggatgtgaacactaggaggtgggtcatgggagcctccatcaaagttctctgagcttttctttcttatcgcttcatgacttgtttcaccggaattttagagctattaggctttattgctttaagaaagcacttttagtattaccataccatgttcttctagttaatggagaaattagtctgaaagattttccctctgtttctgctcttcttccctaaaatttgctctgcaaaccattcctccttcagatggtatgaaggaaataagcctggggaaaattaccttcttggagattgacagctcacattagcatattgtaggaaaccttctttgcacccgttaacatagttagggcaatctttattaagcttgccctgagcactttataaacgtacacataccactagccagtaaggtactgttttcatttaacctatgatgaaacaagcttagaggtgaactaattttcccattttaaatgggaagtggttgatagggtaggattcaaaccag

SEQ ID NO: 28282 - DNA, 1197 bp, Homo sapiens
tgagctcaggcagtccgcctgcctcagcctcccaaagtgctgggattacaggcgtgagccaccacgcccggcctgttactgtttttcaactgtcctgatttagaacagtttcttacctgttctttcttttgtgatgttgatatttttgaggaatacagaccagtgattttagagtgttaccctcagtgtgcgcctggtgtttcctcatattagatacagattagatgtctcaggcaggaatgatgctgttttgaattttgatgaagtctaattattaaaagtttcttttatggattgtgcatttgttaccaaatttcagaactcttcctagtgccctggttctttggagtggagaatggcatttggaaacctatgtctgaatgttaggtgtgcttggtagtgttagtgtgtgggcgctcctcggctttcagtggacagagccagagaatatgtgcatgtcctgagcctcctgttcgtcctctttccaggtttggggatacatgagctagtttccttggcatcttcaactgtagacacttattctgtggcttcctttagtctcctaagcctgccactactgtgccatcttctatccattgtctaaaaacttctttgtccatcactgtcttgtatcttgttttattattttttaactactgattttaggtgagttttatcttcagtgcagttttgtgagagaacagaggtaaatgtatggattattcaatatgttgtttacttgctgaagctttaatactctttcaaaccaatttttgccttttattattttttgcagtcctccttaaccccttgtttacctgctctgttcctgattgggctgttctacagcctataatcttccacgattctcctttgtatggaatgaagacaaatttattaaactattcagattctcttgataacctagccctagtttatctttccgttttcttttctgcagttctgccatcttccctctacttcagagcttacattttcccactcgtgttaggctcctcttcagctttgcctttggagcatactgtgcttttctgataacgttttctatatggcacagagcctctgccagggcatgtagtaggtgtgttcagtgcattaaacaaacatacagatcctctaaactagtaaagccacccaagcttgtttgttgcctgttatcattttccaaatactgtc

SEQ ID NO: 28283 - DNA, 1096 bp, Homo sapiens
gtagaagagtttcattctgaaaccatttcccacctcctcctgtccgtggaaaaattgtcttccacaaaagtagtccctggtgccaaaaaggttatgggatactcagctccacgttgcacctaaagtagcaaaagactagataaaaaccctgaatatgtacttgtgaaatcctgaatatgtacttcgtgaaatcagtgacataaacctcctcctgggttacgtgttacagttcacaaacgatctcaagtattctacagttcacctgtggttgtcctttgtacaggtggaagaagagagggatctcagattccctgtagttgcgtccccgcccccagacagatctctcccttcttcatgccctggattgtttcatccatttaaatagttctcttcttgattctgacttgagggatgggcatcctgtgattaggtttggatgtgacagtggaagtttgtcagaaacattttggctcatgggccagatacattggagtccgtccgaaagctcactaggaaatgtagattctcaggtttaacctaactaggctaactatacctaagtatcttagcagaggtttggatgttacagagtttgaagatcgcatttttaggccctgtattcttattctctgtaaggatgatgtcgcccttcaagggtgtaaggattgttattggggagtatatattcagggcagcttgaatctgtgctcccgctcctcacctcattgttcttcggagggggatggaaaatcttagatgttaatcatggtttgtggccctccagaagttaatcttacctgacaaaaccttattccttaatgtttaatttcccttgttaagaatacatttaatttattgaattaaatttaaattaaatttctctcctggggatgggatactcaaaaaaaggttgagaaacataatcctataagaattactctggcatagtacctgccctgcattatctgtgtcccctctcccatctttggaaaccttaggatgtgattttggctatattattttaatactaagattttacttacatttaatggattaaaaagaaaaacattctagatgggtggaaacatttactctg

SEQ ID NO: 28284 - DNA, 1049 bp, Homo sapiens
acaaatacagtttgtactttcatgttgttgacagttttggtgtggcattttaacatttactgttcttaatagaatatgtgacaactttctagacaggtactactgtttaggattgggtagctcagtgttgggtttcactgagcatgagaggcgtggagagtttacattacatgtcttccagtggttctgtctttctaaagcttgaaggtactcacgagaaagcagtgagactgtacatcattccaaatgagatgttgatgtagattaagcacagtttttcatcccagaatgcaaattaagaatacaaacacaggttgaagcatttttcataggtgacatttgtagaatgtatatattttaagaacatttggaaaactttttttaacctacttgtattagttccctgtggctcctgtaacaaatcacagatttagtgacttaaaacaacagaaatttattctcttacagttctggaggctagaagtccaaaatcagaatcattgagcctaaaccaaggtgttggcagggccagggctgtgctttaggaggctgtaggagagagccacttgctagtggctgccagtacttcttgacttgtggatgccagcattacttgacttgtggccacattacctcaatctctcctgcgatggttgtgttgtcttctttttgtgtcagattgccccctccctctctcaacatttgtgatggcatttagggcccaccttgatgatgaaggataatcccctcatctcaagattctcaacttaatcacacctgcaaagacctgtttttcccccaaatcataaaacatttataggtttcacagtgtaggatgtagatatcttttggtggaccattttccagcttatcacactcctataaattatttggaaaagtaggaaggttgcttttgaagtagcaacttgtagatatatcataagtatacttccagctataataagaattagtcatagttttataactttttagtgttaacttgatgatccaaatttgagatccaacctgggagacagctcccaaaattt

SEQ ID NO: 28285 - DNA, 1046 bp, Homo sapiens
aattactgtgtataagctcttcttcacatgaactttggaaggtgttctacattttgagggatatacacattacatattttcaaatatttagagttaatattgttgcaactcctacttcacactgacaatttccacttcccacttcccattccccagttgccaaatgtagtagccataaagagcatcagattgatttatctgccatccctttgtgcaattgctgccatgtttttactcctacttatattatacattatgtacaattttattatttttgctttaagctgtattttaaacaactaaaatttatttttgtttaaaactctcagtttttaaatataagtatccaaaggaaaaatatttatgaaaactttgtttccatttggtatcagttttctgtcttaacactcttcggcatttcttgtgcagctctgctggcaaggacttctctcactttttttcccttcttacaaattttaatctctaaatgtctgtattcagtcttgagtttgaaggttttttcactgaatgtagaattctagattgatactttttgtcttttagcactttaatggtgttccattgtcttctggcttccattgtttgtgatgagatgtaagtggtaatgactatctttattccctcgatataccagtcttttcttctggctgctttcaagattttctatttctctgctttaagctgttttactctgctgtgcctgggtatggttatcatttgaaagattttaagctatggtttcttcagatatttatccctttttttttctgtgactttatttacttgcattatacaacttgatattgttccacaggtcactaagggtctgttcagttttctttagtcttttttctctctcttctttagacaattttctttccctttctctttccctttccttttcttttttgagacagagtcttactctgttgcccaggctggagtgcaatggtgccatctcggctcactgcaacctctgcctcccaggttcaagtgattctcatgccttagcctcccaagtagct

SEQ ID NO: 28286 - DNA, 2092 bp, Homo sapiens
aacatggtgaaacccttctgtactaaaaatacaaaaactagccaggtgtggtggcacatgcctataatctgtaatcccagcgacttgagtggctgaggcatgagaattgcttgaacccgggaggcagatgttatagtgagctgagatcatgccacagcactccagcctgggatacagagtgagactcttgtctccaaaaatgaaaaaaaaaattatatctatgtatatctctatatatctctatatatctatatatgtatatatctctatatacatctctatatatgtatataattatatatatctatttatatatgtaattatatatatatatctttagtagtgacttttactagtgaaaattttaatatcctaattaccgttatttagaaaaaattctttttgagttgatgtttaaaattcttttgattttttttttttttttaaagtcatcttttacaactcctccctaccgctcctcccctagctctccaggcccattgccctgactagtaaaggtttgctgttttttcttctggacattttcctttgcgtcttcatttatatataagtgctcatattcttgttatacacagatatatttacaaacgtaggttgggtatccctaattcgaagtgtttgggagtacaactgtttcggattttgaaatatttgcatatatgtagtgagatatgttggggatgggacctaagactaaacattcatttatgttttatatactgtagacagcctgaaggtaattttatacaatattttcagtaattttgtgcacacaataaagttttggctgagctgtggctgtaacccatcatatgagttcaggtgtggagtttttcactggtggcatcatgtctgtgctcaatagatttaaaattttggagcattttggagttttgtattacagatgctcaacctgcacttctgtaacagagtagtttgaatgcttaattaaaatggcagttgaatattatgttaactttggttttatgattaaaccttttcaaagtttttgttactttcagatactcataagtaaggcatataacctctctagacctcactttccacatttgataaaggaacgatttgaattaaatgaaattgaaaatctcttagctctaagtataacaaattatgtgttaaattgtataattcatctcttagatatcatgaagaatgtgttgtttataatatgaaaaagtatgaagataaaaatcaaatatgactttgggtagcaagaagagattttgggggaagttgctaatgtgtacagttttttcccctaagagcggcgagagaatggcagctgatcagactggtggtggaatctgtctctattgcccagcttggcactatgaagtttgacctgtgtcgatcactcaaaactagctgatgacatctgaaagggagttttaccccggctccctgaagtttcacattacagctctacatttgtgttaacacaatgaatgcttcaaaaaaaaaaagttatagaaatcaaagcttacataggcaaatctttgttagtgacttagttaaaaacatttcatgaataatagttgctcaagctattttaacccttttccctttcccagaagagaaacaagaaaatcccacacattttgctcagtcatggtatgtttgtaagctctcttgtcagaaagtgtcactgattctttaaatttcttttagttagctgcttttgtccagtagctcacttattttgtggtttgaagatgactgtacttctgacacttttctcacatactcctgctttaatttttcgaaaaactcaatggcaagaaactgaaaacatatacagaagtggagagaatactagaatgagctctcacgtccctagcctcttggcttcagcagtactcagtgttttgcccatcagattttctaatgcttttagtgtaagtaatgccacatttaaaaatactccttttagaaaagagacttagtatttaaaaggaaataaaccagagtcattcccaagatttatctgattaaactgtagagtttataattatataaattttttttagcacatagaacagtcattctc

SEQ ID NO: 28287 - DNA, 1060 bp, Homo sapiens
gtggctggagtgtagatgtgtactaggagatagagtgaaaaggtggaggtaatagtaatttaaaatataacagtaaaaagaagcagctgtgtattgatcacttactgtgcactgttttaaatggtttacaggtgccacatctttgataatacagcaattctgtgggtgcaataagtgatggagccaggagttcacctggggcaggctggctccggagcatcactggtgccttagggcctcaaataccagattcagcaacgctaagcacttttttgggtcttatttttggatggtgatagttagcaggatattaactgatttttaaaaacaaatatatttgtccattgtcatgaactttttaactctgttggagtttaaaaaattggaagtacttagtggttactcattgtggcccctagttacagttcatgaaagggattttttaatgttaagatggaagctgaatttcttggaccatttttttcctcataaaagatgtatatatttataaaaattgcgatacattgagaagtataataaattagtaattactcagaattttattggccaaagatattcattatgaataatcttaaatgctttcttcgagtgttttctatgtatttattctactcttctaaaactgtgctttgggaagggctttgagtcctttctaatataatggtataacttcccccctcatgcagtgaagctttcagaagaattcaagtgatcacacaacatcatatctgtgttaccttttgtgttgaacatttattatttataacatttaatttttaatgataaacttttgtatatacattttgtatattctgttatgaaacggatttctaaaattagagattgaacatgaagcagaatggcctacaaaaggaacatgaatctgtgctacagatataaaaactattttgaaggctataggaacaaccacatttgccaggactcatgcttaaatagactgtgtacggctgtggagatcataaattgagaaagcatgatatttgagcaagaaaaatttactgaggtttgttaagatttg

SEQ ID NO: 28288 - DNA, 1041 bp, Homo sapiens
ctaaagtgagcatggagaggaatggaaaggcatgaggcacttcgaaaatggataggatttagtaagaccatttagataaagtcagcagcttctaatgaaattactgaaagaatggtggtgcgggaatagagatgggaagttcaagtggataacatgtggtgcaggaatgtgatgaggagttgtaggcatagagaatggaggcagggatgtggcactgtaggcagccacccaacagcttgttagactagatattgagtgaaaagtttgagtggagaagagagtttgaagtattagtttggagtaaaccattgaaaatacttcttttgcagggaaagatgtatagagaaatgagtgaagcggtcaggggatagaaccagaggtcacatctgaggttagggctaaatgtgaaagagacatggattatttggaggatagctagtgttgtgaaatacaagaacatacattttaagaatttttaagggggtagcatttctctgtaaactccacagaagtgtgggaggggaagtaagtaaaactgaactcactttactgcttttagtaatagactcattggaagaaaatgtaagctattcatgcagtgtgtgtttttgattatttctgggccttgttatttttctgtgtttctgagatgcaaggattatttaaaggcaatggtttataaaatgatatataattacatacgtataaaagtacatataaccaactaagtatatgtatgcatgcactcatgcaaatcaattatatatttacattttatatataaattatatatgtgtgtatatattgtattatagaacatcctgtgtggaaaagttggtgctgtcagaagggagagagagcaaggcagttttccagtgcatttcttataagctagttatgagaagggcttgcaggttactgattgaacatattctttctaaatgtcttctgtctgatagatactcctttgttagggaatatatacataaatgagattaccctagatgttcaggttagtgagggaaacgttacaatagatag

SEQ ID NO: 28289 - DNA, 2015 bp, Homo sapiens
aaacaacttagggaaaaggattattaagcaggatgattgggatgacatcatgtgaaatttaggaattggaggcattgggaattgagagggtgctaacaaaggaaaacagcttattttagaatttgtctggaggatgtagaattgaagaagttttggtatttcttctgcagcggccccagtgcccttgaccaggaacatctcttggagtcagtagttttcatgaggctgacctaggaacttggccaacatatgcaacattgttctatttaaaatattccttgaattaaattcgatagtatcaatttaaaacataaagttttcactcaactcctttagaagttagattttagcttgtacttgtctttacctcttctgctgattatcagttgacaacactgagattactttcattttcctgtaagtcattatgaatttttctggtcaaccatgagttatcagtggaagcaataagtaggaagtactgtaaaagaattacaataaaataagagaaaccacttggagagcaagagggcttgtggacttgggggagcggttgtgagaaatgtctcagaacttaatttacaaataacattggtagattgacatgttgtctttcctataaagtaactttacctctgtcttaatagtaaactactatgaaagtgaattcgtgttcctcttgatttgtgaactgatgaaaattacaaaatgtggagttttttccccagataaagtaaatggtggaatattcaggtttatttgatacctagaaaatacctgaaattttccgtggtaataggcacattttgaaactgttttttttttctctgacaattgaatatattttatatatagttgattttgattattgaagactaaggaaaatttaagtttgaatgttagaaaatgaattttgcaaatttgaagtaattttattctttatgttttgggattgtagttatgttagatattcctcagttggggtaattgtcttgcatcattatctcttatcataatctgtttttcttcacacagtgttatagttttgccgctggactcttccctcccttcccccaccccatcaggatgatatgagacttgaaagaagacgatgcatacaggtgactcaagttttgaaatacagtaaaactctggctaagagaatgtgggaatcgatggtctattttgaatgggggaggtttctgataaatagcagttagtggggggaattgtagatcagtaaatgcaaaggtagttgggctatttgttaaacttacttttgaactcagattgataatcagtgatttatagtggtgttattacaaatacagcatagtaaatgctagcacttaggcttttcaagagctaatattttggtgggaattggaataattctgttaatgtaaataacacagtcacctttatggttgaatgcatgtctcccccagaactctattagaatatggcagatcttttatgggagtagatgttagtaggatatcatcaaaaagactgacaagttaaggatattatacccatacatacggtttcttaaaaagatatgctctgggattttgtttattttttccttgttcccaatatccctgcctcccatttcctttcttcccaccctccccctcttatccttttgtcatttgtatttttatacagaagaagcagtgtgaaggcatttttgaaagaatattttttgattgctctataattaattgaggtgatcttttacatgggaaactggaggctattccacacatggctatgttcaaatttctgaaaatgtagtgcagctaatgtataaagtgttaataacttttgaacttaaatgttcttaaattaggcatattataaggcattttgttgaactaagtgacttaacatttgaaactctgtcagagagccttatttgattatatttataaactgtttgaaaatgtgattgctaactggaaaagaaatatttatataaattttgaattgatacctaacagatgcctaat

SEQ ID NO: 28290 - DNA, 1098 bp, Homo sapiens
tatgcatacactatatatatactcatatatatgaatttaagtacttaaaaccgtttgtggcagagttttaattttggattctcttaactcattttaaaatgtgaattttgtaggacaaaattttcatatttccagtgatcacaaatggggtgtattcattatacaagagttagaaatcagatctgtaaattacaaaaccccaacttttaaaatcccatcatatgtggggtacactaggagaatgaaagggcatgtagattgtaatatttaggaagctgtcaccagtttgcctccccttggaattgttgtcgtggtcgtgtgtgtctgatctttttctttgtctgtgtctccttctctagctttcgttcatgtctcaacccaagcagtttgacttttttcttactgattcaataaatttatttttctagtaagttaaaaagatagtggatttgcttttgcactcatgtttttactttttgtttattagatgatacaaaatcactgaaagaattctgaaatgtataaatatatatagataagtataaggaaacatatcccaagttttagtgtcccctacagtgtggcacattcccttccagttgtttttcatgccatttttttaactaattgaggtcattttgaatattcaggatgatgtggttgggtaagatccattttatactcgtgttgactaacatatcataaatgttgccctacatcatcaaaagctaaccatagtgatttgctgttactttgaacttggagcaaatccagggtactcagaatgcttttgaagataattactttagatatttattttacagtatgcttatttcctagttaagttaggtatctcttatttttaggcattaagttgttttttaaagcactaatacctgtgcatagtatttggctgtaaaattattttcttataattgattcctaggagtcataatgtttgaaaaattttcaggctcttgatgcaacttttcagaaagctgtttggtaatatgtaccactctgtacattacaagaatgtctcttaatttatttttctcagcattgagtattatagttaaaataaatcttcaacaggca

SEQ ID NO: 28291 - DNA, 1084 bp, Homo sapiens
gtactgtgattgacccagacagaggttcggtagcctgccccaggtcacacagctagtaagggatggagctggggagcaaattcagggcctgtgagtccctcctcttaatgatcatgcttttgattttagggatacttactgttacttattgctggtacattttccagtttgcatttgccttttgttcatggtgtcgttttatacaagagctttaactttttgtatgggagaactaagttttatttattagtgtaatgcctcaaacataacagattctcaaatctatgtgttgaacaaatgagaatgaacccatcagcagtctgttgatggtgatgaccttttatgtagtgtaatatgtatctccttttaaagggattcccagggcttcataaatgagttactctttggtttttatcaggcacagtaagcttatctgtattagctcttctggaaagttttttagatgtaatcactgcttttaaaaggaacatgtgttcttaaacaagcaaataggagttgtgaagaatgtatttattgataatgatttgaattgtagattcaaagtgaaatgaaataatttcactctaggaataatttgatgggatttgttttttgtatttttagaaaattatagatttggccattgtttaaaaagttttgaataaattttggcttagtgtaagaagattctttgataggaaaactaaaactatttgatataaaaagttatcattgcttaagatttggatagtgtagatcatctcctcaaaaggtgaaatttaagattttacttttctcgaattcctgacctcaggttatcctgctgccttgggctcccaaagtgctgggattacaggtatgagccaccgtgcccgaccaagattttacttttctttaagcactctttctcctcttctctctggtggtgaataccaggctacttaatggtgccttcttagtttggcctctgtattccttagtcttttaaaaaagtgtagagatccatattgctaatggatatacattagagagaaacacaaataagttaattttaatttttataaaccatccacaaaatatactc

SEQ ID NO: 28292 - DNA, 1020 bp, Homo sapiens
acaggcaggcttcagtttatttagcgagtgtgagccctggcaggaagattctctttctctgcttgccaggttgaggaggcctcattaagcagtttgaacttgtggttttggcgtgtctagtcctggtgcaggtggcttggtatcctcacaggcatttctttggcctcacccttggggtgactgttcacttgtgtttgagcggctgggactcagtaggttcactggagtaggtatttctttagagccactggcggaggctgatcatgcggcagatagttgtttagtatcaagccagtctctccccttctttctactccagtttttctttaccacccagaatggcatctgccacttctgctctggttcctagatctttttgacattccttaaattattggtattatcccagttgccttttcttgcagaaaactgacaaaatctttggttcactggtatgtctccatcccatgctttattttatttagtgatctttcactgcttgtttctatggatgatatagaggaatatagaggataagaacaatatgtttactctatccagtgttctagattttcttgttagaagcaccctccttcccagcttgggaaaactgagctgctggggtggctgttggctccttcgcttgctgttagttttaaaggattgttttcagtcacacttgaattgtagctatccttggttctctttttaccaatgaattctggtagtatgttttaagagctgggtggccttcctggcctttgtaaacatttcctgcaatgcctagctttagtgagctgcgaagttgcccattggagatgaggctctattgaaagtcagcacctgtacttcactccctgccttttgtgactttgggtttcgaccgggtgtttggaagcactgtttcttctgtccttgaccttgttccacatgttttacccattacctcctgtgagcaggcacagggcctttccttgtcacctgggcttcagctgctttgaggatgactacttacccctt

SEQ ID NO: 28293 - DNA, 1892 bp, Homo sapiens
ttcatttgctctttttctagtgtattaaggtaaaaagcagaagccattgatttaagaactcttttcctttctaatagagatgattaatgctataatattctccgtaactattgtcttagctgtatcaaaaattttgatatattttattttcattcttttcagaatgctttataatttgctgtttgctttcttccttgagttgtggttatttaggactattttgttttgagttatggtttcttccttgagttgtggttatttaggactattttgttttacttacatggttctgttactttattctgatttagtttgtcaccagagaacgtattttgaataactcgatttcctttaatttattagggtttgttttgtaccccataatgttgtctatcttggttaaagttgctttgtccctagaaaagaatgtatattctgctgttctttggtagaatattctctaaatgttaattaggtcaacttggtcggtagtgttgatcagatcttgtatatctttattgattttctctccacttgttctatcaaatattgagagacggatattgaaatctcttaatataattgtgtctatcgttgtagttttatcattttttttggtctgtgtgttttaaagctctgttaataggttcatagatgttcaggatttagtatgttctcttggtgatttgacacttttatcattggaaaataactttcatctcgtgatattcttcagactgcagcatactttctttgataatatagccattctgtcttaattttgatagcatgatatatcttttcccagatgtttacttttaatctattaatgtctttgtattagaaatttatttcttacagacacatatagttgacttgcttttcttgttgttcctggtctgaaatctctgcttctcatttgaggtatttagatcatttgtgtttaatgtgattattggtatgttttggtttaaatctgtcatcctgctatttatttcctatttgtgttgtctgtttttcccctttcctctttttctcctaccgtcttttattctgcttttggattgattgaaatttttaaatgatttgattttcttccttttattggtttattcattttaaccttgttttttaaatttagtggtttctctttatcttatcacagtctacttccaaaggatattagatcacttcacgtatagtgtattgaccataccatagtattcttctatttctctactactgtcctttttactgactttaaaatagattttgtttgtgcatatgttattaaccttacactacattactattattgtttaaacacttagatttaaataagaattcctgtattcttatccatttcgttatcttttctggtcttcattcctttgtataggtccatatttccatctagtttcattttccttcatcctgagtatttctattaacattttttgtagtgcgtatttactaatgatgtattctttcaccttttaggtatctgaaaatgcctttattttgctgttttttttttttttgacagatattttcagtgggtatggaactctaaatgacacttttttctttcagtaatttaaaaatgttgctgcaccatctgctctctcgcattgtttcttacagaaaatcttctttattcatttgtatataatatgtctctttttctggccgtttttaagatttttctgtttatcattggtttttagcagtttgataattacgtaccttagtttagttttctttgtgtttcttgtgcttgtggtttgttgaacttttagatctatgggtttgtagtttttatcagatttggaagatttttgaccattagtttttcaaaatttttgggttctcctctctgtcaggaactttag

SEQ ID NO: 28294 - DNA, 1053 bp, Homo sapiens
ctctgtcaatagtagttttggatgcttatggaggtcacttgatggaatgagtctaaaaagtgaagcaatgaaatgtaacagattttttaggttatgacctcacattttcaggtaatgatattctaaatctttcaaaaaatcattttaaaaagtattgttgtaagtgaaaataattaatgtacctattgggttaatggaaaacaccacctttctgatgttaaaaaattttatctcattgttacttgagataaaatatccagttatagtattttacagggattcagtaagtgttgtatctaaaacaacttagaagttaagattatgtgctgcggaaaaccagatgacttaaagaggatttaatgacgacaaagatgctgatgttaaagatggagtaggctttccactatattgagaagggcaccttatccagacagattttaataagtgagattggtcttatctctttgcttttgggacagctttatattcctgagtgtgctgtgctcagccagatgtgataatgtcaaagccggtagtgattgtaaagatggttattcaggggtggtcacctttttttttttttttttttcgtgccccagcatacttgagcaggttaggttacattctggcaaaaaacaggctcccaggacaattcttgggagatgggggagggagagagtggtgtatatattttgaagaggtcttaactacacagtgattctacccctgtgtgtgagggcctgggctctttggacagatgacatgttttttccagtgttatggagttaaccttagagctgggaccagaaccctggacttgctccttgtgccagttttaattttctcagccacacccttttctttccttttattttgtacccttttttcttactattttcaatagaattttaaatgtcatatgtttaataagatggaaactgctgatataaatcaagaagcagtctttaaattttaaataatggtacatttatggagacattatcaactaatttaatttctttttctgactttttaagtcacctcttttttcca

SEQ ID NO: 28295 - DNA, 1043 bp, Homo sapiens
ccccccgcaagacagagtctcactctgttgcccagactggagtgcaggggcacggactcggctcactgcaacctccacctcccgggttcaagctattctcctgcctcagcctccctagctgagaccacaggcgtgtaccaccatgatcgcctaattgtgtgtgtgtgtgtgtttagtagaggtggggtttcgccatgttgaccagtctggtctcgaactcctcgcctcaagtgatccgcctgcctcagcctcccaaagtgctgggattacaggcatgtgccaccgcggctggccttttgtgtttaacttttaaagcgtctctggtcagatgaatattttgccttttgggtatttttaaatggaaaatttatgtaaataatcagtgttttaattagaatcacaaagccaaatgattgcctcattggataattttaagtattatgctgcaattcaatataggtaccaagtacttaactagacttaaaaatatcttgtatgtttaacagctgtttagctagaactaaaaaagagcaagtcctctatgtgtatgcttctccccttttctccctgggatgggagaaggaaaaagttaatttttttcccccttgactgctgttgctgtgcctgctttagaagaagacagaggtaaagatcagggaaggcaactttgtttccaaagaaacattatgtgcctgaaacttagtaacaccttcagacacttcttaaaatggcttggttatggcatagctgaaggtctgaggctgtggtaggtaaccttctgcctgtgttgtattcctggccgcctctgtgtgttctgaccctgctcctctagagaggaaagcagctaagcaggcacctttcaacttttgaatggcttcatagtattacagcatttagatgtgttgtgccattccccctctttttgtacttacgggtttcttggaagacagctgtaatatgcctgtaggcacgctagacaaagttatggtcaagggggcggtaggggagggcatctgggtaatttactgtgtgtgtgtgtgtgt

SEQ ID NO: 28296 - DNA, 1533 bp, Homo sapiens
catgtccaggctcttcccctgctctccttaactatcctacagatgcctctgacctgggaggaaggaagagaagccctcatctcctgactgagagtgggaagtggcagtcactgaatgtgcttgccgtgtgacattactgcatgtcaggctggcagttcactgttttgtgtgtggaggactgtttctgatgctctctgctatttgctaagccataaataaggatataccgtctgacaactactataatagtatgaaggacagctttgaaatcaagacgtctgataaccttaagctgtggtcactgtcatttttctcttgaaagatcctggactctcaggatctggcttaccatctttgatggacaatcattttattagcttgcttgaaagaattagttcctctgttataatcactgtagtgtcagttggaatgacttgagccatttttgtaaaacttgtgaaatctttatgtatttatgaaagttaaacttactgaaggctgaatgactgcagtgaaagtatgaatcctttaattaaataagtggttagcatttatataagcagtctaattaggaccccaaatatttgttcattttctttagggctactaacctggatgcccgatggagtaatcatcactgtcctgtgtagatcttgtagatttttgaaagtactttctgtctcacagtggtggtagattttgtttatttaattatttagggggcatgttttcagtttagcctgattagttacctgctgaataaataatgttattctaataccctgctaggaagaaatttatgtaattgaaattctgatttctatgtaacgttctgttttcgtattgagacatgatactgcctgacagggctgcttcagcagctgtcatctggtttgttgtttcttgtgttgttatatggattctgctagcctaaaaggcattcttctctgtgtctctgcagggctgtccagtgagtcatctaaaattaaactttgatcagaaataagtttcgtttttttcccgcaaaggactggagtgagtgggcttgagaatacttgtatgcaaattaaaaatatatatattcataaatatttgggagcattaggtcaagtgccaattaagtcaggaaggatcctgcagccatagtcatgaagataaactttttaaattgcatttgctcaaacttaaacatgtttgtgagtattttgtataagcgaccattatttcagttgctatgttagatttgttgctttctttagcatggattttttttttttggtaaagtgttagtttttaatgtttcaaaagattttttttgcagtcatttaaaatcaattgtcagttaatacctaaaattcggcagattgtatgttttatttattgcaacatgttgagaatcttttgtttcctgttgacattttaaaaatctcctaatggcagattgatttgtctgtgctctttttgtattattaagtcaggcagcagatacttagagagcttctgctgttttaagccatggggaggcagtagcga

SEQ ID NO: 28297 - DNA, 1045 bp, Homo sapiens
ccctcctcatttcttagtggattctgtcttagaacctcagcctcataagtttccacatttagatgctatagttttaattaaattattttcatttactttttgttctttaatattgttctttgatttaactgtttctctttaaaatctactatcaattaatactgtcacaggaatggtcccctgttaacacattactaacaaagaaattcaggttaggtaagaataacattcagatctacaagtagagctacgtgtgggttatgtatcagagatgatggcttctgatacttgttatttttacttttttgtttttaaacttagggtcttttctcatgctttttgtatttgctgtttcctctgtgtttaccactatctttttgaatcttatgtcccagtctttgagatgtgttgtttatgaaatatttctctgtagaatcagtgctgatccatactggtaatatggtctctagttattatagttccttgctagaacatagtaacgtggctgaagtaagaaagctgcttcatttttcttttagtaaaatattgaatttttcccaagtttagcaaagttacagaaacatgctcatggtaaaaatgatccatacagttcagaagcacgtaaagacagaactccacatgcatgattttctccaacatgctttccatactgtttgacagcagttgaaaatactttggaactgcactccaaatgatgattttagatagctttgaattatttgttaagttcatcattaaattataacattatctgatgttaaaacatgtattgtgatacattcttaagctaagatattattatactgagttgaataaagattatataatacggtagatagtaggttgaaccatatgaaattactgtttttgtaagccaagggtagtcagaaatctatcagcagtttcatatggttccgcataatactttatatgatcatccctgttacaggatgaactgagtcattttttccattaacatttgcattaaaattttaggaagatagaaacttaagagtaaaaacat

SEQ ID NO: 28298 - DNA, 1049 bp, Homo sapiens
ttacaggcatgagcccctgcgcctggcctgccaaaacattcttgaagaagaacagaatttcctgttggatcttaaaatttttaaagctattgtaatttaggtagtgtccagttcttgaacagagacctaggtaggtaagtctgtatccagtagaacagaataggcagtccaaaactagatccaagcataaagggaaatgtgatttatgataaggatggggttacagagcagtggagaatgtttgtcttttaaataattggttaaggatcaattggatgttaatttggagggggaaatgaaacttgattcctattttacacagaagtcaaatgcaaatggattttgcatttagatgtgagagagaaagcccagtgtttagaaggtaatagatttttttcatgactttgatataaggaaaaatttcttagattccaaaagtatagtactaattgtaaagcaaaagttgataaaattaagaacttttattcatcaaagtataccattaagagggtgacaaggcaagctgcctgtaaccaataggggctcgatcatattcagaatatggatttttaaaaatcctagaaatttgtaagaaatgggcttacaattcagtagaaaaaatagaaaagcaacctgaatgtacatttcacgatgtgatgtataagtggccaatagacatgcaaaaatgctcagagtaactaggaaaatgcaaattaaaaaccacattggagtaccacagcacaaatacacttagcataatggctgaaattagactgatgattgcatgccatagtgaaggagtggagcgtgagaatttttcataaactgctagtggataaattgattggaacaaaaaaagaccagaaaaacaacaggacagcatctctgtgtataccaaacgatgcataacaagaagcttacaagtggcagtgttcatagtagccccaaactggaaataatccaggtgtcggtcagtagtagaatggataaattatcatttgtccatattgttgtaaagcaaggtaatggacaaactgcagtttataggc

SEQ ID NO: 28299 - DNA, 1050 bp, Homo sapiens
atgcatgctaaaaacatgttgttcagtaaatacctgctactgttattgttactttattattaagttattcggttgactctaccaatgacttatacttcctgtcaacttttattatagcagtaatgaagcattgcactgattcagattttgtgaaacctcacatttaggctgcactccaccagcccaagaaaggggcttactgaataaactacctacatgaaaacaatgctgggaacttaaattaaaaaagaaaagacatttaagggaaacctttcatcaccctaaatgcttacagcattcattcacagaaaaactgacgtttattacccatattaatttatgcattaagtccttaaggaatagtataaaaatattctgtgaacttagcattagctactgtttagaaaagtaagactgtctatttgaaaaattaaatcagatcatcttcttaattctgatgatttttgtcagacaaatagtataatcaccaagggttccccccccccccaaccttatttggaattaagaagcacaggactttgagaagagatagtgttatttcagtaaatgggtgaatttgccctctgggtaacaactttttagagtttgagtatacatgcagaagaaaccagtgttaatgttggttcatgataaagcgcacgtagtaaagttcatgatttacagcacgtaaaatgctgtaacaattctgtcttttcggaccacatggatggtgatttttcctgttctgtccactggtacaaacctcccctcttctcttttttggtgtgggttaggttaacaattataccatgactccacacatttttgcgaggtcttagtatgatgtgtttactgtcactctgcccctccgattgacccgagtgtccttggagagatgttgtgtcagggtcttctggctcatttcccagcacaaatgtccagaagagttgggcaggaacacaaagatgggccagggggaatggctgtgaccaccttgatggaaataattggttttgaggatctgttgattgcaagaacccccattgggaa

SEQ ID NO: 28300 - DNA, 1044 bp, Homo sapiens
taggtttttatgtatgaaaatctaattgaaagttagaaagttatctgaagccttctgctgataaacttttaaatatttcatacatattcttagggttcaggtatctctcattaaaagaatagttcgatgagttgttttatagtgttatttagtaagaaagataaaaaaacctaagcatttgtcaagagtcataatttatttctgaaggaggaaaatagttaatttaattttattaagaaaattatctattttgtggatatttagaaatattgtacaaatgcaaaaagaaattcaatttaaaagattgatttaaagttactgtgtaataagtggatatatattgaatagaaatagatggcatctcttctacttaggaaggtcagaaaaataattataaaaacatataattgagaattaggtaaatgttataattaaggtgaattataaattattgtgaaatttttgcaattaatgaaatagagaattattcatcttctcttttaggttgtaaaggcatatgatcgtgtggagcaagaatgggttgccattaaaataataaagaacaagaaggcttttctgaatcaagcacagatagaagtgcgacttcttgagctcatgaacaaacatgacactgaaatgaaatactacataggtaaacaaacaggcaaacagcgcagtgtgccccaacccacaccaaaactttgagttaatggttcttttctatcaaaatattttgattttattttaaagtggctgattaaaaatttgtttatttctgttggacagcaagatttatataagtgacttgatctggtagtaatagtctaaatcttggggaatgtgccttccatgtagcataccatgtagaaacaaatgagaatagtgtgtgtgtgttttttatttgcaacttactggtaccatttgtttgctaataatgatgcatgtttatccatagggtcatctttccagtaactttaaccatttctaatctagctcagaaactagttgtgagctagtatgttcttagtggttgtggaaccattt

SEQ ID NO: 28301 - DNA, 1025 bp, Homo sapiens
ttcttttataaatgaagataaaattgctgaaatattctcactgctgtttgtccatttggtccttatgttttcagatctgacttttagagaaacaaggcattttggtagcactgcttaccttatatcacttaccgacatatgctgtacctgtttaattcagcagaagagcaacttagatattcttaactgattgaaaactgctgttattacaaaatgctgatctccaaactttaactgaactctgcgtttgatgtaataatgttatagaacatttgagagtgcatgtgtttgttactctcagtttattggtatatataatttaaaatgaaactgttttctctttcagtgcatttgaaacgccactttatgtttcgaaaccatctctgtttagtttttgaaatgctgtcctacaacctctatgacttgctgagaaacaccaatttccgaggggtctctttgaacctaacacgaaagtttgcgcaacagatgtgcactgcactgcttttccttgcgactccagaacttagtatcattcactgtgatctaaaacctgaaaatatccttctttgtaaccccaaacgcagtgcaatcaagatagttgactttggcagttcttgtcagttggggcagagggtaagtattatttcagaacttgtgaattaaatagaaattaaatagaagtaggtaggacagtgtaggtattaggttggcgcaaaagtaattgcggttttcgccattgcagttgctgtttttgcagtggcaaaaaccgcaattacttttgcgccaacctaatagatatttgaaatgttaataaggtgtataccatttagaggcaattacaggatgcttatttatctttaaaatgtagcacttaattaccttgtgttgatatctattttggggaaataccttttaaaatgcaaatagcaatactttgagtcaaaagacattgatttttttgaaatgggtatatttaaaattgtatgtatgctaaaagattaagggagagaataggagatggaatg

SEQ ID NO: 28302 - DNA, 1048 bp, Homo sapiens
accagttctccaaagttgttttattttatattcccatgatgtatgagggttccagttgcgtgacatcctcaccattttgtatggtttgtctgttgggttttagccattctgtagtggatatgtagtggtttgcatttgcatttcttcatggctaataccaccttttcatatgcttattagcctttcatacatattctttgtcacaggtctttcccatcttttgcttgtgttactgggttgtttaataattgagtagtcctttgtcattaagttttttgtcacatgtatgtcagtgtatttccctagactgtggctttgccttttcctttcttaatatggtatcttttgatgaatagggagttttaatattgatgaagttgtatttgtcaactttttttgtttggtactttttttatcctgaaaaatctttgccatctccaagtttgtgaagatattctgtgttttcttctaaaagttttttatttttattttttagtctgcttttacagttaggattctgtggtccatcttgaattaatttttgagcgtggaacagggtgaaggggttgaagttcattttcttccatatgcttacctagtagttacagcagcatttgctgaaagcaattactttaccctgttgatatgttttctattctaggtcctttcttttcacatatggatttttagaatcagcttgtaaatttctaccaaaaaaatggtgctagcattttgatttgggttgcagttgggattgcattcaggaaaatggacatcttaacaatattaagtcttccactctgtaaagatgggttatctctccatttatttagggcttaaaatctctcagcagtgttttatagtttttaatgcagaagtcttacatattttgttcactttattccttagtttttaattttttagatgctattttaaatggcatttaaaatgtataatttcataatttttcatttttggtatacagaaatacaactgatttttgtatattgattttgtatcctaagaccttgctaaattcacctattct

SEQ ID NO: 28303 - DNA, 1053 bp, Homo sapiens
cagcatttcctcatcctcaggcctctcccatcttaagcagcacctttgcgtgtccccctttctttccctatacttctgctacctgtggtctttgtctctttaccctgaagacctctttgcttgttccacttaggtcctgccctccaactctcctgccggtgtcagcggtgacctttattcatgggtccagtggacaccctaatgctgtctttctgcattctacaacttcatttggcagtgttgacttttccccactctttgaaacactcactgctggtttccttggcaggatgttcttctttccctccccccaccccttttctttgccctttccttcactgtctgtttcgttttttttcttctacccagcactgaaacctgggtgttcctcgaggcatgacctgtgtcccttccctactccgcttaatgtttcctggatgatttcagccacacctgccagggcctgcagtcaccatcctcatgctagttgctcctaagtcttgacttctgacttagacttcacttctgaacccctggggcctttctaattgtttactataaatgtcaccttgaaagtctcaacaatatgtgcacacacagcacataaactgaagtcatcattttcacttccttcccaacgcttctacttttgccattctttgtaaaaatggccctaaatttacccatttgctcaagttgtaaatttgggggcactcctctctccctctttccccacactgaatcagacagtaaattatctggattcaccacatcttaatacgtttttattctccacctttcactttacctcattgttatgacttgtcttattagaatggagtgtctcattccattcacctgtcagcaccattctcttccctgcagccaagtgagctttcactaaagtggtctgttcttgctattttccctactttttttctcccctgctgagacggagtcttgctctgtcgcccaggctggggtggaatggaacaatctctgctcattgcaacttccgcctccctggttcaagcgagtctcctgcctcagcct

SEQ ID NO: 28304 - DNA, 1045 bp, Homo sapiens
ttttgctcccccattttaacttgccacatcccagtcacagtggggtttttttgtctttctattcagcaaaagttaatattcagatgttggtcttggtcatttgccaactaattttaaagtaaaaggcactgcacataatttgcataaagggccccatgagggtgttttttttttttctttttgtcccccccatccccctttttttttgttttgttctgttttgttttgggtgggagggtgggaaatttgggtttttaagtcctctaaacacacttgggcacggaaatgcagtactgtaaggaagagggacctccagcttccacaaacaccatcttcagctgtatgaaagggacggttgtggtgaagtttgtcaggcacagtaagcatgctgagtggcggggatcagaactctcctatctgaacctactgaggagcaaagcagcaattacatgggatcctgtggctctcccgttgcagaggccacaggaagataggatggaacgtgactggtctcctaaccaaggtgcactgagaagcaatcaacgggtcggtcgtggccagtcctggggaggtctgagtggtggtctttgggataacctttggccttatggatttggactcgaaattagaagagcctaccatttcagatgcaatcacttttggacatgcttttgcagacagtccttaatgctgaaaacacagagaatgggtaattcaagaggcctttcttttaaaatagacttttgtgacccactaattgtaaggtattgcaaggtcactttgcgtgtgtcataaagttgacttccttattggttgaaggtcacagaagtagtggtttgctttgatggaaatagctacagctgtgtcccttcctgctttttactttttcttttgctttttctcggcacgtggtatctccaccatttcttctgcacaaagatgtcttctgttcatcctgaacatttttaaaaaatgcagaattttatgtgactgcttttttgcctcacaattatgctgtgaattttacaaaaatttattttctttt

SEQ ID NO: 28305 - DNA, 1044 bp, Homo sapiens
tgagcctttgttatttcgccacatccagtaagttctatcagttgaatgttgtctgaattacttaaaaagttctcagttgtaaacaggtaagagcacccagtggaggccatggagctaggcttagagctttgccaccagccttcagttccatagccatgaacctgggagggcaaggaatcaccctagaggtgaaggccattcatcggtgctaacccaaggtctctgaaaatgagttttagttactctattatctaagtatctttcttactgatatgtaacttacctggctgaacaattacattttagagctccaaataaattttcagcctattatgtcattgtccaattacaagcctcattgtaatagccatgttaaaaacaataaagccggtgaaattgatttcagtgtatttcaaattaacctaatatattcgaaatattatgtatgtataaaaattattgagcttttttcttttttccactaagtctttgagagctagtgtgtatgtgtggatttgtactagccactggttgagagctctgtagccacacatggcaagtgggtaccatattgcttagcccaggcctagtagaagattaagactcagtcagaggaagtaaggcagatccgtgcttggaatcagttcctcttgaagaagtgcacagccaagcaacacacaaagcagaaatattttgagctctgtattcaaagcaggaagatctgggaccatgtaagggggtttggtcttcagttctccctttgatcccttccctgggtgtgtgctttcttacagcctggagagtggaagggaagagagggggcttcctggactcctttcctgtctctagaaatgacccctgcagctgtcctgaagctctcaggttaagctgattgtgtccagagcagacaggaggcggcccactgccccactgtacccacccaagcactcacctaagctggccatggaaatgtgaatgaaaagcctgacccaggccctcttgccctgctaacccagcaaggaggctctgaccagccagccagca

SEQ ID NO: 28306 - DNA, 1027 bp, Homo sapiens
tatagttctgagatatatattttctcaattatagtcagaaaagttttttgttaatagttacactgttttaaggaatcatgccaaggtttgagatcaaaattgttcttttccaaaaactaagatgtctctcctaaatctccacctgatatcaccaacttgaagtcctaatgtccccatggggggtttccttccagactccgccaactgtgaattgcctttgttaaccccgtgcagcaaggctgtgatgagtcaagccttaaaagctaccttcagtggcttcaaaaaggaacagcggcgcctgggcattccaaagagtaagtactgctttcctgagcctgcactgggtgagaagaaccaacttcagtgcagttgtttgatcttgacttgtttattaagcttttgcttggggtattctgcaaagagtagcatggatgtcgttaacctgagccagtttctgtttcaccccaatcaacccaagacttgatccagaactcattaaatatgtagtagaaggacgcattactggtgtcttgaaatgtgcctgggtcgtgtcagaatggtgacgtgtcatcatggtatcttgctcattcgtgggttctggtgtatgtcggtacttggtgcataaattagggatgacagtggtctcactacctttccactgtttttacctcatgtgttccattttttcttctctcctggtagacccctggctgtggagtgagcaacaggtatgccagtggcttctctgggccaccaatgagttcagtctggtgaacgtgaatctgcagaggttcggcatgaatggccagatgctgtgtaaccttggcaaggaacgctttctggagctggcacctgactttgtgggtgacattctctgggaacatctggagcaaatgatcaaaggtaccagctgaacgtcttacttctccttgtccaggatgagctgtggccgggaagactgattgggaaagtcacgtgggtgttcttcaaccttagggttgccacttgaaatgacatagagtacctt

SEQ ID NO: 28307 - DNA, 1033 bp, Homo sapiens
ggagtgtatgtgggagtttaaggactttgtcatggtggggctagtttgtaggtgtttctcagcaggatgaatctcccagtgttctccagcaacagcctttgctctttatcagtcctgggaacgttcacggccgcagtttgcattcagtcctgcagggacgcacacaactggctgggtcacagagtggtcagggcatagacagaaagtagcgggggactggggaaccctcctgtgacccgtgttggaaggtgctgatccccgttgtccgccctgccagatgtccagggtgctgcagaaggacgcggagcaggagtcacagatgagagcggagatccaggacatgaagcaggagctctccacagtcaacatgatggacgagtttgccagatatgccaggctggaaagaaagatcaacaagatgacggataagctcaaaacccatggtactgtgtcccttgcagcctggaggcttcatgagagcggatgaatagagaagtctgtatgtgaagattagtagaatacatactttgcttcttggatgttctgaatattgatggaaacttaagttatctggaggaaactcagtaataagtattactttcctcttatttgctggtgaacctttgctttctaagcacagaaatatctaagatcctctcagattttcctcagagccaactctttaaaattttaagctaactcttaaaaattgtaggttttcatttttaaattcatcacttttctgagagaagcccagaaaaaaagtctcacagtggattcccagaggcttttgttccactctctagaaaaatgcccagcagtgtcctcttctgagtgtcacctcccgggtccagtgtcctgtgatgaagagcgctttctcagggcagcccgtgtgctgagggaccccggtcacagtgtgtgcacagtcagagagctgtctctgtggctaggaaaacagacagaggggcctgtccaggcccaggacaagctggactcccaccaggggttcgtgtactgtgcacactgggaaata

SEQ ID NO: 28308 - DNA, 1034 bp, Homo sapiens
ggtggtgcatttgttacaatcagtgaacctacactgacacgtcgctatcacccagagtccatagtttacattagggttcactcttggtgctttgtaaattctgtgggtttggacaaatgtataatgatatgcatacaccttatcacatcatgcagaatagtttcactgccttaaaaatcttctgtgctctgcccatttatccttctctctcttctggcccctggtaacaactgatttttttaatagtctccatagtttgccttttccagaatgtcatatggttgaaatcatactgtatgcagcctcttcagattggcttttttcacttagaaatgtgcatttaagtttccttcccatatttttgtagcttgttatctcatttcttgtcttttcagtgctgaataatattttcttgttttgaggtatcacagtttatccattcacctattgcttctaagtcttgacaattacgaataaagctgctataaacatctatgtgcagctgttgtgcggatctaacttttcagttcctttggaaagacaccaaggagtgtgattgctggatcatacggtaaaagtgtgtttagttttgtgcaaaactgccaaactgtcttccaaagtagctgcaccattttgcattcccaccagcagtgagtaaaagttcccgttgctccactttcccaccagcatttggtgttgtcagtgttctggattttgacctttctaataagtgtgtagtattattaactatttatttattatttgttggattttttaaacttttattttattcaggggtacatgtgcaggtttgttatagaggtgaattgcttgttgtaaggagttgctgtaaagattattttggctgggcgtggtggctcacgcctgtaatcccagcatgttgggaggctgaggcgggtggatcacgaggtcaggggttcgagaccagcctgaccaacatggtgaaaccccatctctactaaaaatacaaaaaaaaaaaaaaatagctgggcgtggtggcgggcgcctgtaat

SEQ ID NO: 28309 - DNA, 1061 bp, Homo sapiens
tcttttttgggggccacaactcaacccataccagcttgcttgatggatattcatagctgatgtcaaagtaaatttaattctcatcctcagaagcaagaaagattccacgactaaggccaacaataacatccagggagttcgtttcttgagcaacgaccagctctttgcatagcacgaattgccaaaaaaggccagcgtagtcatttctcggccatgcacacctgtgatgtggcaagccatgttgacgtgccaaaaatgagaattctccagtaaaaataaaatagagtaaattagataataatgttccgaaggcaatttatacttttctgtgctttgggattcattttcaaaacatgtttcatttgtctttgaaaatcgaagttcacgttcaaggcccctttgagtttgctttttgtccaactattcgggcatgcaatagtcactaatgggaactcctggcttagagccaagaaaccaacaaaaggccccaaaatgaatgctttaaaagactgtgcatgttttaaaggcctctcgcctatcagcaagcaccactgtttctccatggacaaaccagagtgtcctgacaaggtctcctgtcccctggcagacagctgacacccgaggcccatcaggctgggagcttgcttgtctggaatgtctttgaatgcatgggctatcctttcccactcccccatagcctcccctatcagccaaagtaatttgaagatgtggtggtgttataagataatctaggataatctcccaattcttgcacacttctctgttgagaggtcggtttatcgcttcttgcacacttctctgttgagaggtcggtttatcgcagtttgtttttaggtctattaagaggtctaagtcccctctccctgaatctgaaccctgtgagtgcgtggctgatagagcaccttgggtgtggctgtggtataagtcctgaggatgcatgtccttccatattcccttctctttgagtgtgggagagtctgggaatgctgcgctattactcttgtgatttagagcaaaagggatatgatttgagtgggcct

SEQ ID NO: 28310 - DNA, 2046 bp, Homo sapiens
cttaagcctcatgttccaagccagtgtcaacaggattcttcctggggccactgggttttagcacagccaatggcacattggttaccgtggttccttagccctgtaattgcatcagaggcctgcccagaagactgattggaggccagcagtctcgctcctgtggccaggcagcatcttcttgtgtccctcgagagttttgaaggtattttcacattatcttcccgatgctgttgataagtctgatgcaattgtaattcctgattcactgtatatgaactgttttctttccctccagaaacatgtgaagtattcttgacctggtatttggaaatttcttgttgatgtgtcttagtctggatctttaaaaaaaaaaaaaatgctgggcacttggtgaatcttttcagtctagaaactcataacgttcatgtctgagaaattgtctagtaattgcctgttctctcttcttggacctcccattattcagaagttgcaccttctagtctggtctctctgcttcccttgtctgtctttttggttcttctctccattttcatttctgccacccacattttagttttcaggatcactttctttttctctgaatgcttctgtttttgtttgtttttcaccttattcctgtttcaaagttgcacatcttcttatatttctctgagaaaattatgattttgcttaacacttgatttctgcttcctgctttttatctgtctcctccaagttccttgtttcagtgtgtttgtcatggtctttgtgtctcatgctagaggctttcctcactatctcatgattattggctgtctgttcatatttaaaagagaagcattcaaatttgattggaagttaaggactgtatggagacaaggtatagaaaatattttcattgttttattagtcagggttctgtaggggaacagaataggagatagatatagataatagagatagagacatagacatatagataaaggggagtttattaagtattaacttacacaatcacaagatcccacagtaggctgtctgcaagtttgaggggcaaggagagccagtctgagtctcaaaactgaagaatttggagtccagtgttcaagggcaggaagcgtccagtacgggagaaagatgtaggctgggaagctaggccagtctctccttttcacatttttcttctgctttatattcactggcagctgattagatggtgccctccagattaagggtgggtctgccttccccagcccactgcctcaaacgttaatctcttttgacaacaccctcacagacacacccaggatcaatactttgtatccttcaatccaatcaagttgacactcagtatgaaccatcacaagtccacccctcgtcaacttgaacccatacacatctgagatcatacataatcttcaaataaagacaataataaggtcataattatgcctaacatattacaactattctttgtacaacctgaaacacaccagtctccaacccaaatactattacataaagttaacaatacttaaatgctgatttgaagtcagtaaatcttatgtcacatgctaaaggaaaaaggaaataaaatcaagatattttcttagtacaagtataaacatgcacaaacatgtttttaacaaaacaaggaaaaaatactcatgacaattacagtcctcgtttctgcagctggtcacgtggttgtagccggtattgatgactgccttcttctactacccattctgtattccctttgccttcagcaaacaccttggcaggttgtgatttttttttcctggtggagtgacccaaaccttcattcctgaagggtctgggccatttctagtcctgcctggattgggctgttgtagtttcccattgatcttaatcacagggcatggtaatactaagagatgccctaatggatctcctgtattccatgagtactcttccttacctccattgtggagtagtagactgatttcatcttgatagtctgggtcaatcaccccggccaactgtaactcccatcttagcctg

SEQ ID NO: 28311 - DNA, 1013 bp, Homo sapiens
tgtgtcaggaagctgcagatgggagatgtccaggcagtggctcagaagaacccatggaggacccattaggggaagggttggtatgtggacaccagccacgcccagggtgaaccagctgtgcagtcaaatacagaacttcccgtcccttacacctccattctctgtgtttcaattttagtgaagtcagccacacccagagtgaaccaaccgtgcagtcaaatacaaaacttcctgcccctcacacctccattctccctgtttcaatcctggtgaggtcagaggcacagtcatgagcaaggtggggaaacagcagtaaatccaaccacaacacctctcctccccgactatagaccgccaagcctaaagcaggcccgtcacgttggatgccagatagaaactttgatatgagataggactggactcaaaatgcctaaaatcaaatgtatgaccacaaagcttttcgaaaaatgtagactttgtccaagatagcattcaagggttgagaagtataacttacatggcttgttagaaagcagttgtatggcaagagagggttctattaaaatgttattccatcatataatttctatggagaggaatttggaaatggctagcaaaattacatacatttatcctttgactcagaaatccacttctgggctgggcacagtggctcatgcctgtaatcccagtactttgggtggctgaggcaggcagatcacttgaggtcaggagtttgagaccagcctggccaacatggtgaaaccccgtctttactaaaaaaaataaaaataaaaataaaaattagccaggcatggtggtccatgcctgtagtcccagctgcttgggaggctgaggcatgagaattgcttgaacctgggaggcagaggtttcagtgagccgagattgcaccaatgcactccagcctgggtgacagaatgagactctatctcaaaacaaaaaacaaaaccaaaaaaaaaaaaagagagagagagagaaatccaattctggaa

SEQ ID NO: 28312 - DNA, 1049 bp, Homo sapiens
gctggtcccccactgtgtgccctgaaccagtgtactaagctgcctcttgtgtgttttataaatttcaaaatgtatgtgatgtacaaagggaggatatgcataaggggtagatatatacacacatagaagttaaatactcaaaaatatttatttttatttttatttttgagacagagtcttactctgtggcccaggctggagtgcagtggtgcaatctcggctcactgcagcctctgcctcctgggttcaagcaattctcgtgcctcagccccccaagtagctggaaatacaggcacgccccaccacacccagctgatgtttgtatttttagtagaggagggttttgtcatgttggccaggctggtcttgagctcttggcctcaagtgatctgcccacctcggcctctcaaagtgctgggattacaggtgtaaaccactgtgcccagcccccaaaatatatattttttgatgggctagtttatccccaaattttcaaagtcacttgtcactgagaattctgaagccttgcggggaatgatgggcctcgtctgattcaagagaaattgcctgtttctgagttgagtcgtagtgtatctgggtactcaggctagatcctagaatatcacagatgctcaggagcgatgcattcacctgtctgttcctgccagggctttccagctgccttctttaataagctcctctaccaaagcagttccagatagaattgaacaatctttttaaagcataaatatcagcttccaacaggggtctccatgcagtctctactctacgggtggcgtatttgactcctctttccagctggctggtgtgaacacacccactcgagtttcagcaccactgcccttttttttgttttgttttgttttttgtttttaattttagtatgagtactgctagcaaaaacagactgcttctggagcttcaaccgaataaccatcacccttctaggcaacttgggtgatgtgttggtggatctctgtacgctttttatttatttatttatttatttatttatttatttattatac

SEQ ID NO: 28313 - DNA, 1067 bp, Homo sapiens
cctatgagtgagaacatgcggtgtttggttttttgtccttgcgacagtttgctgagaatgatggtttccagttttatccatgtccctacaaaggacatgaacaatgagaacacatgggcacaggaaggggaacatcacacaccagggcctgttgtggggtggggggaggggggaggaatagcattaggagatataactaatgtcaaatgatgagttgatgggtgcagcacaccaacatggcacatgtatacatatgtaacaaacctgcacattgtgcacatgtaccctaaaacttcaagtataattaaaaaaaaaaacaaaaaaaaaacccaaaacctcttcttgggagctctggagtagaattctctttctggctggactctgataaatacagctggtgaccattatttcagaatgaaatttcgtttagtttatgagtctgtccaaatatttcgatcatttaaattcagatgttagtttacctcggtttgtggagaatggactgggctgtagaaacttagaagccaagcgaatgtggactccgctgtcttcattgctgtcttgttactatggatgtcggattaggtgcacccgtgaggtcttggattgtaaccccatgttctgcaggtctcaggacctcttccctgcactgtgctagcccggccccctgtgatggactgaattgtgtccctcaaatttatacgttgaagtccaaacctccagtacttcaaaatatgactatctttggagatggggccttaaaagaggtcatgaagttaaaatgtggccatgagggtgggccctgatccagtctgacaagtgtccttatataggacatgcagagagacaccagggatgtgcgcagagggaccgccatgtgaagaagcagcaagaggagcaagaggacggccatctgcaagccaagggggaagccacctgcccacaccttgatctgagacttccggcctccacaaccgtgagaagatacgtgtccgttgtttaagctgcccagtctgcggtgctttgttctggcagcctgcactgactcacaaacccacttctgacct

SEQ ID NO: 28314 - DNA, 1034 bp, Homo sapiens
ttcattgtaaagctaggtcacagcattccacattcaggtgagtactaggatttgtagattatcagtcattatcattaacatactcacatacaattgtcattgttgctaagaagtgtttgcaccttttcaacacttagaaattaagtcacattttctgctttcaaagcccttaaccttaatcaatattttataatgtgttttcatagatgagatacatttgagttaccccagttataagatggttactccttgcaattattctagatatgaagattcatttggctaaaatgtggtaaaattgcaaggccattcagcaggtcagttttaaatacaatatgattattattccgtcatctttgtgcgtgattgaaaataacagattgtgtggttggcaattcgcttccccattagaaaatttaccttcctacttctgttgtgtcttacatagtataattattctgttgccttgaaaaatattataataaacagaagggctaatttttttaagcgtgttgggtggccgaggagaaatgaaattttgagtggaaaacctcacatgaattgtctgtagttgcttgtacttcatccctcaccagtgcaaaagccaattccacaggaattgaaaactgttatgaaagagaagcctggtcttccgtcttaacatcgggtcatgaattcaatggggaacactgtatcttcttcatctctatgactcaggcacatagtagctgctcacttaatatttattagaaataaatatttactgaaaaaatgaatctcccccaaagaactgaaagcagggtcttgaagagatagtcacacacctgtgttcacagcagcatcattcacaatagcaaaaggtggaaacaacacaagtgtctgtggacagttgaatggataaacaaaattctggtctatacttatgttttagtttgggctgccctaacaaagtaccctagactgagtggcttataaataatgtcaatgtatttctcttagttctggagactggaaacccaaggtccaggtgccag

SEQ ID NO: 28315 - DNA, 1461 bp, Homo sapiens
ccagcccacatctgcggaagcttggttggagtgaggctgcttacggctgctcccctttcagtccatgtttggtttctgcatccaagaggcagagtgagaatcagaccctggtcgggggtgatccctgaaggcaacgcagtcatatgcagtctcttggcaagcagccagtgctctcagctgggacaccctgtcttcaggcatgctgctctgtggccccgcttacaatggtgacgttgcctgattctggccctggttctgcctatcactggccagacagccctaaaccaagctcataccgctagggccttaggaagggagaggaatgcaggcaaaagtcgtctcccatacacagccacctaaggaggaacagagccttaggatgttaagtggaacaaaccaagtcacgacccacatgtaagaatgtgaccaagagcgagaaaacccacagacacacctttctaagggtggtggcctacaggattagtttctctttctcttccaagtgactgctctccccacaccttggcctccaccagaggggaatgtgggcagtgcacgcaggaccgcacggtgtcttctgcaggggtgaaaacagtatttgaagcccctgtgactgcaggtgcctgcaccttctgggggtgggagagggcatgaaatcctatcagcaggaaagtccatccttgctgctctgctccactcgcccaagccgggctgggaagagaggagagaggacttcagaggtacccaggctattcccagggggaggcctgtgtggtccccgtttgttcggagatgataaggagtccattcgagggaggagctgccttctgaacatgggagtggctgacactacctctgagggtttcagtgcctctcccgtgtccagaattcttctgattctgatgcagggggcaggatggcaggggtacagggtaagggtatgagggctcaggggctgctgaggatgggggtgtttgttttgttttagttcctgccaccccaccctgccctctgctccccatctctgcctgggtcacccatcactgaaagatgtcagttgcacaccaaggtggctaccagagggagaaaaacagcccctaggggtagggaaggtgggagttccgtggaggcagcacctggatcaggagagctgggcagccaggggcagaacaaccacctgccagggtgggattaaaaagcaggcatcctcaccatagcctaggatacctttggattggagcattcccagctggaacgttgccctcttgcagccacgtacaggtggtgctgacactcaggccgctcccaaacgttctgtcgtgcggttatgtccaccctgggttgcagcccatgtgcaccctgggaggactgctgaacacaccgccaggccatggagattgtgcacaccactgccggtctgtgtccagactagcagcaataaggattctgattctgattaaa

SEQ ID NO: 28316 - DNA, 1039 bp, Homo sapiens
aggtcactggtgagcttggccggccatggagagctgaggcagaagctccatctctgcaggtggaggagagaaagagagaaaggaattgagacgggaggtggcccactgctggatgcttgaccgcaaagggggaaggaacagtagctggagggagtgtgttttgggttttgccatttttaggaaggcgagaagaaattagccactgagttcctgcagttccacctccttaggtctctggcagcttggatcacagatggttttcaagggcaggtcctggtggacaggccattctccctactagatgctgcactctgcaggggccaggacacaggcaccatcatctttgctgctctcaccccatgccccaggttcagcacagcaaagacccacatctgccctgcaaaggccctcgaggccgctgatgttggcggcagggttggagtagttaaaagccagtgattttcaaggtagaagactccatccagcttctgctggaaaaccggtttttgttagttgtgattgtgttctggaaaaatggaatgtgacttctatgggaggctccctagtatcaggaaggaagcagggaacaggggcggggacgtcgggacctccatgggctgtttcacatctccaaggcgtttctgttttcctcagatgtaaagtggggatctgtctatcgtatgagcttttgagtcattttaagttatgctttgcttggaagttaagaacattccctgaatttgagaatatatattttcaatgaccttttatgtagctggagggacatggcccagggctaggctggtgtgtgtgtgtgtgaatacatgcatacatgcacgtgaggttgaacccaaagaggcaggaaataattttggaaattcctagaataaaggaaggggcagattaaattgctagcatgtggcatgaggtgaggaacctggaaggagcccacagccggggtgtttgagttttccgttgtttgagagcgcgtcgtgtgaaatttatagagcaggtggcattactatttttatctctgtgg

SEQ ID NO: 28317 - DNA, 1628 bp, Homo sapiens
gcgcggtggctcacgcctgtaatcccagcactttgggaggccgcagagggtggatcacgaggtcaggagatcgagaccatcctggctaacacggtgaaaccccgtctctactaaaaaaatacaaaaaaattagctgggcgtggtggcgggagcctgtagtcccagctactcgggaggctgaggcaggagaatggcgtgagcccaggaggaggagcttgcagtgagctgagatagagccactgcactccagcctgggtgactgagcgagactctgtctcaaaaaaaaaaaaaaaaaaaaaaaagtgtcagtgtctactgtgtgcctggccctgttacaggcatgcacggcagacagagcagcaaacagcaaaaatccctgtcagagggaggcttcacgctggtggggcggaggcagcaggagctgtcgggaccccgtgaatggcatgattgcgcacggggcccaggcagtggctgagttggttacaagaatgcgctcggagtctgactctgggttccagcctcagctctgccacttacccttgtagagttgagcaagtcagactctctgcacctcagtgtttgcatctgtgacgtggagtgaggactgtgctgccctcagagctctgttatgaggttgaaataagctaatggatataggaagcacgtacagcagtgcccagcccactgcaggcggtgttcagtgtctgctgtcactgttatgtgaaaggtgtggtgttatgggagggaaagggatgcacaggccggcaggagactgggaacagcagttctcccaaagggccagccagggtcagcttcgtggagaaggtggcgttgaaggaagcctggaagggagcgatgggccgtgccacatggacctggacctgggtatcctggggaagagcccccaccccagcaaggtggccaggggaaaggccctgcccctgggggatgtctggggctttcacggagtggcctggtggtcagcgtggctgggaggagtgatgtcagggcatggcgagtgactcagcaggccatgtgaggacttcgccagttactctgggtgacgtgagagccatgggaggtggagggctgactccctctgacttaactgtaataggactgtggtggctgctggttggaagtaggcctaggaaggaagcagggacaccagtgaggacgaggaggggatgacagtggtgtggacccccacagactccttggaggaggtgaggggtgggccggtgtgggccagaacctgaaggtggagccctcgggacctcctggtggctggatgtgggccatgaggggaaggaagccctagggatcacctccggcatggcctggcctgacctgatggagctgctgtcgaccgagatggtcaagtccaccaggagagcaggggtgggggcagctggagctcaattcgggacacgccaggcgtgagatgatgtcccatctcaagatgtttcctggacctgctgtaactaagtacacaaactgagagctgaaaacaacaggaatgggccaggtgcagtggctcatgcctgtaatcccagcactttaggaggccaagacgagaggatcacttgagcccgggagttcaagaccagcctgggcaacatagtgag

SEQ ID NO: 28318 - DNA, 1028 bp, Homo sapiens
agcctgggtgacagagcaagactccgtctcaaaaataaataaataaaaataaaataaaataaaatgaatacaatatgcttttcttttctttctccaggtctagcacataccgctccaagggctttgacgtcacagtgaagtacacacaaggaagctggacgggcttcgttggggaagacctcgtcaccatccccaaaggcttcaatacttcttttcttgtcaacattgccactatttttgaatcagagaatttctttttgcctgggattaaatggaatggaatacttggcctagcttatgccacacttgccaaggtaaggctaatccatggatttaaggaaatcaaataacaggatgagattctgaaaatcagtcattaaagggctgacacatgagtcttgggctgttcttggagacagtgagaaccacgtggtggaaacagaccagcattcacacaattatatttccaagcattttttaaattgaaggtaaacagcatgattcttggaaccttcctgtaagacaggcaatagcattaactttttgttttattttcgttttatagtttaaaatgttaacagaatttgaatcatgtagattgtggtgtgtgtttaggagtttttactaaggtgggattaaaagaaaacacatttattaaattcatacgtttgcgtgaagatggagcctgcagacggccctggaatgcaggcagggggtggtgccctccgccaggctgggacgtggcctgttttcctggctctgcaggggacacctccgaggagacacccagcatgggaatatgggcagcctgaaggcatgccctggggagagccagcccttcccagtggtggtgagccccagaggaattgtggaaccctgctcttgccatcaccagagcctccccacatggggaaagacagaattggatgttcaccaaatatttgtacttggggcctacccaaaggaaatatgtctgtatgcaggaggagggaggcaggcaggggaatttccacctggaggcattgcca

SEQ ID NO: 28319 - DNA, 1024 bp, Homo sapiens
acagctgcggctgacaggcaaacaaagatgtctgcggccatggcagctcctagagaaactcttctctccttactctcaaatgcctaagattaggatccaccacctgccacggtaacctacttccacggcttctcacaccccctcacaaggcagtcatgatgatagatgtgactgcgtcgaatggcttccagaaatatgatcttatttgtacaacagagccgtgcccaaaggaagaatgccaaccagtgggaagctctgctggggctttctgaattcctagacccaatcacaagctggtgtactgttgaaccatgaaaaaattgagtataaacaccaggaatgtctgtggcgcgtggcgtctacactgggtgacccatgtctacactgtgagtcctaagcgggtgcccctctctgtcgccctcccgcagccatcaagttctctggagaccttcttcgactccctggtgacacaagcaaacatccccaacgttttctccatgcagatgtgtggagccggcttgcccgttgctggatctgggaccaacggaggtagtcttgtgggtatcttttagtcttaaaggggcgaaaaatcacagatggatgggctgtttttttctgttttattaaacacctgagcagaaatattaggcatgtaggtgtgcgtaggtactgtaaaactttcatcctccttgtagtagatctttttagaaatggctaaaattaggcaatcctttatgtcatcctgccatctggaaggatgattctcatcgcttctccgaattccattaaaacttttctttaccgcccttggaagggcactgctttctgtgggtgggggagggacaagtgaggagcggtggggggcgtggtgagtggacctgactgtgggtagggggccaaaggagagttcataaatttggcagggaaacaggggcccttgtagatcctttctctctctctctctctcaacacacacaggcacacacgcaccacagcacaagtgtttgctgctgaaacagaatca

SEQ ID NO: 28320 - DNA, 1091 bp, Homo sapiens
aggttgactccactggggaaaattccccatgacgtaggcaggtccagctgagctttctgcggtaaattctccttctctttctcctcttttttcatctccactgaggaagcacaacccacacagctgtcatgaccaggtgctgacctgcactctcacctgtgtagtaccgcagtgtcgctggcattccatgaagcacagggtgcttccatatgtgccctgctgcagttcccctccacacctaggctcggtacccacacaccttaaaacatgccgtcgttccagtttgcagggactggacccccaaaggcacgctgagccgtgaccccactcagtgcttcctgagctgtctaagccactgggacctcagtggactttaactgtggtttaataaaccaaggggttctgtctgtgtccaatgtgagaggtggaccgctcatttcacagctgtggattttccctttctgtctccccagaaattgcaggtgctgcagtgtctgaaatttccgggcctttctcaacagaggatgtagccagcaactgtgtccccgctcagtctttgagcgagcccattttgtggattgtgtcctatgcgctcatgagcgtctgtggagccatcctccttgtcttaatcgtcctgctgctgctgccgttccggtgtcagcgtcgcccccgtgaccctgaggtcgtcaatgatgagtcctctctggtcagacatcgctggaaatgaatagccaggcctgacctcaagcaaccatgaactcagctattaagaaaatcacatttccagggcagcagccgggatcgatggtggcgctttctcctgtgcccacccgtcttcaatctctgttctgctcccagatgccttctagattcactgtcttttgattcttgattttcaagctttcaaatcctccctacttccaagaaaaataattaaaaaaaaaacttcattctaaaccaaaacagagtggattgggctgcaggctctatggggttcgttatgccaaagtgtctacatgtgccaccaacataaaacaaaaccaagccttggctcgttctcttctctcttcaatctctggaaaaataagtac

SEQ ID NO: 28321 - DNA, 1023 bp, Homo sapiens
tatcccctctctcctgcttgtgtgccaagttcagtgttccctttgcatttttttggggtgggttggctatattacagaattccaccaaaagtgctaagtgtcccctcctgcagaagtatcgtttgtattcacagtaggctacgtgtggatgtttcagccatctgctctgctccctgggtccccgggtcaccaccatactgagaaatataggactctgccaaagagacgtggaggccacgtcggcttgtcatggtgtcctggaagactctccagcagccagaagaaccttctgtgctgttttcactagagaagatttgagttgcagcctcttggaaagaacatgacggcacggaacgggaggagggggctcttgtatcagggcccgttgtcacatccgctctcagcttgttgaaaactcataatctcagaatgcatttcacacggagagatgtctggaagtccaattctcatcccattggctttttccgtggttgctgttttgtgggccgctttgcacaggagtgaagccaacacccctagattgtgccttcacccttgctgtgaaaaattcaaagccctgaaataagaggagggaatcgcagacatgccctgattagttttcctgcttatttcttcatacaggcatcttctgttccgttgtattgtgttaggtttcagaggcggggagcttcctcctgcagcagatgaacaggcatagttcttaaaatacaggaaagtaacaagtgaggtttccaggtagagtaggtgaatgaagtttgccgtcatgctctgtatttcatatcagatttctttatcttttcatatcgcatgtcattggatgtgacattttgatgaaaatactgaaactacaaaagcataacttcgcaacaagaatgagatagacaattgaatgtgggacatttttctggcatgtcttgctgctgagaatcggacttccagtcaaaaccctgttagtgacacccacctcctccagttatgcaaattgatgcttagcttggcaag

SEQ ID NO: 28322 - DNA, 1095 bp, Homo sapiens
gcattccgaacatccgacagcttctttctccagaatgtcttctgtcagagacttccaggaaaggagctccctcctgtctcactgctgtcagcgtgggagccctgctccccaggctccacgtccccggaaggtccatcttgtcctggagcacacccagccccattcagggtcagtgcaggagggaacagggaatctgcatttcagtaagctccccaggtgaggctgcagagcagaaaccacggctttcagacgtgagcaggctccctgggctcttggtgtcaccctgttagccacatctgcggaatgtggaaggcagaacatagccacgctgcttagtgctgccagcgaacctcaggttgcatcagtggctggaatctatcacagctgttggggatacgtaactcccagcaataaatccagtattttcttccctgccctgagcttcctctgggtttcttatcagcagctattacacacagatgtccagtgcttctaaactaaattgtactgtgtaacttttacatcacacttgtgtgcttaaaaagcacaccgtgggtagtgactgggccaagagacatcacaaagcttcctgataaatttgaatccagccacggcaagagcgacgtgcgggtacctggtccctgatgcttgggtgccccgttgagcctcgggtacttcttggacactattgtgagagcagccatcctggtgtctctgccagcatcttggggaacgctgtgatggtaaaatatctgtctctcctctgggaatcagggcagccctgagaagtgagcagttccctttacagatggataattgtttgtgtaagaccaaccagataaagtccaaactgtgtagaacacacgtgtgcctcacacatagccatctgagtaaaatattttttccaatgtagatttataattagaaatgacagatttataatatagacttcagtaagttgggcacagctgtcactttcgtggtatcaataaaaggctagaaaccttgggtgtccttggcaacctagcctttgacattgatgtttttccataggattttcttcatttgggttggaataaaaatgcatttttattc

SEQ ID NO: 28323 - DNA, 1027 bp, Homo sapiens
aaggatcatcccagccatcatgtggtttgggggaaagctgggaccccacttggtacaatttaggaaggtacagaagaatgtgcattccatcatgtgggttctgcttctcccctgaagcctctgtcaagagctgctttgggtcttggtatggagaaatgccttcatttggccagacccatctggcagaggcagtcacgatgccattggacccccaggcaagcagcccctcctagagagcgagggtcttggaaggcctggtatgacccccatgccactctgtttcctagggaaccctaaagggaaaccgcacgtgagggactccactgagataaccctgacgtcaccgtgccactgtgccccttgtctgcagggtaacttggctttgaaggagcatcaggggaccctctgtaggactgggggtgagatcgatggacctgccagctgttattgttgggattatagggaagtgaggaggtcgtgtgtgcctccttggggtctgagtgcctccttggggtgcctaagggagactgaacatcattttggtgatatttattgatgtaactactccctttgcacgatatttattgatgtgactattccccatcacttgtgggatgctgagctgtgcatagcacagttcaaaatatctgatctaagcaggcaggaaggagacagctgctggtgctgcttagagttaggcgcagggatgaaacccatgagatgaggaggctggtggaggaaagggactgggggcagtggagggatggagaaatggacagaagtatggatggggaatgctgaatgtgagggagaccccagaaccggatgacacaagaaaacaatccttggctgtggccgggtgaccatgttaaggccattaaagtcatgcttggagaaaccacatagatgcttgcagctttgcctgtcatccagtggacttcagagcacagcatccgttcgaaatccagcggcagattttcatagtctgacaaattaaatcagctgttctcctggcgccagagtgggc

SEQ ID NO: 28324 - DNA, 1032 bp, Homo sapiens
attttttaatgttccaatattatagtgacataagtaatattgataatggctgtagaactgaatgaataatacacagcataagaacgtttcagaacacagtgatatgtattcctaacataacttctgttatttcatatcatcctctcccactgttttgtgtttcaggtacagagccttcatttttattttgacatttctgctgtatgcaagttttcacttatctcgaaagcctatcagcatagttaaggtaagaatcatggaaagcactgcctgtcgtctctgtgaggagttcgtcacttgaaaagcttgtggggcagaggatggggatggtagcaggtacatggggaaacagattatgtagaaacaagttattctgctgctttggcttttcggtttccctttgctaaaattaaagtcttttaaatgttttttggatttatactttcagaggtagtagacttttagttttattagttgacatttccagaatttgaaagcttagctaaatatttattttatcttgtgtgactgttccttccaaatgtatccagtcttaagtggttccccaaattccagctcttcgtgcgatccaaccctaggtctggctgcggaggtggctctccattgttcttggaacgctgcatttttgtctgagtgatgggtgggcaggaagttgttaagcaggtgttctactagactttgagaaaagaagattaaagcagacaagcctacataatcaccagttataacctggagaaaagcaggaataattttcttaccctcattgggattacgtcacccggcctgtagaccatcaggggcctgagaggcattagagtctctatcgtagaagaacgaggaaatcatccactgccagagacagtgcattcacagcccagtggcccctcgctcactctccgggagttggcagggacccagctccaggactgcaattctgtgacctttggagctgtgcttcctccactcctgccggtggctgagccctgggtggctgccctctgcagccctggt

SEQ ID NO: 28325 - DNA, 1046 bp, Homo sapiens
aggagtgtgctcggcagctgcatgtccctctatgatgtcaccctgtgttgtatgggaatggacttggctgtggggagcctgcagccctgtagctcagtttgggttgcaaggcagtaaccagtttcatccaaggtgataaagagaccaaggtgcttggtagtcagagggggctgcagaggtggagcgagaagcagtagggctggtttcccgcagcacctagaggcctggggtctgactctgggttcccgcattgctcggggcaggttgctggtgtctgtaaaggacacgctgaagcctcacttctggttctgttccttttcaagtttcctcccttccttgcatttacacaaagatgtttgttccatatcaagatagatgttttatctccactcatttttatttctaatgaatttcataacatgaaatacctcattacagacattcttccagcctcgctcccctgatgtgcttttcctggttttgcttttcttctggggcttgtcctctgaatgagagtcgtgggcttgtccacacagcgtccgcatgctctgcttgtgattattggccacgctgggaagtattttccatatttaaagtagcgttcacgttcacagtgttggcactggctggcggtgatctgccataccccccttgcacacaagtgggctgccaggccgagtgactggggacaggccggggcgtgtgcgggagtcactggtgggacagccaagctgtgcccttgccctcacctggcatgctatggcgatggcttttttctgaaacgaatgccaatttagtaaaggtataagatggcatcttgtgttttattaaattttattgtgtatatttaaggtatgcaacatggtgttacagatacatagagatagtaaaaaggttactagtaaagcgaagcaagttaacatagccatcgcaactcacagctgcccgcttttgtttttgtggcaagagcagctcaaatccactcatttaatgtgaatcctgcatacagtccagtttcacacccggtgctcccgtgttgccctgtc

SEQ ID NO: 28326 - DNA, 1621 bp, Homo sapiens
tctggctctgactcttggcttccagactccccggaaggtgcagtgctaattggctccccagagactccagtaagcatcttgtcagcctcagcaccagctccagcctggggggtctcgctcagaagcaaagtcactgagtgacctgtcctcctgacacccacaagactaaaatgatctctcagaggggacctcacagaaaccagcaccttgtccatgccagctgggtatctgagagaaactgctttgttttcctgaagtcatttgaaacagcgtgcagagacatttaaactcggcgggaaataggagaagcccaccttgacccttctaattctctggccccaggtgccttattaacaagagacagtatcagacacaccagacaaaagccctcctgagcccaaagagcccaaatgtctggaagctctctgctgagatgccaaaatgcatgcctttctgataaagagacagagacagatgaggtaccatgatatggacatggcagtggacgtggacaggggagcagtggagatggagaagatggagacacacgcagttgaggatacaggcgaagaagatggagacacacgcggatgaggatacaggcgaagaagatggagacacacgcggatgaggatacaggtgaagaagatggagacacacgcggatgaggatacaggtgaagaaggtggagacagacgcggatgaggatacagatggagaagatggaggtagacgcgggtgaggatacaggtggagaagatggaggtagacgcgggtgaggatacaggtggagaagatggaggtagacgcggatgaggatacaggtggagaagatggaggtagacgcggatgaggacacaggtggagaagatggaggtagacgcggatgaggatacaggtggagaagatggggttagacgcggatgaggacacaggtggagaagaggaagttagacgcggatgaggatatagatagatgcatagggtgtggatctaaccgggtacaggtgatgcggaaacggatctagacagcgatgtggaaatggatctagacagcgatgtggatgtgatctagataatgtggctctggacgtagaaagagcttcagatgctctatctatgatcgtgggtgtggatataggcatagacatggtgaagaggagagaatagactctcctctctcatgacaaactgatcgtggctgggggcggcacgtgctgagatgtggctgtatttgtcccccaggctggtgcctgcgcctcctgcacccccgtctcctttgtgccttcttccattccctctgccactgttaggtccaggcctcactgagctctgacctccctgcctccagcctgcctctcccacacggctgccaggttcaacctggtaagacaccttcttctccatggtggcctcccaatctgggccctgccaacttatgcctcaccaacttctccaacttacccctgtacccacgcccgcaccatgcccagcccacaggatcctgccttcccagctctgcagaaccagcttctgcttatccgctaggtgccagcccagccacctgccttaagcaccatccacagtcacccagcccatcaccatcactagcaaagtcacc

SEQ ID NO: 28327 - DNA, 1053 bp, Homo sapiens
atcactgtcaccatcctctcttgttcatttgggggatacagccgccatcagctcaacagagcaaaagagagggaggccacctgcatccgccaggtgctgaaatgggtccaggcagctgccagagtctgacatttccaacttgatacagcacctgtgatcggcagtagtacccatgacaacatttatttaattgaccaaacacgaacattatagaggaaggtgatcatttaaatgatatacttgaaattcatctgagtaaggaagctgagaacagtcaaagaagctaatttaaaaaataaaaataaataaaaagaaccacctaatccgctgatttctaatcatgccgagtgcttatctctcctgccaggcatacagcgagcgccttgcagagtctcacagcggcactgtcttctcttttgcagcactccgtacaaagtgagacctgtggccatcaagcaactctccggtaaggccctgctgtcgttttttaaactaaaagaaggaaaaagaaatcttgagcttgcccctgtgataaaatatatactagttaagcatttgaatctaagcatttgaaatatatatgagttacctttgaagcatttaactatatgttagttaagcatttgaatctgcatttgaagccgatacaactgcagaatctgaaaccttgtactactgtaagggctctgcctttctaaccccagggagaatagcatctgcctggggttagcctcccttgtgtggattttttcttactccttttggccactgcctgttcctggtctatggccgttccattggctgcactgtctgtccctgcccctcggccagaggccatcccaaggactttgcagttgcagggcggcatccactctggtcttcctggcccagcacctgtcctccccgctccactgtgagttgccaaggcaggcatttgtggcccctgggatgccttggggtgcctcatacagttacttgggccgctgtgttacaatcctttttctttttctttttttttttttaaaaaaaaacggagtctggtcctgtcaccca

SEQ ID NO: 28328 - DNA, 1031 bp, Homo sapiens
agttttcatggtgtggaattctgcattcacagtttgttttcttcaagaagcttaaagatgttgactcactttctttctggcctccattgtttctgatgagaagtcagcttaatttgatcattattcctctgtatgaagtgtgtctttcttctctggctgctttctttggggtttgtttgtttgtttgtttgttttgttttgtttttgagatgaagtttttgctctgttgcccaggctagagtgcagtggtgcgatctcggctcactgcaacctccgcctcctgattctcctgcctcagcctccaagtagctgggattgcaggtgcccgccaccacgcccaactaatttttagtagagacaggatttcaccatgttggccaggctggtctcgaactcttgacctcaggtgatccacccacctcgggctcccaaagtgctaggattacaggcgtgagccactgtgcccaggcctctggctgttttcaagctgttgatttctttcctttatctttaggtttcagcagttggactatgatgtgcttcagtctcattttcttcttatttatccttcttcatgttcattgagcttccatggactatgaatttaccttttcagcaaatttgcaaaattgtcagccattacgtgttatatgtgccattctttctcactaatgacctgtatgttagaaagtttgctgttgtctttcaagtgactgcagctttgcggttttttataatcttttttttctttgcccttcaaattgggtaatttctgttgacctgtccttgatttccctgactcttccactgactccagacttctgtaagttgatccatgaagtttttttttgtttaggatattatattttaaaattctaaaatttgcacttgactcttgttcatagatttgtctctcgagactcccctctgtttacgatttactgacgccgcttttgtttcggtgtttgcacgtacctgcaattgctgcattaaagtctcgtttgctcattttggcatctgagccggcaagc

SEQ ID NO: 28329 - DNA, 1092 bp, Homo sapiens
atttatcaagcctctctaactcgactacatttaaactccaaactttgtctcctccacagcaggagctgaaacctctgccacactaggcccacaaacatgcgtcattcagggatccaccaaggaacagggtagtttatacagaatttgggtcccactgccatggcttcctcctttgggaactctcctttccatttccatcctctctgacaacctaaaactgtgtcatctgacgcttcaacctggaactttctgcttaagttttagccatctacattataagggcactttatagcaagaaatagaatattattccattctaggccaagtacagtggctcacacctgacatctcagcactttgggaggccgaggtgggtggatcaactgaggtcaggagtttgaaaccagcctggccaacatggtgaaatcctgtctcttctaaaaaaaattttgaaaaaattagccgggtgtggtggtgcatacctgtaatcccagctactcaggagctgaggcaggagaatcccttgaacctgggagccagaggttgcagtgagccgagatggcgccactgccctccagcctgggtgacagagtgagagtctgtctcaaaaaaaaaaaaaaaaaaaaaagaaatattccttcgttcttttataggagcatagtacttcattttgtagatgtactattgtgtatcctactgatagatacttgtgttgcttccagtcttgtttttacagcgatcagatggttcttcttaatttctcttgctacaaatgttgctgctgtgtacaacctgttaaagtccacagatggaataaaagctttggtttgcaaaaatgactcaatctttacaaacattctgtcatttgtaccataatcaattagtttattggatcaccgaattgcctgacagaatccttcctggaactagtctatggggtcatttggcatagagtcaaagcctcagacacgatgagccagagttgatttcctttggcttcacataattaaactttcccagaggattatcaggttacagtgacacacacacaggctgtcagataatggacaaagtcccagcagcgtgtacaac

SEQ ID NO: 28330 - DNA, 1110 bp, Homo sapiens
aggcaggcagatcacttgaggccaggagttcaagaccagcctggctaacatgctaaaaccccggctctactaaaaatacaaaaaattagcctggcttagtggcgggcacctataatcccagctactcaggaggctgaggcagagaatcacttgagcccaggaggcggaggctgcagagagctgggatcataccactgcactccagcttgggggacagagtgagactcagtctcaaaaaaaaaaaaaaaaaagaatggtagtgttccctcctcttctgttttcttgaagatattgttagaatcatgttgactttttaaacatttggtagaattctctataaatgtttagaaccatcttggcctggacatttcgttttggggagtttttaaattacaaattgacttttgctataggttgtttaaattacctgtttgatattgaatgagttgtagtacctcatgcttctctaggagttggtccattttattgaagatgtcagagttatgtgtgtagaggcatttgtagtgttcccgtattatccttttgatgtctgcagggtctgtagtgatgttccctctttcattcctgatattgacagtctgtgtcttccctctaattgtttctttgtcagtcttgctagaagtttgacaatttcttattttcaaatacctagctctgttttgttgattttctgcattgtttttctgttttctgttaccgggatttctattcccctatctttgtgatttccctccttccttcctttgctatcattgtgggtttactttgctcttcttttcctgggtgctcatggtgggatcttggcttattgagttgagatttttcctctcttcaaatgaaagcccatagtgctataaatttccctctcagcattgctttagtcatgtcccacagctaagttttgtgttgtattttcatttttattgagttcaatgtctttttaattttcccttgagacttcctctttgacccttaagttatttagaagtgtgttgttaagtttccacgtgtttggagatttgtctgctatctttctgttattgatttctactttgatcctcgtgtggtcagaggacatgctctgtatag

SEQ ID NO: 28331 - DNA, 1196 bp, Homo sapiens
aataacacaattaaatgtttacaggaaaattgaataattcaagatacaagtgatccccccaaaaaaatatatatatatacagttgaaatgacctagattgatgggtttgggttttgtatctgatgcttgttgttttattttcttggaagaggaaaacatcatacctggcacagagatgtgttctgtaaatgcttgtggggtgggtgggtggatggatggatggatggatggatggatggatggatgggtggatgggtggatggacaaatggatggaagggtggatggatggatgggtggatgggtggatgaatggacagatggataaatgggtggaaggatggatggataaatggatggaagggcagatggatgggtggatgggtagatggatggaggatgaatgggtggatggatggatgaatggatgggtttttgggtgggcagatggatgtgtggacaaatggatgggtgatggatgcacatatgaatcggaataagagatacatgaaataatgtgtgcagggggctcagtacacagtaggcctccgctgaataattgttcagactatacccgtgttaacacgttgttctctcgctatttagggaatgatcacattaatcttggccactgacatggcaagacatgcagaaattatggattctttcaaagagaaaatggagaattttgactacagcaacgaggagcacatgaccctggtgagtggcttattctgcctgggtgggcagccaggcggtgggctggcgaagcaggtcatccatccagctcacactggaagccaagaagctgaaattattagtcttcttggaacaaggtgtctataaatctggttttcaaggtcatgactcttactaggaaagtccgggcagggcctccctcctgatgggtcctccttcatggtcagaggcagcattctcccattcctccatctcttttggatttgaaggagataagtgggtgaaggccgtgcatctcgctctgctttccagagaataaaaccagctctcccatgaaggcacagccccagcatggcactctgaaagcccacctatgtgggggcaactccaacacagctcccgctccccaagccagcatcccccaccaggcccacaccatagcccagcacccctccataaccaggacaaggtggccagagaaggggtagggggcctccc

SEQ ID NO: 28332 - DNA, 1011 bp, Homo sapiens
agctgggactacaggcatgtgccaccacgtctggctaattttttgtatttttagtagagacagggtttcacaatgttagccaggatggtctcaatctcctgaccttgttatccacccgcctcggcctcccaaagtgttgggattacaggcgtgagccactgcgcccggcctaaatctttaattcttttttttgagatggagtcctgctctgttgcccctgctggagtgcagtggcgcaatctcggctcactacaacctccgcctcctgggttcacaccattctcctgcctcggcctcctgagtagctgggactacaggcgcccaccaccatgcccagctaattttttacatttttagtagaggtggggtttcaccatgttagccgggatggtcttgatctcctgaccttgtgatccgcccgccttggcctcccagagtgctggaattacaggcgtgagccaccgtgcccagtcctaaatctttaatcattatatggggttgtagaatagtaattgagtttggtcttattttcatcaatatactatttcctcagtttgaatgtttgaaagtatttagattcttttgttttcttcctccttggtctgtgcacagaacactggtaagtttttaaatatttgtatttatacaaagagagtgccagcccctgactgcctctcacagtgtgtggacttgaggcttggattccacgggaatgttatttagttttgtgctatgactcctgcctcgtttttcaatcattgtttttttctcttcttccttttatgttatttgttttaagagaggggctctggctctctctcccaggctggagtgcagtggcacagtcatagctcactacagcctcaaactcctgagctcaagcaatcctcccacctcagcctcctgagtagctgagactacaggcacataccaccactcctggcatatccctggcatgttttgttgatgttgttgtttattttttgaaatagagtcttgctctgtcaccca

SEQ ID NO: 28333 - DNA, 1035 bp, Homo sapiens
gcagtacagtggcgcaatcttggctcactgccggctccacctcccacgtacaaacgattctcctgcctcagcctcctgagtaggtgccactacaggtgcctgccaccacgcctggctaattattgtatttttagtagagacagcgttttgccatgttggtcaggttggtctcgaactcctgaccgcgggtgatccacctgcctctgcctcccaaagtgctgggatttcaggcgtgagccactgcgcccagctatgttaccattttcttgagcacgaaacttgataagatgcaatgcgctttaggtgggtcgtggcaaacatgaaaaggcaagcttccgttttagaatccatggctcttcttgaagacttctctaaagtgcatgatccctaacaagcgcggctccgtcctgtgtctgctctccatcctctgtaccgccgccccttgccttatgtgccttacatgacgccttcttgttcttggttcgttgtgcgacaggatctatgtgttttcccccctctccgtctgctctttgatcagtacgccaagtgccggtgcttgccagacttcccagcccttaggaactgcatttcctgatgctgctgctttcactcctcctgctcgaaaatggagacgaataacacaactcgcaggataaaaacagaattgggagttttcagactgcaaacctttctgaagagaaagttctaatatttcacgggtgtgttgtttcttaactatcttctgtgcgcatgcgcagagcccaccttgcagagccgtgtctgtatggggccgcggtctcactaggcagtccgtgccccagtactggccttccaggtagagtggttttagatcagagttttgtaacccacgtcttggtcagttatcaccctccctatagtaactaaaatagtacgttctgctttgaaggtgtccctacaccacaccgaagatactcaccttgtggagattggaaggatgccagctctttaaatgagacatcgtttttgcttaacgtaacttaaaaatgaaaaaca

SEQ ID NO: 28334 - DNA, 1020 bp, Homo sapiens
aggagatcgagaccatcctggataacacggtgaaaccccgtctctattaaaaatacaaaaaattagccgggcatggtagcgggcgcctgtagtcccagctacttgggaggctgaggcaggagaatggcgtgaacccaggaggcggagcttgcagtgaaccgagatagcctcactgcactccagcctgggcgaaagagcaagactccgtctcaaaaaaaaaaaacaaaaaaaaaattagccgggcgtggtggtgggcgcctgtagtcccagctactcgggaggctgagacaggagaatgatgtgaacccgggaggcagagcttgcagtgagccgagattgtgccactgcactccagcctgggcgacagagcaagactccgtctcaaaaaataaattaattaattaaattaaataagtgggtgttttaagtgctcagcttccttggttctaccaccttctctccctgaccctccttccctttccccctgaccttggcctttattctagaacggatctgaagcaataggatataaaaaattcacaactgctaaaacagtgttccttctagtgtaattttcacccttagagacctgtctgtaataaacattatttgaaatgcctactatatgctaggcactatgcctcggccacgggttcagacgtgatcgagacagcctgccttctctgagtgtatggcctgggaaagggggcagctgagagacagatgcatggcgatgtgccggataacagacgtagaaggcagaggcaggggagctgtctggggagaggcaaagatggggattcatcagagaaggctttgaaggacatgatgcctaacctggatgtcgaaagggattttgccaggagcacagggcactggtggagggagccctgcggggcagtcctcaaggcctccggatgggtgtgagaggcaccggggctgaagcagcatctgggtttgaggaagccacagccccttggctctccactgcagtctcagagcagcctcaggctgagtaag

SEQ ID NO: 28335 - DNA, 1033 bp, Homo sapiens
ttcaccatgttacccaggctgctctcgaactcctggactcaagcaatctgcctgcctcagactcccaaagtgctgggattacaagcgtgatccactactccaggcctaaaagtgggtttggtttagtttgtttgttttttttgagacagagtctcgctctgtggcacaggttggagcgcagtggctcgatctcggctcactgcaacctccgcctccctgggtgttttgtattcttagtagagacagggtttcactatgttggtcaggctggtctcaaactcctgaccttgtgatccatctgcctcagcctcccaaagtactgggattacaggcatgagccaccgtgcccagcctagttttgttttcttgagacagcgtctcagtggtgtgacctctgctcactgcagcctctggctcctgagcttaagtgatcctcccatgttgcccatgtgaaagaaaaatattttgggccccaaaatcactaaggaaaagtcaagctggacactgcttaagggaaacctgcctcccattctattcaaagtcactcctctgctcactgagatagatgcatatctcattgcctcctttggaaaggctgatcagaaactcaaaagaatgcagcctccagtgtctcacctttctgtgcccagcaagctccctccccgcttggagtgttcctgcctttgcttcaagttgtcccacctttccagaagaaccaaggtgcttcttacatatattgattggtgtctcatatctccctaaaatgtataaaaccaagctgtggcccaaccaccctggggacatgtcatcagtgcaaggctcttgcattggttggaaccccgagagcgcgccaacagacaacatgaggcggtgtggagcaacatgctgttttaatgagcgcctgcatgcagacaggctgaggcctaaaatggcatcagccccaagtgaggatggggcaggggttttatagtcctctgtaaacaggaattgtcccagcctaacgtgactgctatgtagtaccagggcgacctcc

SEQ ID NO: 28336 - DNA, 1043 bp, Homo sapiens
tgtgacttcctcaattgctccaatagataacatcactattgtagaacctaagattggcctttttttctttttgagacacttttgtctcccaggctggagtgcaatggcacgatctcagatcactgcaacctccgcctcctgggttcaagccattctcctacctcagcctcccaagtagctgggattataggcacccgccaccatgcccgggtaatttttgtgtttttagtagagacggggtttcatcatattggccaggctggtctcaaacgcctgacctcagatgatccagctgcctcgggctcccagagtgctgggattacagccgcgagccaccgtgaccagacgaaattggtcttttgagatttttttttcaaactttctggtgtgaaccccaaatatatgagactggtctcagtcaatttaggaagtttattttgtcaaagttaaggacacatgctgtgacacagcctcaggtggtcctgataatatgtgcccaaaatggtcggggcacagtttggtgtgacatacttcagggaggcatgcaacatcaatcaatatgtgtcaggtgtccattggttcgacctggaagtgtgggacagcttgaagcagggagagggctcccaagtcataggtagataagagacaaatggttgtgttcttttgcatttctgactagcctttacaaaggaggcaaccagatatgcctttatcttagtgagcagagggatgactttgactagcgtggaaggcaggtttgccaggagcagttcccagcttgacttttccctttgtgatttgggggtccctagatttattttcctttcacattggcaactgagtggccctactgggacccgtgacttgtgacccagccaatcctgtggccccacccagaggcagactcagcacaggaggactgttctccatacctgtaagatttttctttatatatatatatagtggcactatcacagttcactgcagcctccaactctgtgattgaagtgatcctcccacctcagcctcccaagtagctagaa

SEQ ID NO: 28337 - DNA, 1049 bp, Homo sapiens
ctggtacccaggcagcaggctgggcattccttggtcaatgtttgccaggcacatgataacctaagtgtgcaggtgatgttcaagccaggtcaggacatggggaaccacctggcttctctccagtgcttgccatgatgtcccaaatgaaggtgatttttttttcttttttttgagactaggtctcattcttttgcccaggctgcagtgcagtgtcaagatcacggctcactgcaacctctgcctcctgggctcaaatgatctgcccacatcagcctcctgagtagctgggaccacaggcgcccaccaccatggccggctaattttttgtacttttagtaaagacgggctttcaccatgttagccaggatggtctcgatctcctgacctcgtgatccacctgcctcggcctcccaaagtgctgggattacaggcctgagccactgcacccagccaagtgctgggaaccattttctaaacatggccccaggatcaaatccattccacacttgcatgggcacatgtgccagttttgtcgtatctctaactatgtcttcaactgcttgcccttcattatctatgtgtacgcagcaattagtaaggttaaatttcctacagacctttccttcagctgctagcaagtagttgagagctaatctattttgacatatagcatttctcatctgagcttcttgccaggccacaatagtcaaggctctgctggttttattaatgtttatttttaagacagcttgtaactgtatgattcggttgatcatgtaaatgggggtccggtatccccacgagccgtcttgtgcctaagtagcaggactataatgttgtatgattctctcagggggccatttatcattttttcaatttcttatggctacgattctcttttcgtgggaagaatagacagggaagcccaggagttcgcctgtttttttgggcagtaggaagaaagatggtttaatagtaccaataacacaactacctgcctactggtcaggtaatttggcgtaagctctgtgcctacatatccagtataa

SEQ ID NO: 28338 - DNA, 1133 bp, Homo sapiens
gggattttcaaatagcatgatttggtacttggttaatctatcatttgttaaccaatgatatcctttggtatttattaaggttaccacagcatggggggtctttatattcagattttgcttaagggttagtttatctgcttcttgtgctaacagggctgttgctgccagggcccttagacgtggggccagcctttggaaaccctgtctagttgttttgagaaatagaccactagccttgaccagggccccacagtctgggttaaaactccaactgccattttttctctttctgacacatagaatgttgagttttgtcaggtcaggtagcctcagggctggagctgacgtgagttttcttttaactcatgaaaagctcgttgctgttggttgtaatagatgtagtttatccaatctacatttttattaactgtcacctaccaaaatattgactcaaatcctgcagctatttgatttcaagctttaaattgatctggtattcctcgtgggactccaattgcgtctaaatagacatgagagttgaaagacccctaaggagcttctctcgctttatgatgtcttattgatgaaatgccagggtgaaagggatagccaaccggactaaagtacaagtgccactccagttattcggcagagtgcccagtaaaggtccaccacaataccaccacacatccgctcagggatgaacaagggctgcctcattgataagctcttgaaaattcttatgcttcactgcatcctttcaggtctccaaggaacacgaagtttcctccctgtcatgagagacacgaagtgaacttagtgttgggagacggaggttggatggccctcaggggctgacccacagggtgctggactttgggatatagcagagagagcttggcacgacttattactccaggccgtagaatcctggaaaagagctaccatgcagcccacacctggtcaactggaggaccaccttagtggaaaggggacaatctgggcctctggcctgccatgtgcacaagcataacaattggttttatttaatgtcaaatggaatatttgatccattttaactaggcatttgcatcttggtatcctgtcttaattgataaagtttgttttaagtc

SEQ ID NO: 28339 - DNA, 1070 bp, Homo sapiens
gcggggcggcgggcgtgagggtcgggggcgcgcggcggggcggggccggggcgggcggcgcgcgtggggccggtcgggtccgcggcctcgcggagtcctcagggccggcggggctgctcggagggtgcggggcgcgcggcggcgcaggcgggaagatggcggccgcgaccccggccccggcctcggccgtggcgagcgggtgggtcggggtcctgggggcggtgggcgtgatggggctcgtggccctcagccgggcgccggcgcgggagcagcccagggccgctcgctgacggcagtgtttggggccgggtgctggggaagcggttccggcgtcccgggaattggtgggaagagccgcttctgtcacacgggtcgtggtaatggatgacaggaagtgccgggcagggtctgggcgccctgtgggtttgcaccttccttgtgagggaaatcgtgtcacttaacgaaaaatgaagaaacgcggagtctgctttatgtcatcctcgtggctctcgaaatgccttatttggacagtggctctgcgacgggaccagttagggcctccgttccgatggcggattcctgacgggaggcccgagggtccgggaatggcggcgtcctgaggtcgggcccagggcaggccaggctgagcgccacggcggggccgcagccctggggggtgttccacctgtgtgtggggttctcttccaactctacgagagtttgctttttaaaacagtagatgatttttccttaggaagtggttcctcttcaggatgaaagaaacccccagctttagttaggtctactttcatgatttttcctggcatactgaaaaataggctttctctaaacataaggaagaatcgaggtgaaatgtgaacctctgccagtatagttattggtgatgctcttgcatttagtcataatttggaagatggcaggctgaccccaatgagcctttcatcactctgcttaatttacttagagtgatttgtgaatcctgtccttgtacacaggcgtacctcagataattcgagttctaatccagaccaccgcagtaaaataagtat

SEQ ID NO: 28340 - DNA, 1078 bp, Homo sapiens
tgaaagacttctttgtagcatgtgatgctgttttgatagcattttaaccacagtgaaaattctttcaaagttggaggctattctcaaactctgccactgctatccactaagttgatgtgatattccaaatgttttgttgtcatttccacaatgtgcacagcgtcttcactaggaataaattccatttcaagaaaccactttctttgctcatccgtaagaagcaactgttcattatttccaccacatctgcagttccttcctccactgaagtcttgaactcctccaagtcatcataagggttagaatcaacttcttccaaactcctgttaatgttatttgacttccttccatgaatcatgaatggcatctagaatggcagattctttccagaaggttttcagtttactttgcccagattcatgcgaggaatcactaccacagctatagccttacaaaatgtatttcttaaataattaagacttgaaagtcaagattactccttggatccatagctgcagaatggatgtggtgttagcagacatgaagacagcattcatctccttgtgtacatctccatcagagcccttgggtgactaggtacattgtcagtgaacggtaatattttgaaagaaatctttttctgagcagtggatctcaacagtgggtttaaaatattcagtaatgtgttattccatttccagagcacaggcaagagtagacgtaacataattcttcagaaccctaggattttcagaatggtcaaagaccactggcttcagcttaaagtcaccagtgacatttgcccctaacaagagagccagcttgccctttgaaactaagcactgagttctctctaggtatgaaagtcctagatgtcatctccttccaaaggaagtcttttgtctatattgaaaatctgctttttcgtctcgctgccttcatcaatgatcttagctagacctggataacctggtgttgcttttctgttaggtagcacttgctgcttcaccttgtactttcgtgttatggggacagcttctttccttaaacctcatgaaccagcctctgctgcttccaa

SEQ ID NO: 28341 - DNA, 1071 bp, Homo sapiens
ctttagaaggccaaggagggcagattgcttgagctcaggagtttgaggctagcctgggcaacatggcaaaaccctgtctctacaaaaaatacaaaagtaaaccgggtgtggtggtgcatgcctgtggttccagctactccggggctgaggtgggagggttgcttgagtgagggaggtcgaggctgcagtgagccagatggtgccattgcactccagcctgggcaacagagccagaccctgtctcaaaaaaaaaaaaataataataataagcggacacagtgtgcctgtaatcccagctactcgggtggctgaggcaggagaattgcttgaaatcaggtggtggttgcagtgagccgagatcacaccactgcactccagcccgggtgacagagcaagactccgtcataaatgaataaataaataaataaataataagtaacgatccactgtggcttcctggaaacatccatgttcacagctggggtctggtcagtctgcatagtggagcacactgctaggatgcatccttagcaagtgaaaaaagtgaggctcagaactgtttgtagagtatagccttttatctaaggaaggcagatgaagactggcttatgataaaggtgctaacccccagactagtaaaaatggggttccctgtggagtagggaaggggcagtgttataagttggatttctggccatatctgctatagtactgatcatggaactctaggggaggaaagatgttttccttctacccatcttacgttcattggctggggctcctggaacagaagacagatttacaaaagagaaaggcacacaaatttatgtaatataagttttacatgacatgggagcctttataaggaaatgacccaaggaaatggttaaacctgagtggttttgtgttaggtttgatgagcaatgaaaagctatggagaactatgataggaggagtgtgagctaaacgcaatgaactgggggaaacttagcaaggtctgttcagatttctctctgtatccttctttggaggtcagcatgtttcctccccccgtagatacggagggcactt

SEQ ID NO: 28342 - DNA, 1051 bp, Homo sapiens
gctactcgggaggctgaggcaggagaatcgcttgaacccgggaagcagaggttgcagtgagctgagatcgtgccactgcactccagcctgagcgacagagtgagactccatctcaaaaaaaaaaaaaaaacattgattctggccgggtgcagtggctcacacctgtgatcccagcactttgggaggccgagatgggtggatctcttgaggttaggagtttgaggcgagcctgtccaacatagtggaaccccgtctctactaaagatgcaaaaattagctggatgtcgggtgcatgtctataatcccagctgctcgggaggctgaggcaggagaattgcttgacctgggaggtggaggttgcagtgagccgagatcgtgccacagcactccagcctgggcaacaagagcaaaactccatctcaaataaaataaaataaacaaaaaaaaaacacacatttttttgagactttgcaaacctaaaaatgagtttattttaatctcatatttgatatgcagtctgtttacttgtagaattctgggttgaaaatcctttctacccaacattgagaaagcattacttttgtttttctgagacgaagtctcactctgttgcccaggctggagtgtagtggtgtgatctcggctcactgcaacctccacctcccaagttcaagtgattctcctgcctcagcctcccgagtagctgggattacaagtgtgtgccactatgcctggctaatttttgtatttttagtagaaatgggtttcaccacgttggccagtctggtctcgaaatcctgggctcaagcagtccgcctgcctcggcctcccaaagtgctgggattacaggcgtgagctactgcacccagctctcaagaaggttggtgttcttttttccaatcttttgtgtttttctcatcttttagaagcttctctttttttgcaggtgctctgatttttttttttttttttttttttttaagagacggtctcgctctgttacccaggctggagtatagtggcacaaacacagctcactgaagcattgacc

SEQ ID NO: 28343 - DNA, 1048 bp, Homo sapiens
tggaaaaataagtgatgccaacttgggcctatgagatcgagatgctgggtgtctgtcatggcctgcatcggccatctcgctattcgcctaatgttatgtggaacccacatggcacagaccagagctcagcagggcaaggccactggacctaattacagaagccaacacctttttttttttttttttgagacggagtctcactttatcagccaggctggagtgcagtggcacaatcttggctcactgtaacctctgcctcctgggttcaagcgattctcctgcctcagcctcccgagtagctgagactacaggcatgtgccaccacactcggctaatttttttttgtatttttagtagagacagtgtttcatcatgttggccaggatggtctcaatctcctgacctcgtgatccgcccgccttggcctcccaaaatgctgcaattacaggcgtgagccaccacgcccggcccaacacatcttctcgttgttggagctagtttgttagattgtctgtcacctgcagcgaacagcacactgggacagcctggtccacttagggtctctgaagcggttccctcttctgcagagcgagacgctcctatttctcaagagcttgtgtgggtcaactgggataaagagctaaagaggtcccttttcttcctgctttgtcccatgtcaaccacaactccccttgctggtgtctggattttcagggcaggtaaaatttaccttccatgcccccacaacctggttcagctttgctatttccaaagcccttgagattctaaccccgccatccccctggacctctcacttctcaggctgctcatctggaccgaagggagctctgggaacagagcggtggttcctaggaagtgctgcttcgatttgagccccgcttctccagggcagaggcacagcattcgccaggcaggcactgtgtcttgctcaccccgtggtgtgcatgcatgtcccagcgtcctggcggtgctggccactgggtggctgcgaacccctggagcctgggaaacatgaaataacaagcca

SEQ ID NO: 28344 - DNA, 1055 bp, Homo sapiens
ctcctgttcactctgcaaagaatcccacaccttcttcactgccagcattcagttcagtatcacttccttcaaaaagcctcgcctagcatcttgccctactcctccagggttctaaaacatccattgtgtctctgttgtagcacttagctacattgcttcttaattatcaatgtgtcatccttctcccgaaacaccgtaagcttccatctgttttcttagccagaagtgggagtacatgcaaccgtaaaaggtcttggcctgtacaagagtggaagaccagaggcaatacttacggtgctaagacagcctagacagagccttttgctcaaaccctttggtgagccagcccaggatttgcaaatgcagaggttatgcgggggcctaagaccagtttacaccagtgctccagagtcctgtctggttagtgcctatcacacccagagtgacttgtcttgtatatcttgttcaccaccacattgcatggagtacagtggaccttcagaaaataactccgcagcatgaacgtcgtggacagtgataatgggacaagaaaacacaaggtctccaccacagctatgccccatcacaattacagcacaagtttggaaataacttggcctgacattcgactcccgatgacaggctccaacttttctgcatcttgtcttaggcatcataaaggaaatgtgagctatcactcttcctgaaacatgagctgttctgcagcaacatcaatagatagctttgtcattttaaaaataaattggaaatctttgtattgctttaagtaacagtgttgcgctcttgctttaactgttcaagttgggtgctcacagtcataaaatgatcactctccatggctttcatccataagagcttatttgtcccaattcattcattcattcatatatttagcaaacatttatggagtgccaactgtgtactattatgtacgctattcttggcactgggaatatagcagtgaacaaaacagaccatccctgcctatcttatcagttctgcaactttaaaaatattgactaaaatggggaggc

SEQ ID NO: 28345 - DNA, 1065 bp, Homo sapiens
cgtgaggatccccaggcatgacttgttcataacaagagggcaagagaaccagttggtacatcttctctccaactgtgaaagggaatatactttaataaactagttttatgttagttcctgatatcctggttttacatggaaaactatcataaaagaatcaaaatgcaggccgggtgtggtggctcatgccagtattcccagcactttgggaggccgaggccagcagatcacctgaggtcaggagttccggaccagcctggccaacatggtgaaaccttgtctccactaaaaatacaaaaaattagccaggcgtggtggcacgcgcctataatcccagctactcttgaggctgaggcaggagaatcgcttgaacccaggaggcagaggttgcagtgagcctagattgtgccactgcactccagcctgggcaacagagcaagactctatctcaaaaaaaaaaaaaagaatcaaaatgtaccattataaaattgttgatgggagaaagacccttagcaaagtggaaatcaatacctgtaaattaaggttaacgcactctgaatacactaaacaaactttggtccattaaaaggtctttttgtcacttttttttttttttttaagagacggactctcgctctgtcgcccaggctggagtgcagtggcgcaatctcagctcactgcaaagtgcaaactccacctcctgggttcacaccattctactgcctcagcctctggagtagctgggactataggcgcccgccaccatacccggctaattttttttgtatttttagtagagacggggtttcactgtgttagtgaggatggtcttgatcgtctgaccccgtgatccgcccacctcagcctcccaaagtgctgagattacaggcatgagccaccgcgtctggccctttttgtcactttttaagcatcttttggagtattaagatcacattgattctaaatatttgtttgcattcatctagtttatagcactttgttgctccaaaagatttctcctaggatctcctagtaaaatcctaataaagaccatttgtaacacac

SEQ ID NO: 28346 - DNA, 1034 bp, Homo sapiens
tccccaggccctttcctaggcctttgactttcagatgtactgtttggagctcctgtgtcctcagcctggctggttttctgttcctcggaagtggggctgcccgttgctggggcttcatatgacttgagcaggtcccccgcatctcttgtaagatttgcagttttacttcacaagaccagcgaaaatgtcagtgtgcaggatggctgcacgtggtgggcggggagggcgttgatgaggagccgatttcataagtggccactttgttcatgaattttgtgttgtgatgacatttgcttcctcacgctgaggccgggccaccactgccaccctaccctgtagctgataaagctgcaggtacagtagtaatttatttgtgtttcttttataacaataaggaaatgtttgcttcaattttttaaaaagacgtgcaaacgaaagagaattaaaatgtatgtgatacttcaccactttctaaacttgaagaaaagagatgcatagactctaagatgtttgtattgttttgccttccaggaggtttcagtcaggaagaacttctgaaaatctggaaggggctcttctactgcatgtgggtgcaggatgaaccccttctacaggtaacatgcgttccctttgtcatgctcccgggttcttgctgtggatggataagagacttgatcactcatgctgtgccagtcccccgatacactgacgcacactgacagtcatgcttcaaggagtcattttcgtacctcttgtccatacagaaagggatgcagggtcaacacagttaggtgaattgtcttttcaaataaaaggaaagatgtgcattcgttgtcaatttactatttctctgtaaaatttcataggttccatgctaggttttacattacttaaagtttctctcttctggtaagtttattttttgtggtcaaggatggcatgacaggagcactaactagtcaagaccctgtgaaacccaggagagggcagccgcgtcactgggcttcgggttccatggagagcagcagtagcgc

SEQ ID NO: 28347 - DNA, 1072 bp, Homo sapiens
agtttgaaatcgagtgttctgatgtctccgggtttttgagggttttttgtttttttgtgtgtctttttttttttggtgttttggtgttttgggttttttttggcggcggggaggggagagagacagagtcttgctctgtcgcccaggctggagtgcaatagtgcgatctcagctcactgcaacctctgcctcccatgttcaagcgattctcatgcctcaacctccctagtagctggaattataggcgggtgccaccacgcccagctaatatgtctttgtatttttagtagagatggggtttcaccatgttggccaggctgatctcgaactcctgacctcaagtgatccaccagcttcagcctcccaaagtgccgggattacaggcatgagccactactcccagcctctagatttattctttttgcttagtcttgctttggctatgcaggctcttttttgattccatatgaattttaggattgttttttctagttctgtgaagaatgatgatggtatttttatgggcattgtgttgaatctgtagattgcttttgccagtatggtcgttttcacaatattgattctacccatccgtgagcatgggatgtgcttctgtatttccatttgtttgtgtcatcagtgacttctttcagcagtgttttgtagttttccttgtagagatctttcacatccttggttaggtatattcctaaggtttttgaggttttgttgtttgttttgttttttgttgtcattgttgttttggtaggggtttttttgcagctgttgtagaagggagtaagttcttgatatgattctcagcttggtcgttgttggtgtatagccatcatactgattcatgtaaattggttttgtatcctgaaactttgctgaattcatttaccattctaggagctttttgggtgagtgtttagggttttctaggtatatgattgtatcatcggcaaacacggactttgacttcctctttaccagtttggatgccgtttatttcttttctgtgattgctctggctaggattgttcgtgcttttaaaaaatctggaaggata

SEQ ID NO: 28348 - DNA, 1048 bp, Homo sapiens
ggtcttaaactgttaggcttaagcattccacccacctcagcctcccaaagtgctgggattaaaggcatgagccaccacacctagcccaaaatgttagtatagttagctgtaggtggcagaattatgggtgatttctgtttcctttgtacttctctatttcctacagtgattatatattatatttaatcagaaaaaatcaagccggttgcagtggctcatgcctataatcccagcactctgggaagcccaggcagtcggataacttgaggtcaggagttcgagaccagcctggccaacatggtgaaaccaagtctctaccaaaaagtacaaaaattagccaggtatggtggcggtcgcctatagtcccagctacttgggaggctgaggtgggagagaatcacttgaacccaggaggtggaggctgaagtgagccaagatcgtgccactgcactccagcctgggcaaccaagcaaaacactgtctcaaaaaataaataaataaacagatagatagatagatagatagatagatagatagatagatagaatcaagaaccttttttttctttttaatttttagacctggtggacgggaagtaatttttttttttttttgagatggagtttcgctcttgtcgcccaggctggagtgcaatggcgcaatctcagctcactgcaacctctgcctcccgggttcaagcaattctcctgcctcagcctcccaagtagctgggattacaggcatgcaccaccatgcttagcaaaatttgtatctatcttttggtcaggctggtctcgaactcccgacctcagttgatccgcccgcctgggcctcccaaagtcttggaattacagacaggcgtgagccaccatgcccggccaagaatctttaaaagaaagaaaaaatactctggccaggcacggtggctcacacctgtaatcccatcactttgggagcctgaggtgggaggatcacttgagcctaggagttggagaccagcttgggcaacataacaagaccttgactttacaaaaattttaaaattagc

SEQ ID NO: 28349 - DNA, 1052 bp, Homo sapiens
gtggagactcatgcctataatcctagtactttggaaggccaagatgggaagatcacttgagcccaggagtttgagaccagcttgggcaacataatgagacccccatctctaaaacaaaacgaaaaaaagaaatagtctgattttaaatttggtgtagataacagagttgactaaggacctggagcaaattttatgtggtcatgggagtagtctctgggtccctccgctccccacatttctgtcgcctaacctggacacagactctcttccaagtgcagttccggacgttccctcccagttgcgttcatgaaacgtgtgctgcgcctgccccatcctccccaggccttgccctgatgtcgcaccactaataagcttagagggttccagaaacagtacacgtttaaaataattttgagttctcctgagtctgtttaatctgcttcttcataggctgtaacactctgaattttttaagtgctaaaagttgcattaatattgacttgtgcttcctgaagcatgctcgtgaaaagtgactgtactgctgtgacaggttctcaccaaggtcctaaactgacctgagactagggccggattcctgcgtccatgctcctacccctggtggtccagggcgatgccgtgtcccatccgcttgcctgcgtccctggacaggagcttcccatgcaccgcagccttcgtcctaacgggaccacgtgtgggggaggaaatcatcgaaggcagcagggaattggggttttatgggtacaaaaggcaaaacatgtgctttttcccagacttaccttcattcccatagcctgaacaatcaaaatgtcctgggaaattataaatggctttgcagagtttttctccttaaataaattttctttcattttttctttttttgagacggagtctcgttgtcgcccgggctggagtgcagtggcatgatcttggctcactgcaacctctgcctcctgggttcaagcgattctcatgcctcagcctcccaagtagctgggattacaggcacccgcaaccacgcccagctaattttt

SEQ ID NO: 28350 - DNA, 1014 bp, Homo sapiens
ggaaaccaaagttttaaaaagtagtataggccaggcgcggtggctcatgcctgtaatcccaacactttgggaggccaaggtgggcagatcatgaggtcaggagttcgagaccagcctggccaacatggtaaaaccccgtctctactaaaaatacaaaaattacctgggcgtagtggcaagcacctgtagtctcagctgctcgagaggctgaggcaggagaattgcttgaacccaggagatggaggttgcagtgagccaagatcgtttcactgcactccagcctgggtgacaggctgggtgagactccatctcaaaaaaaaaaaaaaagtattataacgaatttaggacctgactcttgttgggaactgcaagtaatagagagtatgtgtatgtgtgagtgtgtgtacatgcaccagtatatatgtgtgtgtgcgtgtgcatgcacacatgcgtgagtgtgtatgtttagggagaagagactctgagagactgaggagctcacccagcctttacaactggagaaaatgaacagtacgaatcctgcagctccacatagcacagatttgtcccagacacaaatgcctggttcactcattgtccaaaacacccccacccccaatgttcacccttccaggagccaccctaccagcagctccccttagtctgtgcaggcagccctgggccctcccttgggagggtgagttgaggcatgggatgtggcctcactgccctcctttcctcagaaggctcttgggcctgctctctgcagggccttgagatggccctgcttcgtcctagcaagtgggtggggtcggcacccaggcaggacgctgtctaaggtgttgaagggacagctgtcggacccacttaatatggggccttgctctcatttgggacagaattcaagaagacagacaagagtatcttggtcagtcccacgggcccttctcgagtggccttcgaccctgaacagaagcccctccacggggtgctgaagacccccaccagctcacc

SEQ ID NO: 28351 - DNA, 1109 bp, Homo sapiens
ctgtttgaggaagtgtctgacctgggcctgagagctggagaaggtgcagattcaaagtgagcggctcctgaggagagccgccaaggctgctcgccttctccgtggcttccgcagctaccgtctgcacggtgagagggcacgggcacacggttcgggctggcgtgcagctctcccagccagccacgctctgctcaggcctggaagtgaaagccgcctccttcccgttatgccccccatacaggagcctcggtttttcagcaaaacgcggccagtccccttctccactgctgcctcccagcagagggccccaggatctccaaggtcccagctatggctttggacaacgtggcttcggcccctggggttgcagagcttgcattgggtttacctcggtctcattcattcatggagccaagggtggggtttcacctgcgaacatcagactgacttgctggcgtcaagagcagttgactcactgatgaaggccctggtgaggagaaagcactctgttcttcgcctactctgtaatcgttttgtcataatgagccatgaaaaaagtaatgaacttgtgctgttaatcgtcactgtaatgagaagtcttacgtacaacatagctgtggtggcttaatggctgcattagataggatcctcacatcccattcagaaccaaaactgatacagtgaaacaattaaggtgagcaaatagttttaacttttcttttttttttttaagtttcattcttcctagaatatttttctaacaatttttatttcagctttaaagatgggtcatatagccaaacgggccatataatccaacattgttgagatgtcttaggacatctaaggcaaaactggcacatttgttctgcagactattgcaggaatgttttttcctagcatttctatattatctgtccattctgaggaaccagtgaatgtcctataaatgcacctcctgtcaaaaccatgcctgagaggtcccggctgggagtgacagggtgcttcttagattctattggtccttctctcattctccgaacttactcctttttatgggtaagtcaactaggtttacagtcccttatttttaatgcctaagttttgac

SEQ ID NO: 28352 - DNA, 1041 bp, Homo sapiens
gcccttccacattgctaggactgtttcctcttgggtgtaggaaacctcaggttcttccagggctgggaggtttggctctttggagccccaggtgtgtatgtgtggaaagccttcctggctatcagttcagcagctcacatgtttctgtaggcctcactgcatgggggagatcctggggccctcagggcagcctcccaaccccttttgctctattgcttccgtaaccctaaggtacacagctgtagggttatgtatgagtttgctggattgaaaataccatatgcagccttagggtcatgtaggagtttgcccggactgccaaaacaaagtaccacaaaccaggttgctcattgtagcagaaattcacctctcatagtctgggggccagaagtctgagaccagggtgtgggcagggccatgctccctccatacaagggtccttcccggcctcttccagctctcggtggccccaggcttctggggctcacggccgaatcactccagtctctgtctctgtcctcacgtggcctccgcccagtgtgctctcttaaaagtccacttaacatgggattcaggcccacctggataatctggcatgatctcatcttggaatcttacatctgcaaagatactttttctttctttcttttttttgagacggagtcttgctgtgttgcccaggcagaagtgcagtggcgcgatctcggctcactgcaagctctgcctcccgggttcatgccattctcctgccttagcctcctgagtagctgggaccacaggcgcccgccaccacgcctggctaatttttttgtatttttagtagagacggggtttcaccgtgttagccaggatggtctcaatctcctgacctcgtgatccgcccacctcggcctcccaaagtactgggattacaggcatggggccaccacgcctggccttctttttctttttctttcttttttttttttttgagacgagggtctcactctgtcgctcaggctgaagtacaatggagcgatctaggctcactgcaacctcccc

SEQ ID NO: 28353 - DNA, 1028 bp, Homo sapiens
aaggaagaaaattggctagttttttgcttttctgactcccttagtttgggactgaggtttctgttattcttgtttggctgtcatggagaaaaacaagaacttatcggtcccgttttccattttttctttttcttttttttttttttttttttgagacggagtctcactctgtcacccaggctggagtgcagtggcgtgatcttggctcactgcagcctcctcctcctcccaggttcacgccattctcctgcctcagcctcccaggtagctgggactacaggcgcccgccaccacaccaggcaaatttttctgtatttttagtagagacagggtttcaccatgttagccaggatggtctcgatatcctgacctcgggatctgcccgcctcggccttccaaagtgctgggattacggctgagccaccgcgcccggccaatttttgtattttggtagagacggggtttcaccatgttggccaggctggtcttgaactcctgacctcaggcaatccacccacctcagcctcccaaagtgttgggattacaggcatgagccactgcacccagcctattggtcccattttctgatctatttttccctcttgcctctggctctagcccacatcggtgcatgtgtgtgtgtgtatgtgggtgtgcatgtgtgtacgtggtgtgtttgtgtacactgtgtgtgtatgtgggtgtgcatgtgtgtacatggtgtgtgtgtatgtgggtgtgcttgtgtgtacatggcatgcatgtgtgcatgtgggatgcatgtgtatggggcatgtgtgcatggcgtgtgtgcacatgtctgggcatgcatgcgtgtgtcatgggcatgcatgtgtgtgtatgcggtgtgttgctctgcaggccccagtgttggccggcccccccgtctttcctgtaagtgacttccttcctaggaggcttggtgtgactggcattccctggaaagggaggggcggatccgcagaacgggcagcttcggggacacaggggctgctgattggcattgt

SEQ ID NO: 28354 - DNA, 1023 bp, Homo sapiens
aaaacaaaaaatggtagcacggcggcctaataagaccatcccgagaagggggatgaggtgatagtccacaggcctcagtggaccgtcacagcaggtatggacatcagagagtcttgctcatatctgattgattgattgattgattgattgatttggtttgatttgaatttttttgaggcagagtctctctctgtcacccaggctagttgcagtcttggctcactgcaacctccgcctcccaggttcaagtgattctcctgccttagcctcctgagtagctgggactacaggcacgagccactacacccggccaatttttgtatttttagtagagacggggttttgccatgttgtccaggctggtctcgaactcctgacctcaggtgatcctcccacctcggcctcccaaagtgctgggattacaggcgtgagccactgtgcccagccctcatatctgatttagagtatgtactgccaagctccgtggtgtgaatacttccactatagctgaacgtaaactaccaacctgagcaggaaagagctgtgcagcagcctctgtcatgtagcgttcttccctccagacacaatagacacaaatagctgagtagacaacagatagtgtaaaatgctagtaaactaggaagtggtgaggctacaatatatattatgtttacttttaatatagtttatgtagtctgggtgcagtggctcatacctgtagtcccagcactttgggaggctaagggaggagaattgattgagcttaggagttcaggactagcctggacaacatagtgagactctgtctcaacaaaaaaatataaaaattagccaggtgtggcagcacgcacctgtagtcctagctactcaggaggctgaagagggtggatcccttgatcccaggagttcaaggctgtagtgagctatgattgtgccactgcactccagcctgggtgatagagtgagaccctgtctcaaaaaataataatataatttacataattgtaagttttatgactcaat

SEQ ID NO: 28355 - DNA, 1050 bp, Homo sapiens
ggggggctcgcggggggctcgcgggggggctcgcgggggggctcgcggggggctcgcggggggctcgcgggggggctcgcggggggctcgcggggggctcgcgggggggctcgcgggggggctcgcgggggggctcgcggggggctcgcgggggggctcgcggggggctcgcgggggggctcgcgggggggctcgcggggggctggcggggggctggcggggggctcgcgggggggctcgcgggggggctcgcgggggggctcgcggggggctcgcgggggggctcgcggggggctcgcggggggctcgaggcgtcccatgtgggcagccgttgggacctgccaagcactgcgcctagtgatctccttcgggtttgagccagtccatggggaggagccgtccaccaggcagcctcagggagagtgggcgggtgtcaagggaagcccacggccccagctggcccccttgtgtctgagcccccatggcttcctctgcctctaggctatgcccactggaagggccaagtgctgaattcagatgagctccaggagttgtacgaaggcctgaggctgaacaacatgaataaatatgactacgtgctcacaggtaggtgccggagcaagctgccgcaggggactacgcaccccactccagccagggtgggctcagggaggtccagagcacccccgccctgggcctgtctcgggtccctgccccttcaaggagggccttggcgtgcccaagccaccatcacacccccggtagcctggggggtcctggccacactatgcctgccgggacaatgactgcccaggctgtgccaagtcacccccactcctgtgaccacactggggttccagtgcccaggggagggtgcaggcagggtgttgggaacgctgaccggggcaggacaggtgggtgggacactcaattaggtgacgggctgctacctggtacactgccatcctttgtcaactttctggttaaaaaaaaattgtatttgtatacatgtttattattattattatttttgagacagggtctcactct

SEQ ID NO: 28356 - DNA, 1031 bp, Homo sapiens
agtgactgaacagtctgtaccagtcggggcctccagagatcagcaggatatatgtgtgtgtgtacatgtgtggacatgtttgtgcatgtgtgtgtgtgtgtgcatgtgtgcgtgtgtgcgcgcgtattgtgtgtgggtgtgtgtgtggatgtgtgcgtgtgtgcgcgcacccatgtgtgcatgtgtgcacgtgtgtgtgtgcacatgtgcatgtgcgtctgtgtgcatgtgtgtccatgggcgtgtgggcatgggtgtgcacgcatgtgtgcatgtgtgtgcgtatgtgtgcacgtgtttgcacatgtgtgtgcatgtgtgtgtgtgtgtgtgcacatgtgtgtgaagagctattgtaaggcggtggcttgagctgtgtgggggctcctgggcatgtttgggatttgcagggccagctgttgggaagggcaggctggaggctggacacaggagcagatgcagcagcccaaggtgcagtttcttcaaagtcctttttctccgggacttggagaccgtgcgtgtcttgctagcattgaaccttggttgagtcatcttagtctgttggggctgctgtgacaaaatgcctgagactggatgatttataaaaaacagaacttttggccggatgcagtggctcacgcctgtaatcccagcactttgggagactgaggtggtcagatcacttgaggtcaggagttcgagaccagcctggccaacatggtaaaaccccatctctactaaaaatacaaaaattagctgggcatggtggtgcacgcctataatcccggctagttgggaggctgaggcaggagaatcgcttgaagccaggaggcggaggttgcagtgagctgagattgcaccactgcactccagcctgggcaacagagtgagcgagactccatctcaaaaaacaaaacaaaacaaaacaaaacagaactttgttccccacagttctggaggctgggaagtccaaggtcaaggcactggcaggctcagggtctggcgggggctactttgctacccggactgca

SEQ ID NO: 28357 - DNA, 1060 bp, Homo sapiens
cttgtgttccctggaaatcccctcctggcagcagtgggcacgtcgggtgttgtgagtgggccaggggcacagcaagtctgtcctccctgcaggtggcctgtgagaagaccgtgtctaccttgcaccacgttctgcagaggaccatccagtgtgcaaaaggtacggcggccgggctgcatgggctgcgtgggctcctggctcccgaagtgggtgggagagaagagctggcacgtgctggttttgaaggtgtgatcggtgtctcctgctgacctcacctctgggagtgggggcaacagcgggagcccctctgagatgggaactcagtgctctctgcctgccccgcagcccaggccggggaaggagtgaggcccagccccatgcagctggagctgcggatggtgcagagcaaaagggacatcgaggacccagagatcgtcgtccaggccacggtgctgtgagggccccgccgcttgcccgtgacacgcagcgcgttggtgtctccgtgtttgtccctgtgaaaacatgtaacgtctgccttagagccatgaccgaaacttgatatttttttctttcatgagtgtccggcatctgctggtcttcattgtgaaacgtgccagtcgtgctttgtgaaaaataacaaagtggtcacagaaatttgtgatctgaaaacccggctcccttccccacaaggctcctgggcctccgggaagacgggcccctgtttgccatctcgggggtgttccctgtgggagggtgagtgggtgaggccgagcctgctgcgtgtggagcctcgagtgggccctggctgccactaccgtacagaggccgtgtcgcgctgggctgggcctgggtggcctctgtctttgcatctctgagaaggagtcgggtggtaacggttggggtcaggaagaattctgccaagtatctttactgtcattctgaccatagcctctttgttcccgcattcgaacttttggttcttactttgctgctcgtttagtccctggggatttcagatcttaggctgttgtttcaccgtatgggagggttgatgtgagct

SEQ ID NO: 28358 - DNA, 1024 bp, Homo sapiens
aggaaggaggatggctgtgtccggagcctggcggggaggcggcctccccagtatgtgagtgcagggatctgccagaaccacctggccctctgtagggcgtttaactggaaataccctcactgccaagtggagactggggcgtgtgccacattgccagccaccaggaaagcttttctttttcttttttttttttttttaaacaccaagagcacgtatagcatgggggaaagaacctaaatgtctctctgtcctgtgagctggtgaaaaacccagcatgagaacgcagtgtcaggtgtgggactccttctgcccctgcagtgggtgttacgggcggtgtgccctggcgagcaagctttgattcttggttctttgagctcgtttcagaggctgagtccccacatcagctttagttcttggacttccctgtattaagcaagaattaggagaatggctgtccctgcaggcgcctcccgtaaatcctgagctctctggcgcaatctgaaacttctcttctgttttctttggctgtatcagccgaaccaggagaggcctgggctgcgactaaggagaaagaaatcgggggtttctgagagcagatggtgcctttgtgggtgcagggcttttgtggaaattgtcagcctctacgggcagagtccggcatcccctccccagactgcctgctgtcaaaccacggagcagctggagcctgccctgtccacggcccgtttccacccgggcatgttcgtctctcctgacttcggcagaggcccctggtggccttcagtttcagtttctcatccaggaaggtaaccttgggcattggcagtgggtttccctatggcttggatccagattagaattgatctttgttttcactttccatagttaataacatgcaaaataatgagaagaatttattttaaggtgacagctatactggtccaacatcgcctgcttattgtcagggtacagaagtttaatactttcttaatccagtttttcaaacttctccctgtagaccgta

SEQ ID NO: 28359 - DNA, 1083 bp, Homo sapiens
agctgggtcagcggctctgaagccctcgagtgactttctaacccaagacccagcccctggcaggaggagggtgggtgcagggctggtgggacaaaaagaggcctcagcaggcctggaagacccttccagtacatcccacagcgtgtcgagcagctgggagaacctgtgtcaagctcgagccgtcataggtccccatgaggtgtctgaagccccttcttggtgatgggaggcagaggtgctgacgttctggagcatggacgtgagtcctcagctggctccgcgtgggcccttggagggtgccaggtgtgtggtgaccttctggatgcctttaacttcatggctgcgtcattcctgatttagaactttaaccggagcttcatctagtgattgcaaaactggaccaatgggaggacggcggcgcagcccgctccctccgtggaatggagctcagctcttcggaggcatcaaagcacctgtcgcctccgtggtccccctgctgagggagtgcggcctctgcaaggttcgggggtggcttcgtttgcctggagtggccggccctgcttgtgccatgtggatgtttgtgagcctcggtcctacagcactgtgtaggctgcatctgtttcgtgctggtcctgttgacttgtatgatatccacaaataaatattttcatggcggtcgtgttgaggcatgatggttccttcccatcccaggagctccctacctgtgattggctgaacacccagtaccctgccagccacgctagggattgctgctggaaatggtggcagctgactccctaaaaacctcccctttggaggaaagagcatgccttgcccctgcctgccgggcccaggccccctcccatcctgcactctgttttctgccttgggggctggcctgggtgccccggcatgggcttcctgcaggacttcccagggcagagccctcagggataggaggcctccctgtgcaattctgaggcccagctctgggtgttggccaagggtgtctgctcctcctgggatccacctggctccttcacacctgggtggtgacgttgtagtgcctctggctgggcagat

SEQ ID NO: 28360 - DNA, 1035 bp, Homo sapiens
aggcagatagccagtgatctatggggtctcgcagccctcttcctcctgatggttagggggctgtgagtcccaaggctcccttccgctctcccacgtccctctttaaccgtgactctgtggcttagggcacagcctctgtcaagagggcagtgcctgctgtggttgtgtgagaggctgttgaccccagctgtctagaggggcctcccgtggttgtgtgagagcctgttgaccctggctgtagaggggtcttttggagcaggggtgaaacctccagtgcactgagctgagaccccctggaagccgactctctgtgatgagtgagtgagtgagtgggtgagtgggtggttgcgtgtgtgtcattgtgagagcctggtgcttcaggggctgagggcgtttttgttgtttcctacacaggaagaattaggaaggactatttcccagctcgttcatgcttttcagaccacggaggcgcgtgagtatgctctgctgtagttgggtgcatttgtagatgtcagaacctctgagcatcagagccaccagacccaggaggtttgtgttctcaaatccagagtaaggaatgcctaagggcaagagagcgccagctggtgtctgtgggtgcttagcatgtgtgcagtgctggtgtaagtattcaacatggattagctcatttacccaaaaccctcatttcgagcctaatgggctaatatcttacactttaaaaataaagtgaaaagccaggataatgtcaccaagagattggactgaattccgcctgatggtcctgaggttcctgcagttgatttttctgactcctctgttctctggtgaccggagttgagaagttcttaccctgcctgtctgtaggactcacttgaggagcctctaaaaatcctcatgtccagatcctggtccagcaagatccagttctgggggtagggcctgggcatcagcattttttatctatagctatgtaaagaacgggttcctccatgttctcacctccctccccagagtggcttcgtgctcctcagtggt

SEQ ID NO: 28361 - DNA, 1045 bp, Homo sapiens
tggcatgtgatgccctcaccaggggcaaccctgggtccgcggcagaccactcagggcctggagctgcctacctgcagtggagggggttgagcacagtgccgggcagggcagggggcccatggcaagaatggggtgcagaggaggcacatggtggctttgccccacactgggaagccttccctgttactctctccatgctaaactggccccagggcctagggattcaccccttcccttgcccagagctccgtgccattgaagccgtccatctcatttcccatgaggcagtggcctcctctttgtagccggcccttggctgtgtgaaccctgtcggccctggcgttcaggacctggcactgcctggcgtcctgttcttccacctccccttctgccttgagcccagtcctgcctactcctctgtgcctttgctcctgggtctcatgaccctgtcctcacgctggtccttctgaggtcagcccttgctgaggtcctgagccgtgtggatggagcttggcgcccacactggacacgggatgcgtctggctggctgttgtggccgtgttgtcctcccaggtctgtggtgctggcatcctcagcctgagttggagtaagtggaaagagcccgtgttggcattctctggctcatggggtcttgctgttttgtcagggaaaggtgagaaggagcccccgagcccgggcatggagaggaagaggagcaggaggaggggtgtaggggccgaccccgaggcgcgggcagaggctggtgagcagccaggcacagctgagcgggccctgctccgagatcagcccaggggccgtggccagagaggggctcgccagagaaggaggacacctcggcccctgaccagtgcccgagcaaaggcggccaatgtccaggagccggagaagaagaagaaacgcagggagtgatgtggccgggccaaggacaggcagggagggaggccaggcctcgcttgcaccgcgggacgaggctgaccgggctgttctgtagactcaggaccgtggctccagaactcctgtgcca

SEQ ID NO: 28362 - DNA, 1091 bp, Homo sapiens
cacctgccttggcctcccaaagtgctgggattacaggtgagagccactgtgcctagctaattttgtatttttagtagagagacggggtttctccatgttggtcgggctggtcttgaactcctgagctcaagtaatccgcttgcctcagcctcccaaagtgctgggattacaggtgtgagccaccacgcctggccagtgttctggtctgtttgtgatgggtgtaagaatctgtctctttaaagaggtgcctctggccaggtggttacctctgtcaccagagatgagtcacccagtctcagctcgcaggccttcctggacgttcccagatagtccccagtgctggaggcctgtcgaaagtgtagctccaccacgccctttgatctcttcctcctctcctcttccccacccgcttccccctccttccccctccttccccctcctccttccccctcctccttctctcctgctgagggcatttggcctcatagataagcggtttctaatgagctcactggtttccgatggtgggtggggagtgactctgggctttctgtgctgcctcttcgacctcgtccctgttttctgctgtgcggagcatggccctttcctaatccgaaagagccgcacagtcccttccagtgctgcctgtggtctcgcccagctggctgtgctattgcgggacatggggcccagcctcctgctccttcagaggcctggggtgggtgaggctggggtgccctggtgctggatgcaggggtgctgtggtgctgaatgctggggtgccctggtgctggacgttgggtgcccaggcactggatgctggggtggcctggtgctggatgctgggtggcctggtgctgggtggcctgatgctgggtgctgggtggtctggtgctggatgctgggtggcctggtgctgggtgctgggtggcctggtgctgggtactgggtgctctggtggtggatgcagaggcagggctatctgtgggtctgcccttgggtgtggggcaagccaggtcagcatattgcaaagcacacgttgggctgctgcttgtgtaattgtctccttgtctctgctctctcccttctcc

SEQ ID NO: 28363 - DNA, 1031 bp, Homo sapiens
agttcaagtcaagaccaagctgggcaacgtgacaaaatcctgtctctgcaacccccaccaaaattagccaggcatggtgacttgtgcctgtcatctcagcctcttgggaagctgacttgggaggattgcttgagcccaggaggcagaggttgcagtgagctgagatcatggcactgcactccagcctaggcaaccgagtgacaccctgtctcaaaaagaaaaagaaaatctattgttgagtgtggccaccttcatcagtgatcttagctccatctgcagatgacttgctgcagcttctccgtgggcacctactgcttcacctgcacttttatgtgaagaagatgtggcttcttttcttaaatctcctgagccagcagcctctgctagcttccaactttttctctgcagcttcctcaactgtctcaaccttcacagaattgaagagagtaagggccttgctaggcactaggctttggtttaagggaatattgaggctggtttgatcttctctccggaccactcgaactttctccatatcagcaataacgctgtttcattttcttatcatttgtgtgtttacctaagtagcacttttaatttcctccaagaactttttctttgcattcatcacttggccaactgtttggcccaagaggcccagctttcggcctatctcggctttcaccacaccttcctcagcaggcttagtcacttctagcttttgatgtaaagtgagagctgtgcaactcatccttttacttgaacacttacaggccatcagagggttattaagtggcctcatttcaacactgctgtgtaacagggaatagggaggctggaacagagggagagagatgggaagagccgctcggccgagcagttcagagcatgcacgacctttttccactcagttcctcctctgatgggggcccggttcacagcactgaaaacaattatggtaggaacatcaaagatcactgaccacagatcactgtgacaggtataacaatcatgaaaaagtttgaacgatt

SEQ ID NO: 28364 - DNA, 1053 bp, Homo sapiens
ggtgaaggaatctgctctgcttgatctctgtcttctgaaactttttaggacttgccttatggcccagcacacggtcagattttaaaatgttctgtgtgtctttgaacagattctgttctgcagtggtaggggcagcattgtgtgtagattgattgaatcaagtttattcatcatgttattcaaatcttctatactaagggtcagcaaactacagcctataggctaagtctggctagctacctgcttttataaagttttgctggaccgcagtcacaccatttgtttatgtcttgtctacagctgtttttgcattgtggatttgtctattttgtctagcagttgtatcgagttttgctttatatacttgagagctatgttattaggtgatacagacttaaaattttatatcttccttatgaatgaagcgactattactgtgaaattatcttcttacctttttaatgctttctgcctttcagactttgtctggaattaatatagcggcaccagctgccttttgtttactgtttgctttgcatgtctcttttatttttttatttttaatttttctgtatctttaaatctgaaatgtatctcttgtagacagtgtatgattggaggatcttttttaaattgaagtttgacagtccgtttttttttttttttttttttttttcagtatttattgatcattcttgggtgtttcttggagagggggatgtggcagggtcataggataatagtggagggaaggtcagcagataaacatgtgaacagaggtctctggttttcctaggcagaggaccctgcggccttccgcagtgtttgtgtccctgggtacttgagattagggagtggtgatgactcttaaggagcatgctgccttcaagcgtctgtttaacaaagcacatcttgcaccgcccttaatccatttaaccctgagtggacacagcacatgtttcagagagcacggggttgggggtaaggttatagattaacagcatcccaaggcagaagaatttttcttagtacagaacaaaatggagtctccta

SEQ ID NO: 28365 - DNA, 1712 bp, Homo sapiens
ggctgatgaggctgcaggtcccttctgggtggccctggaccctgtgtccttctcccactgtggctgctttctacccaggaggtgtctcctccaaatgctgtcggcagagatcaaatcccatccctgatgttccaaggcttccaggtgtaactcacaggcccagttcttggtaggcaggtgatttagccttctgtgtcccagtcacaacccagggtgtgttgaaagctaccatttgataaaaacaaacatgagcaagattgaagtgaccaacaccaagctcgggctttcagagatgtagtcatggcggacctcaaacagcattgctgaccatctgagctgggtgctgaatgcctccatagttttcaaattaaaatgactgtatttagtgtctctttttttaaaaaaaatatttatttatttatttatttatttatttatttatttatttatttatttattttgagacagtctggctctgtcgcccgggctggagtgcagtagaacgatctcggctcactgcaacctccacttcccaggttcaaatgattctcctgcctcagccccctgagtagctgggactacaggcgcccgccaccacgtccggctaatttttgtatttttagtagagatggggtttcaccatgttggccaggatggtctctattgcttgacctcgtgatccacctgcctcggcctcccaaagtgctgggattacaggcgtgagccactgcgcccggcctagtgtctctttaggattgttttattaagattgcttatttgatagcagataactatgaagatactaacgatactataaagacacagtggcagctcccagctaactggcactctgagctgtcctctaacattctggattcacaaaagtttacttgctgggtttgctcattgttgatttaatactttgcctgtggtttaaactgttaaattgttgcaaattgctattctgtgcaaaagaaacttgaactgtcctgcaccccccagttcagctctcactgcattcccgctcttctgcctgtcctttggctattgttggactgtactcagggctgagaggagggcatggggcttctgcagtcaccacagggctgtgggaaggccaccagcaagggctggggggccagagggcttctgatctgtcaggtgcagggtgtggcgcacgtgggcttgtgctgtggatgaggttttgcttctaggggagaaaccggccaaggcgcgtcaggcatcagcagacctctcccagaaggaggacattttgagaagatgaagatggaaatcggtttgatctcctttgttccctttctggggacagggacatcacggttctgtaataactgaggtctaggaaaaagaacagaaagaagggcaggttggaaacattgtgtcttttggggctagtagtagctgcagaacaacccaaatccgatttacaaccaagcttctagggtgagtaactcgatattcaccaaaccgggtgactgtcagtgatggcatgccacgtatcacttttgggagggaggagaggttgcaaaactaagcagacggtgtggcactgcagctcccccccgcccaagctggtgagtgttaatatcgaaatctatagcaaaatgtttgtccatgacttgcaccagtacctctcgaaaggtgcccaaatacctaataaacatctgaaaaggcatgcaactcaattggtt

SEQ ID NO: 28366 - DNA, 1087 bp, Homo sapiens
cacttcggtcgagtttttggtggtgttgagcggatagccggggaagttggagtcttgtttgtggccgcctcgtgctcgtgtctgtatctaagatcctcaggctgctcctttttgggtaaggtctgttgcttctctaggaacagtgacggtggcagagcccgtggcccctctctcctgtcccagagccaagctgtttcctctccccactcccgggcaccctgcgggcaagtgaggggggcccactctgccctggcctgccccaccgccccatttgctgggttgtcctcaaagcacacggtaagcacccccgcccccgccccccacacacgtaccgctgtcagccttcttgctcgtcacctccatccagggcacatccgcccctctgggtgctgtgagcctgttgccggcgcggtcccgctgctcctccttctgctgccctgcactgccgtggcacaaccctccctccgggtctctgctgagccctccaggcgctcaggtctgccgtctggttgcaggtgttttatagagtgcagctttacgctcccactccagtcatctccacgttggtgtccgtctgtgtgtcctctctgcctttaagttctgcctctgtgtgacacagtttcacagtttctgtgaccaaaacacaggtttagtcgcttgctgctggcagagtccaattaacaagagcacgtcgggtataaagaaagtgactttattccaaagctagcttaggggaagaggtaaagtgagggtaccactttgcttttggagcagaaagtgggaacttttaaaggtggggggatgtgtggcacacaggggaggaggctggcaggtgggggtccgcataactcgtttcgctgccttatctaccgggtggtcgagttggcatcttccccggcagaactgtgttggggtgttgtgggtattgtgggtattgtgggggttgtgttgtgggtgttgtgggggttgtgggtgttgtgttgtgggtgttgtaggagttgtgagtgttgtgggggttgtgggggttgtaggggttgcgggtgttgtgggtgttgtagggggtgtgggtgttgtgggtgttgtgggg

SEQ ID NO: 28367 - DNA, 1050 bp, Homo sapiens
ctcctactgcagaagtcacacatctgtccatcatttatattcttggagtgtcgtccttaaatgttaggatgcatgcttgatgtcacaaaagtttaccggtgtctctattttctttttttttaaacttcactaatgtgtggggtacaggtggattttggttatgcggacaggttctttagtggcgaattctgagattttagtgcacctgtcacccgagcagtggtacactggacccaatatagagtctctatccctcacccccttcccaatttccctgtccattatatcactctatgtttttgcgttctcatagcttagctcccacttataagtgagaacagtttttggttttccgttcctgagtttcttcacttagaataatggcctccagctccatccaagttgctgtgagacattattttgtcccttttgatggctgagtagtattccgtggtgtatatggaccacgtgttctttattcactcttcggtccatggatgctttaggttggttctgtatccttgcaattgcaagtcatcttgctgcaaacatgcatatgtctttttccgctcatggcttcttttcctctggtagatacccaggagtgggattgctggatcgaatggtggatctacttttagttctttaaggaatctccatgctgtttccacagtggttgtactagtttacattcccaccagcaatgtagaggtgttccctgttcaccacatccatgccagccaaaaatgtggaatgcttcacgaatttgcatgtcgtccttctgcaggagccacgctaatcttctctgcctcgttccggttttagtacacgtactgctgacgcaagcatgggtgtctctgttttcttcccaaatagtgtaaagatcttggagccgggactttggttccatggtgttttcaaaccggctttcctcatgtgtgggtgccatgcgggcgtctgcatctccatgcttggagtccgcggggggtctccagacaggatcctggttgtcacctgaagcttggagaagggacaggagtgcactgcagg

SEQ ID NO: 28368 - DNA, 1029 bp, Homo sapiens
tagaatgacagatgtggcatttcaatcggtaaataatgagtacacctttaaggtccaggcactctttgtttagaacattgtggaatgcctacatcatctcatgcttgcacaggagcgtggctttgtcagaactcatccccaggcagccctgtgggcacctggtgggggctggacaggggtcacgaggagaagccagcaggagggtggtgggccctccaccttgtccccgcaggactcccctctctgcccagacacactcagcctccaccaggactcaggggttccagccaagctcctcttaccaacgatgccccgtgactgccccagggacgggagggctcaatgccattcccctgcaggccctgtctctccccagcttccagttggttgtcctgcagcctcaggtctctgatgggatgaagcaaagtcgagaacttacggtttgtctggctttattcttgtgagagtgggagtgacaagctctgtacatccccagcagaaaccagaattccacctcctacataactttgtaaattgcaaaatataatgaaaagtgcatgaggccaggcacagtggctcacgcctataatcccagcactttgggaagccgaggtgggtgggtcacctgaggtcaagagttcgagatcagcctggccaacatggcaaaatcccttctctactaaaaatacaaaaatcagccaggcgtggtagcccgcacctgtaatcccagctacttgggaggctgaggcaggagaatcacttgaatccaggaggcagagtttgcagtgagctgaggtcatgccactgcattccagcctaggggacaaaacaagactccttcttaaaaaaaaaaaaaaaagtgcatgagacattgatgaccagtttaatgaataagtatgcagcaaatatccatctgtttctatagagtaaaagtagttattataacgcgtagttcgttgtaagaaaattatgtctaggtcaacttagctgtgactgttttatgtgtgcatgcatgtatgtgtgtgtgtg

SEQ ID NO: 28369 - DNA, 1196 bp, Homo sapiens
tgatgaccagaggtatttgtttcttgtcttaggaaagcaaaagcctcccttaaagcccccgcagacttctccctggctggacccagggcacatgcccatcccatccctggatcacttgctcaaagaggggatgggattacctttatggcttagatctggggctgggcttccctcccatatccaagggtgagcgctgccataatagcaggaggttctgttaccagcaaagggggtagtggcaggtaggtaactcacagtgacttgcatgttgcaaaaggcggggttctgttatccggaattggaggagtggttttaggtatgtcatataattatgcctttaaatccattggttgagaaaacaggcaatgctaaaagattctcatgaacctagcagcggttttaattttgtattttatttattttatcagtatctaaatacaatagaaatataaatacaatagaaatggaatggatcatgtgagatgtgtgttgttgacgaacgtgtagtcagtgcttcatgcacatgggatccaagtccccaaacagtggctgcagatccacaccctgctccaggtgctgaggtgccccagacagctgctcctagtcagtgaagcattgactctttagtctcaattgttggtctgcatgtctactgataagccggtactgtgctgttttaattattgaggctttctagatgttgtagtgtattttagggctattttcttgttctttttcatgattttcctggcttttcttccctgtttagttttccatatgaactatagaatcagtatgtctagttctggggctgggggggagcttttgctattttaattaggattcagttatatatttaggtttatgtatcatttacatattactatctaacaaaccacctcaaaatgtatcaatttaaaacaaccatcatgtcggggggccctcaattctgtgggtcagcaatttgggttgggctcagcaacatggttcttctgctggtttcccctggggtcattggagtggctgtcgtcagctagagctgcctggagaacctcaggtggaatggcccatttctggtccatttctgctccatgtgggaccaccttctgtcagactagcccaagccaccacctctgatggccacaagggtgtaagggagtggcaacgctctaaagactgtcttggaagtcctgtga

SEQ ID NO: 28370 - DNA, 1094 bp, Homo sapiens
cagcactgcctttcaggagcctaacccttgggcagctgtagcagagggcgctgaagctaaaccaggactcttgagcgagggcgcgagacaagctagggttaacagtgacccttgggtttcagcagaggcaaacgaaagtacactctggagaaagtctcattcaggcctgaagaatcccacagattaaggaaaattaaatatgaattcataatcaagaatgacaacgtaaacagcagatgtggactgaagatgacccactgtgccccgacttgaaagagaaccaagtagaactgctctcagtgagaactgtagatattttaaagcaaaaacttacagacaggttttgtatcagattagatacagttaatgagaatgggtacagaaccaagtagaactgctctcagtgaaaactgtagatattttaaagcaaaaccgtatggatggattttgtatcagattagacacagttaatgagagaatgggtacaccagacatcaatgtgaagaaatcatccagtgacagtaaaggaggtgaaaaatgtgaaataggcgtgaaaagatgtaaggacagaatgagaaccttcataaaatagggctttggcccccatccccaaaggagagaacaggagaagcctcctgggaagagaggatgcctgaggacctcctgaactgatgaaggcacgatttttcagatacaggaagcacatgtagaccaagcagagcgaatgcacagaaatccacacctaggcaggccctggggcatcacagaccatcagagacaaggaggagccgggcgcggtggctcacgcctctaatcccagcattccaggaagctgaggcaggaggatcccctgaggtcaggagtttgagaccagcctggccaacatggtgaaaccccatctctactaaaaatataaaaattagctgggcctggtggcacatgtctaatcccagctactggggtggctgaggcaggggaatcatttgaacctggtcggtggaggttgcagtgagccgagactgcatcactgcactccagcctgggtgacagagtgagactctgtctcaaaaaaaaaaaaaaaaaaaaaaagataa

SEQ ID NO: 28371 - DNA, 1033 bp, Homo sapiens
gctgcccattttgaactcactgccagtgtgtctctgctgtcatctgatgtgcagagctataggtgctgcggcgaagggtgcaggtttggagccgtttaaacaacctggcccagcctcctcactccctgctgaccttggtcaaggcttcagtctctaaacctcagctttctcatctgcagagcacagacaaaaccacctgcctttgagctgtcttataaagcctaaatcaatgcgcacagcaggtacacagcaatgcttgataaattgttactattattgggtgaattttaggttttttttgttgttgttgttgttttgagacagagtctctctgttgtcctggctggagcacagcagtgcgatcttggctcactgcaacctccatcttctgaggttcaagtgattctcgtgccccagcctcccaagtagctgggattacaggtgcctgccaccacatccagctaattttttttatttttaagtagagatgggcttttgccatgcttccccagctggtcttgaactcctggcctcaagtgatcctcctgtctcggcctcccaaagtgctgggattacaggcttgagccaccgcacccgtccagaattttagatttttttaaatccgtggttgaaaaataggctatggctggcttactcattgtgctttagggaagcatgtatttgagtgaaggaaatgataaaaggaatttcatatcgggcccaggcgccgcccaccctgcaagacagtttacagatgcctgccctgacagctgtctgcagttagccagcgtcagccgaggggtcctgagatccgctgaaggctgcctttgcatgccgacagcaagggaaaagtgccacatgtccctgggcttgccacaggtgacctttggatgggaccattctccagacagcgcagctcgtctttccagaacactcatggggagtgtgcctgtgtctggctggctgtgtgggctcccattcagttcattccccttctccagcctttaggcatgaccctaaaggcagaggtctc

SEQ ID NO: 28372 - DNA, 1023 bp, Homo sapiens
tgccccgcccacgggcagtggctgcggagtgtctgctctatcaggcatggtgatttcctgccagcctgtgcctttgacattcccaccagaggcagaaccttctgcaggtggccctggccaggctcctctctcctcccagctcctcattagcctcctttgccaggctaggaaaccgaggtatgcgaggttaaggaactttccttgggccgtgcagctgagagtgcgctttgcagggatttgcatccaggccgcgggactcacacaggccacacctgccacccccactgcctctggctcgtgggaggtgtgggatgtggcgggtggccggggcagtgctgggcaggcaggtgttggtattcacaacgttgctttcttgaccgattattttcctgggagacttcctcagtcaaagggttgatatgcttgcgagctctcgatgcacgctatcagattctccaaaaacgtacagccagcttcgcctgcacctgcagcttctgtgatttgtgctcttaattgacgtggcgctttttttaggttgagtcgtttttcattgccaacaatcttctcctgcattgaaataatagcttgtaaagaagcctcacgcttcctttttctctgttgactcttctaggacgcgctccaggagatatataatcagaagggcatgtttccaggggagcagtttaagcctgcccggaggccgtggaccctcctgaacttcctgtcctgggccaccattctcctgtctcccctcttcagttttgtcttgggcgtctttgccagcggatcacctctcctgatcctgactttcttggggtttgtgggagcaggtaatggacactgtcgctaacagctcacactctgacgggcctcacagtatcagccacagggtccgggacctggtgactcatcacagtggctgtgggaggcaggggcctggctgttatggaccctggagccaggatccccccacggcctgcgggcctcagagcctggattcttgcactgagctgagggtcgcct

SEQ ID NO: 28373 - DNA, 1542 bp, Homo sapiens
ctgccaggggccttggtgggaggggtcctgagaggcagtgactgccaccagcctctcccattggactacgagatgacttgaggccacccacagaggacaggatgtgacctgcttacatccgagggtcctgctcgtccacctctgtcacctgttgggtttgcaaggccgagctgttagaatgccccgaagcccttctgctcccaccagccaaagacccagaggggcaggcagggcaaggtccacgtgtccacctgcctcggacccagccggtcagaagacgtgcccctcacccctgcctgagcagaccacggtctgagagggctgtctccccgcgggccacacctactcactgacagcagaggccactgggtgcggggcagagggacagggtctggggcagaggaaggaagccccagtaacacgttttacagcaaaaaggcaaagtcatccgtctcacctcttctctctctctcctgtcttgaaagcttcctttggagttcgcagactgataggagtaactgagatagaaaaaggctccagctacggaaaccaagagtttaagaaaaaggaataattaatggctgtgactgaacacacgcggccctgacggtggtatccagttaactcaaaaccaacacacagagtgcaggaaaagacaattagaaactatttttcttattaactggtgactaatattaacaaaacttgagccaagagtaaagaattcagaaggcctgtcaggtgaagtcttcagcctcccacagcgcagggtcccagcatctccacgcgcgcccgtgggaggtgggtccggccggagaggcctcccgcggacgccgtctctccagaactccgcttccaagagggagcctttggctgctttctctccttaaacttagatcaaattttttggtttttaatcagttatcttgggaacttaacctggcccctcacctcttctgcaccccccgcccccgaaactgtctcgtaatgaatttctgctgtcctcctgggagtggacggccgggtcccgtcccccgggagcatcgctcggctcagcaccttggctcccagtgggggccccgtggagggcgcccgtagtgataagcacaccggcacgaacgtcaggtccattcctcgaagtcggagccctcactctgccctgtcctggggctggctgagggcgaacgccccacctcactttctagagccctgtctgtcctagctcctatctgaccttgtgtgtaaatacgtacatctgtttttaaagtggatgggcccctgagaactcagtgaaatgcagagttctccatgcacctaaagctcctttgtcgctctcatggctgtcagatcctggtccctccacactgggtgctggggagggaggaccctcggggctaccgcgcgcccccccatcccacagatcaggagccaaggagggagaacagggcagcctgtgggactctaggatgcttcagaagaagcgacggcaccgtcaaccctctgttttttaaaggtggttggagactgttaacactgagctca

SEQ ID NO: 28374 - DNA, 1023 bp, Homo sapiens
cgaggccggcgtctctggtccgggagcgtccaggctcgctcaccgcgcgcgaggcccgcctgccgagtcctggcctcagctccggcgcagggcccagcggggcgcccactgccgagggaggaagatggacgtgtcccgggagccccgctccgcctcccacttcccacctcccggtcccgcgcggccggcccgggcgcacttccgtcggaggcgaagcgcggcgaagacccgccccgtgaagcctcgcgcgccccggaaatggtcatgcggcggcgccgaggccggaagtggctgaggccggcagcagcgggcggcagctgcggcgcaaccggctccggagctgcctggcgcggccgggcgggcggcgccgctcaggctcgggctccggctgggcccggcgcggcctcggggctgcccatggggcgcggggggccgggccggtgacgccggacgcccatggacgcctctgaggagccgctgccgccggtgatctacaccatggagaacaagcccatcgtcacctgtgagtgcccggaggcggggagggcgcggcggtcgttgggcgggcccgggccctggcgttatgcacccggcgcccccagaccttcagcccccggcgcgctccgggctgggccgcttcctggaggtgtgaccagggctgcggctgaggcggggccctctgacttttcggggacgccctctgaccttcccgccgggcgacctctgacccctggggggcgccctcgggccggctgcagttggagccggtggaacccggcggactctgcccgggactgggcgcgcgccggcgtcgagggcgaggagcgggggctgccaccgccccgtcccgcccccgttgagccgcgcgcccgggacctgggggccccggcctcttccgccgggcggttttgcccgcgggcgccctttccccgactacggggaagtccttgggggctcgcagagttgcaggcgttggcgaagtaggaacagtttgttgcggggtgaagcgtcaggcagagccgc

SEQ ID NO: 28375 - DNA, 1030 bp, Homo sapiens
cttcttcttcttttttgagacggcgtctttctctgtcgcccaggctggagtgcagtggcatgatctcggccatgatcttggctcactgcaacctctgcctcccgggttcaagcgattctccttcctcggcctcccgagtagctgggattacaggcgcatgctgccatgcccggctaattttttgtttgtttgtttttgttttttttttttttcagtagagacagagtttcaccatgttggtgaggctggtctcgaactcctgaccttgggttgtccacctgcgcagcctcccgaagtgctgggattacaggcttgagcccccacccttggcctcaagcaacatagtgaatgttaatctctgcatggatggtacactgtcctagaaggtgcaaactttcattcattggagtctcagaagagaagggggcttcagtagactgtcaaagttaacttgaaaaatgatcactttaaaagtgaaggtaaaaagctgacttcatacttcccacttgaaattatgttgtggtatatctgggactgaagctttaggaagcacttggcctggtttcactttatgccttcatcttgctcctctctttcagctatacatgttttgaaaggagaaggtggtatgaacaattgctttaaaaaaatccacccagaggctaattaacccttaactttttaatattatgtacatagttctcttagtaggcaacatttttgttttcaaaaatcttttaaattcttacttgaaatggtattacctcagatctgttcattttaaaatgaaagtagagtttatgcatgttgtgaattttttttccatagaatgtataatattttacttcagtgaaaatgcattctgcttagacctttctgggaagaatatagaatgtaactggttcaggtgaatttaaaaactgtgtatatgtagggatagaagaatgaaaagttcccaaagattaagggtaattagaatagattattactttaaaacctagctgattatttcacttcattttattattat

SEQ ID NO: 28376 - DNA, 1137 bp, Homo sapiens
ctgtggtgggttgcctcagagcttcctgtggcttcctgtcctgtgtctcaccttctttcttcctcaaatctttcctctatctgctcttaatgtcaaatatagtcacagtattttggccttagagaatatttgtttttaaattaaaaattgataaccttggagtcatttatgacttcttttttctctcacaactgacattatctttgaaatatatctagaatccagctatatatagggcctgcctggataatctgggataatcacatcttgagctcctgaacttaattaagtctacaaagacccctttcccaaataaggtgacattcacaggttttgagggttaggatgttgtggggcaccatgccacctgccgcaccactgtctgtgttagctaccaagcgcgcagtggccggcattcatcaagcgtctttggttttagacagctgcgtctgtctttggaggtttgtccttcgtgtactcctgaccgagggaatgttatcttgacatttgggcttctgggttctagatgtggttacaaggtggggtgatcccttcttaggaaaagtccagcctcttctgtgctctctcccttatgtggctttttggacatttgttacatggtgtttaatttctgaatattattttaggcccctgtttgcaattttttttttttaacagtgaccagggaccattccattgtatgtttggacatttttcttttcttttctttttttttttttgagacagagtctcgctctattgcccaggctggagtgcagtggcgtgatctcggcttactgcaagctccgactccgcctcctgggttcacgctattctcctgcctcagcctcccgagtagctgggactacaggcgcccaccaccacacctggctaatttttttgtatttttagtaaggatggagttcaccgtgttagccaggatggtctcgatctcctgaccttgtgatctgcccgcctcggcctctcaaagtgctggattacaggcatgagccaccgcgcctggcccatttttcttatttttaactgagatctgttagcagtttgaagcgattgtatacatttcagagttagctgggcatggtggtgcgtgcttctagtcctagctacttgggagac

SEQ ID NO: 28377 - DNA, 1056 bp, Homo sapiens
agctaaatccatttctctgtctttctcacccattagtgctctggggcctactaagccctacagaataaagccagcctttgaaaataagacagcccattaggtggccgaggacagtgtcttgttaacaggttgaaacactccacatgtctccaacaatttaagataaagtgagatgtattttattagaaaacttactgttccttttaccaagattatgctaaagaatttgaagaaaaattgtcctgtatcagagtatcagcaaatattcagactccttatgtcaaggtttttttttccaacataaatctccaaatagaagtattgaccttgaaaatatatcatgtcaggtatttaggaaagcgacaaactgactgaacattctgttttgcttagccactctctcagggttataattttgtgatccttttatacttttgtatgagtaagaccatcacggctttgcacgttcaagaattggttcagtaaaaaacagatgacagaaatgttcactctgtctgcggaaggccttttggaacccatattttcagccaaccattgttaaaacaactgctgcagagtaagtagtaaacttgttagaattaagaagttgggaaggagcactgggcagtattgagtcctaagccaagctacctgggttcgaatcccagccttggcgctcatttgcttgatgttgggccaattaggggagttcttgatgtcttggtttccatatgagggttcagggtgagtatgcgtgaagtgccgggggcatagcaggcgcacggtgctgtctggagggacggtaaacaggtggcccttctcttgactgtgttacctagcagctgttccatgaccctaatgtgatggttttgggaggtggggcctttgggaggtgattaggtcatgtggctggagtccccacaaaagggattagtgcccttataaaaaagggccccagagatctcccttgccccttcccccacgtgagggcacagcaagaccaaggtactcaacctgctgaagccttgactcagacttacaccctccagaaatgat

SEQ ID NO: 28378 - DNA, 1027 bp, Homo sapiens
atgagagggtgcctggcaggtgccttgtgtaatattcgcacatggggagccacctataaattttagctcctcctggcacttggttgaacagtgagttgattttggtgaagttttggtttctttttctccatggattttgggcgtctgggagaaagtggaggctgtagaacacagcaaagctgggtgaggtggagcaggctccctctcctaagctttgtgtccttggggcaagttcttcaccttctctgatccttgttttccttgtggggaaaatcacacccaccccatggaggtgtcacgagggttcagcttcatcacatctgtcccgtgctgggttttcctgagacgtgttatgtagaggcacaggtacagaagaatcttgcgatatcgctttactaaacataaaactacctaaaaacaccaatttattaagctctagagccattttgcatgtattcacctaaaaatatggtaactgaatttctttcttcccttcataggtgctggagatcagaatttatttacctctgtttatccaacgctctctcagcagcttccaagagaaccaatggaatggagaaggtatgagttgtgtgttttttggctgtatccctctcttcattttttaaaatgaagtacatgtttttaaataagtatatgttgtttagacatttatgtgaacaagtgaagtagcacaagttaaaagcctcagttctaaagaaacagaatgacctcacataatctgtgggtctttgtgggtcttattctttatggaatgccatggttttctttttttttttttttttttttgagacagagtctcgttctgtcgcccaggctggagtgcagtagcgcaatctcggctcactgcaacctccacctcctgggttcaagcaattctcctgcctcagcctcctgagtagctgggattacaggtgtgcgctaccgcacccggctaatttttgtagttttagtagagacaggttttgccatgttggccaggctggtcttgaactcctgacctcaa

SEQ ID NO: 28379 - DNA, 1028 bp, Homo sapiens
ttggaaagtagaagcaagacaattattttgagttaaagactcacttttataggaatgatctgtgattcttcatggttgaccagaatgtcttaaaggcacaggcgttttgcaaaggagacacgtgctcacttagactccaccttaaagcggaagaactgggctgtatcagccatcttacaagaccctccctccaccctggctcctgtgcgttttccttaaggacaagaaggtaaacagaaagatggtatttaaaaattaggagcgaggttagatcagccatcaccgttgctctgttgcatgtttacagttagtcgtctggtgacatactcataggaaatcactgactgggaatcctcttcttggaaaacttatttctggtaagagcaggtgttacttgtaaatataaagttgtgtatatgtaaatgtaaatttgtaaatttggattttgtcttgtaacataggtaatctgattttaaccagggtatacagaatttcctgttgttctttgtgtttatgtaagtctgattcttatagcattattcctttctgaccaccagtttgtgccttagtaacatgagggattaaggtggctttctggagttgacttacccaggtgaatatagtctaatttctgtgctgattatagtgtcttacaagatatgcatttagttgctaatatttaatataaagagtgtacagagtgtaagagaaaaattgcttaacatgtgaggaggcccagtgctgtgaaagagagaaaagagtttagcaaatggagtaatctgtaagggcattctgatagataaagggaaaaaaaaagtgtgttcatgaaacaagataattttgagaaaaaaattaaatggagaaactatgtaggcccggcatggtggctcacgcctgtcatccagacactgtaggagggtcaggtgggaggatcgcttgagcctaggagttcaagaccggcctgagcaacatagtgaaacccctgtctctgtaaagaagaaataaaattagctggacatggtggtgca

SEQ ID NO: 28380 - DNA, 1064 bp, Homo sapiens
ggcccgggtgaaagcagggctggagatgggggttggcagaggtgtggacagggacagttagactcagggtccccactcctgtctgtagtgaagtgattgctgtcattgcccactcccccaacccccccccccacccccgccgcccctcaggaacctggaaagtctttctgtggacagaagagctccagaccctcggatctgaggtgctgcagaaggcaagggagaagggccattctaaaaccagccggcctaggttctgaacagggcacagctccgctccgggaactctgtagccagatccatgcttcctaggcaagagagtagagaacttatctcaggaaaattggatggccccagggaaaagactacgtttttcagaaacaaccttaaaatttgggaaagaaatgtgttaccttagggaagatacgtccacctgaaacctcaggatgtgtctttattggaataagggtcttcgcagatatggttaagataaggacctcactgtgagatcctcttcaattagggtagaccctgaatccaatgacaagtgtccttgtaagaggcagaagagaagacacagacacagggtagaagaccttgtgaagatggaggtagagatgagagtgatgtgttcatgagccgaagaatgctgaggatgccagcagccagcagaagctgggagagaagcaaggaacctcccactgcagccagagggaactaagcccacccataccttgatttcaactttctggcctcatgaaacatgcaagaataagctaatgtcctaagcctccaggtttgtggtagtttgtgacagcaggtctggaaactcatgcaggagggcaggttgaggaggatggagcaggtacttggtgtagtttggatgtgtccccaaacattcttgcattggaaacttaatttctgccctcgtgagtggattaatgttgctgtcacgggagtgggctccttatcacgtgagtggctttcttatcaaagtgagctctctttggctctctggctcttgccctgtcaccatgtgatgccctctgcgggttttgacatac

SEQ ID NO: 28381 - DNA, 1030 bp, Homo sapiens
ctcatttatttaaagagaataggaggcaacgaagtggccagctgtgatggaaactagccctgctctgtagtagggcttgatccacactccaggggcgacgggggctgaggaggggagcaagacggccggatagaggcctctgccctgtgggtgctgcttactagccttgcgcactcccttaatggaaaatgtgttaagaatggagattgtgcctaccttgcacagctggctgctggggtgagcggtaacacccgtgaagtgaggccagttctgcgtgagttcaggatcctccttgacagagtatttcctttttttttctgtaacaatttctaattttccctccatttacaaaagttgaatgttttctttatgtaaatttggaaaataacagacaaatatacgaagaaaatgtcgttgcttttgctagcaggaagaggttccctttttttgtccatggccttcttatgtatagatgaactgcagttatttccttgctcctatttggacatttgaattcttcaaaattctttgcaattgcagcagtttgtatccttatacatacatctttgtgtgtaaattcatacaagtagaattggaaggtcgaagatagacatgtttttaaagctatatgttgttaatttgtcctccagaaaggtcttcccattttcagtcatgctagtgatgcctgttttcctgcacctttggtaagaaaaaagtatgatacttatatattttgtcgccaaattagaagaacggggaagatactttcttgaaggccataatgtgtttgttacaatgattgcccaagtgattttttgggggggtttggaatgtgtttcattcagcgtttgaccttttatcaccttagctgctggttatgtaacagaccgtgtgggcctagcagggtcaggactcctccagaccccaggggagtcaccagcctagcctgtggcacggaggaaccgtgcatgggacgccgtcggagttagctggccggtttgtgaacagaggctgtgtgtggccaacctgc

SEQ ID NO: 28382 - DNA, 1183 bp, Homo sapiens
ctccctccccctacctcacacgctgctcatgaaagtttccacccacgctgtctccacggaacagcctccgtctgctggctcttcgtggaaggccatttgtctttcaggtagacactcagcagccctcacggtcttagtgacgtgtgtgcctttctggtcacacagctgcccagtttcctgatcggggtggatttgtgtcccctaaggggtaaaacagccgtttaccgcagatcctctcattgtgcttttctagaataacacccttctaggggaggcgggtgggggagggagggatcataaccccttctgtgccttgggatgccggagctgggggacctggaggcccatcagccggagccacgtgaaaggtactgaagaaagctgagacccggctgtgaggagcgcctcagcggtgaggtggtttagggataaatgtttctggaaccctgtggtcccccataatgttgatagaatatcatatgcactgggagttaaatatatttaatttaatgatcattatatatgtgggggttaatatgttgtttttctgtccctttaaagtctttacatgtaattgtagctgtataatcgttatttttcttttgcatcttaagtcttagaaattaagatattccatcgtgaggatgagagaggtcctcagtgtgtttttggtctggttgtagggaaggactcaagtcctggaatgtcctccactggtctactgagttgcagtcacactgttccaatggattatttgctttcggttgtaaatttaattgtacatatggttgatttattatttttaaaaatacagactaactgatgtaatgtttatgtataagttgcaccaaaaatcaaggacaaaaataagtgtgtttgtttttacaggtgtgaaagtcacagcttgtaaataagtgttgtatgtattaaaccttttccagttctccaaagcgatgtatttttgtacacttgaaatagagtactcttaatttactgggcaaatgtgcttggaattgaacttgacaagattagctcaagcagatagagtcgggtccagcagtgggtggccctcgtgtgaatccccgtggatgtgcaagttgtggagagaaggagcaccgggttcctgcccagcactgtgcttgcgggaggcggtggggcatgggaggaaggaggcacagaccgg

SEQ ID NO: 28383 - DNA, 1024 bp, Homo sapiens
cacttgttcaggagggacggggtccagaaaggagagggaaggaccagggctgagctacaacgtgacttggggaggttttgagggcgggggtgccatcagggtcaccttcgtctgctgatggggaccgagggttccttagaggaggaagcagcaggggatgatgggattcgggtgtgcctggcggccatgccgcgcctcccgcacctcctctgcctcccatgggcactgctgtctctgggtgcaccactagctctgctgtggggccagctggcgacagtggagatgctgtgtgaggttcctttggggtcccgagcttgggatggaggcgggcagcttcagggcctggggtggagagggagagggcaggtctgggacctcctgcctggatctgtggcctgtgtcctggagcccagagcaagctggggtggcagtctggctctgcgctcctcctcacaactcttctctctcgtcaattcaggtacttcttcaataaagaaggggattttaacaacctgacagctgcagcatttcataagaagtctcacctcttggtcactggctttgcttctggaatcttccatcttcatgagctgccagagtttaacctcatccactccctgaggtaagcctttgctcgcagtggggtgtggttttatgcactcactggccctgaatctgagggcccagccaagcctgcccttagcagtgggggcagcagagccacttggagcgccggctcaggccacaggacggcagcccgaaacctgcccggccgctggtgctggtcagtgcgacagtgttgccgcccccactggcagtcagcagcattggtctcgggtcagtcacagcctttcaagtttttgtctccgcttttcttcatctgtgagacacagagaacgaaaatactatgctcataaaattgtgaagttgcaagttgttgaaccctggcctcccctctgggccttctctgattcttttctttgagacagagtcctgctctgtcgcccaggctggagtgcggtgg

SEQ ID NO: 28384 - DNA, 1051 bp, Homo sapiens
tgggctgggccatctgtttggcagctcacccggaacagcctccgcggccccagcacgggcccacctgccgcagctgcagcgagggaagggctgcttctgcctccgctttgtgcaggacccaatgagtagaggctgctgctcttgatggggctcccacagcaccccccagccagccgggagaccgcaggatgacttgcttcgtggggagagcagcctggatatgctgtccagtgatcattaacggttcttttttccccaggtgacatgagttctcggcacttcaaacctgagatcagggtgacctcactccgcttctctcccactggtgagcactgagccatgggcttttggtgccggtgggcactggggcatctgtgccatagcaaggctggccaccatggagctgtctgcaggctctgggctgtgccctgtgcccctgggtaagaacatggccctgcaaaccctgcaggccacaagatggctgttgtccctgaggatggatggctgtcacggtgccaacctcagatgcactgagctttgaaacatggcaggcctggtatgcccttgctctagcagctccccgagtgccctggacgtgctgcctgggggcggctctgccatcacggagagcccgtctcctgcgcactgcccccatcctctcgcagtggggaggagggtctgtgccacaggcctgtggagcctggcggtgcacatggtccccacacagaggagccaggagcagggctattggcaagcgtgctccagcctagactgagtgtcagagccaggggcagagaggcccatgtgagccaggggtctgtgccctcgggcccaagggccaaatctggctggccacctgctttggtcactgatgttttactgggacattttactgggcgtttttttgttggcggatccttctggctgtctctagtgatccgtgcagcactgagtaggtgcagcagagaccacagggcctgcggagctgaagacgcctgagctagacagaagacttggctggctcccggcgtcaagagaggaggacgcatgc

SEQ ID NO: 28385 - DNA, 1111 bp, Homo sapiens
ccgggggcctcgagaaggcctctccaccagtgaagtttactcttttttgaacagcttagagaaagcatgtattttattttatttttactttttgtcttttgagacagcgcccagtctggagtgcaatggcgcgatcttggctcactgcggcctccgcctcctgggttcaagcgattctcctgcctcagccttccgagtagctgggactacaagcatgcaccaccacacccaactaatttgtgtatttttggtagatacggagtttcaccatgttggccaggctggtctcaaactcctgacctcaagtgatcctcccgctttggcctcccaaagtgctgggattacaggcatgagccactgcacccggccgagagagcttgtattttaaataccctattcttggctaaaaaaaagcaaaaacgacttgcaaaacccagggagacgctaagaaagaacagtttttaagtgtcgcttatgctgtcacctagagcctagaaatgacttagcatttcacttgagtgtttttcaggacacacacattttgaaaacactgagatcacactcacccgtgttttgcaaatgtttctgacgcatgggaagtaattcccattcattcagttctcaacatcattttaacagttgcgtggtatttctgggtcctagacaggttactgtttacgtaactggtcagctgttgctgagtgcttggtggcctgatttcctgtgctactggaaatgactgcaggccgaaccagtagggcaggaggccaccacgcgtgccaggtacctgtagttcccatgtggttcagggtgaactggagaggggagagctgggtggtggcgaaaggggtgtcaggccatggagagtggcctgaggctggtggctttgtgggtggcccaccttggctggttggagttggcactaggcagagtgagctgggggaaagggccaggatgtgtttcatgatttggccttggtgggatagaaaatagccccagaatagcttgagccctcccaggcagaacggcagggtcttgtgtctggggtgtctgggtggatttcttatgggtagcggaacccaagtgccagggccaggtgctgacctctccc

SEQ ID NO: 28386 - DNA, 2022 bp, Homo sapiens
aggagcttctgttgcccttgcccttggggagatggagctgcctggcctgtggtgttgtcctggggtctcttgtgtctctcccaccatctgtgatgggaaagttgagggagactagaaattgaactaagtagtgaccgaaagccccgtcacaccgtctgtgcacgtggcactctgagcacactgctgcttctcactcttggtgcttgcagcaagcaactggaggagggcagccaggccctgggtgtaggtagagcactcagcagccggggacccgcacgcctccaggctgtgccctcagtggagtcacccggcccccataccccagtttgcaaagggagctgttgggaccagctgatctccatagcccacttctgagggtttgtcatagtcgtaacccaccaaccgacagtgaattggaatgggggtgtgggggacgtttggcttggtatggaaccaactgtaactttttgcagagcaagtaagatattaatatacattaggaatttgctcctggtacttagctaaaatcctgtttttaaaaatgtgttaacacaaatctgagtggggcacgttttgaagagttgtctctggttttcccccgtgcaggatcctggtgcacctgagccgtggaggggctgaagtccagatctttgctcctgacgtccctcagatgcacgtgattgaccacaccaaggggcagccgtccgaaggcgagagcaggtgtgggggtgggattggaacttgcttcttgtctacctcccacggtgcagcctttttttgctggcttagcttaaaccaagtcttgtgtgcaaatgaacgtccttctgagcagctgtgctcgggctgttccagaagtaatgctgccaaggctcaggagtgccttccttccagtactcacagaaggactgaaaatggcgaccggatcgcttcccactgagtcaggctgctcataccttggtcttaagcaaaggtggtggttctcagcttggtcgcccaccttcttcccctgtctgggctccagatctgttttgctggttcccagcagcatgtctgttactgcggtgtgtgtggttctggcctgtgtggcctgagatccccttcccttgcctgtcctgcctgacagccctgtgcaggccattccaaggtgccttccaactggcctcggaccacgagaggtcggagctggagattcgaggaagaagccatagctgcctcctggggctgtgcttctcaccagtggggacccctgtgatttcttttcctgcctgggaccctggcttctgcacctggacttgcaccttcggcccccacacctgggggctagcagcttcctgcggtggctggccttcgggttgcttcactggtcctgagtcctggcttcttaccttcccctctgagtcccaccgtcctgatgagtgcacagaattctgtctgctttagacactcggagagacttccatttcccatgggccttgactgcagaagattcagagtgatttggcgcaggttctgaagtgctgatcggaagagcccagcatagatttagcgttgctagaaccatgttgtctttccaggtagtgaccaaacatgctgacctggaagtaagtccccgtgtggctgagagccacgtgtgtggagcgtgttgcctgtgggctgtgcccctgccgcgctccacagtccttcacctgcatgctgaggctttttgccctgtgctctttcccaggaatgttttgaccgagtctgcgaggatcgcccgtggcaaaatcacagacctggccaacctcagtgcagccaaccatgatgctgccatctttccaggaggctttggagcggctaaaaacctgtgcgtatttgagctccaaggtcttccgctttccatgtggagcagatgggaagggggtgcacctgtctgctgtccaatgtggtcagtggagcggcgatgggagggggtggtgataggagcagtctctgggtttagggtctgggcagggcacgtgcctgccctctgacttgggagctgtt

SEQ ID NO: 28387 - DNA, 1050 bp, Homo sapiens
ggtgtgctgggggctccgtgccctggcatggctcctccacattttgccaacccagaggcacaggcgtgaggtgtgtggtggttctcagggtcagtgggtcttggccttggctttcaaggtgttgatgggccctgggactgatgtgcccgtgtgtctgagcccacgtcccctgggcgaagctcccattttcactgacctgtccagagcgttctgggtgagcctgccctgcgtgtccatggtgcggcgcgctctaatgagctgcagccgtggccactctgcaccctctgagacagtcacccatggggacggcgaacacccactgcctccagaagattcccagcactctgccagcaaagccatgtggaaaatgctggggcagaggactggggtgcgtgagggtggcgtagagcccaggggtgggttcgtgggaaggtgtgtccacttgtagatttggtggcattgccagatcacacgccccatgggcagtgtggagagacctcccctgccccgcgtgccctccacagctcctgctcctcggcctgaggtgtggatgctggtgtcgcaggtaaactggcgtttctttcacggtcatcgaagcaagagtgcttggtatgcctggaggccgactgcgtttctttttttgggaactcctggagtttcctgctgcccctttgttttaaggaaaaactctcacaccgtgtttctcctcctcccaccacaacagttgtccacacagaaggtgggtgtgaagggtcttccccatgcaccacgcaggggtcgctgctgccttctaattcagttccaacagtatggacccggggtagcgtccgatcgcacgggttgagggctccgtccccaaaactgccctctgacacataccggtaaactgtctgagcctctggaactgaccaattggcttcaagttggggttcccacaaccccgtttgctggcgtggctcacagtgctcagggaaacatgacgtcagcattctcccccggggagtgggggaccctctcaggagagggtcctgagacccacagtcagaaagg

SEQ ID NO: 28388 - DNA, 1900 bp, Homo sapiens
gccgaggggccaattcgttctctgccacagggacttgcctcactgtgtcccaaaaacaaatcgcagccagcttttccagaaatagaaaattctgccgtctgaggttttatacttcaggttagttagtttttggaaggaagaacatttttaggtttgcaagcctcctgatcaggaaaccagaaataccacatttatggaccatgaaaggttggttcttgactctgaagggacttttgagttaatcagcgtaaggggatttctaaagcaggcaatccctgtagccgcagagaataaacgccttcccaaaatggcaacttcccacagccacatttcagacctgctgagactgctgagtgaggaatggcagtgaggtttcttcaattagtctcagttctcttaattttcaggaagaaagggaaattgcagcccctcagcccccaggattgacctctggggagtgatggtagcgttggtgccaggccgtgggttcaggtgtggcagaagcttgcagatgcgtccgaagggaaataaagtgtgttggcgttagactttgtgctgcattcatctgtgtgttcagggttgtttggggaagaaaacatttggggtgggagtcaggtgtctgcacgcttcactcagtgtcacatatctgttgctgtttgggtctgtctctgcctgagcagccagggccaggccagcctgagaggccccacgctgggtgggtggcaggagctgcccagtgttgggtggcggtgtgggaaacgcccactctggctgctggcgtggctgttccgtgtggtctggtttgcacctccctgtgtgtcaggtgctgggcccggaatgggggtgcaggccctggtcccacaagactcgaaccctcaattgcactggtacccaccacaccccctcggccctccccacccactgcatggaatcagcggattcattctaccgccttgagagggcgtggggggcccatgggtaaggcaggaaggccccggtgcaccctgcatcgggtctcagccggacacttctggttcttcctccgtgggagctgggttctccagtggccttcctcccacggaggccgggcctcaggaagtcctcacgggcgcccacgcccgctgcaaacgcccacagcactcgccttggggccaggattaccctgtccccagcagcggaggagcctcccatgtccagggtaaggtggggctcctcccctttctcataggctggtagggacacattttgcatggctggagggggggtacccgtataccacgcatgtttattcacgtgtgtgtgagtgtatggaaaagtgcacaagtcacaagcattcactttggggtttccacaaagcaaatacgcaaaaccatcgctcgggcctggaacggtggcactgtccccagagcctctcagcctcctgcaggcactggctgcgtgcttgtttgcgcgctctctctgaggtgatccagtgtggcgccccacacgcaggtgcttctgctgggccaggcctgtcctcacctgcatctgcccttagcccaggtggccctgtgggtcctcagtgtccccacttgcagatgaggctttgctccccccagggccctgcagcttgtagggcttggctgggactcagctccgggcagcgcagcaccagaaccccagccctagaaatagatcttgggacgttgggaagcccagagaggggccgtgacagaaccggagagcttggtcctgggttcactgcaggagagtttggtcctgggttcactggacagtgactccgtggctgctgcgtgccaggcaccttcaggtaccaagggcattgtcacgagcatgccctcgtcctggagttcaggtgggggcagccagtatgtggcccggtgagccatggagtcccccc

SEQ ID NO: 28389 - DNA, 1088 bp, Homo sapiens
tgcaaccctgccgagtccaacggagcaggaacccagagtcaggtcagagagaatcccaccccgatgtctgagctccaggagcagatcagacctcagtcctcgacgccttcagcaggatgccccggccctgccgcaccctcctggtgattttccagccacggaccccctcacttctcggctgtgaaccccccttgtcctgctgcacccaacatagagcccgtctctccctcactgcgggagtccataatgaagtcttccttgccattacgataagcaccaggataatttttccttaacaggttctctctagactggatcagggacagtcttggctgtaaattgtgaattagctgtgactctgccacccacggttgcccgccagagttctttctaaatgttctatctgagcctggccgttgctcctggctctggaggtgccagagtttctgaacgttaatctgagcctggccgttgctgctggctctggaggtgccagagtttctgaacgttaatctgagcctggccgttgctgctggctctggaggtgcagtcacaccaccctggctgacacgcctcggcctgacctgcagtctcaccccacagaaggatctggggtgaacgtctggctccaggcactgttgcagggctgttgggtcctgtgtctgagcccacaaaggcttcctgggagcggcatcgccagccctgtggaccctgctccctatgggcttctgggtatagatcaggtgcccagcatgcgcccccagacaggagctgccctctgccctgcctctgggacccactttcacccaagtcctgtgggactggcatagcctagggcccgggtgctggcagcgtctggctggagcctggggcggggcagggcagggccttccaggcgcgttcccgagcgtgcactgaaggtgttagcgcgtggcaccggagacaccaggctggatgaggctggacaagcgcctccgccagaagcagcacaggcctgacacaggcaaacctcccggagaccaccccacggaccccagcccctgctgaccctcccaggaggcgttgctggaaatccaccctgagaattc

SEQ ID NO: 28390 - DNA, 1219 bp, Homo sapiens
ggggctgtgggtgggaccccatccccctctggctgcagcaggcagtgaagctgcatcaggggctccaccctgctgaccacagtcctggggcacccagtggaggccggagacaccagcaggttctcctggtcacatggccccacctgccctgtcccccagagccccccaggcttgggatgagttgcgaggggtcggatggacggcgcaggacacacgacacagagtagttgtggcggttgcccctagggagacgtggagagaggccccagggcaccctggaagcggaggctgtggctccgtgtgtcccagggcacagcaccgcccctcacagccgaagctctgatcccttggtctcaggaaacactcaggaagtgcagggcgggcgtgggtctgatttcagggtgagggagctggcagccccaggagtgaggaggccccagtcccctttcaccaagcccgtcctccccttcccgctgccacgacactggtgcctgcagccgtgccagctaggagggcgacgtggacaggatttctctctagaaaggatcctggggtccgattgagaagctggcttgaacgttagacgctgtagctcagagcactgggtatgcacccagaaggagaagtgctcatcacatggtaattcttttgttttgtttttttaagaaaaaggtctcactctttgcccaaagcaactttcttatttatctttgcatcttaagagtctaaaacaatgactggcatgaagtatacaaactatacatcgcctagtaagtggataaaacgattaattaatttgcccaacattcaaaacgtgatggggtgggattcacagccatgacttctcattgcaacgctcaagctccttgtgctgctccacgccgcctttcggtacacgagaagctgaggatccacgccgcctttccgtacatgagaaactgtaggatccacgccacctttcagtagagaagctgtaggatccacaccgcctttccgtacacgagaagctgtaggatccacgccgcctttccgtacacgagaagctgtaggatccacgccacctttcagtagagaagctgtaggatccacaccgcctttccgtacacgagaagctgtaggatccacgccgcctttccgtacacgagaagctgtaggatccacgccacctttcagtagagaagctgtaggatccacaccgcttttcagtacacgagaaact

SEQ ID NO: 28391 - DNA, 1046 bp, Homo sapiens
tttgacctggtatattgtgactctgccatggcaccacatgacagacagcagacctccttattttaactcaagcattcctttctactgactcccagtttttaggcaaagctcaactctttcaaccaactgccaactaaagaatccctaaacccacctataacctgtaagcttcaagatatctcgccttttggggctgatccaatgcacatcttctatgtattgatttattgattgattgattttttgagatggggtctcactctgtcacccaggctgtagtgcaatggcgagatctcggctcactgcaacctctacctcctgggctcaagcaatcctcctgcctcagccccctgagcaaccccaggtgcacatcaccatgactagccaacttttttgtatttttggtagagatggggtttcaccaagttgctcaaactggtcttgaactcctcagctcaaagtgctgggattacaggcgtgagccaccgcgcccggcccgtgtactgttttctgattccacctgcagttcgcatctccctgaaatgtacaaaaccaattgtgctgggagtggtggctcacgcctgtaatcccagcactttgggaggcagaggcgggcggatcacgaggtcaggagattgagaccatcctggctaacacggtgaaaccccgtctctactaaaaatataaaaaaattagccaggcatggtggcgggcgcctgtagtcccagctactcgggaggctgaggcaggagaatggcaggaacgcgggaggcggagcttgcggtgagccgagatcacgccactgcactccagcctgggcgacagagcaagcctccgtctcaaaaacaaataaataaataaataaaataaaaataaataaatacataaaaccaaattgtaactgaccgcctcaggtgcacttcctcgggatctcttaagactgtatttcccaggccatggtcactcttattggctcagaataaacctatttaaaaactttggcagaatttggtttttctgtctgtcctcacattgcccttagagaa

SEQ ID NO: 28392 - DNA, 1061 bp, Homo sapiens
gcgtttgttggatgtatggaacagccagcctcaccatcctgccagtgttgcccagtcctgggacttctcgggccttgatttccccttctgtgaaagggggttggggacaagacaggccaccttgcaagttccttccagccagcccacaagtcctgtcctgtgtggctctgggtcacgcctttcctgttggccaggggttggtgctgttgagcaggggagggcgttgttcaaggatatctatttgcacaataacctgtgcaaaggtagctagaagacttgaaacaggccgggcgcggtggctcacgcctgtaattccagcactttgggaggctgaggctggtggatcacctgaggttaggagttcaagaccatcctggctaacatggtgaaacctcgtctctactaaaaatacaaaaaattagctgggcatggtggtgcgcatctgtaatcccagctactcaggaggctgaggcaggagaatcgcttgaaccaggaggtgcaggttgcagtgagccgagatcgagccacggcactctagcctgggcgacagagcgagactctgttgcaaaaaacaaacaagaaaaaaccccaaaaatcagccaggcgtggtggtacatgcctgtagtcccagctactcgggaggcagaggcaggagaatcgcttgaaccggggaggcagaggttgcagtgagccaagatcccgccactgcactccagcctgggtgacagaacgagactctgtctcaaaaaaaaaaaacagacttgaccaaaaaaaaaaaaaaaaaaaaaatggcccggcctgcctatgcctaccttcatctcgccctggcctgggcacttttaattctctgggccctttgtctagtgccccctccctgcccctgcaggacaccgtgccctgcctttccctggctggtgtgtttggacgttggtttcctgttatcgcaggtgaggacttagcttcctggcccgccacgcctccctgacatggcctcctgtttggagccttcaggctcatgcttacatccttagctgatcattaaactttgtgaccatttcatg

SEQ ID NO: 28393 - DNA, 1045 bp, Homo sapiens
acagtggcttcagggtgcagggtgtccggggagccctggctggtgccagcgatgcggggcccctggttataaggatgagcagatggaagctcacaggggccccaggtacctggcccaggctagcccgggcaggcccctctgccctgtgccccgtggagctgcagccctgtgcgtcttcccgcctggaaggcttcaccagacacaagggcccagccccagctgtgtgtgtgctgggcccagccccgagggcccccttcctcccctgctgcccttcccaggctttcgggcagagccctcttgttcaccgcctccaggagggcggggcgtcctagtgggcccagcctcatctctgccctcgcgctccaggcctgctttcctcctgctgggtggggattgtgccctggcccatgtgggttgggaatggtggccccagggagggctcctggcacccgggggctgtgtccggggcaggtttccctgcctggcagctgagccctgtcgtgtctttgacccagactcggagccgtgggtcccgactgaacatcatcatcatcgctgagggtgccattgaccgcaacgggaagcccatctcgtccagctacgtgaaggacgtgcgtgtgggcctgggggtggccactgggcacctgctcctctaggccgtgtgggctggggctcagggctggtccttcccactgtcctgcagctggtggttcagaggctgggcttcgacacccgtgtaactgtgctgggccacgtgcagcggggagggacgccctctgccttcgaccggatcctggtaagtggccatcaccctgccctgcgtacgtgcgtgggtaagcgtggtgtgtgggtgtgggtgtgggcagtgtgcacgcgagcatggcacgtgcactgtgtccatgtggctgtgggtgagtgtccgtgtctgtgtgtgggggtgtatgtgtgggggacgcgtggtccttgtgggtgtgtctgtgtgtgtctggtccgtgtgggtgtgtgtggcagtgtgtgtgggtgtgtgtcagtgtgggtgtgtgtg

SEQ ID NO: 28394 - DNA, 1063 bp, Homo sapiens
tgggtttggaggcctgcaactggggcagagtgccctgcctggagctggagctgctgagaggtgaggagggcagctgggggcagggtagggcctcctggtctcagccagccccagaagagctggccttggtggtgaccgctgttcctagggagaggctgccaggcctgggccagggtcaggagatgccggccagatctgccctcgtcaggcccaccagacagggcagtagccatgggtgtgcgggccaggctctccatagtctgtgttctgtttctcttccttaagaccaaggaagtgcagaaagccatggatgacaagaggtttgacgaggccacccagctccgtggtgggtaagccccctcagcagacccctgcactcttacatggctgggtcccggtgccaggcagcatgtgctgcagtggcgctatgcacgcctggcctgggtcatccttctaggcaccgcgtctgaagatcgagggaggaaggggcctgcgggtggtacaggaggcgggctgggaggtgtggtaccacaggagaccctgggcggtggcacgggcagggcccagtgcacagggatctgggcatggcgaggggatgagaagctgtggatacaagcccaggacatggggtggccccgcgggggctgggaaggctggcagatgttgggtgtgggtaccacccccctgcaggcgtcctggcggccgggtcaggctggattggacgtctgggttcccatgcgtgcctccacccgctaccaaggtggccaaccctcccttgagctggatgccggccacgtgctttgctgcacgggctggcgtggcctcgtgttgtgttgggggtctcgcaccttctgtggaaggtgccctgcctggcatgcgcggtgtctgctgcctcatggctgagcttccatcgggccgtgtgcctgtgaccagcctcctgggctctgtcacggctgcgctgtggctgtacgccgtggcgctgcagggctgtgcatggtgtgacccgaatcccttccaggagcttcgagaacaactggaacatttacaagctcctcgcccacca

SEQ ID NO: 28395 - DNA, 1065 bp, Homo sapiens
caccctaacccaatcctcgccctaaccctaatgctaacccctgacccgacccaatcctaaccctgatgctaacccctgactcaactctcaccctaaccctgatgctaacccctgacccaatcctcaccctaaccctgatactaacccttaacctaacccaacccagccctaactccaactctaaagctaactcctaaccctaggagaggagcccaggccgggccctctccctgctggtttcctgttgggctttggagccccagatgcctgcccagaggcttccttgtgcggggtggggtccagcagtgggggatgggcccagagctggtatagccaccagcagagccatcctgatccacaggaccatccctggtggggtggggccccctggggcaggaaggccactgaggccagggagactcccaggcccactcacggcgcaggccccacaggagctggctggaggctatgggtgcggggcgtgggcctgccgggggttgcgtgacaggcagtggggagtgggttgtgctggcagctgtgggtgagtgaggaggctcctctcatgaagggccctggggaagtggaatctggccctgagagacccccggcctcctctgcaggggctgctggcaggaggggaaccggggaccacctcccgccacagagcctggggcccccagccttgcctacagggagggtagatgagagtgtaaactgcatatgaggttgggctaaacctggacatgtgtttcataaccaaagcagccaggaatctccggctctgcccagtgatcatctgggcaggacatggggacgagtgtccaggctgaagtcagggcccggccagcagagggccattttgtattgagctccacagctggtcacattctgtggaatgtgcagacgtgcacggcccatcagacagggtctggagtggggctgccgtcttgggcagctcctcccgggtgtctgcaaaatgcagaggtcaccagagccaaggcagcaaggcaaggagcccggcttctaaggaactctgagcaggtgtggtccatggctgggaggcag

SEQ ID NO: 28396 - DNA, 1029 bp, Homo sapiens
gtgaggtgagcgattttaacccacatccttactgacttcacagcacagtaggtgcttcgtggctgtccggtgcaaggatgtatatacacacacacctttgcaaaaaaagtttgcatctcttgcctggctgtttgttgcaataatctatcatttgtcttttcctttccagcattgcagatgatcccttgaaaagaagtctgatcacattcacactctgctccgcccatttcactcagtaaagctgaagtcctgcagtgctttgctctgcctccggtcaccccgccatactcccagaccctccctccctctcactccactccagctgccctggcctggttcagagtccctgactcttccctccccggaaacactttctggcggctcttgtccccgactcttcccacctgctctttcagtctttgctcaaatgttgcctcttcagtgtggcctaggccgtcaccacccggccttcaccgcatacctttttctctgcaacacctactcaacacaccgtactatagaacttactggcatgctataaatgtattacccttatctgttgcctctaaccaaaagcgtgttccatgagagccatgggtccctgcctacttctgtcttgtttctggggcagcctctgtacctggacatcgtatactcttaacacggatttgtcaaatcaaatgaaatttaacaatacaaacttcacaagtatgcatagtgtaggaaaattccccaaaattcaaaatttcagtctacctccatcttttcaaatgaccacagtgctttataaaatgacatggtcctttgagactgtttcagagagtaatttgtgcaaatgcaatgtgcaaaaagtcacagtggaggtgtttcctcccccattcaagagctgctctctctctaatcagacagcaccccacaccccaaggcagtctgtccagtgctcctaaaggagagcagctccccttttccagttatgggagatgtgggcaataaagcattactgtcaatgccgtgatgttcactgcaaca

SEQ ID NO: 28397 - DNA, 2040 bp, Homo sapiens
tgggcgacagcgcgagactccttctcaaatatagaattttaaaaaggccatctcgactgccgcgggggtcgcgtcctctccatccccgaccttggacgcaaccccgggcttgggtcccccacgatctagacagaaactcgttgtttctcgtgctccgcgccacccgcgtcctccggtctgtttctcccaggtgcgtcggtgaaaggcggagcgccgccaccctacacccgcgaccctgcgcccgcccgagccgcttccgggtacttccggcggccgcggggctcccggcagccgcggctcctgtttccgccgggcggcgagaacgcaggaccagcttccgggaggcgctccgcacgtttgccgtgctccgccgggaagatggggaaagtgagggggttgcgcgcccgagtgcaccaggctgccgtgaggccgaaaggggaggccgcccccggccccgcgccccctgccccggaggcgacccctccgccggcctcggccgcggggaaggtgagctggggaggcgctggccgggggctgccgcgtgggtccgagggcgggtgagctgcggggcgccgcctccgggagggttccgcgaccccggccttccctcgggctctgcgggcatttgctgcgctacagacgcgaccttcttgcttcgcgaagcgtcgtaaactccgaggctccgctctgcgctgccgtcctgggcacacggactcgcgccgctcccggggaggggagagagccaggaacctcccgctgcggtccagggttgccacgcggaccccagaggttcctgaatcgcactgagctccccggaaaggaaaggacgttcccagagttagagaagaacggagagcaaactgaagagagaccccgttccctttagcagtcggctggcctgtttctccatccccctcagccctaagcaagcacgaatctaccttttgtctttattctagacactgcatgtgagtggaattattgctttcaggatttttttttttttttggcttttgccttaaatattttgaccgatgtgtcttggtgtaggtatctgcatttattttgcgtgttcactgagcttcttgcgtgtgtaggttaatgtttttcgttacattggcaagtcttcagccattatttccttgaatatttttttctgcccctttctgtcactcctctctttcggatacttccattataaatatgtacgtcgtgcttaatggtgtcccacagtgctctgaggcgctgttcactcagtttttctcttttcttcagatggcataatctatcttaattcaagtttactgatgttctgccagcccagaggtgcttttgaacctttccagtgaaattttcattttttttgactccagaatttatttactttctttctcttctcctgttcctcctcattttaaaaaatactctttactgatgttttctgtttgatgtgagaatgtcattataccttcgtttagttctttagacacggtctcttttagtccttagaaatatttataatgcctactctgaattctttacatgtgggctgctcaaagcagtttctgttgcctggctcatgctggcaggtaggagcaggtgggccttctttgaatgtatcactttttgtggaaaattgggcattttggatagtcctgtagcaaccagggattagtatctgcttgattactttgtttattgatctggaactgaactatgtgacctctctccttgtccccttctggctgtgtgcagcctctgatgtgcccccttggttttttttttttcttcctgtttttctcttttagcctggctagttggatctgcttaagctcctcactggtcagcaattgttcttaaagcctccttggccagggggtttttgccttttaccactggatacctctggcttggaggtggctgtcagattcagcgtgttcacatttttgaccttcatttctgccctcagaggcacagccaaggactagtagcttacagagtccctctgctcactcctggtagggtgcgtccttgaacatg

SEQ ID NO: 28398 - DNA, 1017 bp, Homo sapiens
aaatcttcatgcagggatgagtgtggctcagaaccagacctggcagagaggctgctgagatgactagttctgatgggatgtggtcagtctgagctgaaagagctgtcaggctgggagctgcctatccttcatctgctcagctgcaggtttcttctgtgacacaggagaatgttgtagaaagagtaagacgaaatggttgggaaggaaatttggttcttgagatactggtcctgactcctgaagaaccaggagtgaagcccgtctggtgattgaaggcagggagcaggtgggcctgggcgctgcgggtctgccctggagctctggaaccggaggcttctgctctgggaggtgagggttgtttcccccaggtcctcccgggcagagaagctggggaatccaggttcttgtcttgcatcttctcctcacctttaacgtccctctgaaaccacagagcaagtctcacacctcttcttttcgtccgtttttgttggggacattaggactgggcgttcatcaacaccaacatctttgccaggaccaagatagaccccagcgccttggtgcagaagctggagctggacgtgaggagtgtcacttccgtcaggagaggtgaggcaggctcgagtgcacggagcgtcccttccatcaggagaggtgaggcaggctcgacgggttaccatgctgatacccagcaggtctgggattgttccctcaggcacccgaggtctcagcagctttccagctaacctgtacctgacaatgtccttgagcaagggatgcccctggctgtttcttggggcgattccccagagtagattacagctgtggttttgcccctgggctgcatcatgtctccgcagctctgcaagaactgctctgcgtcctggcagccacgctgaagccacaggaacttgggctttggtgaccaacagggtttgaactgttttctccgtgtgtgctgattctttcggtctgtctgtatgtttggggcagttttgatccttttcttaaacaagt

SEQ ID NO: 28399 - DNA, 1050 bp, Homo sapiens
ctgagctcgtgctgacagtagcgtggcccgttctggcgcttcctgcttgtgtgcaggtgtttcccatagcccgccttgaggggcacgaggatgggaattatttgagccgtgcggcagggtcagggttttgggtgttggggaggagccttggcctggggaggcacttagtgcttctggccaggagccggtggctttgtgcactgcccatggctgtgatttctgccttggtgccccagggggattcaggagaaggtgctccaaaatggtgccttggaggttgtccctgaggtgtgttccaggaggctgtcctgtgggaggggcgttctgagctcatcgccgcgggcccccattacagccctcctggagcgaggcctctggccagccgtctctggctgtggctctcagcccagggttctggtgcatattccttccaccgccctgctgtgggttttctgcactgaagagccccgggctggatgaaggggaccatgggacctcacagagggctcagacggagggacaggcctccacttcccctgccctgggatgtgaagcaccagcttggcagggtggcagggcccacagaccctcatgggtgggacctgcagacccttagaggagtagccccacaggcggaggggcttgccctggtctgggggccccagccccttttcttcaggcctccgaggtatccaggcgcctcagtggggtcctttgcatcttggctgctcctcaccatgttcctccctctctccaggaacagttctgtttttttggtgtggtctcctcagctcctgattggctggtgccctgcgtccctacccccaccccaccccgggtttgtgctggggcctgagtgcccatgtcatgcagatactgcatcctgtgacttggccgccacccttcaatgacccgcctggctatggaggtgaggtggcggcctgtgggtgcctgtctgcctggcttagtgcaacaccgccttcccaagatgtgtctcatcgtccgtgccctgcctgagtcaggaatagcactgcatgctgcgtctctggc

SEQ ID NO: 28400 - DNA, 1096 bp, Homo sapiens
attttaagtttgatgggaagccttaagggagcctttcttccttccttgcgaatgacatgatctgatttatctttaaaaagtaccactctggctgttgggcttacaatatgccaggctgttttaagagctttacatatattaattcatttattcttatgacagtccaaaaagtaggcattattatcattattcccatgttacaggggggaatacctaggcacagagtggttaagtgatttacccaaggtcacacaggaagtggcaatggcaggatgtacccttacctccttactgcagcttgctttttgcacctccactactgcagactggaggaggaatatcagcaaggagatcagttagacttttgtgaaagctgggtgactgtaccggcacctcagaccagggcggaagtggtgagatcagattcagcctactgaatttcagcatttgtaagatgccatcatttttaagttgcatcatcatttcttatgctgctaacaaagggaaaatgtagccaactagattgtgacacaatgctttcttgttacccagcattcatttatactcattgaaagagcttagactaagcattgacttttaaaatcatataattcatgcactttcataaaaaaggaaaatacaagtaaaataaagtaattctgaaatttcttcacatctagaatctgattcttccaactcagcttttgacttggcgttggtgccaggtatgagatagggaagtctgggaagagccagtgttgggatttgaacatgtggagcttgtgactggaaggcagcccagctcagcagctccactcaagggccagatctggaggacgagggttgggtcattgtgcagctacttcctagatgatcttgagcaagcagtctaatctctgtgcttcagttttctcatctataaattaggaagaataaaagcaacttgtcagggttgttgagttgctaatgtaaagtacctaaaatagtacctgactaacagtatttaatggggcttactttgcttattatttttatgattagttatctgagtagagaaaggtgaatatggatggaaattcaaggtcaggttcaagaa

SEQ ID NO: 28401 - DNA, 1033 bp, Homo sapiens
cccccagaggaaagcaggtattgttgctttgggcctgttgcatgtatatgtttatgttccactgggtcagcagcattcagtgaaacacagttgcctgttaacttggtaaaatatcttaattgcatgagttttgatttgtttttgtgattatttgattttttcaggtttggagtttcagaacacccatcttctcagtagttcagccaatgcgatgaaatgtgaagaagccttccccagcttccttgcattctctccatcatctgtgcagtggagagtagttcccactgctgtggaaacattttccctttgctcttttctctcagggcaggctttcctgagtgcctgctctgtgtgagtcatcgtgggaggatgcggtggagaaggacagggaggaggtctgtgcttctttgaactgacattctggtggagaaactaaacagatcacagaggcagacaccgtgcctcacaactacacacggacccggcttatgatggttccagtaacaatttttgacttgactgtggtacccatacagtcattctgtttttcacttttggcatagcattcaataaattgcatgcgatattaagtactttgttataaaataggctttgtattagatgattttgttcaattgtaggctaatgtgagtgttctgagcaccttttaggtaggctaggctaagctttgatgtttggtagggtaggtgtattgaatgctttttcaggttaggatgtcttcaacttgcgatgggttcataggatcggaactccaccgtcagtcaaggagcacctgtgctgtctttattggcatgaccgaggagacagggctgaggtagatggcatcaagagggtggctcctggtggaggtatgatgttctgggaaggcctctctgagtgcgatgtggtacgctgaggcccagagggaaagcatgagctcatgtcaggaggggggacaacagccttctggctagaaggatagcctgccagagagcctgcttattagagtggccaggataggaccagaaccatt

SEQ ID NO: 28402 - DNA, 1035 bp, Homo sapiens
gggcagaggtggcagaactggagaaaagagagcaggtgtgaattcttggttgtgggcaatagatcaggtcttggagacaagggaagtggagggaccaagaagggctcttggagctctttggatggtgatgatgtgatgatgccacgttccagaggatctcaggttaggagtcttcaactagagacctcattttgtattgggttctgtttgagtctgcaaagcagttgtcatctaatatgtgactagcagaatatttgtttgtatagatacctctcaacttacgatgaggttcataacttaaatatattgtcagttgaaaatgcatttaatacacctaaccttcaaaattcaaagtacactttctattaaatatgtatcactttcacaccatcataaagtaaaaaaatcataagtcagactgttgtaagccagcgtctgtctgtaccttcccacggcctacaaaatttgtaatgcattgtttgtaaaacacagacacgtgcatttaaacttttattaggtagaactggctcttcttcagggtccttgtaattaagtcagttattcctctcatgacattcttgtaggaggtctcattacccctatttatcagatcagaaaactgatgctaaggggctcagtgacttcctaggaaagctggataatgtttaacatttattaagctcttaccatgtgtcagacatggtaaagtgagtttaatctagtttaatcctcatgatgatcttaggatgttgctattaagggtcactgtcatcatccctttttactgataacactggcctggcttacctgagtagcctcctaacagatctcttcttccacttctggtctccttcagtctgttcttgaccagcagtcggatctgagcctgtacatggaagacatcacgtcattctcctgctcagagtccccctgcggccttctttcctgctgtcccttcctgccactcagagccctggctccagctgtcttggggcctatagctagccctcacttcagtgttcatgcaccattgtg

SEQ ID NO: 28403 - DNA, 1035 bp, Homo sapiens
tctgtgggtgccgagccctctgggccacacagctgctgttctctgacttgtgggtttttctgccgcctcttgcgtttcatgctgtgactctggaactaggtcttaccctgtttggagtgaaggttcggggtgttgggaagttctgtcctcttctctcaggaagaggccctttgactgtgtgcccggaggaggcatgggtgcatcttttctccagggggctcctcaccaggggtatggggagactgtgctgcagcctcaggaatgtcagggtgaagaggccctggaggctgatgcttccggccaagggcttcttctggattttcagataaagtcccagaacagaattactttatgttttaatttcaggcaaatgtctctcatctgcccttttaagtacattaggattgggtttttcgaccctgcacagcacatgggggctcctcagagaagtgtctgaaaaaataaaattaaataactcgctttttagcacttcgtttttactggtgatttgttagtcattgattgaggtgattgtgattgatccaattatttgtctgcccatcctgattataactttttttatttacaggattttaaaagatagtttcttgatcttaatgttatatttaatgttctctttcataagatggttttttgatgactttgtgtttaaaaagtgagggtcttttgagaaatagaatatatcaaattatttgttcagaaacattcaaaagcattttttccaactctgcaagcagttgtctgttaaagcaattagcgtgtacccaattagagctctgttcaagatccctcactgataacctctgtgaggctgttggtccgtgtctttatcaagcagtagtgtggcttcccaggtactgtcagctcattttggacccaatactagtttattgcctgaaattacctttaaactggaaaatcttcaagtaaaatttttgagagtttttgattaatcccctaggatacttttgaatgataggttttggggagatacatttggttgttttggcacca

SEQ ID NO: 28404 - DNA, 1039 bp, Homo sapiens
tcacagtggtcagtcacggtgacagggtgtgcctgatacagtggagtgacagtgggccttcacctctgggggcttcatccccaaactcagtcccttcctgtaccatgagaaaaacatcagacagatcccagctgagggacagcttcctcaacagtcaaaaaccaagaagagtctgagaaactcacagccaagaggggcctagggagccatgacatctcaatgtcacgtgggatcctggacgactgaatctgacgaaagtgtggatttcagttaataacaatgtgttaattaatactggtccgttaaaccagcagtcctcaacctttttggcaccagggactggtgacaatttttccatgggccgaggtgggggctgggagaatggtttggggatgattccagcgcgttacatttattgtgcattttctttccatgattacattgtaatatataatgaaataatcatacaactcagcatcatgtagaatcagtgggagccctgagcttgttttcctgcaactagatggtcccatcgggggtaaggggagacagtggcagatcatcagacattggattcttataaggaatgtgcaacctagacccctcacatgcgcagttcacaatagggttccagtcctgtgagaatctaatgctgccactgatctgacagaatcagtgcaagaactgattctctgaagcccagttcctaacaggtcatggactgttacttgtccatggcccaggggttgggactcctgtattaaaccatgctcatgtaagatcttaataatagaaaatgggtgtggggtctgtggggcctttctgtcacatctgctcaatttttcttcaaatctaaaattgttctaaaaataacgtttactttaaaaataagtgttttttcaaaaacacttttttgtgtccttatcttctgctccaaataaataattatcctgacttttgtgtaagtggttccactagttttctttgatttcttaactctgtctgttacccttacacagtatatcctttggttttgaaa

SEQ ID NO: 28405 - DNA, 1050 bp, Homo sapiens
tttggcctaagtatgatacaagaggtggaaggctggtttctctgtttccttcagctgctcctgactggtcctcatctgttccttctcagatcacagttaactgaatatattttaaaagagaaaactcgtaagtgccctaaggaaataaggaattattttgaacactaaagctaaaagcattctaacattgtgttgcttttatgttctttactaaatttgcttcatgcacacacacacatatatgagtgtatttctcagtatgcagatgatttcaaggactggcttccttcgtgaaaacgtattgttggttgcaagaagataggggactggaaacatgattcgtctgtctgtagaggtgaagttccaagaagctcaccactgtccagtctttatgcttatgaacttgttgagtgagttctttttttatagtgtacccatgtctaggaattttggctgaaatcagcttctttgcttttttaggctttttgctagtgatagtgttgtctttgttctgtaaaacaactgtaaaggaataccaacaatctagtgcagaaattcttttgtaagaacaagctaccctgatgtcatgtcgtgttttaggactgtttgcttctcaacctgatgaagttgttcttagctgtttgctttgttttctcatccacagcagtattcctttctttgcctttaatgcaattgtatcttgagcaggcttgttaaatcccgtgggaggctttttttttttataggtcctttctctacttggctatgttgcctgctgagtttaaagcctttttatgatatttaacaaagccctctgtgttcagcgtgggttgtggttgtgtttaatgtttcaacctagactcgtgtattaagtacagatatcatctgtcacttaacttagccttgctctcagtgtgtttatcatcatgtctctaaggccatcctaaatacgtgacctggagagagagggggtggctaggccaaatgctgggatgcctgcactccgtttcttagccgtgagtctgtgcttggaaacccacgagaactctg

SEQ ID NO: 28406 - DNA, 1628 bp, Homo sapiens
tagggtccttccagtgggaggtacacaaatttaacttaactatagttaaacaagagccagaaaggtaaagaaggtattgttgagaacaaatacggctggatgcacttttggggtgcaaatttgtctcttctctgtgtcagttgtatctccccaaagcaaggaataagtgctggagttgagtgcgtcagagcagggcttgtggcaaggcaggaagaggctgcacaaagcacagatgtgcagtttcattagtcaatatggaggaatcctgaggtacccactggctatgttgagtaaaggaaagaaaaaacaaaggcataccatgtggaaaagaagaaataaaactacctcttttgggagtatctggaaaaccctagagcagtcctgtccagtagaaatacaaaattaatatgcaaacgtcaatgttattcatatatacaaaaataatcagaagatattatggaagagacaaccccattaacaatagcaacaacgagaaaatatttaggaataaatgtaatgagaactgttcaaaagctaagtgaagaaaacaataagttgagaaagacacagaagtcgccttgagcaggtgaagacaccttgttctcggttaagatggcttggctcattaagatgtcagttgtcaggtaattttcaaatttaatgtgatgctaatatttgaaagcaaaaagactcagcttttttttcttgggctggacatgtcgattctaaaattgaaatagcatgaatacctagaaaacttagaaaagaaagagccaagaaaaggagaatagctctactagatattaaaacatactacaaaggctatatggaaaatagtgtggcaaggttgcatgaagaaccagacagaccaatggaggaaataagcccatatatagatggaaatctagtatatgataaagatagtatctcagattgttgggtcaaagatagattgttagagtcaacgttcttgggacaattggactccattttgtaaaatacatcattaggatttatagcttacaccacatgcaaaaataggctgcaagtgggtcagagaactcagtgtgaaaaaggcaactgttccaatgttagacacaaacatggttgaatattacctatgtgttgggaaaggcttttttaaaggcgtaactcaaaattcagcttcaacaaagaaaagatggatgaatttgactgcattccaaaatactgcgaccagcctgggcaacatggcaaaacctatttttacaaaaaatacaaaaataatttgggtgtggtggcacacacctgtagtcccagctacttgggaggctgaggtgggaggatcacttgagcccaggaggttaaggttgcaatgagccatgatggtgccactccagcctcggtgacagagcgagaccctgtctcaaaaaaaaagtaacaactttgcctgaccaaaaacaaaacagaaaaacacaataaggtcaaaagacaaaaataccaattgtgtgaaaacctttgtagcatatcataaatgttttaaaagttgagggagaagaaacccgaaattctaggaaaatgggaaaaaggtatgaacagacacatatgcacatatacacgtacataaacatggcccatacactttacca

SEQ ID NO: 28407 - DNA, 1021 bp, Homo sapiens
aagtgttcttttaataaatattatgcttagtagacatactctacataccaatcagaggttgccatcctaaaccaaaactacatatccagcacattctgatattaggcggtggcttacaccagggaaggcttggaggttgttttggctcctaccctttaaaaggcttaccagcttttagatggagtcatagataagacatggatagtaacagaaaggaagcatggcttatcagctgtgtcaagtcaggacacatgtatccccattcacattgctgaactcaggaagatatccaagcaccattgtgacatacttgtccacagagaccgcagataaccccagcaccctctcagagtggtgccttggtgtttttgttcataaagccttgatgctcaggcccatccgtcatcccgggcaggtgcgtagcctgtgtggtggatgccagggtcaggggagggctttgcttttgcagagtctcgaggcttaggctgaatgtgtttttaaaggtccgactatactgaaacaaacattaaaaaatattcaacatcacttaatttttattgcttaagagcttatctggctctcccattggctcagtaatttggttgctattaataacgttgttgaggttgtcatcgtcaccttaacattgtcatcatcacctccagtaatagctaacatttattgagttcttcctccatgcaggaactgtgctgagttctttttctgcattattttattcagcctttgctgcagccatctgcagcaggcactgttactaaccttctcctgccagagggaacgcttgagatgctgcagggtgacagtagcctcagagccagggggctgcattgctggatcttcaagcaggcaaactgccaactctgtgttcataatcctggtcatgggctcgcactgacctgtagagagctggatatggggaatggattggagagcttttatttgaaacaacagcaaagtggcatgatcttttgggaatacactttttcaagtcatgtatcca

SEQ ID NO: 28408 - DNA, 1102 bp, Homo sapiens
tatgtccctggatttaaatatgctaattttgttatgatttttgtgtctacatttgtaaaagccgctgatagttcatgtctggcacattcttgacagattttactaccgagattatactgggctcgtaaaacgagtgggggatgttccctgtttttttgttcgctggaacggtatgtgtaagctttgtgcttttcctttattcagccagtgctttcacatgctgcttccttttatagccactcttttttgctacatattctttctctacaagagcacagttcttctggaatgtgtcccttaggattaactatctcaggtgtgatttgtgtgaaaacatctttattcttattgtggaaagactgttgttaggtggggagtttactttcccgtctgcacattgaagatctcatcctgctccactactggtctcttccctgggccctgggcatccgctctcagcctgactgtccccctgtgctcccgcatcatttctctgtgctgtgtctgggttcatgcttatttgtatttattctgctgcgggttagttggccgaatctgtttctgtgagagctcccatgcttttggtactttctgtctctcgtgtgtctctgcactgctttctgggttattgcttcggttctactgcccagtttggccattttctctttaactgtgtctaatatgctgctaaaacctgtccactgagcttttagcgttagtcattatagctattatttctggagggtctctctgcttccctgtcctgccaagtccaattggtcattcttagtttacctgtttactaactgtttgtatctcctttagccgttgttttctgtacgtatatggtgtgtttgacttttccagcatgttcaaggctgttttcccagctgtatcccctcctctcgggccatcaactttttgttccccattgttgctactaattcttaggactaataaagcacttcaaatggcagctactgtcaaaaattaggaagaaggcttctttgccgtagcagcctccagttgattactttctcttgacctgtactttacttgccacgagcatatcatgcctctgtacttgctgcagtaattactg

SEQ ID NO: 28409 - DNA, 1038 bp, Homo sapiens
agaaacccgctcacccctggacacacctcccagagacttctctttggaactctgcaatggagaaacccattgcagacttccccttcttttggatatcagtttgcttttcaggaagaaaattttaatactccatattgaggttttataattatattagcatgttgaaacattttctctaatggcttgctggttgaaaacgctttcacacagagcagaaactagatggagatactgtttcacaacctctgcttcagaagcagaggtggcctgtagcttccaaacccgggcagagcacgtgcagggatggtgcgtctctgtatctggactcacattcacatgtgtgcatgtgtaggggtgtgtgcatattgaattgtaaaaaagatgagtacgtgtgagattctgcctgagactccagtcctcagtgtgtggcctggtgccgctgatgccgagatgttgggctggcagcgatctgcctccgtctgtcacaggtgcctctacctgctgcaggcagacggacggagacgtgatggattgcgcatatcccctttacagattcggaagagtacatttaaaataacttaaatttgtatttagaagacttttcatggagagtatttattgttatagagttcacttctgaaatggtgacaaagcttttgatactgaatcaaacaagtgtgaagttaccgaatctctctgttacacagagtggagcctttcaggctggcatggagagcttaaggggcaactgaaggagacacactggccaagcgcggagttctgcttacttcagtcctgctgagatactctctcagtccgctcgcaccgaaggaagctgccttgggatcagagcagacataaagctagaaaaatttcaaggtgagtaaaaacctgtaaagatctgatcaaatctgactggtagaaatgcctttttcttgatataaaccgcttaattaagccttttggcttgcctttgaaagatgctttattgaatacttcccggcacagatgatctgttactgttggttgatttctaat

SEQ ID NO: 28410 - DNA, 1066 bp, Homo sapiens
ttttttacacaagatgaaattgaaatggccaatgagcacaccctcattcatccagcgagcattgaggaccccctagaggccaggcccatgagtgatgaagatcccgaggatgaagacgccttgccagccaggtcagtgggtgatggcatttgtggtcaggggcacccagcaccacacccctggctgccgttgacagctgggtgagtcccctgctgcctgggcagagccacctctgcagatgcccaggtgggtctcctggggcagggactggcaggctgtagcctgtgagcagattctgggacctgaaagctaaggatggtttttacatttttaaggagttataaaacaaacagaaaaggaagaatctgcaacagagaccataagtggtctgcaaagccaaaggtttatagaaatgggcagacctgctctaaggggcctgcttgctgatggggccttgtctggattgccagttctactaattctggaattggaagttctcatggaggactgtgtgctgggtaggatttccagatcccaagatgctttggctgcattcaaacccacagggcagagagagccctccgccctgttccttggcagaggcctccacactccgtgtgctgaccggcctgccagaatgacaacaactgtcagctgtctgcatcctcctggcaccccttagtgtggctgcatactgaggggagttaaaaccataaacaggtggagaatatctccttccagggaatctcagaggactcagtgatttaagaggaaaagaccaaactgctgctttcagcaggaccactgtgtgctgcctgcctgtcagtgcatacagatacggggtcctgagttggtgacctcaaaaccgtgagcggtagatagacagagtagcccctaatgaagcagaaagactagaagagacaggacctaatttaggtcgaaaagcaaagtgaggcctcagaagatgaaggcagagtgcgagaaaggctttctggaactgacaagtctgccatccacatttcgaaatgtattagaaaaattggaaaaaaaacatatgaagtgtaga

SEQ ID NO: 28411 - DNA, 1027 bp, Homo sapiens
aggaagttgcaaggcaacctggtttcagccggaccgggactctcccggggctgcgtcctgctagagctggcaggacacagaataccactagcagcctccctgggagtggcttggcgtcttggccacctctttccacggatgtggtggatgtgggggtaaactagagagactaaagcccactattgggctcagcttcctgtagaaatcaaatcagatgaaaaccctgacccagagggagaaggcagagagttggacttttgaaaacgtgagtgtgtccagcaaccaggcagcaacagtccttgtttttatcgaacttctataagcactttatttctccagaataatttcatcataaagaatccagagctcagacagctctttaccatctgtcttttccttttttcttaccctgtgtttggcttgatctggactgcacttaaccatgacaatgttaagtgctttcttctgggtaaaaattctggcttcttctccagaaattctggctccacttctcaaattgtttctgtccctgttaggagacccctggggcctcggctggagagacagtgcagctagtcccagcagccactgtgcttgggcctggccagcccctcctcaggggtcacggcactgctcacctggtgactaggtcttctcagccagatcagttcatgtgctctggtgtttttgagcttctggctagtcctcagtttctcagacctggttaatcacagtgtggagtcatttttcataactgtgcacctcacttgtttgatgcatggcaagggaataattaaattaataaacctacagatattcccccttacagttttcaaatacagtaagtgaatttctactataaaataggtccaaagaggttttattgtttcttatttgaaataattaaagaacatttatgtttcccttttgtggtttcttggttctaatcctgtgggttgcttttgacgtcctctgttggggatacactgtgcatccgtatttaacaggagatcccgaactcccagca

SEQ ID NO: 28412 - DNA, 1025 bp, Homo sapiens
ttactctttgcccctttacagaaaatgtttgctaccacttgatctaaaggattaaaaaataaaacatgtcattgggccagatgcggtggctcacgcctgtagtcccagcattttgggaggccaaggagggcggttcacctgaggtcgggagttcgagaccagcctgaccaacatggtgaaaccccgtctctactaaaaatacaaaagaaattagccagacgtggtggcgcacgctacttgggaggccaaggcaggagaatcgcttgaatccaggaggtggaggttgcagtgagctgagatcctgccgctgcattccagcctgggcaacagagcaaaactctgtctcagacaaacaaacaaacaaaaatgtcattgaatttgaagtatacaaaatttgaatatctttctatcaaaaatttgaattttaaggaaataacaaagcaaaaattataattttttgtgttttcaaaaaattattttttctaaattattaagttataagatataaagtagttaatgtgaaatgtttaaatcaaaattgtttaaagctgagttttaaatttaatactttgaaaatttagttaaatcatattaataattttataagaaataaaactattgataattctgatgtctgacatctgtctgattgctgacatggatcctgagtcttacagtgttttgagggcctccagctacattggggttccagtgccagagtggctggcagccccaccctaacgagaagtgaaggggctgggcatgctgtttccagtgctttcatgagatgctgctttgcctggcggtcgggcctgatgtctcgttgttccacctgtgaccaaggggtccctctggaaatgtgtgtgtactgacacatgccctggtggctcttgtctgatccatgtccaggttattcctgcctgaccgtcactcgtgccaggagcccaacacaaattcaggcacaaattcagtacaccacacaatgggggaaacatgttcaaagatttttacttacaggtcctgag

SEQ ID NO: 28413 - DNA, 1001 bp, Homo sapiens
ggaggcctggccgtgttggcttccaagaggccagatgggtgctgctcaccatagaaagtgacccttttccctgttcctgagccaacctgtcacttccatgcgctgtgtgtcactttgaaaactatctttgctttctgcaaaatgaaaggaaactttcaaaagtcaacgtattaaagcctgtttgcatttattcttttatgaattttgctcacattttttaattgggtgtttgtctaaagacaattatcgatcatagtaggctgctggaaggttgaccacagaaacctggttctctttcagggaggtcaccatgtctgcctccaggcccatcgggtaggggctgccttctgtcaaggcacatgctccaggtcccttagatggaaggaaaacacatggtctttatccagtggactcagggtgcaggtaactgaaggaattaacctccatcattttcacagatcctcgtagagctggaccgaaggaggtgggagatccctgccgggagccgctgcagtgggagggcttacagacgttcgcatagtctctttctgtttggttgttttaactcccattaaaaggagtggctttcagccttcttgcttactgtcttgtgatgtatgtgtgttcacatgttccatgcacatttgtaacgctcaccatgctctctgattcagctttgttcccttagagttgccccagcactgctttgccatgatgattgtgttttttaaaatacttccagttgcttacttctgtttagttatctcagtgctaaatattgttaattaattaaatataagcagcatgttctagattttatgtgtctggaattcttactaaaaatcttcctggatatgacttccagtcataacgttatggattttattgtaaacaaggtagaattttatttgccttttaatcatttcattatggtgagtgtcctccttacagagcgtgtactgaatttgggttttactccttttttgttcatttccacaagt

SEQ ID NO: 28414 - DNA, 1081 bp, Homo sapiens
ctgttgtgtgcgcagcccgtgcctgcctgctggtgattgtttttttcaggtttttatcctcatcaatcctgctcttgagatcttttaaaaacccagcttcatgtttttactgggcagttctactcactgtttccaagtttgtgacaagttttaagagagaggttacgtccatactcctcatttgagaaaatgtgacctgtgcttggcccgtgcagtagcccaccaacggagcatgtgcaggggtcctcagggcctctgtgtcaggactgtggcctacagcctacagctgcagtcacctcgcatagacagaggctttgtgatcgtgtaggttctggaactatccccaaactgatcctgtgatcacttgacatgataaagaatcctcccacatttttctgtgaagagaagccgatgttgtagtgctaaaacgtggacattctggtcctgtatttgtatcattttgaaagcaatgcaaagccctgtcatgatcagtatttacatttatgaagtgtagtagcatgatacagaaagagaaggcatctgttgaagaaaagctgtgaaagtggcatctttctctagttttagtattttcctttatgatagtagcattttcagtgacagtgagagtagtatttcagtgtgcccctgaggtgaataagaatttagaatgtatggaatctgtatcacagaaagtgtattcttctcaagattatttgtcaatccaatagtaattatttttatttctgaaaggaaagcatttggttatttcagaggttataaatatttggttaaatgcatgtccaaatacatttataatgatttgatttttgatattgataattgtttagcaacaaagtcaaaatgtaagcagtaatctagtatgtcatgttcttgctcagtttattaatctctgaattccatcttggctctattttttttaaccttttgttccctttgagcaccgaaaggagtaacctatcgagcttttgctggaggatgttataaatgaaaatttagtgtccattccatcagctttgtcaactgggagaagtggtgtgtgtgtgaggattattttggagaa

SEQ ID NO: 28415 - DNA, 1072 bp, Homo sapiens
atttacaagatcctgcaacgaaggcattgtaagttactctttctgggcaccacaggttccagcagcactgatgtgaaggaaaaccgcaatctggacaacgtgtcccccaaggatggcagcacacctgggcctggcgagggctctcagctctccaatgggggtggtggtggccccggcagaaagcggcccctggaggagggcagcaatggccactccaagtaccgcctgaagaaaaggaggaaaacaccagggcccgtcctccccaagaacgccctgatgcagctgaatgagatcaagcctggtttgcagtacacactcctgtcccagactgggcccgtgcacgcgcctttgtttgtcatgtctgtggaggtgaatggccaggtttttgagggctctggtcccacaaagaaaaaggcaaaactccatgctgctgagaaggccttgaggtctttcgttcagtttcctaatgcctctgaggcccacctggccatggggaggaccctgtctgtcaacacggacttcacatctgaccaggccgacttccctgacacgctcttcaatggttttgaaactcctgacaaggcggagcctcccttttacgtgggctccaatggggatgactccttcagttccagcggggacctcagcttgtctgcttccccggtgcctgccagcctagcccagcctcctctccctgtcttaccaccattcccacccccgagtgggaagaatcccgtgatgatcttgaacgaactgcgcccaggactcaagtatgacttcctctccgagagcggggagagccatgccaagagcttcgtcatgtctgtggtcgtggatggtcagttctttgaaggctcggggagaaacaagaagcttgccaaggcccgggctgcgcagtctgccctggccgccatttttaacttgcacttggatcagacgccatctcgccagcctattcccagtgagggtcttcagctgcatttaccgcaggtgaggaactatgctgctgctttaaaacacggggtcattgctcttggtaatgcttctagacagcattttagtttcaggatta

SEQ ID NO: 28416 - DNA, 1031 bp, Homo sapiens
ggaggggcctccaacaactgttctagggcctgccagttgcctgggagtctctactttgaatttcctacatgggctgtatgaggacttccccgcatgcccaggctggaggtggacagccacccttccatttgacctccccagcgcagtgaaatcaggatgaaggaaggggaagttccagggtgggcttagattggcttacgtgaaagagaaaaagtaaaggagaaaatcacctttagttctcatctctaaatcctaaaactctctgattatgtattccttcttttcttggaaatccaaagttcttctggtctattgcaaaagttatttttttgaccctctattcatttattactttgtatcagagtcttcttcactttgaagataacatgtatactacccttgaccacaagacttgaaggtggcttgtgttcccctggaagaatccaagtgtcttatagtttcttttttgctgttggctacaattagaacaacctctgtgcagttgtagtctgagatgaccaggagttctgttttaaaggaaggaaatgtattttattttgcctaaaggaatcaaatgcaacatcagtataaaataatatattcaaggtatttcactgatttttttaacgaaccaaatacttgcttcccttattaacctctcgtcaacattgtttataaggattattagtccatttgtactttaacaaatcagtgctactagatcccatgtgattttttattttcaggattactctttgctaaaatattaaagcctgagttcaaaatattgtctgatgtgacttgtcttcccttaatattgacagagtggcatataagaccattgaaatgacatcaaatgccgtggatcccagatgtctgaaccttcagtgtgtaggctaggagcaccttaggcggacgcagatcgaagtgccagtagagatgtcacccctgcctccctggcttggctgtgcgcctgcagtgacttctgtgtggagcatgaccagagcccctggcttgggaaggctggaggg

SEQ ID NO: 28417 - DNA, 1027 bp, Homo sapiens
acaggttttagctgacgctgtctcacgcctggtcctgggtaagtttggtgacctgaccgacaacttctcctcccctcacgctcgcagaaaagtgctggctggagtcgtcatgacaacaggtaaccatcttggtgttgtatgtaaccctgcctgttttcatgtctgacaaatgtgaaatgttctcaatcgacaaaaaccactgtgccacaccgacgggagatggttacttcttttcttcttcaaaatgtctgccatatgcaagtttacgaactgcacttacaagcttttttcccaaaatgttcatctttttaacctaagtttgttttatctggagaaagcacactatattaatatttgattcctgtcatcttcatcctgtgaatggcctcaatctgctctggaagatggcaaggggcttactaattcttcctttatttgaaagtagagcctatctattgtatcagttaatgttaacgatgccagataagtttcagtgtgacttcctttgaggagggagagagctctagcaagagtagaaaatccgtggggaaaaaaagcacaatttagaacgatagaagaaaccctattaaattagtctagaagttcccagtagcaaaaggaacccccgagtcctctccccacatcccgcgagtgagaacacgcagcagcatctctgtgggtagctcctgggaagggaagccacatccttggccagtgtctggcaccccagggtggagcaagactcagggagaggacccctgtcatgtggggccgtctctgtacccagcatctgctcagcccagcctggacagccagatgcaggaagcagaccctagaggtcagggaggaagctggggacagtttctctgtctacatccaccagcccaggagaaacccccagttctcggtatgtgactttcttgttctttccccctgaggggtcacctctatcagactctgcagccctcttcactgacccacctcttgctgccctaggaaacctggctgctctgctcatgaccattgt

SEQ ID NO: 28418 - DNA, 1802 bp, Homo sapiens
tccgttatctctaatcttgatagcctaaagcacattaccaaacccctcccctggtccccgctgcagggggctgtgccgagctgattcagcagcagcagagagagcctgggttggagccatgaggctgcccctgcgtcagctctgcctccttggaagcttctgtgtctcgggttcttcatacgcccagtggcagggatggaccaggcaccccttgcaatccttctggacaaatgtgccactgtcctatgaaaataaaaggacaccactcaagctccaggaggcagaaccttaactcaaatctgagccaataaacaatgtcactctagcaccaaagtctatttcaaaatgcaaactatttgaaatatcttatttttggtaaatgctttattttggaaatgggtttttgttgttgtttccctgaagagagttcagatcagcaaagcaagtagctttggagaagacacctttagacgaggactcctgtgaatcagcaggacagcgtagcaggacattaggtgagccacagggtggagcaggatgggagggcagaggcttctgcttcagaattgaagccgaaggcaagtaatgctgtgggtgttactggagacaaaaggaaccaaacaagaaaaatctggagaggcaaatgttgatgtcttaatagatttgggaggtcacactctttaaaaatgggtcccaaagcaaagctctcaaaacttcattaaaagaaaagtcttacatttgacaagtgacctggacagaggagctaccaggacattggcccccttgctgtgcacctgcactgtgcatcacagctcacgtcgtgtttgttacactttgtcacctcacattttattataaaggtcattcccgtgttaaaaagagagcgcggtatgacagcgcctagtgaattgtagtgtctttagggaggaacaaaaatggacataaatgaatacaaagaaaagattacctgaaactgggagcaaatcaaagtaaaaatgtagggatagggtgttgctttcttttaaaaagataatgctgtcaggattaaagtgagaagaatttaattttcatttcagcctgaacactagttttactttcagaaaggttcttggtgccaagctgtgacacttttgcctttgtgggtatacacacttggtacccttgcttagcactgtggaagaggaagtctctcgagctttctcagactttctctcaaatgagtttcacatccagcacttgcaagtttcaggacaattccagcttcttatttatgtccattgatctcctgagtgtgagctcctcagctggcccagtttgttgtccaacgctcactaagataaaccaagaagaaggagcagggtgcccaaatgccgcatgcgatggctctggggaccttgttgacagacagcctgctccggggtttgcagacaaggcttcctatcctgctggttttcatgttgaatgttggcacgaaacgttaacaaacaaggctacatgatggggtagggtccttgtgaagagcttgcatttaggtatctctgggaggacagcacagggacccaagggggctggcagcaggcccaggtgtgtggcaggaagaaggcaggtgcctgctgagctgctatccacccgagaccatttgacattatgggcaggaagagcaagggaagctggtttaatgaggccctggctggagtgagagagaaggaacatcactgtgagagtgtggaaagtgtgtgtgtgtatgtgtgcgtgtgtgtgtgtgtgagtgcatgtgagtgtgtgcatgagtgcgtgtgtgt

SEQ ID NO: 28419 - DNA, 1021 bp, Homo sapiens
ctttcctacttactaccctgaaccctctgatctggattgttgagtcttcacttctgagaagtttccttctgtcctgtcacttctgctagaagcatcttctctgccctctctgttgtccctgaaaatgctgctgagcagaactcacaggcctgtgaccagtgtctctcctctcatctgatgtgcttttttgactgtactgcattctaagagaatgcctgacttctgtcaccatctcaggagtgaactgttttccccgcggagcaggctccccgggagctcatgcctggcccacttccctgcaccacggccgccacacggctccgtctcttgctctagttctcctttctgggagagtgactccatttggggctcgtcatctctgttgggttttcagtggctgcatttggggttcctcatgtctgttgggttttcagttctccttttgcatactgagagaacaactttctagtgattggaactgtctagaaaagtttcctgaaaggaattgagctcccctgactggaagagttcaggttggaattggatggacactgttgttacggacacggtgataggggatctggctgaaaggattaacccacgtgatctccaggtgtcttctaaactcgagatcctacggagtgcagtttgcttgtttttaaattctctgtgcagatgactgtaatgctacagtacagttaccattacctattgtatcaatgacacttttgaaggtttttaaaaataataatagttacacttcactgactgccgtcctcaggccatctcccgggcatgcatgtgctcaagtcaggagccagattcttacatgcttccctgaatccacgccgcagccctgtgggccgggcctgccgtcacccttcacagtggaagcagccgcagccggcagacaccacgaggcttgcagctcacagccatattccactgtccctaggacaagtacagcttgaacccacatcccacctttcaccaccccaagccttgcctcccatggacgaag

SEQ ID NO: 28420 - DNA, 1047 bp, Homo sapiens
ggtgttgttttcatctgttacagcgtcaacagttgcatttgtttttttatcccttcacaggttccctcccacttactacgctccaagattaccaagcccaacgtgtaccatgagtccaagctggcggcaaaggagtaccaggccgccaaggcgcgtctgttcacagccttcatcaaggcggggctgggggcctgggtggagaagcccaccgagcaggaccagttctcactcacgccctgacccgggcagacatgatggggggtgcagggggctgtgggcatccagcgtcatcctccagaacctcacatctgaactgggggcaggtgcataccttggggagggagtagggggacacgggggaccaccaggtgtccacggttgtccccagcatctcacatcagacctggggcaggtgcgcagtgtggggaggggatggggtgcgtcagggcccagcatcgccgcctggcatctctctgccgcagcatttccccttctgaaccgtccagtgactgctttcaatctcggtttacgtttagaaattgagttctactgagtagggcttccttaagtttaggaaaatagaaattactttgtgtgaaattcttgaataaataatttattcagagctaggaatgtggtttataaaataggaagtaattgtgtcaggtcacttttatgccacattattttaattgcaaaaaagcatctatatatggaggagggtgggaaaatagaggtaggaaatagtagcctaaaggaaatcgccacacgtctgtctaaacttaggtctcttttctccgtaggtacctccctgggtagttccacacactaggttgtaacagtctctccctgaggagcagactcccagcatggtgtagcgtggccctgtcatgcacatggggtcccgcagcagtgactgtgtgtcctgcagaggcgtgacccaggcccctgtagccctcagcctcctctagaagcttctgtactccttgtaggatcagatcatggaaaacttttctcagtttacttctaagtaatcacagataatac

SEQ ID NO: 28421 - DNA, 1035 bp, Homo sapiens
gtgtcactctccatccagtgtccttgatgtggcttttagagacttagcagaaaattcgacacaagcaggaacttgattttttaagaaaaaatattacattttgaggacattttgacaagtaggggaagagagggcttctgttgttttgttttgttttgttttgttaactaaacctgaagtattaattccacaaagacactgtccctcaggaccactcaggtacagctctgccagggacagagtcctgctagtgggaggtctcaggtggggcggtgtgttctgtgccatgaggcagcgacaggtccagatggatgtcgtcaccaccttcctcagctctcatcacctggtcgtacgccaggcccacctcttcccagcaagggacgccaaagaactgcagtttttattctgagtcttaatttaacttttcatcatcttttcctattttggagaattttttgtaattaaaagcaattattttaaaatgtgcaagccagtatctcacaaggcatggatttctgtggaatttatttttattcaaataaccatatttatctccaggctgtggaatcgccactttctttgtgaagacagtgtctctccttgtaatctcacacaggtacactgaggaggggacggctccgtcttcacattgtgcacagatctgaggatgggattagcgaagctgtggagactgcacatccggacctgcccatgtctcaaaacaaacacatgtacagtggctctttttccttctcaaacactttaccccagaagcaggtggtctgccccaggcataaagaaggaaaattggccatctttcccacctctaaattctgtaaaattatagacttgctcaaaagattcctttttatcatccccacgctgtgtaagtggaaagggcattgtgttccgtgtgtgtccagtttacagcgtctctgccccctagcgtgttttgtgacaatctccctgggtgaggagtgggtgcacccagccccgaggccagtggttgctcggggccttccgtgtgagttctag

SEQ ID NO: 28422 - DNA, 1041 bp, Homo sapiens
cactgcagagcccagagggacatcctccaccgtgggcctgggctcaggtgtgctccgcgttctccggcccctcctccaggtgcgctgctcacagcacacgtctccacgtcctggcatcccgggcctccctgggctccgtggccccggagggtgcccctccctcagccagtactgtgggaagagcccggtccctctggggccagatgagcagggcagagtgagcaggtccccctttggtggagattcacgatctccaccccgcccagcagccatcccaggccgcagtctgctgactatccccagctcacacttctcaccagctgacacggtgatctggccgggcacctgcccagggtcccacccgcagaggaacccgcctcttccaggttggttccgggctcctggacggatcacgcgctgttgacatgcagttgtagcttttttcttgtgggtgggagcaatgctcttcccagctccacctggaattccaccagggatgggtgcagcatcctaaccccgccttcccttggagaattcactgctctggacagacgcctggcccaggatttcaaaggcgcatctgttatggaccgggcccccagaggagacgtctttttgccattttgttttctgaccggagggttttttggaggttgccctcccacccaccgggttgctggcagcccagcccgtgctgttttcagtggacccttttgcaaatgtcttcacaggctcccgggaagctgagctgaacagtgacctcagccttgagcaatcccgaggatgtgtttgctgaggaaatcattaaacagggagatgagagcactcaacccccaacatgccaggctctgcgggaggctgcttattcctgtggcctcgggccaggtgccccagcgtttgctgcccttggtagacacttgtctggcctgagccctcgggcaccatacaccgacatggttagggcagccagggtcagcccgggcccctgggagagctgagtggagggaccactggccaagcacagagggtgcagggtgccca

SEQ ID NO: 28423 - DNA, 1046 bp, Homo sapiens
tggggtctcagggaagcggcacctcctcaggggcctcccagccacctcacgtcacttcctggggtctcagggcagcggcacctcctcaggggcctccaaggctgtctctgctttagcgttgggttcccgggtccctcccaccccgacctcctgtgcctgcggccctgcgaggcgtgatggccaatacacaccctctagaggggcttgtgtcatgtggaaccagccagaccccccggacggcttgcaggcagggagatggagaagcaacccctccatggggcagacagtgccatagtcttcaccgcctcagtctgggggcatcagggctgcaggtcagctcttccctgtcttcagtaaaggatggacgcgaggaccagggtccccagtgtcagtggcgggtcagggatgccaaagtgctgagcagaagttggccagcccttgccagaggctctggagctgggccctgacacacgatgccgtgtgtagtgacatgcaattccatgtagtgacgtgattccgtgtagtaaggcgatgccgtgtgtggtgacgtgcagttccgtgtagtgacgtgatgccgtgtgtggtgacatgcagttccgtgtagtgacgtgatgccgggtagtgacgtgatgccgtgtagtgacgcaatgccgtgtagttacatgatgctgtgtgtagtgatgcgcgatgccgtgtgtggtgacacgatgccgtgtgtggtgacacttaatgtcatgtagtgacacgctcgcaggatcgccaaggccaggctggctccaaaggcttgggtctggcttcctggggccactgggtgctctctgaggccgcccatcactgttcgggccctggggtgggagctgggctgcaaagtggcctggactttatgtcctgccaggtacagtgtttccctcagcagatttatcaggcgttttgggtgtaaatgccaggaagcctggctggcgctgaaggaccctcctcaaagccacggatgggcaccatgcttaggggaggacctggggccacttggttgcattgtgaaatgttca

SEQ ID NO: 28424 - DNA, 1605 bp, Homo sapiens
agactctggccacccccaccccacccagccctgcctcgaggtcctgcactggtccctgcccggtaccgggtcagctggtgcctgcctgtcctgccctgcactcctcaggctcctcaaggacagacggacagacaggcactctagagaagggaccttggccagacggctttgccgcccccacccccataggtgcttgctttgagccccttgcaaaggtgaagccagatctgggatcccagggcctggtgcggctggacatgggaggagggccacggtcacgcttgcacggggcagagactcccagaaccacaggcctcaggagagctgggaagggaaggagagggcactgcggtgcctggagagccagagtccgcccgtgtggaagtgttgggggctgtgttgcagtgacagccctggcgtctcaggagcggagcaggacaccgcgtttctggctgtgcaaggctccacgcgggtcagcagcccatcctggcttgtcatgctgttaattagattggaaaacctcggccttccatttcttaaattgctcactcctgcagtcctcttctcttgcctgcaggcctggaaggtgtggagcgggtcaggtggctggcaggttgccaggaaggaagctcacactgtttcagggttggccgggtacttgccgtgcctgcctggcacagagaccctcattcctgccacctcccaggcagtaggcagccaggtggaccaccgagtggagagaacctttgaacacctcagcacctgaggctcagggccctgtgacaggacacagcccggggtcccccagggccagttgcacccctctggaattcctgagcactgtgactgtgacctgtgtcatatgtgcggcctctcagcttgcaaccctccattcctgcctgtggtgtggtgccatcttcaccccattccatgccaacacactcacacagacacacgctcgggccgatacgcacacatggctgtcacacacacaggttcacagacacacaggctcacgcacacacaggttcacatatacacagctcacacaagctctcacacacacacgttcacacacacaggctcacacatacaggttcacatacacatggctcacacacatgggctcacacacacacacacgcatgcaggcacacacaggctcactgtgaggtttaatctcagcaaagtctgagcacctggacttggctcagggaccctggcacacccgcttgctctctgtctgtagaggggcaggaggccctgggtttggtgggctctgtctgtagaggggcaggaggccctgggcttggtgggcaggcatttggagtgcgatggcggggcctcgcctgtgggcactgagggtctcacctcttcctgcagcttttgaagggatgggaggctccaggatagagttgcaggacagaatagatggcagaagccaggagccggggcctttgcgtggctgcctggcctgacgcacctcgcgccgtgccaggacccgggcagggcagcaaaaggcatctgtgagtcgccgtcctgtgcgggtctcagggcacagtgggtggcacgggctctcccagccgtcggttggtgaaaaacggg

SEQ ID NO: 28425 - DNA, 1947 bp, Homo sapiens
gctcctttgtggggctgccctgggaagccgggatcacgaggctctgccggccgtggtcaccccatgaggcagggtcagctcgggagcaaggcggatcagatggaacagaacacgtagaccacctcgcccgcccttagtcagctgggccattgaaaatcaagtccgtagaaagacctagaaataagtcccggggtgcccttgcctgttgacgggcgggccgagcaggactgttctcaggcaggcactggtctcttggcttccaggtggtttgtttgctggtttgaggctgggggtgacgctcctgtgcgggaggaggtcgcattccattcatagcggcttatctgggctgtcaggcaggcctgggagggagcctgcctctgtgctctccaagggtgggcgacggacagacagggtgtcccaccccttctgggccaaggacagagggtcagtgtttgcagagacctggggaggcccaggtgacctccaccgagcacctgctgtgtgcagggccagtgctggctgcagagacagcggagcgtgtgtggacccggcggcccaggggaggggggcaggcaggacccggcggcccaggggaggggggcaggcaggacccggcggcccaggggaggtgggcaggcaggacccggcggcccaggggaggggggcaggcaggacccggcggcccaggggagggggcaggcaggacccggcggcccaggggaggggggcaggcaggactcggcggcccaggggaggggggcaggcaggaccaggcggccctgggggtcaggggtggaggccaggcctagacggcccacaggagggtggactcattctgaccgattcctggaagcccccggaaagtggtgatgttctggagggcccagcagaccccaaggcccccaagacaatcccagctggctctctgcggctctcggtgtctgccatttgagacaatttgggcacaggcagggcaggccgtcgcggacggtctaagccgcgcgcattggtgggggcagcagagcccctgctctcagctcctcggggtacagcgggggtaccaggcgggtgagtgggtgggtggtcactgctcctgccaagggcagccctggtttggtttgcacttgctgccctggtgacggctgctctcattcctgccccattgctaacaagggtgtcataagctactttcccggcccacatcctattaagcccatggagaccctcccacagctgagcctgctgtgggctgcaggccctgggcggtgcccacctcggtccccactggcctccttccagcactttagagcagacacaggttggagataaggaaagttccagagcacagactggaacaagccccaggcctctccctgccccagcagggcctccctggatttgggggacaggtgccctcatggggggtcctgaaggtcagagctggggctggggctgggctggcggaggtggccttggcggaggccacattccagggtctcagtgagagtctgtggcaggcagccttgcagatgccgctgagggaccccccacttcatgttgtgggtgatgtggtccattgattgcctccaggtttaaatcaggtggatatttacctagcggcctcctctccctctgcacagggcctggagtgggatggactggggtgctcagctggaggctctgcagacacagccccctgggctatgcaggccctgctgggagccacattgccatttttcatcacccactttttgggtgagaaccccctcgagtcctaacatctgccgcatctcagagcctgtggctccagtcagagcatctggaccatactgctggggtcagagcgcggcaggacaatggccagtttctgtgtgattgctggcgggaatcttgagccattccgtgggtccgtgggctgggatctggaagcttccttgaaatgtctct

SEQ ID NO: 28426 - DNA, 1075 bp, Homo sapiens
gctgacaggctgtggcttgagagcctgggtcgggaaagcccagtcagaggggaagccgggggctggttctgaccctgcatggtttcctgagggacgtgctcagtgggatttgtccctggagcaccaagggctgaaggaaagccactgtcctgctttctcgcagccctggtccccattcttctgtgggtgcaggtggggatggtggggtgaacccgccctcctggggacagatatagggatgccgggatgccgcactgcaggtgtgagtcctgggaagtgggtagggggtcgatgggaggaagagaggaaggtggggtgggggcgggaggagagaagaggaagaagggggtggggggagggaggaaggaagaggaggaaggtggggtgggggtgggcggagggaggaggaggaagtgggggcgtccccatcagagacctcctgcagacctccagctgtttggtccatgggtgggttggttaggtctgggttcagaagccccttcagtgtaggtgctcagctgggccatggagtcctggccttccctctgagcacagacccaccaggaatgggcagcccgttcttagtgaccctgggggctggggagcacccaccctctgagccccagctcggcctccatgtgtcaggtgggaggcacgggcagggccaggctgtgggagtccgggagggagtcagaggttggctggggcagaggtggggtcagggagcaggaagtgagcgtttgcccactggggtagacgctgggtggatggggagctgggagtcctatagggtgaagggtctgccgtgggctgaggcatgttggggcatcccgagtacctatgggccccttggacgtccccccggcgctccctggcacaggtctgctcggagggtgtcggcctcctctgcattcaggatcgtgggtctgtcaattgggacacctatgaacaaatgctcttcccatcagtaactccgtgtgcccctctcttgagcccctgtgagatgcaccctggggtcccagcctcacccactatccttcacagcagagctgtgggtccatggcccaggcagggt

SEQ ID NO: 28427 - DNA, 1030 bp, Homo sapiens
ctggcgccaagcacagagcctggcctctaagatgctcgggaaatgccgctctctgcgcccctgagtgctcagtgcgagcctgtgaagtccattacagtctccggctgtgaatgtagcaaggagtgggaactaggcctgggagatgggagtgtttgtctgatgacttcctgagcgaaagcaaactgggaaatctcgggctgcgcgctggtgccccgactccgcacctcccaccccttctgtggggccagcacccagaaagcgccagcggaggctggcaggccgtgggccgcatgggcggaggggccggtcctccgatgatggggcaaacgtctccggcctagcccccgacgctcggggatgtaagggcaagggctgcggggtcggaacgtcggctgtggctgtggctgtgtgactgctccgcaccagctcagcttcctcacctgtgcacacaggctcccgctggaatttgctgcgttctccaagctctgcaagattcagaagcagaggcctccctgggctctcacagccccttagcttcttgcccacccacggagagggtccagagctgccccttgctgtctgtgaggaaagcgggtgcttcaggcctgccaggggtccactgggagttgctgggtgggctcctcaggccctgcccagggctgacccctggctccaggtcctgggcctccgtgccatgttccccgcaagcagtcggggcctgctggggtttgagccacgttccccggaagcagtcggggcctgctggggtttgagccacgttccccggaagcagtcggggcctgctggggtttgagccacgttccccggaagcagtcggggcctgctggggtttgagccacgttccccggaagcagctggggcctgctggggtttgagccacgttccccggaagcagtcggggcctgctggggtttgaaccacgttccccggaagcagtcagggcctgcgggggtttatgtcacaccctggctgcacgtggggatcgtgtctaagctttttggaaatgtcg

SEQ ID NO: 28428 - DNA, 1683 bp, Homo sapiens
ctcgataaatgccagctgcgagcaccgggggccagcacgagagcagctctgagagcctgggtcgtgcagggcgagagaggctccggggagtggaggctgtgagccagggaggaaacactactccacgtgttaggaggaagccacgtgctcctcgaacatgctggtactaggtttgaaaaccaacattagcagcaaagatgactccgtgtccataccctagtttttaaaagttgatatagcccctctaaaaatgagtttgaaagcacaggaatttataagagaaaaactttcatcaaatacatgaaaaaaatcaatctcactcaaaatggaattaataagaaatcaagcagcattaaggattgcgtggtttggaaaatgtgatgtgggtctcccttgattgttttgaatggctttattgagatgtaattcacattccgtgcaattcactcgaagtgtacaatccagtggttttcagtatattcaaaaatctatgccaccatcatccccatcgaccgtggaacatttcatcactccagagagaagcctttccgccgccctccctccctccagtcctggccaccggtcatctcctttctgtccctgggttccgtcttctgagcttccatacgaattaaaccatggaacgtgtggtcgtttctgtctggcttcttcccctcggcctgtggtttccgggttcgtccgtgttgcaccctgtcccagggcttcattccttgctgtcactgaataatgtcccaccaggtggaggcaccatgctgtgcttatggattcagcatttggtggacttctgagcggtgtccaccttttagctgtgatgaacggtgctgttgtgaacacttgtgtacaagtttcagtgtggacgtgtgtcttcgtttctctcgggtatatacctaaggtggaatcactgggactatggtaactgtgtttactcatttgagcagccgccagcctgctttcccaagtgtctgcaccatctcacgtcccttcctgcagccttgggagttctgatttcgccacatctttgccatcacttgtttttctctgactttttgtttccagcccatgttgggtgtaaagcagtgtcttgtggttttcatttgcattttcatgatgactgataatgttgaacatctttttttgtctttcttggcgatctgtatttcttctttggagaaatgtctattccgattcttgcccacttttagttggattattgtctttttgttgttgatttatgagttctttacatcatctagatagaagtgcttcctcacatatatgattcgcaaatatcttctcccattctgtgagatgtcatttcactttcttgatggtgtcctttgaggcacaaaacttttaagtttttacgaagtccaatttatttttcttttgtcacttgggcttttgctgtcatatgtaagaatcttttgccaaatccaaggttatgaaaaagaaaaccttcaaaagtttttttattttagctcttttatttaagagctaaaataaaaattttaatagctgcatgtggtgtgaagtagggatccagcttcgcccttttgcgtgtatctgttcgttggcccagcaccgtttgttgaaggctgctctttcctcactgaacagtctcgacattcttgtcaaacatgagttgcccgtaggttatgagtt

SEQ ID NO: 28429 - DNA, 1051 bp, Homo sapiens
tatttccatgttgttcatacatcactttcttgactttctccacaccttcctgtagttctttgagcatctttaagacagtcattttaaagtctttgtctagtagatctgccatcaggtcttttgcagagacagcttctgttaatttatttttctcctttgaatgtgctatattttcttattgctttgtgtgccttgtgattttgtgttaaaaagtgaacatttgaactcagtaatgtggctcttgaattttgcccttcaccagcgttcgcttttttttgttactttttaaaaaatgttttgtgtctgtgccagaaatctcccttaggtgtgaacttcaggtcttctcaggtcttttctgagcctgtccctttccctgggtgtgtgcagccactttctaattttcctcttacatgctgctgtttttcaatgtcccgttctttcatgtttggctcccaaaggaggaataagataaaaatgagggagaaaaaacagtgccagccctctaaatccccttcaagtcacttcagctggaaggggcagcttgcaacaacagagggagtgtaaaacaatggccccacctccctgtctgcacatctgtgatcccaggcaacctgatcagagcacaggttctcgatgtctgcaggacagggtcctttttgccgtcctgtttcccacaagctgtgtggctgctgctccaggaactcgtgcatggcacctgctatgggaatgggggtggaggatggatgtgtggctgctattgtgccaagagctggggtttagctaaattaaccacccgttaccgtccaagccttcctgtggacattgcaagctttcagtagactccagagttccaaaagagttctaagacaaattctgcccatgcacttgttaattagttggggagatggattcctggcgctttccatctgccatttaccagagtactccagaatcattttcaaacacgtttctttctgtcaagaaatcaagtcttggccaggcatggtggctcacgtctgtaatcccagcactttgggatgccgaggcatgc

SEQ ID NO: 28430 - DNA, 1017 bp, Homo sapiens
ccatgtctcctgcagacaccatgtcccctgcacacaggtttctgcatggagcctgcctgtcgtttgggaatgagtgaaccagggtggccgttgggtggctgagcccaggggatcagggcaggctgccaggcacgtggagagccctcccagactcagtttctcctttctgcccctgcctggctgcctctccaggccgcgtcggtggcccctggttccgtcctgcacagccacctcaccagctgtctttctttttgcagagcgcatcagcgaggaggtggggctgctgcagctccttggggaccccccgccccagcaggtcacccagacggatgaccccgacgtcgggctggcctacgtctttgggccagatgccaacagtggccaagtggcccggtaccacttccccagcctcttcttccgtgacttctcactgctgttccacatccggccagccacagagggcccaggggtgctgttcgccatcacggactcggcgcaggccatggtcttgctgggcgtgaagctctctggggtgcaggacgggcaccaggacatctccctgctctacacagaaccaggtgcaggccagacccacacagccgccagcttccggctccccgccttcgtcggccagtggacacacttagccctcagtgtggcaggtggctttgtggccctctacgtggactgtgaggagttccagagaatgccgcttgctcggtcctcacggggcctggagctggagcctggcgccgggctcttcgtggctcaggcggggggagcggaccctgacaagttccaggtaacccccactgtgccgtcgctgggggactggagcagctgggatggggtggggtgggggtggccactgggacagggacggagctgtggccggaagaggagagcccccaccccagctgtggtcagcccgggcctccagcgcaggcctcctgggttcttggctgctcagccctggcctccggcgcaggcctcccgggttcttggccggcctggctg

SEQ ID NO: 28431 - DNA, 1049 bp, Homo sapiens
tcaggtgtcaggaactttctctttgggtcttagatgagattccagctggggagaggagaagcatgcttgtgtggtagaaaagaagacagacttgttcagcacaagattttctcagacttctgaattgagatacttgggaaagaaacattcaagttgtgtgactcataatttttggcagaaacaagcacagagctttgggagcagggaggaaaccgaggcttcctcctcctcagcctctccacaagactgcatcgaccctggcgctgccacagatggtgcctgggacccccggccgcagctgggtccaacagagccctccggagcattggttgtgttcctcgtcctaagagtccttgggcgttgttggtcttttcaggttcactttcttgagtcaggtttgtcagtggtcgtctcccgggaaatcatgcacccctcccagctgctgccgttgccttgaacgtcatttccagctgtgtcctgatttccagctgtgtcctgatttccagctgtgtcctgatttccagggcgctgaggctgcagcgtgtcgggaagcattttacatgctcttccctcacagaattcctgtgagctctgtttcaggtgtctccggatttcataactttcagtccgaagtcccttaaatatttacaatgggcctgtggcttttgcactagcgcctcctgccccacccccggagccagcggccaccacgggctcagagcttctctgccctctgtagtcgccccccacccaggcaccctgtagccccgtgcaggaggcgtcggcccctcgggggcactctcaggagagcgctgtggccacctgtgggggggtcagggcctcacgggcctctctggacagtgcatgtctgtgtggggatcgggtgtcaggaatgcccagtccctccccgacaccaagaccacccaagatgcaccccccgcccgggctgccccagtggagaagcgcagttttttttttttgttttttttttgagacggagtctcgctctgtcgcccaggctggagtgcagtggcacgattgcggctcac

SEQ ID NO: 28432 - DNA, 1045 bp, Homo sapiens
tctgtgtggtgtgtctctgtgtcttgtgtggtgtgtctctgtggtgtgtctgtcttgtgtgttgtgtgtggatgtgtgtgtgtctgtgtggtgtgtctgtcttgtgtgttgtgtgtgttgtatgtgtgtctctggtgtgtctgtcttgtgtgtcgtgtgtgtctgtggtgtgtctctgtgtgtagtgtgtctctgtgtgtggtgtgtctctgtgtgtgtggtgtgtctctgtggtgtgtctgtcttgtgtgttgtgtctgcatgtctgcatggtgcgtgtgtctctgtgtctgtgtctgtgtgttgtgtggcgtgtgtgttggtggggtgtgtggaatcacgtggtacccaaggggagaatcccccagccccaggtgtgaggaacagcagggaattctcactcaggggcccagatcacaacatgccccacgtgaacatggacccacagcctcgctcctgggggcgtgggcaggagacgccgtggacgtggacccacagcctcgctcctgggggcgtgggcaggagacaccgtggctggactgtgggcagtgtgtgaacatccatgttactttcatgctttttctttattttgcccaataagcccgttgtttttgcctggaacatgccagaagacgccagatcgttcacatggcggccatgacaaggctgcgccctgggacagcttgctgggtgcggggggtcgccgaggcgccgcacccctcccctggcctgtcttgccctcaggggtcagtagcggtccctgaggatgtttctcctccgggttttcctgaagtttaaaacatccagccgccttggcgcgtgttcggcccagccgggcgtgcgctggggaaacctgtgcggggagcatctgcggtgcggcctcctccagggcagggctctggccagaagagaggagcgcgttccccctcccgcctccgcatgtctgaccaccggccgaggcaggttcagaagcgtcactgtcctcgacccgattggacacgacttactgaagctcagatggtgcctgggcagggaaggccagcgt

SEQ ID NO: 28433 - DNA, 1047 bp, Homo sapiens
gtcatttcccatcactaatggcttctcttgcacacccagggcgaccccggtgaagacggaaagccggtgagtctgcttttctttctgacccctgtgttatctgtgatgtttgcttagaccccagggctttgttgccagtgacactctttttaaacgcgacccagtgaggagactgtacagcaaaaccattttgaaagtggaattttgtaaagaaaagatgagtgtaactgttgatgggaaatagcagttatgcatttgtgttgagacatttgggccacaactaccatgaagaaggaaaggaagtgagaaaaggcagagcttccaaacccttagagggaagacgcacagcaaagaaaaaggaagtcgggcggggcagggggtggtgcaagtcggcgggggagggaagcacggggcgacctgagactctgtgaagtccgagcttcgtcgcaaaacacgcagttcagtctttaaaaatcagcaaacaccgtttccaagcacagtaatgacgtgatcgactgcgaataaagacctgggaacagcctgcccagcaaatggtaacactcggcagaaagtggggccgtcacgaacgctggacaggagggttcaagttaaaaacagtctagaaggtctgaaaggacagggagggcatctcatggtgcccaccgaacggtcattaccgaccgcctggcaccccacagccaagctgcctgcgatgaggaccacggcagacaaaggacagtcggctggggggcggcacggggcccacccactgcaacagggtacacgcacgcgtgtgagtgtggggtgatgatccacggggcccacccacagggcacacacacgtgtgtatgtatgtgcatgtgtttgagtgtgtgaatgtgtgactgcgcgtgtgtgtgggggggtgaggatccacacgtacacataccacacatgcacacacagcacatatcacacaccacacattacacaccacacgtggacacatgcacacacattacacacatgtgtgcacacaccacacattacaccacacgtggatacact

SEQ ID NO: 28434 - DNA, 1030 bp, Homo sapiens
tgcggaagcacctgagtggccaccccatggttctaggggtgctgaccagtgggggtgaccgcaagcaaggcctccgacctctctggccctgtgggtccacggactgcacagagagcgtctccatgagcaattcccatgggtgggtgtgggagggccgaggtcagcattgctggagggccaggggagggaggagcctgcttggccaacgcggctcgtagggtctcaggtccccacggcaggctccccaccagctctgccacacatgacgggcagcaggtcatgactggcagcaggtgcctgccccaccagctgtgccacacatgatgggcagcaggtcatgactggcagcaggtgcagacgtggctgctgtaattgggtcatgctgcactggcatcccgtggcctggggtcactcggtagcatgccatgacgtgcagggcagggagtgtggggttaggtcacccatgacatgcccctgcctccgtaacagtccctacctgagccagccaaccctaccgatgggcattcaccgtcaccatcggctctgaggcctctctgggtgccgcatggcaagtgctccccagaatccattctgaggggaatttgggcttaaagaacatgcctaatccatattcacgcatgtggccagactgcctctcagagggagcagcggctaccccagccctggtgtgcaagcatcttcccgccgtggtgctgtcggctctgccatctcatcctgccaatgtggccgcgaaactgcgggctacgcaggctgtggggtctcccgtgagccctgggactctggccctgtgtctggggaacgttctgtgtcctgccttctggaaacctgcggaagcccagataacctgttaacccagaaatcgttttagtggccgaatgccatcaagacccactatgctctgctctcccccagggacccccaggccctccgggaagagaggggcccccaggaaggactgggcagaaaggcagcctggtaagtcttccctcgagtccagggtgagtgggaa

SEQ ID NO: 28435 - DNA, 1032 bp, Homo sapiens
acctcccgctgtgcatgtgggcctccccctgtgcatgtgggcccaaccccgaccaagttcgggctccgtggctctctcctcagttgtgtttctgtgtggctgaaatcgtgtcgtaaagttagaagaaaggctgctgtggggcctgcgttgcttggcagaatgttccttaccttttgatttgcagggtttagaaagcatcataagaaaacgtgtctacgctggggttgcagggccagcgggggctgggctgggtcctgacacgctctcctcaccccacgcaggggagcaagggagcccccggtcctgctggtgctcgtggggagagcggcctggcaggagcccccggacctgctggaccaccaggcccccctgggccccctgggcccccaggaccaggactccccgctggatttgtgagtaccgcctacacctgaccccctggagagccgggggctgccgttgccccagccctactacccctggcatctcactcacagagcagcacgtcctgggcggtggccttgctggcactgcctcatcctgggattccatattccgcatggtggggctcgagtctctcgcccgtcgcccgtgccccacggtgctgatggggatcttggcccagccatgccccagcacccgtgccctgaccaagagcgaatgagctgacccgagacgggctgccccgggggggctccacccaggccctgccaccaggtagacagtccccatctgagaacggcggctccccaggccaccgtggccccaaagcatgtcccaccctcctctcgggcagtgccaccccagggaggggtccttccctaagaagggacacaggcccctacgtgtctcgtgtgtctcttccaggatgacatggaaggctccggggggcccttctggtcaacagcccgaagcgctgatgggccacaggtagtgttgtgagctgggcgtggccggctctgaggggtaagggggtgttgcctggggcaggagagtgtccctgagagccaccggccttgcatgggatcggaa

SEQ ID NO: 28436 - DNA, 1407 bp, Homo sapiens
aaacaactgtgctcagacagctcagacgtgccaggggcagacccaggggccacaagctccttcctcccctgcccccactgtcccctccacaccaccagcgctctcgtggcgccagcatggaggagcccccggggccacagccctgcccaagagacacgtggggtggctgaagccacagcgtccagcttcatgctcagagactcagcctgttgagagcacgggtggctgggacacatttcttacttggagcaaaacgaatgagaaatttcaattaggcagaaactaattgattccatagtaagttagaatggctttaccattttaacttagtacatttccttttacacacgtattttgaagtcttgactgttactagcgggcttttcttgcggcagacgcatctcacagcagggcctccagctgcactaacactgtgtctcctctgccctgacagggacctcccggcctgccgggacttaaggtcagtgacggatatgtctgggtttctgtggttgctggcttggccctgtctcgacatcttggggctgggggagacagggccttgcctcgggttttctgatggcaggagtaggatgaattcatcctgggaagtttgcaaaatacagcaaaaaagcctgacagggaaataatcgcacaccaaccccaacctagacttccagcgttaaggggccattgtcccgttctctctccgaagcccaggaatcaagattcctgggttcacacacctgaagcatattctcagacttgggccgaaaagaggggcataggggaagaactcagggtccccacctcagcctcagggacaggtggactcctgggctcagggacagagccgtggtgaccttgtaggacccaggagctttgtcctctgctccccccatccctgggggacactagcccccagcctggccccgaagaccccaccccacccaggccccgaagctcccagggcaggtgcctgagcagggagcctggagcctcctctcctaggccctgggcagcagccgcctttcaccccgctgcgtgctcatcaaagcgtcctctgctgcgtgcggggccaagggcgcacggggcccaccctggggctgcactctcacgcgtcaccagcccctgccatggcacctgctcctttgagctttgctttcatttgcaagacatcgggacactcaaaaggctgacttatgggaagggccgtgtgtttgctttcttaaattgtttgaatgaggccgtctcagcggggttcctcttgcagtctgcagtcctagtgatggaatatgtccccaggttccgcagccgtcccggccgggtgccttcagccagcctgggcccacggggtccctgcacaagttgctcagtgtccctgggacccctcggctctgggctggg

SEQ ID NO: 28437 - DNA, 1774 bp, Homo sapiens
cagggagatccagggaaggacggagtcgggcagccgggcctccctggcccccccggacccccgggacctgtggtctacgtgtcggagcaggacgtaaggacgctgcgtgggtgggcacccaatctgtccagaccccccacggggtgcagagatccctccccgagccccccccacacccccacatcccccaggtcaggacaggccctgactgccagtctacactccacctcctcggtgggggctgcagacgccctcggtcagagacgcctggggagcccagctccatgtggtgttggagacaccgaggagaggggagggcctgcacaggggccagtgtttttacgtcaaaggctcccattgggctcactccctgtgtccttgacactgtggccccaaagctgcatgtagtcacccagctgccccgtcagaagaagcagatgcacccttggcccctctggtgaaggttgtgttggttccggaaccttcctcccccactgcggcccgtccatcaggcctctcagctgcaccctctgcgcctgccagcagtgcatcccactggtccctgtgccaccctggcctcacagaggcagacgcatctccgcccagccacatggaacacagggaccaagccccactctgggcagggagctgagccctgggcagatgcagggcccagggcagcagagctgggtgtggccaggggttcagatccctgcagagttctctgtggccaccagtggaaggggggctgcccggggcagagctgagagcaggcaccgtcagctgtgtgacactggacaagttacctaacccttgtgctccagctccccacctaggaggtgggactctaacagtcttgagaggaggggtggagttgggaacaggcaggagagggcttgccccagcacggctttgctaggagcaggcagacaggcatcgggaggcaggggcagcccgagaggccacagggacctcggcgtgacggtcaagacatcagaacatcagaaaagcctcccgtaggccgagccacctccgccggcaagcaagggagcgtctagcagaggcaggagcattttaaaacaaaatggaagtaaaaaccatggcccttagggcgtctggagtctgcatccagctgctctgagctgaggggcgtctgtgctgcaggagggatgccccaggcccaggaagactggaaagcaacattttccttgaatttcctggtttggtgttttgttgatctgtaagtcgctcgagtccagttgaattttaaacgcggctctttgtttccgatttttccttttgctcgtggacagggatccgtcctgagcgtgccgggacctgaggtatgtgcctgcccagcttctaagagacgggcctgcggggacctgggtacaaggctgggtggggtccgggcaggcgcgagggtgcgtgatgaccccagctgacgccgtccctctttccccagggccggccgggtttcgcaggctttcccgtgagtaacctggtgccagagctgcatgctgcccggctggggaggggtctccacctggtagcacagagcagcccggtcgagctggggtgggccttgtcaggcccgagggatagcgacagtcactgcccccaaggaaatgatgggagtgggatgtgggcgagagccgctggcaggccctgtgctgggtgggcacccgtgagggtgaggcagctccttgcacctgcagaggcctgcagtgtccagagtgaggctggggccgggaggtgtcctggtgggggtcac

SEQ ID NO: 28438 - DNA, 1031 bp, Homo sapiens
gcccagtgcacccaaagggaccacagcggcccttagggaggctatcaggtggggcacaagccgccacctaaccgtgccttcgccacaggggccctcagagaggctgccaggtggggcacaagctgccacctaaccctgtcttcttgtttttttgctcagggagagccgggcttccgaggacccccggtaagtcggtccctggctttctctgcactgagctcgggcatgacggcccccaaggacacggtcgcccgcggctgctgagcttgtgctgtgcggcccagggctcatctccctagtgcagttttaaagcgtgtggggcaggtgtcggcgtgaggctgcagtgggctcctccgagctgatgggtggcccagggtgctgtgctctgcatggcccctccccttccccaggaccccccaactcgtggtcaagggccagggtctgccccactaagcctggcccccttcctcttgcagggtccatacggacggccggggtacaagggagagattggctttcctggacggccggtgaggacctggggtctccagtgggggcggcagatggggtctggcaggtggggagcagcccaggcccacgggggtgacatgcccagaggggagtggacggccgccgcacccactgtcctcccccaagaaccggccctgcctgagcgcagctcttgtcctggatgtggctggcagtaccccacgaggggccagtacccaggaggaagccctggaggcagacagggcagtgggcctgtgtgtgctaggctcagtcacctcctcccaaaagggtccttgtgcaggaaaggggtgagaagggccggggtagcctgagagctgggaacgtgtgaggctgagcgtgggccggccgggcctggcgtggggctaacggcaggcaccctgcgggaaggtgtctggtaatcatcagtgcccagcagtccccaccccctgtgctccgccccagggtcgccccgggatgaacggattgaaaggagagaaaggggagccgggagatgccagcct

SEQ ID NO: 28439 - DNA, 1140 bp, Homo sapiens
ggggcccaggctgggctgaaagcaggcctggcttccaggaactgtgaccccacgagtgcagtagaagcaagtgggaagtgcccacagggcagtggtcttccacgtggctcaggaatccaggagaagcaggtggaagtcagaaacccctgggagcttaggtgcgtccagggcatcctcagccctcacactgcagccgcaggggccttgccctgcacaatccccggtctcccaggtggtggggcctccacagccggtcacctccctctgcagaaggacccccaggggctccacagccggtcacctccctctgcagaaggacccccaggggctccacagccggtcacctccctctgcagaaggacccccaggggctccacagccggtcacctctctctgcagaaggacccccaggggctccacagccggtcacctccctctgcagaaggacccccaggggcttcaaagccggtcacctccctctgcagaaggacccccaggggctccacagccggtcacctccctctgcagaaggaccctcaggggcctccgcagccggtcacctccctctgcagaaggaccctcaggggctccacagccggtcacctccctctgcagaaggaccctcaggggcctccgcagccggtcacctccctctgccgaaggacccccaggggctccacagccggtcacctccctctgcagaaggacccggagcagggcccagcccgagagggagcacgggtcctgacagcagcagtgacctccaaccccagggacggctcctgtgggatggggggccctgggggtgtggagccacgtgctccaaagcttctgggttacagggcatgcctccaggggtgaggtggtccccaccccggtcacggtttcaggggaacagtcacaggagaaggtttgcccagggccgtctaaggtcccacctggaaggagaaggggttttgtcatctccgttgacaaaattacagctttaagtagtacctgtttctacacatcagcctaagatgttaaagaacaaacagcatttaaagaacaacaaacagttatttgatgaaaatagatgggaagaagtattaaacatcaaaaatgagtgaagagaaattgcgtatgttttatatataaaaa

SEQ ID NO: 28440 - DNA, 1074 bp, Homo sapiens
tgagcattttttcatgtgttttttggctgcataaatgtcttcttttgagaagtgtctgttcatgtcctttgcccactttttgatggggttgtttgtggcacatatacaccatggaatactacgcagccataaaaaatgatgagttcatgtcctttgtagggacatggatgaaattggaaatcatcattctcagtaaactattgcaagaacaaaaaaccaaacaccgcatattctcactcataggtgggaactgaacaatgagatcacatggacacaggaaggggaacatcacactctggggactgttgtggggtggggggaggggggagggatagcattgggagatatacctaatgctagatgacgagttagtgggtgcagcacaccagcatggcacatgtatacatatgtaactaacctgcacatcatgcacatgtaccctaaaacttaaagtataataataaatttaaaaaatttaaaaataaaataaaaataaaaaggcaccattaacaaaaacatcagaaagtatcggttaactaggaagaacctaattaaatacgcgatctctaccgcgaaatggctagaagggcctcaggcaaacccaccagtgctgggggctgcagagggaacccggcgctgtcagacaccacctcagcgagaccccgcctgtctctctcttgcagggcagtttccgtttgactttcttcagttggaggctgaaatgaaggtgggtgacctccctgtggggttgggggcccccaaggtcctgtacatcccgctgggtggctgctcccaatttctcgccccatccggcccaagcccccttcctgttcagccctgcgaggggcgctggctccagagggtgtcgagggcgtccctcaggatgttcctgtccccggctcagtttttgggggactcggctgatgcagtgggaggtggggagtcgagccctattctatgcagccagcagctcccaggcctgggctccggaagcttctgactgcccagccctggctcggggggatgggaggccacctgtggcttgtaggggttcagggctcccgtgtaacaagt

SEQ ID NO: 28441 - DNA, 1039 bp, Homo sapiens
ggccctccagggccacgtgacgtccacagcacggccccggctggggggcaggctgtcccgtggctctgcaccccgcgttataaacaccaaggtgggatgaaatgcatcctctctgcttagcacgggccttgctcaccagcctggctcctcagacacacctgggattgccccttccaggacaggccagcccctttcctgctttcccaaaatggtctgggtggcaggagtggccgctctgatccaggtgggtgcggccatgcttgcagggccccgggaaggtttaccttcgtgtggcaaaggtgaggacgggtagaagccccatgccgccgaaacggcctgtgacatccgtgggagcctccatggcagaacactgcacactgacacagccctgactcctggagccctcccaccttccaacacacccaccttccttctagagccctcccaccttccctctggaaccctcccaccttccctctggagccctcccaccttccctctagcactccctccctctcgccaccggccccctcctaggcctggccagcccctgcagcaccccagacagtgaatcccactccagtcccttcatctggccagggagaggctgccagtctcatagcagatgctgagctggtgcccactgtgtgccaggtgtgcttgtaggcacccggatgcagccccatcctaactttcaggggctttggtcctgacaggaggaggcaggggatggcatcctagcaaacgcgtgctgggagggctgggtgctgggcagggagggcaacctgccgtggactgggagggctgggtgctgggcagggagggcaccctcctgtgggctgggagggccgggtgttggggagggagaggcgggtgctgggcagggagggcaccctcctgtgggctgggagggccgggtgttggggagggagaggtgggtgctgggcagggagggcaacctgctgtggactgggagggccgggtgctgggcagggagggcaccctcctgtgggctggcagggccgggtgctgggcaggg

SEQ ID NO: 28442 - DNA, 1024 bp, Homo sapiens
gtctcagtcaatttagaggtttattttgctaaggttaaagaccatgggctatgacacagcctcgagaggtcctgagaacatgtgcccaaagtgtgggttttatactgttttctgtttttgacactctgtactctttctcacggatctgagtttccatctggcatcattttcttcagtctgaaaattttcccttaacattgtgttgttgtcgtttttgagatggagtcttgctctgttgtgcaggctggagtgcagtggtgccatctcggctcactgtaatctctgcctcccgagttcaagcgattctcctgcctcagcctcccgagtagctgggatgacgcccaccaacacacccggctaatttttgtatttttagtacaaaccgggtttcaccgtgttggccagaactgctggcctcaggtgatccgcccgcttcggcctcccaaagtgctgggattacaggcgtgagccaccatgcccggctgtgaacattttttgtagtgcagttctgctaggtatgaattctctccatttttattgattgataattttgatgatgtctttattttgccttcattttgaaattctctctaaaattttaggttagaggttttgggattttttgcccatatgtaatatgtcattcctttgcctctggcttccactgtttttgatgagaggtcattccttaccctgttcattctctttgtgcaatgtatttttttcctattgctttgaaaattttctctgtctctgattttcagcagtttgactagaatgtgtgtgtatatggttttcttctcttctgtttttttatgggagtttgttgagcatctttatatgtgtgattgacactagccatcaaatttagaaaatggttagccatcatatttaactttttcccatttcagtctttcttctcttctgggactccagttaaacatattttagaccactcactattgtcacgcaggtctctcaggttctgttgttttatttttaagcttttttttatctatctgtg

SEQ ID NO: 28443 - DNA, 1017 bp, Homo sapiens
ctggtgcggggctgtctcggcgccccgtgaatccgtttgacccctcacctggcagtgagtccagacgcacggcccccccgacccccgttctagaagaagtcgtgcgctgctggttctgaatccagcgagaaaccttcccgtgaggtctcacttgtccggtcccgtgccggggacgccctgcccttcgggggaggttgtgaaggtttctgactcccctcgaggcacaggagcggtttggggtctctcactccaccccctccccaccgtccccaccgagggacgtcctgctgccttttcccgggagagcctctccgggcccggggctctgtgctgcaggcgctgggctggccgggagggcaggcccagcagagactcggggaatggggcgagagcttgaaggcccctctcctccatcttcggccagactgccccgtggacctgttctttgtgctggacacctctgagagcgtggccctgaggctgaagccctacggggccctcgtggacaaagtcaagtccttcaccaagcgcttcatcgacaacctgagggacaggtaggagggacgccccgtgaccttcctcctgtgcttctgggcctcttggagggaggggtgggggcccaggggaacacgggtgcgacggcctcaacctcctaaggttgggcgagcgttgccctgaccggggcccctcccggcgccctccagagtgaggccggggccctttccggcgccctccagagtgagctggtctgagcctctcccagcgccttccagagtgagctggtttgagaccctgctcgcgggggtggcacctgttcagcagggccgaggtgacagtgaggctgagatgtagggaagagaggctcccgcaggctgaccgagagggctcagcgcactggcccagacacgcagtcctgcctggtgcgcgggagcccctcactaaccacctggaccctggtttgttccgtgggcagtgagagcctctacctgggtcctggatcccacgttctgaaggtcc

SEQ ID NO: 28444 - DNA, 1053 bp, Homo sapiens
cctgggttccccaccccgggctctcctgccctgccctcctgcccgccctccctcctgcctgcgcagctccttccctaggcacctctgtgctgcatcccaccagcctgagcaagacgccctctcggggcctgtgccgcactagcctccctctcctctgtccccatagctggtttttcccaccaatcctcacctaacagttactttacaattaaactcaaagcaagctcttctcctcagcttggggcagccattggcctctgtctcgttttgggaaaccaaggtcaggaggccgttgcagacataaatctcggcgactcggccccgtctcctgagggtcctgctggtgaccggcctggaccttggccctacagccctggaggccgctgctgaccagcactgaccccgacctcagagagtactcgcaggggcgctggctgcactcaagaccctcgagattaacggtgctaaccccgtctgctcctccctcccgcagagactggggcctggactggacatgagagccccttggtgccacagagggctgtgtcttactagaaacaacgcaaacctctccttcctcagaatagtgatgtgttcgacgttttatcaaaggccccctttctatgttcatgttagttttgctccttctgtgtttttttctgaaccatatccatgttgctgacttttccaaataaaggttttcactcctctccctgtggttatcttccccacaaagtaaaatcctgccgtgtgccccaaaggagcagtcacaggaggttggggggcgtgtgcgtgcgtgctcactcccaacccccatcaccaccagtcccaggccagaaccagggctgcccttggctacagctgtccatccatgccccttatctgcgtctgcgtcggtgacatggagaccatgctgcacctgtggacagagaggagctgagaaggcaacaccctgggctttggggtcgggagcagatcaggcctcagtgggctggggccggccacatccaccgaggtcaaccacagaggccggccacaggttctaggcttggt

SEQ ID NO: 28445 - DNA, 1033 bp, Homo sapiens
gtatatggtggtggtcatttactaaaatagaggtgtcttttatttatttagtgacaggatctcagtctgtcacccaggtgggaatgcagtggcacaatcattagctcactgcagcctcaaattccagggctaagtgatcttccgggctcagcctcctgaatagctgggactacaggcgtgtgccaccacacctggctgatttttttaaagtttggtagagacacggggtctcgctatgttgcccaggatggtctcaaactcctggccacaaggaatcctcccacttcagcctcccaaagtgttgggattataggcatgagccaccacacctggcctaaaatagggaaagtttgattggaaaattcagattaaagtggggacaagttatactagagatgcttattagacattcaagtgaaatattgagtaggctggcattcaggagagaacataatgctagagataggaatttgggagtcatttgctttcaggtagtatttgaaatcatgagattggacaagatgaattaggaaatgcacataaaaaagagaagttctagaatgagccctggggcaccgaccttttccagtatagaggaatggccagagagaggaggaaaaccagaggaatatgaagtcataatataagtgaagacatggtgatctttgctgaggctttgaagggattgcaaaatgaagacagaatttattattggatgcaacaaaacaatgtattggtgactgacaagagctatctaaagagacatggggggaaaagcctaatggcagaattttgaaagaaattttcagttaaacatggcagactgagcataaacattaacctccatttcctgcccaaaccctactcacataaagtaataaaagaccaaaaaaaccccacaaagaatgggagaggagacactagtaagcaagagaagtcaacaaaattatagagactgggaatggatggagaagtgataactgagttagctagagaaagttgagacttacgtttgtgggtgaagccaacaaga

SEQ ID NO: 28446 - DNA, 1018 bp, Homo sapiens
ccactcacttctgacagacagaagccaacaaaagcaacaggatgtcacttctaagtttaggttataaacacactcagacttccatctaggctcacctcttgctcactctgatgaaagccagctgccatgctgtcagctggggagaggcccatgtggcaggaactgaggaagtctttggccacagcctgcaaggaagtgaatcctgacacaagctcactagagtgagctgggaagtagatacccttcagtcaagctttcagatgaggccacaatcctagccaacattttcatttccacccatgagaaaccttgagccagaagacccaagctaagctacacctggattcctgacccacagataccatgataacagacattattttaagctgctatgttaggagtaattagttatttaggaataaggtaactaatacatttatattaatgggaagtcagcagagaacatttaaatggataaactgagaaatggctgtgtaagtgtgtgatctggaaacaggagaaaaatgcagccctgaagaaaggagttaagagaggaaggaggagctactatgtctcattttaaatcacgtgggtggcattatttgacttctttttaagtacacggaagtgttactttcttaaatgaaaatgaaggtaacagcagcagtaaactaatttccagtagatgaaatgtgactttgtaatcccaggaaaagggaagaatttgcaccaagaagttactgttacctcagaatggcaagagcatggatggctcttatcatcatctttatacttcttttacatttcctcattttttaaaagttttgtgtacatattacatttaggaaatccaatatatagtattaaaacagaaaaagtaaagaagcaggctgggcttggtgcccactactcaatttgactggcttaaaaaaattttttaaacgacatgtacggacagacataatacttgcttctgagcctcccagtctttcaaaaccacattagggaataagcagta

SEQ ID NO: 28447 - DNA, 1044 bp, Homo sapiens
agtgaattagaagagagaagcaaactgcttctgcaatatttttgcagttttaagtgggattcgttaatgaatatgtgcacattggaaaaattaaaacaacactgaaaataaacagactggggtaaatatttccaacaaactcaatgtaatagcagtcaggttattatctacattctgtagatgacttcattcaaggcttcccacattgtagcagcaggaattggagcaatcctttgggaaagcaacttggcatttcaaacacatgtatcctttagtcctgtggtgacacacccaagacaataaaccaaaaggcagaagaggccgggtgcagtggctcacgcctgtaatcccagcactttgggaggccgaggtgggtggatcacgatgtcaggaattcaagaccatcctggccaacatggtgaaaccccgtctctactaaaaatacaaaaaaagttagctgggtgtggtggcatttgcctgtaatcccagctactcgggaggctgaggcaggaaaatctcttgaaccaggaagtcggaggttgcagtgagctgagattgcaccactgcactccagcctggcgacagagcgagactccgtctcaaaaagaaaaaaaaaaaaagaagaaaagaaaatgctgaatcacgtaaaaatgtattgaaatgttaatttattggctgggcctataatcccagcactttgggaagctaaggtgggaggatcacttgagcccaggagttcaagaccagtctgggcaacatggtcaaaccttgtttctacaaaaaataaaaacaacaattagccgggcatggtggtgtgcagagctgtcgtcccagctactcaggaggctaaggtgagaggatcgcctgagctcaagaaactgaggctgcagtgagccaagactgcacctctgcactccaccctgggccacagagtaacaccctttttcaaaaaaaaagttaccattttctgtaataggaaaataagaggagcatcctaaatatccagccataggtgactggcttagtgtgaacagtccttaacta

SEQ ID NO: 28448 - DNA, 1032 bp, Homo sapiens
aaattggggcaagaagggagagatttagcttttatatcattttaaaacttaaatatgccttgattaagctatcaatcttttatacaaattttttttaaagttttatttttctgtaaactgccaagggctaggaaagctattctgccaatcagccgtatggttttctttaccaggcataattagcagtcctcattgttagaccccttggatatagatattgatgaaggcagtgtttgtggagagccatctgttggccaggtgtggcagagtagactgggtcagccctcgggcctcatggtccccaccagtctgttgactttgtggttctgttatttttttctcacttacctttgcctttactacttatctacatttttgcgcagcttgctcacttccgacagagaaaaacaaaaggtgacagttcgcattcggagaaaaagacggcgaagaggaagggctcggctgtcgatgcgtctgtccaggaggagagtccggtaaccaaggaggacagcgcactctgtggaggaggggacatttgcaaaagcacatcatgtgacgacacccctgatggggcaggaggggcctttgcagctcaggtagatttgctcaatgttgtatttgaacatttcgcttatcttctagtgatttctagtgtgatttactaaagatggtctttggtctgtttttgcctttcaaaagtgaggaaagagggtgttattttagtttataaaaagtgagggccgggtgcagtggcttacgcctgtaatccccgcactttgggaggccgaggcaggcggatcacctgaggtcaggagttccagaccagcctggccaacatggagaaaccctgtctatactaaaaatacaaaaattagccggacatctggcgcacacctgtaatcccagctactcgggaggttgagggaggagaatagcttcaacttgtgaggcagaggttgcattgagccgagatcacgccaatgcactccagactgggtgacagagcgagactctctctcaaaaaaaaaaaaa

SEQ ID NO: 28449 - DNA, 1024 bp, Homo sapiens
catacctcctcttcctgtccattggctctaaaatggtgggcaaaggtcaggtaccagtcagctttttccacagaattcctgacattttaataagctaaacatgcagtcatcaggtattaacccctattggatcttggacatcagctttttcccccttttttttgagatagggtcttgttttcttgaccaggctggagtgcagtggcgcaatcatggctcattccagccttgacctcctggcctcaagtgaccctcctgcctcagcctccctagtacctgggactacaggcatgtgccaccatacctggctaacttaaaaaaaaatttgtagagacagtgttacactgtgttgtcagggctggtctcaaactcctgtgctcaagtaattctcccacctcggcctcccaaagtgctggaattataggtgtgagccatcccacctggctaaaatttattttctttatacatgtataggtaaactaagtagtatgtgtagaatagagccattgtctttctgctgtacactaagttaggaatcaaatttcttaagccattttgtcaattatgtatataaaaaccattggtgctttagaagcagatatttcattaacttttttctgattatatcattgtacatcatcagttcagtctaaaaaggagtttttttcatatgtattataaaatatttcatgatatttgagtttagtatgcctttaatccagttgtagatgttaaaataggagtaattttgtgttcaaaataatgatcttctgaaaagtgaaattctaggaaagagtccactgtttaaagctagcagctggtggccgtgtggccgaataatgtcccaggccagggcactcccctctcagatggttggtcatgctgcgtcggagatcaggaatcctcaaggaacctttatgttatagttgtaccagtgctttaaacataatgaaaggtgcatttgttttattttacccatctataaattgtgagaggtttggctatggagagtctagtgagctta

SEQ ID NO: 28450 - DNA, 1050 bp, Homo sapiens
ctggatgcttctgcttttctgtcctgccagcattcaggggagagactgggtgtaaggcctgtcaggacagtttagttgggggccatgactgcccattcttttttttctttgagacagggtctcattctgcctcccaggctggagtgcagtggcacaatcacagctcactgcagtcttgacctcctgggctcaattgatcctcctgcctcagcctcccgagtagctgggactatagttgcatgccaccacatcccactaatttttgtatttttttttttgtagagatggggtctcactatgttgcccgggctggtctgtaaccctaactcctgggctcaggcgatctgcctgcctcagcctctcaaagtgctgggattagaggcatgagccacgttgcctggcctgctcagaggttttgactgtgtgatttaaatttctttagcacagataatcaactattgagtttaatttttttttcttttaaattagaccctgaaggaagattgggaatctgaaaaagatttatgtttagaaaatctacgcaaagaactgtctgcaaagcatcaatcagaaatggaggatttacaaaaccagtttcagaaagaattggcagaacagagagctgagttggagaagatttttcaagacaaaaaccaggctgaacgtaagtaatgaaaatgagcaagtttggagtgggactgaattttcctaggtagtactggaaggaatgtcgttcatgtcaccatgcgtcattgcgcacgtttcctaccttctaaatgctggatggccccatgcacgtgtgacacgctggtggccgtcatgggtcacaggtctctcagggtccttaaaccttcctgatctttgtttcagagatttttcttggcatgttcagttgctaaattattacaaagcagcagctttgtggttgttcacttttcatactccagggttgtgtgttccagcttgaccctcatggtgggtggcatgggtaggcgatgtcccctggtgctatcaggcatgtgaggctcaaacgaggggcccgggggcgcc

SEQ ID NO: 28451 - DNA, 1081 bp, Homo sapiens
gatctcatttctagccataaagtaaggttttgaacctgaaaggtttgcttggtgaagagggactgctcctgagaatgggtgatgcagcgccggattctgaggttagaaatgacttgtttcttcacgtggacagctctgggtgctgcccagtgtggacactggcccctcagtcctgaggcacagccctgagacctgcaccctgctgggtatcgtgtgggtctgtcttctctggaaaagtcagattctgtctcgcttttccagggactcatgctaaagaaattctgtccgttttatctgtgcatagcacaaggaggtgttcgttttctgaaatcgtgtgtcacctgtgtcctttaacctgtacttttgttcttctagggtgactgttgttgttgttgttttggagggaggatcttgctctgtcgcccaggccgaaggtagtgatgcaaccacagctcactgtgaccttgaacgcctggcctcaagtggtcctcctgcctcagcctcttgagtagctgggactacagatgtgcaccaccatgcctggctaatttattttttgtagagatggggtctcactgtgttgcccaggctggtcttaaattcctggcctcaagcaatccttttgtctcagcctcccaaagtgctgggaccataggcgtgagccgcgcctggcctggactattatcggaatactcctagagcgtctttgcagtatttttgtagttgaggtacaggtttgcgcgagtaagttagctttttactttgctgctagggatgtgcatgtcaatactctttttttttttttttttttgagacagagtctcgctctgtctccaggctggagtgcagtggcgtgatcttggctcactgcaacctctgcctccctggttcaagggattctcctgcctcagcctcccaagtagctgggactacaggcatgcgccaccatgcctaatatttgtatttttagtagagatggggtttcaccatgttgcccagggtggtctgatctcttgacctcgtgatccgtccgcctcaccctccctaagtgctgggattacagatgtgagccaccgcgccc

SEQ ID NO: 28452 - DNA, 1054 bp, Homo sapiens
tttcgacatggttaaccctgccctagtttctcactctggtttgttttctttcctttcaccctggctctgcggttgtgtgactctgcgccagctaccggccctgaccactctcccggcagggcctaggctctgacggtggcgtgaacccggccctggtgtgcagcggccctgcctcgccgtgttgcgtgacgcccccttcgctgtgtggtgttttgtggctctcttcaggtgttgccatctgtcccttttgttctctttgtctccttgaaaagttgatgggcctgcagccgcacaggcagttgtgggcatggtgggcgctgagtctggaggttgttcaaggccagcagcgttgcccagagccctgctgctgacgctgccgtcactggttctagctctcacattctcagctgcacgtttctgtttccacctcagtaaacgcaaactcttgttcataggcacagctgtcactgcagcacacaaggactcaggtttgtaaagacaaacgattgatttgtgtgtgacgtgctgtttgtttgcactggattttgcaaattatttactaaagaaaagtacttcagaccttttgtggcaaacaataaatacagcgatactctaatcttcagtattcataaaaatgggtggagttgtcccattttaacgccccagcaaaacaggagcatttctctaacggtctttactacagtgcctaagctacagtttgtgctgcttttcagaaactgatgtcttgtgatagttacagctgttcttgggctgggtcccagctctggtctccagggagggcctgggccccctggatcccctgtgcctgttcagcgtgggtgtcacctgcttcgccagctgggattgcgatcctcgtgtgcctccctgagtctgcgtgcatgtcagcaggcaccctgccccagtgcccctggccctgaagatggtgatgttctgggccaagcacagcccaggtcgtgtccaggcccagggagtgcagtcaggggagcagctgccctcaggcctcgccgcacgtctcaggttgtgaatgttaccg

SEQ ID NO: 28453 - DNA, 1044 bp, Homo sapiens
ttgacaccattcaccgagcctgactctctggagattgatccaggttactgagtgtagccatagtttgttctttatgttgctgagaagtattccattctttttttttctttttctttttttttttttttttgagttggagtctcatgcagttgcccaggctggagtgcagtggcgcgatctcagctcactgcaagctccacctcccgggttcacgccattctcctgcctcagcctcccgagtagctgggactacaggtgcccgccaccacaccccgctaattttttgtatttttagtagagacagggtttcactgtgttagccaggatggtctccatctcctgacctcgtgatctgcctgcctcagcctcccagagtgctgggattacaggcgtgagccaccgcgccggctgtagtattccattcttttctatcagaatagatttcattttcctaacaaattctgtattatagagaatgcctttcttaacacaacatcaccctatacttcctttagatctctgttcagcctctgggtctaggtctccctgtgcagcctgtgggtctgggtctctgttcagcctgtgagtctgggtctcttttcagcctgtgggtctaggtctccctgtgcagcctgtgggtctaggtctctgttcagcctgtgggtctgggtctctctgtgcagcctgtgggtctaggtctccctgtgcagtctttgcgtctgggtctccctgtgcagcctgtgagtctaggtctccctttgggtctaggggagggcatagggcatctattttgtctctgttgttttgggtacttttttgtttggaaaatgggtttttataaaacattctattgtattcctcaagcattttttgttgttttaggttgagttgttacaacaaaagttgagagaaaagttggatgaatttaatgaattggctatacagaaagagtcggcagatagacaagtgttaatgcaggaagaagaaattaaacgtctggaggagatgaacatcaacatcaggaaaaaagtggcccagctccag

SEQ ID NO: 28454 - DNA, 1105 bp, Homo sapiens
cggtgaatgaacacagcgtgggagaattgtgtgtgtggtgcccacgcggcacgtgctcggtgaatcaactcagcgtgggagaatcgtgtatgtgtggtgcccacgcggcgtgtgctcggtgaatgaacacagcgtgggagaattgtgtgtgtggtgcccacgcggcgcgtgctcggtgaatgaacacagcgtgggagaattgtgtgtgtggtgcccacgcggcgcgtgctcggtgaatgaacacagcgtgggagaattgtgtgtgtgtggtgcccacgtggcgcgtgctcggtgaatgaacacagcgtgggagaattgtgtgtgtggtgcccacgcggcgcgtgctcggtgaatgaacatagcgtgggagaattgtgtgtgtgtggtgcccacgtggcgcgtgctcggtgaatgaacacagcgtgggaatgctccctgagtgaacacagcgtgggagagtctcaaaaaacaacaacaataacaacaaaaaaaattttcaaattgattttccatttttccaatttaaaactgtaggcttatttaattaggacatttcatatctgtagggtcagtggaatatttccctattaaggttctgtcggctctgttttgatatggttgttgttattaccatttccaccggcatttctgcccaacaaagaagaggagatagtgcgtgtgaacgagcagctctaggcaccgcaggtttacctcggcgaggtacgccactccctggtgctgggggagaaggggctcttctcacgcttctggctacgcctgcgtctcctgtacgaagtcctcatagtttctgggtgtgattgactggggccttggctttccaggatgacagtcttctgtttcctcatacaatatttataatacttttcaaaattaattttatcagttgggcacggtggctcaaacgcctgtattctcagcactttgggagactgaggagggtgggttacttgagctcaggagttcgagaccagcctaaacaacatgggaaaaccccatctctactaaaaatacaaaaattagccaggcatggtgacacaccactccggagactgaggcaggagaatcacttgaacccaggagatgg

SEQ ID NO: 28455 - DNA, 1083 bp, Homo sapiens
tctcccgcctgtgcctccctcctgcctgtgccctgtagagaagccgaggcaccagacgccgcagtgctctaggactgagccgagttctcttcagacgatgggagagaagccactcagcctccttggaatcaaccttgaaggcagaattttgtggaacttttcataggttttctttcctctcccagtttagcagatcattttatggcaaaaccattgacaaaaacttggctaaacaagtgagtgatagaatgatgccactacaggagcttagtcaagtggtaaacatattcccaaacaaaacagtcttcacatcagtgaaacctcttctgagactgcgcagtaagtcctcacttagcgttgccccgaggttcctggaaactgaccttgtaggaaggacactcctgtgctgctggccgcagctcccgttgtctcagagggccctgagggtgcctttgttacatgcgtttaaaagtcgcggtttccaaaacccatccatgacgttaagtgaggacttactgcattcagaataaaacttgttttactttatttggctgggcacggtggctcatgcctatgatcccagcacttcgggaggctgagacaggaggatcgttggagcccaggagttcaagaccagcctgggcaacatagtaagacccctctctgtcagaactgagtcagttaaacctctttttttcattaaaataaaaaaacttattttactttcttaaacatggaaattggagattttttttttaatcagttttttatatcttctttgcatttcctttttttttttttggtgagacagagtctcactctgtcacccagcagtgcagtcacagctcactgcaacctctgcctcctgggctcaaacgatcctcccacctcagcctcccaagcagcttggattacaggcgtgagccaccacacccagctaatttttgtattttctgtaaagatggagtgttgccatgttacccaggctggtcttgagctcctgagctcaagtaatctgcccacctcagcctcccaaggtgctgggattacagtgtgagccacagcgcctggcctcaaattttt

SEQ ID NO: 28456 - DNA, 1029 bp, Homo sapiens
tgtgcttgggtgtgtgctcatgtggtggtgaccgcgctgagcctctgggctctgggctctaggctggtcgtgacaccagcttctccatagggccgtctgcttacccctcagcctctctggcgagacagtcaagtgtgtgtccggacaccagctgctgcgtaatcggtgggataaagcagccgcctcgtgttcacagacctgtgggcagggcctgctggggatggttttctctgctccccgtgcccagcacaggcagcttcaccccacgctggtggtcggcactggcctcagccggaccacgcacagaggcctcctgggtggccatcgtgtggccttctcgtagcgtcccaggtgggcagggagtgtgtgatatgtttgtgatctcgctgtggacattggcctaaagccctgccctgagctttgtccaggcttaggcgggggacggtgtccccctcagggagcaggtggagtggaggaagtggcggggccatctttggagtggcttatagagaaattcactccaagcctggcttccgtgttgtctctctgaaggtcgggagaggtgggcttgaaaaccttgtagcttgagaagtgggtgccgcctgtacgaagccgaggcggtgccctccctctccacagctgcccgcccttcacagagtcctggcggcagctcggggccgcaggtggtgtagagcgtggctgtgtggggtggcaggcaactcccttctgacgcgctttcccgccacaggctttactgcagatggtgcgtgacgagagccaccagatcctggcgctgtcagaaggccttgcacccccaagcggcgagccacacccaccccggaaggaagacgagatacaggacatctcgctccatgggggaaagacgcaggtttattttgcccttcacacacttcttttccaaaggatttaaggagcttgtggtaatggccgcgtccttagggccacgtggacactaggatttctttctttttttttttttttttttttttttttgagactcggctcact

SEQ ID NO: 28457 - DNA, 1656 bp, Homo sapiens
gcatgccaccatgcccagctaatttttgtatttttagtagagacgggctttcaccatcttagctaggctggtcttgaactccagaccttgtgatccacccgcctcagcctcccaaagtgctgggattacaggcatgagccaccgtgcctggcctaggattttttttagcacggccaaaaagactgaggtccaagaaccctggggaggccttcccatctcccacagccagcgcaggctctcggggcaggttccctgcgggacgtggaggtgtgtggggggcagaagggctcagggctttcaggcctgtgccctgtgtgagcctgcggggaggctgagagtggtccctcctggccatgtggccctgcggactcggcccattccagcacttgtcccccagggcctctcctcctgccactcgggtgacttgccctccggcctcattcctccccttgggtctctcctacctccccctccacaccccaagccccagcaactggacctcagggcctcacctctgtgctgtcgaccccgcaccccacttttccccaagtcctccccatctccctgcctgtctgcttccatcaccagggcttgtggaggttgtggagtgggtgccaactcccatcacgctccctcccatctccgtgcccaccctgtcctgcccctgtgcctgcctctgactgggatcaaagctttgtgagggagggaagggctttctccctgtgcctggaacgcacagggtgtgctggtgccatggagagccggtgggagggtcagccccacccgcctccgctcgcccctccagcaggccctggttgtgtgcgagcggcagcctggctggcattcaggaggctcattggtgctgcacgctgcccctggggaccagcgggtagccccttgcagccttaggtcccctccaggccctgggccttgaaggcacagcagcaggaaaagagggaaggagctttgctgacattttcctgaccttactttatcgtctttttcagtctcttctgtgctcatgatggcagcctttgcttctcgtgccttgaatggccctgggcagtgtgtgtcttctcttctgtcagggtcatttctgtttgaacggctgtcagtctgctcagctgccgtaacagaacaccccagaccagggggcttaaacagcagacattgatttcacctgttgtggcatcagggtgcccacagggttggattctggtgtaggcgcccttcctggtttgcggacagcgtctccgtgctgtgtcctcatatgatggagacagcgagtgagctctggtgtctcttcctcttcttaagaggcctcatttaccctgaatcacctcccgcaggccccatctccaaacgcagtcacactgcgaactttagggcacaaggatgcaggtgcatttgtgaggacgccacgtttcttccttcttcctttaggaagtgcccaccgcgtgccccgattggagaggggaccttctgcaggttgtgcaagaggcctttgaaaaagagcaggagatgcagggggttgagctgcagccccgactcagtggctcagatctggggggtcacagctccctgctcgaaaggctggagaagatcatccgtgagcaggtgagtgtcagctctgccaccaggcctcagtttgcccca

SEQ ID NO: 28458 - DNA, 1053 bp, Homo sapiens
ggagaagtgcattgctggtgacttgcagaagacgctgagtgaagagcaagagaaggcaaacagcgtgcagaagctcctggcggcggagcagactgtagtgcgagatttgaagtccgacctctgtgagagcaggcagaagagcgaacagctgtcccggtccctctgcgaggtgcagcaggaggtcctccagctgaggtgcgcctgatcccccttcctgggacactggcgggagtccccccgttgtgccatgttttcttggtgatgaagggagacagaacctctggtgggccgcagttgggcagccccaggggcaccgcgccctgctgtccctgggttgataatcctgtggtggggggtgaagcacacgtgtgggacctggcagggctctgcctcccctcctggagctcccagcccccgggaacacactctggcccacgtggtcagattgttctgcgatgtctccacgcagatccatgctgagcagtaaggagaacgagctgaaggccgcgcttcaggagctggagagtgagcaggggaaggggcgtgccctgcagagccagctggaggaggagcagctgcggcacctgcagagggagagccagagtgccaaggccctggaggtaacagggtgtcagggcaaggcagccggcatgggctgtgtgcactggaagcctgaagccatgctcctctttcatccttcttttcctgttcttcatggcagtgcacccagttgacagcagtgtgacgtagcaggatagggctgtgtttgcaggtaaaattgcaccttggtgtagtggcagccaccacagggcgaagagtgcgatgacccgtggtggcacgatacccctgctcggagcccccccccgtccctgagcacttgctgtggagatggacacagcctcctcgctggcatccagacagagcacagcctcagaggtctgtgcacaaggcaggctggtggtggggcctctgctttgcatggcggaggcccagcaggcctgctgtggcttctgagcaagtctgtgccagttccatgggttatggctttcaaca

SEQ ID NO: 28459 - DNA, 1029 bp, Homo sapiens
cgctctgctgcagaagctgaaggaggagaagtcccgggtggtggacttgcaagcgatgcttgaaaaggtgcagcagcaagccctgcattctcagcagcagcttgaggctgaggctcagaagcactgtgaggcgctcaggagagagaaggaggtaagtgccacactgaagtcgacggtggaagccctgcacacccaaaaacgagagctgagatgctctctggagagagagagggagaaaccagcgtggttgcaggcagaattagagcagtcacacccacggttgaaagagcaagaaggacgcaaggctgcgaggaggagcgcggaggccaggcagagcccagcggctgcggagcagtggaggaagtggcagagagacaaggagaagctggtgagagccgcctgccggcggacgtccacacctaaaaacgataagcaattggagttaggatggttcacgtgggggacgcgagatttatgtctggccctctgacctggtctgctctggtctgtgtgccctgacgctggcaccacactgctgttactgtagctttctagaaagtattgaaatcaggaagtgtgagttctccaacttcgttcttcctcttcaagatagtttcagctctgtggggcttcttgctattccacaggaatttgaggattggtgtttgtatttctgcagaacctgccactgggattttcttagggatggcattaaatgtgctgattgctctgggtagtattgacatctggacagtgtgaggtcttttgatccacgattacagaatgtgtctcttcatttaattaggatttttttgagatagggtctggctctgtcacccaggctggagtgcagtgatgtgatctcagctcactgcagtcgccgcctcctgggttcaagcaattcttctgcctcagcctcccacgtagctgggactgcaggcacatgccaccacgcctggctaatttttggattagtagagacagggttttccatgttggccaggctggtctcaaacttctgacctcagg

SEQ ID NO: 28460 - DNA, 1033 bp, Homo sapiens
agagcaggccgggcacggtggccgatgcctgtaatcccagcactttgggaggccaaggcaggcagatcatttgaggtcaggagttcaagaccagcctggccaacaaggcgaaagcccatttctactaaaaatacaaaaaattagccgggcatggtagtgtgcacctgtaatcccagctattcgggaggctggggcaggagaattgcttgaacccgcaaggcggaggttgcagtgagccgggattgcaccgctgcacttcagcctgggcaacaagagcgagactccatctcaaaaaaacaaaaacactctttggaatagtcgtagttttttttatctccagaagccttggagagtagggaggtggtttggtggtacagacagtgtggccaagcatggcaggggcgtctacacaggaccccagctgagggtgagacgtggtgtgtgtgtttgcctttctcctgggcaagagctcatcctttgatggaatgctcaaaggagtctttactttttgagaacttcctgaaaccacgcctgaagttgccagccaaaacctttaattttgattgtttcttaaaaaaaatagtaacatgagtgcttagaaaatattttctaagttgcttgcttcaggatgcatcttgacctgtattttgagtgaggtggcccttccagagtgatttatttattaattttttttttgaggtagagtctcgctctgtcttccaagctggagtgcaatggcacgatcttggctcactgcaacctccacctcccgggttcaagtgattctcctgcctcagcctcctgagtagctgggattacaggtgcatgtcaccacgcccagcccagctaatttttgtatttttagtagagacggggttttaccacattggtcaggctggtcttgaactcctgaccttgtgattgatccgcccaccttggcctcccaaagtgctggattacaggcgtgagccactgtgcccggcctccagagtgttttttactgaggatagtgaatttgatctggattatagaa

SEQ ID NO: 28461 - DNA, 1090 bp, Homo sapiens
gcgtcctggtccccatgggcagcgaggcccccattctgcttgtttggtcacagtggggttttcattgctctttcccttcctgtcttgccgtacttttaagtgtgtcttgtctcttttttttgtagattacgttttttggttaagaaatggcaagaagtagatcggaaaggagctctggcacaaggcaaagcccctcgcccaggtgggactccagctgctgttgaccgctggactcacaaacctttctttctactcttgtttttcattcactttgggtcatttttcagtgttgatggggacgtaataaagcacggtaagaaaatccgtgaattccgtcagagcagtcgtccagagggaaggcgcgcccggcgtagggaggtcagagctcatgttagctatgaacacaggtcacaggggcgtacggcgatgggaaacactgagatgctcaatatattgattatttaatagtgtttagcaaaatggtctttttttattccttaaatcaactgaaactcacttcacgtctctttccttgtagagcatcatgcttatttctggctcactcacatctttgtctcgggagttctctgccgagccattgccccctacagcagagagcacagctggctgcactagtgctgaaggagccagccccagagcagggcatttccaggggctcttgtcccagagcggcaggcgttgtgtgcagagaacgcccctcccacgcagcacagagaacgcggggtgggtgtgtggctccgggcctgtggggcttaggctgcctgaaccaccgccgactggcaccatgactcggcattcctggaagtgccttaccaagttgttgttgttgttttgttgttttttaagagacgggcttgctctatcatccaggctcgagtgcaatggcacagtcacagctcactgcagccttgaactcgtgggctcaagccatcctcctgtgtcagcctccccagtacctgggactgtgggcatgagcactgcgcctggcagctgtatcagtgttgactccacattttaatagttgcttcttgaaattaaaatgctttgattcagccttcaagccatcagg

SEQ ID NO: 28462 - DNA, 1065 bp, Homo sapiens
tgaaaccccatctctactaaaaatacaaaaaaattagccgagtgtggtggcgggcgtctatagtcccagctactcgggagactgaggcaggagaatcgcttgaacccgagaggcggaggttgcagtgagccaagattgtgtcacttcactccagcctgggcgatagagtgagactcctttctcaaaagttttaagacatttgtacagctgtggaaagcatcactacaatcaagatagtgaccatatccagcacgcccaaaagtgtccttgtgttccttggtcctcctctcttcggatccttctggctttccccatacacttcaggcagccaccgatttactttctgtcactatagattagattgcattttctagaattttatataaaaggaatcatacagcgtttacgtttatggtctgccttctaccactctccataattattttgagattcattcatgttctgtatcaatagtttactccttctcattgagtaatatttcattaaatggatgcaccacaatttggctgttcacctgttgatgtgtatttaggttgtttctagtttgggccggttacaagtaaagctgctatgaataatcaatcttgtatacgtttttgcatagatgggtactttcatttcttttgggtcaatacctagaagtagaatggctgaattatattgtaggtgtatttcacctttttttttggagactgagtctcactctgttgcccaggctagagtgcagtggcatgatcttggctcactgaaacctcgccatcctgggttcaagcgattctcctgcctcaccctcccaagtagctgggattacaggcatgtgccaccacgcccagttaatttttgcattttcagtagagatgggatttcaccatgttgtccaggctggtctcaaactcctggcctcaagtgatccacctgccttggccacctaaagtactgggattataggtgtgagccaccatacccagcctattttaactttttaagaaactgccacgctgttttccaaagtgattgtaccattttacattctcattattagta

SEQ ID NO: 28463 - DNA, 1042 bp, Homo sapiens
tagcatccaccaggtgggcgtgtactgtctggccctggttcctgccaacaccttgcccaaggctcctctcggagggattcacatttctgaaaccaaacagcgctttctggaagggacgctgcacccgtgtaatgtgctgatgtgccctcacacctgtgttaccaacctccccaaacctcgtcagaaacaaccaggttagttgaacctaacaacaggatgctctctagtctaacagtggtaacagcggtgcttgtggttagggtgcggccctgctagacctccagtgccaactgcccacgtctttggggctggggtcaagagccagagcgagtgtgcaccccagaatggtgccacctcccgccttcctggaaccagccacgcatgggggaacttaaccacatcacctgcatggtggtttccacctgcctgttaggaaccaattttaatgataaactcaaggatggcatcttagctttgcatggctaggagatggctccctagggctagaaatgctgcccaggatcatcctggagctggacgagctggacacatcacatcacccagtgtctgtgtggcctcggaaatctctcagcaaacggccaacttgccttccctcattttatacatttaaaagctaattttagagactggtttaactttaatgcaatttttcatttctttggtcctgttgatttttagtacatgccaaagtttttttttattaattattgaacacatatcactaaatacatttcatcaggaagatttaatttcctgatttatacataaagtacagtaaaacaaaatatgttaagaattttgctgtgactgaggccaaatcgtatcctctgagatgcgtcgtgtagtaaacttctcaataaggcgtagtttatgttcaagagagaaattctctttgtcacttagcataaaccttgtagctagctttctgaatatttgtatctcagtagaagagttaaatgcctcattcaagtatgttttcaaaataaaaattgtaaataaaatcacgtgatgtttatatatg

SEQ ID NO: 28464 - DNA, 1658 bp, Homo sapiens
ataggcacagaacagcatcctctgaaccaggaagggttcaaaggaaggaggaaaagccacacagcccaggaaggcagcatgaagagtaagccaggcttgatatgagtcggggaccctggtgccttcacaaccgcagaggcaagggaaggagcttggccaccctgactccgttcactgccatggccacagccacctgtggggagtcagagaggggtccagagagggacccagccaagccatgtgatgtccaggatacagactcctgcagggcagcaggggtgagactgcggacagaaggcacagctgctgtgagggtctcgaggtgggagctacagggaggccagtgggactgggctgagtgtggggagcagaaggagtgcgtgagtgagtgaactcacatgcaggtgcaggggcttgaaaagctcccttcccgtgtcccctgttacagtcacttcaggcggtagaccagccgagagtggagtcgggtgagcttagtggacagcacatctgtgggagccgtgggctgctgcacgtcctcccttctctgagcacagggacatgtgagccgccatcgcacacagctctgcatcatccttggtgtaaactcagcgggtttccctgggtcatggggcctccacgtcgctcttttccctgccctgccatgtacagccgcactgtaattgtttagctcacccccttttattggacgttctttcctattttgctgttacaatcacttgggcctgataggtttgtgtcctggaaagagctctggttttggggctcagctgggacatgcagggagaagatggaggctccaacagcatctggggaaacagaacagtcccactccgccggggagggtctggcggtaaccgtagctcacacctccctgtggcccgtcgtcccctcctcttgcctgccctgagcctgcagtgtcattgcccccatttcatacgtgaggaaactgaggacacagaacaagcatccaggccttgtgcagtcaggtggtctgacctgagcccagtgagggaacactgggaccgggcctgggaggccaggtaagagatggtggcctcttgccgtcctgaattggcacagagccagtgctcagtggttggactgactcggagtcacgggcaggaagaacttcctcatggtcaggttcctggccaagaactaggacagacatgtgcctcctgcagggctgggcacagcagggtcactgcacccctggatggatgcccatcaggtgcgctggcatcacctggctgattgtctttgtaggcttagtgaccctctgcccctcctgacacccagagacgggatcccttctcaggaactggagtcattttgcttatttctattaacatctcttatttctttcaaaattcaaagtcaaatttggagcggcctctaaacttcctgacctgacatgagcacatcagtcctgcaggccagcttctgagggacgttattttaatgtcactgaatcaagagagtctcgtgtcatgttttctttaacaagggacatagctctcctccttccagatcctccccggcgtgaaggtcatcatcgcacacaccgagaccaaaggacccttgggagactcacacctgggagaggtgagcaggggcccatgggaggggcttgagct

SEQ ID NO: 28465 - DNA, 1485 bp, Homo sapiens
tatgaaaggcttagaaatctaacaaaatgtgatctggatgctgaaaatgatgagatgataatgaaagaaaccccagaaaacctaaataaatggagagataagaaggctcaacctagtaaagacgtatgttctttttaaattgatctgtagacttaataaaattccaattagaatccaagcaggatttgttcttatagataagctcattatgaaatgtatatggaatgtaaaggaactagtgctatggtttgtccccaccaaatctcatgttgaaatttgatcctcagtgtggtggtgttgggaggtggggcctagtgggaggtgtttgggtcatgggtgtggatccctcatgaatagatgaatgcccttcctcgtgggtagataagtgagttctagctctttcaggtcccaacaagagctggttgtgaaaaagagcctggcacgcccacttgcctctgctcccaccctgtggtctctgcacgtgccagctcccctttgctttccaccgtgaggggaaatagcctgaagccctcactggatgcccaatcctgaactttcccaaccagcagaaccatgagccaaataaacctcatttctttataaattacccagcctcagatattcctttttggcaacacaaaaatggactaagagaactagagtagctgatagaattttttaaaagaagggtaaagttggaggaactatactacttgattttgaagctacagtaatcaggacaatgtggtgaagggacagacacgtaagtcaatggaatggagacgagagatttctacaaatatggtcaatgggttttttttaacaaaggtacaaaaatcaatttaatggagaaaagacagtcttttcagcaaatgttactggaatagttgtcatccatatctaaaaaacaacacctcaacctcacatctcatacacagctgaacttaaaattgatcatagatctaagtgtgtgaaatgtaaaactataaacctccttgaaaaaatcatagaaaatcttcatcacctggacttgggcaaagactttttactctaaaagcgtgatccatagcagaaaatgttgataaattgaatttcatcaaaactaaaaatgactgctctgcaaaaggatgatgctaagagaataaaaaagacaagctaagattaggagaaaatattgcaaagaacatatccagtgtgtgttctgaatatacagagaaatctcaaaactcaacaggaagaaaacaagccaattgaaaatgggcaaaatacttgaacagacactttaccaaagtggatatacagatatcaaatacacacatgaaaagatgttcagcatagccatcagggaaatgcacattaaagccacagtgagatatcacttacacccattgaaaaatgactacaataaaaaaaaaatctgatagtaataccaactgtcatcgaggatgaggaacagctgaaagtcatgcattgctggagggaaca

SEQ ID NO: 28466 - DNA, 1046 bp, Homo sapiens
tatccaatcatccgttccgatcatggactgcattgtatttcaggttgattttggtgtgtccttggttgagaggaggagttcattcagttggttagggagcttagagtttcatttttggtttacacacctatgtccaggtaagagggccccacacaggagggcttgctcagaacctggcttgcagggctgcttacagaccttctatgtctcctgttgtcatgcacaaggaaggacacagccaatgacaaccctcagccatccagggagaagctgtgtctgcagaggacggtcatgagctgtgagtctagagacctgtgattgtcttcaggggcctgtggtcctcggctttcataggagttgtgggggcactggctcaaatagcatccaccaggattctaatcagaatatctcattcacagaaggcagtgggtgatatgacagtacagagggactctgtggggccagctgcatggagcactctgggagagtcactggcacccgtgctagacagatcttcattcaacttctggagcacacggatttagatctctctacatcattttgaaagaccatttatcattctgaaggaaaccactgtaattaactaaggtaacatctttaataggtagaaagaaaaaactgattattttattgccaagatgattacaagaaaagaaacaaacaaaaatagcatgaaggaaagagcaacactagactgagggctttgggtaagaggttgagacttagtagtgaatgccctgggccatcttctgtcaaaagggagggacaatcagcaaagggaaatatgcagtagaggcaaaatcttggttagtaaaagaatcctaagagaaaacaagaagtctccttcctgagcatcatgttggtgtcgggaagatgcacataatcccctcattgcatgtcttacacttttcagcaattagggctcagcatgaatttagaagacaccattcacttcacagcacatggggacacagtcaaggcagcggtgagaggcaaggctgggctttcagtctcagcgcacagag

SEQ ID NO: 28467 - DNA, 1047 bp, Homo sapiens
tcaaaaagtagtttggcagttcctcaattagacagttatatgcatctgagcaattctgctcctagataaacaccgaagacaaatatctacacaaaaacttatacaccaatgtttatagcagcattattcataatagccaaaaggggtaaacaatgtcctaaatatccatcaactgacaagtgcataaacaaaatccagtgtatccatgtaacagagtatcatgtggccataaaaagtaagtactgatacatgtcacagcatagacaaaccttgcaagcattatgccaagtgaaagaatccagtaacaaaagcccatatgatagataatcccatttatatgaaacacacgcaatagggaatccagaggcagaaagattggtgattgccagtgctacaactgcgggggtgcagatgatgtatgtggagagacagaattgaaagctaaacggcacaggaggcagggtgttgtggtccatgcctgtactcctagctactagggaggctgagatgggaggattgcttgagcccaggagttcaaggctgcactaagctatgattacaccactgtactccagcctgggctggtcgactgagcaagaccccatctcttaaaataaataaataaatagaaagaaaataagctaaagggcataggatttttttttgaggtggaaaaacaattctaaaattgattggagtgttggttcccaacatctgtgaatatactgaaaaccactgaactatatacttcgagtgggtgaattacatggcatgtaaactgccaataaagctgttttagaaatcctaatatttgctgtgctataacttcagcaaagtactgcagggcaataattgcagagccaaccctatcattacagtatgacacaggaaaacttaaaactgcacttacgatcaagctatatgcagagcatattagcacaccaaaaataaatgactacactaaagacccatccttcaaggattacagaatttaagtgctgaaaaggagagtaaaactactctgtttttttaaaaaaggtaagaact

SEQ ID NO: 28468 - DNA, 1420 bp, Homo sapiens
attaaaataaggcagaggaagaaacacattgtctacagagaaacagacataagaattacattggacttctgtttagaatccatgcaagtaagaagtgttgaaaaaattagaatacagtgggtattttttatccaagtattcattatttaaaactgcaaggtgaaaataattgtaacaagaacatattcactagcaatctgagcactcatgttattagtgtctgttctggagagaattatgtccccccagaattcctaacctgaagccctatctcccagtgtgactgtatttggaaaaggagcttttaagaagttaaaggttaaataggggcaaaagggtaaggccctaatctgttaggactggggtcatcatccaaaaagaaagagacaccagagatacatatctctctcttctctctctctctgcctccctccttctctctctctccctctctccctctccccacatacatttgttaaattgaggttttttgttagaacatatatagtggcattttaatatagtattactctacttaaaacatacacacacacacacacacacacacatatacaattttgataaattcttttttgaggataaggccgggcatggtggctcacacctgtaatcccagcacttggcgggattatcatctgaggtgggtggatcatctgaggtcagaggttcaagaccagcctggccaacatggtgaaacccgtctctattaaaaatacaaaaaattagctgggcgtggtggcgggcacctgtaattccatttactcagaatgctgaagcaggagagtcccttgaacccaggaggcggaggttgtggtaagccgagattgcaccattgtactccagcctgggcagcaagagcaaaactccgtctcaagaaaaatacaataaaatacaaataaaaaaacacaaaactgggatgtgtccctgtcttttaggcagatatactttaccattactaaaattgagcttcagaaacattaagcatgctacacaaacttagctggaaatgaatactgaaatggaagtttgaatccaagatgatttcttttgaatcccatgctaatgctgttaactcctatagacccttctcaggtgcagccagagagacactagcccactgatggacggacagacgtgggcagggtccgtgtcactaaaccacccaccactgccacagctgcctacaacagacacatcagatgacactccgggcatataaatgattttcactgaggacttactggttttaataataggtcctggtgtagagaagtccctcaacctattgtgcaatgagttttgagaagcgggtaagctgtatgttttgtggttttgtttcataaatgcatctacaggaagaccaatattgactgaatgaagctttcatttaaagagctaa

SEQ ID NO: 28469 - DNA, 1050 bp, Homo sapiens
tcacgagaattcactcatgattgtgaggacagtaccaaggggatggtgctgaaccactcatgagaaatttgccttcatgattcagtcatcttataccaggatccacctccaacattaggaagcataactcaacatgagatttggtggggacacatattcgaattgcctcatcagtctttgagtataaagacatccatagcaggctttatccagccagcttctttgggattctttatagggtttcaggtctatagcatatccactaaaatattcctacttcaaaaggcaataaagtaagtagtattatcattcttcaaaaagttataatggtagtgtaggcattcatagtatgatttagttcatttgctactgtttctattctatcaccatattaacactttcctacacaagtctatattcagctgggtttcagttgagcacaaagtcatccttgtactaccaccgatagctggcactagctctttgatactgttatcattctgctgtagaaagtacccgtgaactggaaaaagtccacaatagaatagctagtcattcaacactatcaaattttaggtgactttttgaaaaaatagtatctcttgttgcaagaaatggtccatctgtgatttcaagtctctcgcttgagtgaattggatggaagtggtgaatttcagccaaagtggccaaagaaatcctgttcctgtgataatgacaccatcagcctctgctcctctgtcttcacttctgccacatgttgcctgttctccgtgactttggtaagagcttccttgtgtatgaggatgatgtccaggatgttggtctggtgtccctgagacagcactaacaggtccatggctgggtccaaggtccttcctggactcattggcaaagagcttactgatgttcttgaaggcatctctggtgaagtggatggcctagtcaagttccaaggcctggctgaggctgaagaaaaactggccaccttctgatgctctttctaaaagcctgtcactgtcatctgcttgcttgtcaactcattggctgtga

SEQ ID NO: 28470 - DNA, 1026 bp, Homo sapiens
gaccacagcaggagagttctggaatcctatgtgagggacaaactttcagaccaaagcaggagtgttcttaaatcctatatgaagaacaaacattcagaccccaggagcactgttctgaaatcctatgataagggcaaacattcagaccccaacatgaatgttctggaatcctatgtgagggacaagcattaagaccatagcaggaatattctggaatcctatgtgagggacaaacattcagacccttgtagaagtgttctggaatcctatgtgattaaaaaacattgagaccacagcaggagtgctctggaatcctatgtgagggacaaacattcagaccccagaaggagtgttctggaatcctatgtaaaggacaaacattcagaccctcgtagcagtgttctggaatcctatgtgagggacaaacattcagaaccttgtagcagtgttctggaatcctatgtgagggacaaacattcagaccctcccagcagtcttctgggattctatgtgagggacagacattcaaaccccagcagcagtgttctggaatccgatgtgagggacagacattcagaccccagcagcagtcttctggaatcctatgtgagggacaaactttcagacactcatagcagtgttctggaatcctatgtgaggtacaaacattcagaccctcatagcagtgttctggaatactatgtgagggacaaccattcagaccatggcagttctgaaatgttatgtgaaggacaaacattcagaccctcgtagcagtgttctggaatcctatgtgaaggacagacatttagaccctcgaagcagtgttctgcagtcttaagtgaggaacaaaaattcagacccttgtaacagtgttctggaatccttttttgagggacagacattgagaccccagcagcagtggtctggaatcccatgtgagggacaaacattcacaccccagcaacagtgttctgtaatcgtatgtgagggacaagcattcagaccccagcagcagtgttctgg

SEQ ID NO: 28471 - DNA, 1044 bp, Homo sapiens
ttgaatgctgtctacttcattcattaggcccttagcatattctccagaggtttaaaaaaaattccaaaatcatatctttgtctgcttctgaagcttgctctgttgacacaaattgtatttttttctttttttggattttagtatgccttgcaattttttccctttattctcatgcatgaagcacccactaaaggtgactgctgttagtatagctttagtaatgcggtgatgaggtgacagggcaggtgatgctctcttagtctctttaggctactataacaaaatactttagactgagtaattcataaacaacagagattattgctcacagatctggaggctggaaagtccaagactaaaggggcaggatatttagtgtttggtgaaggtcaagcattcagacactcgcaacgactatagtgacagcagcagtcttcaggaatcctatgtgaggaaaaaacattcagaccacagaaggagtgctcgagaatcctatgtgagggacaaacattcagatcacagcaggagtgttgtggaatcctatgtgaggggaaaactttcaaacccttgtagcagtgttctgcaatcctatgtgaggggcaaaaattcagaacctcgtagcagtgttctggaatcctatttgaggaacaatcagaccacagcaggaatgttctggaatcctatgtgaggggcaaacattcagaccacagcaggagtgttctggaatcctatgtgagggacaaacattcagaccacagcaggagtgctctgtaatcctatgtgagggacaaacatttcaaaaccttgtagcagtgtgctggaatgttatgtcagggacagacatttagaccctcacagcagtgttctagaatcccatctgcgggacaaacattcagacactcgcagcagtgttctggaattctatgtgagggacagacattcaaaccccaacagcagtgttctagaatcctatctgagggacagacgttcagaccccagcagcagtgttctggaatcctatgtgaggtacaaacattcagacac

SEQ ID NO: 28472 - DNA, 1035 bp, Homo sapiens
aaaagttagctgggcatggtggcgcgcacctgtgatcccaggtacttgagaggctgaggttggagaatcgcttgaataaggaaggtgcaggttgcagtgacctgagatagtgccactgcactccagcctgggagacagagcaagactccatctcaaaaaaaaaaaattatatttacaacagcattataaaaattagaaataagcttaaccaagagggcaaaagatttgaacacagaaaactacaaaacactgttaaaagaaattaaacacaaataaatgaaaagaaaagctgggtttgcaaattagatgatttcatcttggaatgatgtcaacactactcgaagtgacctagattcaatacaatccttataaagattccaatgacatttttgataaacagaaaaacctatcctaaaactcatatggaatctccagggcccatgaataggcaaatcaatcttgaaacagaacaaaattaaacgtctcaaagcaattacaaaactgcaataagccaaaaagaaaaaatgtggtcatggcataaagacactcttgacacacttatggaccaacacaacagagacctcagaaaccaaccctggcatatatggtccgatgatcttccagaaggatgccaagaccactcaatggaaaagcacagtttcttcaacaagtgatgatgggaaaattgtataactacatgcaaaacaatgaagttggactcttaccttacaccacgttaaaatcaattcaaagtgaattataaacctaaatgtaaaactagaactatcaaactcctagggaaaacaaatttggaaaatgctttatgacgatgaatttgtcaataatttttaggatatgacattaaaagctcaggcagtaaaagcaaaaatatatcaaacctaaaaacttctgtacctcaaaggtcacaaccaacagggtaaaaggcaaactgtaaaattaaaaaaaataccagttgagtgtcccttatttgaaatgcttgggatgtgtttcagattttgtaatatttgcactatt

SEQ ID NO: 28473 - DNA, 2001 bp, Homo sapiens
gaaagtcaggttttatttgaaacagaaatatcacggaaactctttgatacccttaatgaagacctctttcagaaaatactggtacccattcagcaagtattgaaagaaggccacctggaaaagactgagattgatgaggtggttttagttgggggctccactcgtattcctcggatccgtcaagtcattcaagagttctttggaaaagatcccaacacatctgtagaccctgacctagcagtagtaacgggagtggctatccaagcagggattgatggaggctcttggcctctccaagtcagtgctttagaaattcccaataagcatttacaaaaaaccaacttcaactgaattctgcagaaataatggttatttgtgaacttgtctgatgatctcttcccatttatcagattaccttttccacaaaagaaagtctctaaaatatcacagatttacctagagggcaacatttagatacaggaaaattttacatagtgttttgtcttaggattagacgtgaccagattgatcctgtttgattttggagagatcctattctaacaaatactctaaaatgataaaattgaggtacaactctcttaaaagagtatggataactatattttctggattctggaggttgataaccatatgcacttaacattatattctataaacattaagtagtgccagttatgagattcccagttcttactaaattgtattagcaggagctggtaattacttgtattatcacatgtaactaataatttgaactatacttgaaggaccgtgttgatgtcaggtatttacagtggttggaagatagcagtattattagcataagctgcatacgtaatattcagtaactgccatattatataacaaatttacattcacaaattcagtatcctgttaagtgtcatattcttgtaatctgcattctccaggagttttatgtgtttaatagatgaatttattttatttctaaaggtattcaaatgtttcagcaccatataatagaaatacccaattatattctagttcctttatgtcctgtacatcattctctgcttggatttccattattctgtttggttagagaataaaattggtaattgcatttgaagaatgtgttaatgtcataataaagccatgattgctatcttatttttgttatccgagacctttgcaaacattggcaaatagcatcaattacctactgtatttgtttctttgtttatattttcagtaagccctggggaatatagcatggaattgagctactaaatggttttggttccgttttacggagatttttcctcatatttagttttgaatgaggaaaatgtgctcaattataaaagctgtgttattgttttctattattatttttaaataatcacacttggactcttttcaaacattaggttagtttgtaatgaaagcaaaaaatttgtgaatactggaagtaacgtggaaatctaatgtggaagccattgtggcaaggtttctacaaatcggcatttggagcagagttgtttgtttttgttgtttgtttcctttaagaaaaaccacagggaccaagaaagaaaatataacagtttgatttctgtcatacccattgtatttgaagatatatggatacagattatatatatatatacatattttccttaatagaggaatgcttcatattattcaaaaattatatcctgatcacctttttttgttttttattgtaaagtatctctgctttatccattgctgaattcgataggatgttgaaatgctggtcaccaaaaaaggaaactgagcaaattcatttcaacaacatcaaaacttcagcttctcatagtaaaaagctgaatgttactaatatttttcatatctaaaaaaaaattcttagcaatgaaattgctgttaaaacacaaatttcaatcaaatacttttgtgtatagaaaatatgtatagtaggtagatagaaaagtataaaatgtt

SEQ ID NO: 28474 - DNA, 1050 bp, Homo sapiens
agctggcagattcaaatcctcaaaacacaatatatgatgccaaaagattcataggcaagatttttaccgcagaagagttggaggctgaaattggcagatacccatttaaggtaagtgattaatctaaaatctatattaattttagtgtactcttttagttaatgctttggcttcatgtcacaaaacattctatctcgtctagttttatctattaatacatgaaagttctgttatctcacataaccagaaattccacagcagctataggatcagttaatcactgactccataatgctaacaggtacttaaggccttgccattttcttgctgtcccatcctcagcatgtcttgcttagctctttcaaggtagcaggaaggttgatgaagccctgtgtaccatagatagatattctgtgtgtgtatgtgtacatatttatatacatataaagagaacataccaggtgtgctattttttgctatttaatatgtcatggataattaataggatcatgtcattatctttaatgattttgtggaatgactattccattattaattagactagtctctatcagtgtacttttttgtggtttttcactaatgttggagattccggtaatatccttacttatctttgtacacttctctgaaagtttcctaacttgaatgctagaagtctaattgataggtcaaatgtgtacgtttttaaggcttttgatttatttttctggtttgctcaccagaaaggttatatgctcttaaccataattttttagagtggctgtatcttcgctagttattttttttaatctttaacagtcagataagtgaaaaatagtatcctgtattaatttttatttattttgattttttttagtgagatcagaatttttagaattttattgatattttaattttcttttatggtccatttttctttgtccttttttgttttggtgtgtttttcttttccttagtgagctataaaagaccttcattatatgtttttgttatcttttccttaccttttttttttcactgatgtttttg

SEQ ID NO: 28475 - DNA, 1030 bp, Homo sapiens
agaatcttttcatgtgctttttagccatttatctatctttgtggagaagtgtttttcaaatccattgttcgtttttaattgggttatttatcttcttattgttgagttttaaatgttttttatatattctggatgcaagttttttatcagatatatgacatgcaatataatatattttctccaattctgtggattgtatttttattttcttgatggtgttgtttgtagcacaaatgttcctaattttattgtagtccaattatctttttttggtcacttgtgcttttggtaacatatttaacaaaccattgtctaatctaatgtaatgaagatttattcccatgttttcttctaagaggccaatagtctcttaaattttggtgtatcatttatttcaagataattttactgtacagtatataggaagagtccaccttcattcttttgcatgtagatatatagttgtccttacactatttgttgaaaagactattcttttcctatttgattgtctcggtactcttgttaaaaatcaattgaccataaatatattgtcataaatatatggatcataaataagtgagtttacttatggactcccaattctactttattgatttttatgtcttatgtccattctctttttcaatccacttcaacagggctctgtctccagtactccattaaaatagctgtcgccgtcagtagtgacctctgtgttgccaggtccaatggtcacttttctttctccttactacttttcaactgtatttgacccaagtgctgatttccttacatataaaacatccacttttcttgtttttttttgactaggcatgcttctggcatttcttcttcctcatagcttcctttcttggctctgctttctttctcatcccttgaaacatcttcctgaggcttgttcctggatgctccattgaatctacattctccccttaagtcagctcatctactctcatgattttgtttttcacaactatatctctagctatgacctcttcacttatct

SEQ ID NO: 28476 - DNA, 1074 bp, Homo sapiens
ataggagtggtgagagagaacgtccttgtcttgttccggatttcaatgcttaaagcttttgcccattcagcatgatattggctgtgggcttgtcataaatagcccttattattttgagacatgttgcatcaatacctagtttattgaatgtttttagcatgaaggggtgttgaattttatcaaaggccttttctacatctattgagataatcaggaggtttttgtcattggttctgtttacatgatggattacacttattgatttgtgtatgttgaaccagccttgcatcccagtgatgaagccaacttgattgtggctgataagctttttaatgtgctgctggattcgacttgccagtattttattgaggattttcacatcaatgtcaatcagggatattggcctgaaattttcttcttgttgttgtgtctctgccaggttttggtatccagatgattctggactcataaaatgggttagaataaaacacctatgaatacaacttacaagggatgtgaagaatattttcaaggagaactacaaaccactgctcaaggaaatgagagaggacacaaacaaatgggaaaacattccatgctcatggataggaagaattaatatcgtgaaaatggccacactacccaaagtaatttatagattcaatgctatttccatcaagctaacattgactttcttcacagaattagaaaaactactttaaatttcatatggaaccatatgaaatttactctttttttagagcttatatagccaagacaatcctaagcaaaaagaacaaagctggaggcatcacgcaacctgacttcaaactatactacaaggctacagtaaccaaaacagcatggtactggtaccaaaacagatatatagaccaacagaactgaacagaggcctcaaaaataaaaccacgcatctacagccatctgatctttgacaaacctgacaaaaacaagcaatggggaaaggattccctatttaataaatggtgttgggaaaactggctagccatatgcagaaaactgaaactgtaccccttccttacaccttatatg

SEQ ID NO: 28477 - DNA, 1040 bp, Homo sapiens
tgtatacagcaaaaaggatgagcaaactagaactacagtctcaatatggttgtactgtataaaaatggaatcaaatgaaagaagccagacacaaagaagcacgtactatacaattacattatgtaatatctagaaacagacaaaagttaccaattgcattagaagtctgggtagtggttatcctttgagggaaaaaatgactgaaagagaggataacagtgtaggtcctggaatgctgataatgttccatttcttaatctgagtgttggttacatgagtgtgtcacacttaattgagcttacatttgttttgtattattttgtgtacataagtgattgtttagtaagatcattatattctaaactataatcaaattttatttaaagataaaataaacacaagtacattttagacagaatgtataatcaattttacctgtttatgaagtctctgtttccaaggtgacagcaaaagaagggacaataatcaagagataggaattggtggcagatgctccttggtctctaaaccactactgtagaatgaagtgatcaatagcttaggaattatatttcatgcttcttctttaccttgaatggcttcaaataaaatctgctttgtctgatattagtatagccactccagctttcttctagttactgtttacatggtatgcccttttattttcaacctatttgtgtctttgaatctaaagagtgtctttgtagacagcagataggtggatctctttttttggtccatctcccaatctctaactttttattgcactatttattccatttacctttaatgtaattactaatatggtaggatttatgtctgatgttttggtagtggttttctatgtcttcttgctcctttatgcctatattactgcattcttttgtgttaagtagatattttctagtgtaccattttaattctcctgtcatttatttcattatttttttgattcactttcttagtgatttcctgaagattacaaagaacacttaatttacaataatctagttaagaat

SEQ ID NO: 28478 - DNA, 1046 bp, Homo sapiens
ttgttccactttaatttttatttgctacaggagcatcatggttcaggttaagagatcaaactagttgctttatcagatacacccttacattctctttctcatgcaatacagatctgtcagccacaaatgttaaacctaaaatatctaccatatgttttctctggaaaaaggagttctatgaggttgagaactgctgtgtaaaacactgtatattactaaactgtcagaatgtctatgagttttctatctcaagaatactggtattagagaataccagtcttccctccatgaaagttattgtacgtaggttttacctaggatataccagggactcaagatttgcactaaacacaacagatgatcctgccttcatggagataacattccagtaagaagatatacattataattgtatggacatggatcatattcttcttagtcctctccctgtttccatctgcttttttgataataagacattttatttccacaaataaaatttccctgaagactccaggaatattatcaggttatctgtaagattcatttggaatttacacatttgtcatcttgtgttgtcgtctaccttttaaaaaatgtgcaagtgtccacgtatgtttattgcagcactattcacaatagcaaagacttggaatcaacccaaatgcccatccatgatagactggataaagaaaatgtggcacatatacacaatagaatactatgcagccataaaaaaggatgagttcatgtcctttgcatggacatggatgaaactggaaaccatcattctcagcaaactaacacaagaacagaaaaccaaacactgcatgtcctcacgcataagtaggagtggaaaaataagaacacatggacacagggaggggaacatcacacactggggcctgttggggggtgggggctagggaagggacagcattaggagaaatacctaatgtagatgaagggttgatgggtgcaacaaaccaccatggcacatatatacctatgtaacaaacctgcacgttatgcacacgtgctccaga

SEQ ID NO: 28479 - DNA, 1062 bp, Homo sapiens
actttttattttgagcagctgccttaacagccttcgtcttgttacatcacatgagatatatctctggaataggaagagaaaaaagacatgactgagcaataatttttgactaaaacttaaaattacaaaaccaaaaccagagatagatgtccctgaagttgtatttttatagtatgtgagaacacaattttcttatcctagttttaaggcattcctctggacccaggatttttgtttagtttcattcacataatcaaactcttttttttttttttgccatagactaatgcattttggtgtaatgatctgagcccttatccagaaggcatctaagactcatgtacaaaaatagatttcagggctaaacattctaaaagacaattgagtgcttcttttttctccggcccctagatgtaaatgaataacctctgttcactaactcttaatgtaatataagggataaattatgcttgtttatttaattgtgcttaaccagagtactaggttggagtcaaaccacagatatatttgtgagatgtgacaaaatgtagcttttagcccgtaatacccaagtcatctgggaacataactgatgacagtgtcaacacctttcaggaattctggaggtgcctttgagtttagaaattcgtaggttctctagaagcaacagtagcatactaaattaacacataacatttcaagctacatttacataattgcagtggttatgattaatacaaattatattaactgcctgttttactccttatagctgattggctgaatttaccagtgggtttggtatgttcaacaaatgatccaaattaccttttcatttcagttaagaaactaatcaaagcaaatacactttgatttgttgagaggcagagattctccctaagtggcaatgtccttggccttctaagctaaaacctaaatggaactataatatatattttgatgctttatctcacttgagttttttattctttaactgaagggcagccatggaccataaatacatagaagataaaaatatattgagcttaggagtttggtctg

SEQ ID NO: 28480 - DNA, 1027 bp, Homo sapiens
gtcatctcaaaagtcttgcatgctagaatccagagaaatatagagataagcatcaccaacatttattgatgaaacaactacttaataacctccagaggtgctcacgcatacacagcacatgaaaatagtccagatagaaagtttaaagggatttcacagtagaaaccatggagatagtgtgtgcagtaacccgtagtcattgctgccctcatagtatctgatctgaacctggcatagcttcagaaaaagccaggtgttcaggctaaaatgagaatgagaaaaaaggagaaagttgctttcttcttatgtgaaaaatagggaatgaacattttatagtttggtagtagaaccagttgtacgagttctgcactcgcccatagggcttagcctgaagggagaaaaatatttgtattcaaaaatcactttaagacttatgggaagatatctaaagttggtgtatagaataaagaactgagattacagttgtatatctgatttgttgggaccacgtttgaaacttgaactactatattttaaaagttttttttttgagtgacaatttccagttctgtttttggcatgaggaagtgatacaagaaagcttcctactcttgcacttctttgtgtgttcccttattattaagttttgctattaagtattcatttacagtgttctgccagataatttattttagatgtcgagacaagatcatttgtttattggatccaggtattctgctattcttggtttgaagaggaagtagctttaagtaagaaattcccacacattattaatatgtatgcccctctaggtgagtatgtatgtgtaggagagagacagacccacagctagaggcagagaatgggacacagaaaaaggagacaaagaaaccatggtgtctcaggtaataaaattacttgcaaagttattgaataatgatattgcatttgcacattgtacattcccttttctttcaagtttcagtatctctcaacagtctaggtgctgtatggctgctattgcaga

SEQ ID NO: 28481 - DNA, 1015 bp, Homo sapiens
gcaactatatgccaataaattggaaagtctagaagaaatggataaattcctagacacataaagcctaccaagattgaatcatgaggaaatccaaaatctgaacagatcagcaacaagtaataagatcaaagctgtaataaaaagtctcccagcaaagaaatgcccaagacccaatggcttcactgctgaattttagcaatcatttaaaggaaaactaataccaatctgattcaagctatttcaaaaagtagaggaggagggaatacttccaaactaaatctacaaggacagtgttatgctaaaatcaatacaagacaaagatacatcaacaacaaaaaaaatgtataggccaatatccctgatgaacattgacgcaaaaatcctcaacaaaatactagcaaattgaattcaacaacatattaataaaaatcatttatcatgaccaggtgggatttatcccagggatacaaggatgttgatacacaaatcaacctatgtgatacatcatatcagcagaataaagaacaaaaaccatctgatcattttaattgttactgaaaagtcatctgatcaaattcaatatctcttcatgatataaattctcaaaaagctggatataggaggaacatacctcaacacaataaaagccatatacaactgacccaagctagtcttctcccgaatgaggaacaaccaaaaggctttcctctaagatctggaacaaaacaaggatgcccactttcaccactgttattcagcattgtattggaagcactagctagagaaatttgacaaatgaaataaagggcatctggattgaaaaggaagaagtaaagttatccttatttgcagataacatgatcttattttgggaaaaacctaaagactccataaaaactattagaattgataagcaaatttagtaaagttgcaggatacaaaaccgacataaaaaatcagtagtatttctatttgacagcagtgaataatctgaaaaagaaatcaagaaagtaat

SEQ ID NO: 28482 - DNA, 1003 bp, Homo sapiens
aatgaaactcaggaaatgcagtgatgtaatagaatgatctagattccagtcctgtcttggccattaaagctaccacgtgaccttagaggaatcagttaacatctttgggactcagttttctcatgattaaaatgaaaacattggattagatcaatggtcttcaactgtgcccctaaaagctgtaaagtgttttaggacatattaggtgaaatatgatttgtcttctctgtatcttttctgcagcttagcttccttaagggctggtataaaactttgccataatttttctttactatgtaactgatggacttacattttatcaccatttatggtggaattgaggttctgcctttcacctaccccaataccactcccactgtcaaccttatgtctttcttatttggcttctcctatccaaggaaaaactcaagaaccacttctttataccttttttttttaaacctacccagctcatttaaattatttattttccctgtgcttcaatgaaatgagcactgcataaccacgtttatcctgttctacctctctctgtattatttctggctcaaagagtagattgcaagtttcatgagagcatgactatagcagcctcttaattttgcctcttcactatcttttccccttaggtacaacttaatggagcccctggccattatcaccaagttattaataaactcaagttaataatttcagtttcaaaatatctgccaaggatggccaccctgcaggctgcaaccctttataggaaataaagctctcctttccaaactaaaaaataaaatgaaatagaaaattaaaaatttgctggccgggcatggtggctcacacctgtaatcccagcactttgggaggccgaggcgggtggatcacgaggtcaggagatcgagaccacggtgaaaccccgtctctactaaaaatacaaaaaaaaattagctgggcgcagtggcgggcgcctgtagtcccagctactcgggaggctgag

SEQ ID NO: 28483 - DNA, 1033 bp, Homo sapiens
ctcctcaggctcggtgtagtggctcatgcctgtaatccctgcactttgggaggccgatgtgggaggatcacttgagctcaggagttgaaaaaaaaaaaaaaacccgcaacaactcctcattcatttatgttttattatgaggttacagaaatttacccacatctttaggctcacttctagttcttttgctttttctaccacatctgcagttgcttcttccactgaagtcttgaattcctcaaagtcatccatgaagttgcaaatgttgatatttgacctcccctcatgaatcatgaatgttcttaatgacatctagaatggtgaatccttttcagaagcttttcagttgactctgcccagatccaatcagaggaatcacttttgatgacagctaaagccttagaaaatgtgtttttccaataagatatgaagtcaaaattactctttgatccatgagctgcagaatggatgttgtgttagcaggcataaaaacaacattaatctccttgtacaactgcagcagagctcttagtgtacaggtacatggcctgtaatattttgaaaggaatttttgtttttgtccagtaggtcccaacagcgggcttaaaatattcagcaaatcatggtgtaaacagatgtgctttcctccaggctttgttgttccatttatgtagcaaaggcagagtagatttatcgtcatttttaagggtttaggatttttggaatggtatatgagcattggcttcaacctcaagttccagcttcatcagcctttaccaagagagtcagtctttcctttgaagctttgaagccagatattgacctctctctagctatgaaatttctagatggaatcttcttccaatttaaggctgttttgtctctattgaaaatctgttgtttagtgtaaccaccttcatcatttatctcactcagctggatcttctggcttttcttgctgagcttttctgtcagcatttgctgcttccctttgcagttttattgttttctcccttaaatcgtatgagccacc

SEQ ID NO: 28484 - DNA, 1083 bp, Homo sapiens
gttaactgggttttcatctttatctaggggaggtaatttgaaaaggaaaaatgatgaaaagcttgatggaactggtattttgaagcatatactcattcttgatataacctaaatccataccagatcttactaaccttgacatgggaaacagcaactaaaagaaaccaaattagtatgatcagttcttcataaacaagtggtaaaataaagatcatcttacaaaaactttaaaatactctaaaaatatgtatatttttaaaatactttgccaggcatggtggctcacactggtaattccagcactttggggggccgaggcgggtggatcacttgaggtcaggagtttaaaaccagatgatagatgatagatagctggcttaaatcttgtgggttttctaccataatattagtcacgcatgttttctaaacccacagaactctctgtaggataaaatacttttttattctttaattttgtgcctttttattaatttatattccagggaaaaagatatattggatctgaaaccatcattttaaataacattgtcatatcattttaattctcctatttccatagaattatgacagcccactccttattttgcagaccaaggctccaaaaggtttacttgctgtttacagcatgttctactaggaatgctgcctctgctaggtgctaagatgtaaagatgaaaaagacataattcttgcccataaggagtttatactctcatggggaaccaggccttaacgaaccaaaacacaagcatacctcagagatattgcaggttcaattccagacactgcagtgaaatgaatacctcagtaaagcaagcacattttttggtttttcagtccatataaaagttacgtttacactatactgtagtctgttaagtgtgccatagcattatgtctaaaaataatgtgcataccttaacttaaaaataccttatagctaaaaaaatactaatgatcctctgaaccttcagagaactataatctttcttctggtagaggccttgcctccatgttgatggctgccgaagaatcagggggaggttgctgaaggttggggtc

SEQ ID NO: 28485 - DNA, 1065 bp, Homo sapiens
taaaaatggactttaagaaagttgtttctgaacatgcatgacattttaaggcacaatgaaaccatgtccatgaacactcggtagccatattggatctgctccccttggtggggcttgtttccccatgttcctccttcactgcctgcgaatgttaactaccaaataaattagttggacaaagtccaagtgcattggctttctgtgcttgagacttaatgtatatcacctctgcaggattggagcagaacaatctaagagagtaattttgtggttgatattttctttatgtgtattatgtatagaagcacacatggcagttatttttttatccacaaaatgacattgtgtagagaaagttaccttcaacattatgatattagcaaagcagttttctcagaatttatacccagttgctttttgactgaagtagaatcaggacaagtacaatattttaagtgtgatgatttaaactgatattttggattttgtgggcgacacttaagaaatttgtttgaggggataacatgttggactgtgtgaaaacaagttagaatgaactagacttattattctgaaggatttttctcctattgagaaacaattttgggggtccatgaaatgaaaaggtgtgtatattaagatacatatttttaggtatgggtattttaaagatctcaggtttgcaaaaagaaaatattggaggggaaatctatatgtgaggaaatggttagtgtgattcattgcatcctgcccttgcctggagtctggtgtgccctaaatgtcatgtatgacccaagctcacctgctagtaatttctaatttactgtcctaattcatcgatttgttatcactaattgttcttcatttacttctgtgtagtttccagtacctaaagggttgaaaggttgctgtaattggcacccgcagctgctctttcttttgacaggggataattttgcagcctatgctttgtgtgacagctgcctaattgggcattctccccttgtagcaagcctgcctcctccagcctccctgctgacaaatggtggtggattatagatgagg

SEQ ID NO: 28486 - DNA, 1026 bp, Homo sapiens
tcttctacggtgattcgcccaactctagaggtttggtcgtttaaaaaagtttcacaaaatgaagttgatgtgttattttgcaggattgagtaggcttcccctcaagtctttccttctctcctttgtgtgaccttcccctccacttgcctcaacctgatccctgatgctggcggtccttttctgagagtacagtctgctctctggcagatatttacttggccctggtgactcctgttctgttttactccctactctcttaccttggctgatactctgttaaattctttctgaggtctcagcgggacagtcagtctctagagtatctgacgacgctcttcaaattacattggtgctgggtcttccctgagggttctgggaatgcgttgtgtacctttcagctggatcggaataccaagatggctgctagttccgacacttgatttactgacagcttcatactgtttttactcgtagtgtttttattgtgtgatgatgtcatgcaagctggaatttgaggacttgatatcattatgagtgatcatctaaaaacatgaagctgatagaatgttgggtagtttttattttttaattctgtgtcctaaacgtagtcgggactcaagaaatgtttgctgagttaattttttttctcattagcgttggatagaactcttagctccaagaaccacattataatttaagtcggacatctctgtcttatagccaagggaaatacgctctcacactgttctgaaaaggtacatgtcactgtcttagcaaaacccttacctaatacttaatgaaggttgatagttcaaagtacaaaattcagacttcaaacaggatctgattctgcctctttaaagcacccctgtaagaattactacttttttgaaactttgtagaaatcatttttttagcacagtgtttatcaaacctaggcttgagatatagtaattatttttatcgtttttatctttgattcaataaagttgctatgaaataacaccctatcttatagcactgttt

SEQ ID NO: 28487 - DNA, 1030 bp, Homo sapiens
tgtgctggcaggcctgtttactgacatccttgttcgagtcttttacaaccaccagatcttcctaaaactccagcttgcttgtgttacttgtctgatcaaaaataatgtagcaattgcaatagcataatgaacatagaaaagtaatagaccttccttaatcctaacttactgttactatgggaaacattaatacaattaacatttttttaatttggtatctttaaataattgacttttccttaagtcttttacttagtatcttaattgatataacttacgttgtttggggaggaagatccctactagactaagcctccatatcaactcagattttataaagtcgctatatgcgaagcctccatatcaactcaggtttttttttttttccttttccatgaaaggtttcaaatgaaggaatcaaaataattttaaaagtgttgatcaaactgtcaatacactttctcttcttacacagaccctggtcttttttcactgaaattaactgttgtgaacctgatagtctccttgattctctgctacatttgcccttcaaccatgtggcctgtggtttgcatatctgaaaattttctgattctaacgtcagagcttatgcattttatttagataactagaatttcttcattctggattagaggtatatgagtaattttcaaacctcgcttgcttcctttttgcatttatttatttaaaaaaatgttcatagtacagtctatgtaagcttctagcttgaagctttgtctcctgctgttgccgcccctctctgcacctcctccccacctgccatcttctagcctgtcctccaagctagtgcttctcaaaatatctgcagtaaaggccaataatttgtttgtctgtttctattttattttttttagtaactcacttttattgtctttttaaaaagctatatgacagaagtttttagcaagactacaaaatctaagtccacatctttcatcattaaatttaattataacttttatagaacatgccatcaaattattttgtc

SEQ ID NO: 28488 - DNA, 1011 bp, Homo sapiens
ctaataattatttggttgcaagtcacttttcgtatattcatttatattttacttataattggaatttaaaatcaatgacgcaattatttgtaaatactaaaatttttttattcagatataattaggtgttaatcactggttggcagtctgaaatctgcttttatatttgatgaaacagttgatattgaaccccatttctgaacttctaattctattaaaattaacattataatcatgcatattcctgtgaccgccccgccacaagatataattggtttgttgttgttcttaattttcaacacctttgttttaccacatagccagaatgataagcaatgctcactggatccaactaggagttggataagtaaattataggtagccatctggtaaatatacacagccaatgagttgttcttagaaaattgtcaaatttagatttttcttccagattaaaaaaaaagacagccaggcatggtgtctcacacctgtaatcccagcactttgggaggccaaggtgggcagatcatgaggtcaggagttcaagaccagcctgaccagtatggtgaaaccctgtctctactaaaaatacaaatattagccaggtgtggtagcgcgtgcctgtagtcccagttatttgggaggctgaggcaggagaatcacttaagtcggcagtcggggttgcagtgagccaagattgtgccactgcactccagcctgggtgacagagaaagactccgtctcaaaaaaaaaaaaaaaaaaaaaaaaagacattataatgtatagtgaacaactttgaaaactaaaaatttataaaaacaaattactgatagtgattttctatattcctttcacatatttttaaacgtttttagattttaaagatgattatgtcaaatgtgttttttctaaaacgtgttgtgttaaatatgttttccttttaaatgaacagtccatggtcaaataagcttgggagatgttgggtcaaagtatagaatgtcttttcaatat

SEQ ID NO: 28489 - DNA, 1047 bp, Homo sapiens
ttctaataggagtactcatgtaattacacatatggttattgttaagttgatgtgtgaatcacatccttctaggtatatataatcagggcaagtgattgtttcctactcttcttagaattcctatctgaatttatagtcaagatttaattgagtccaagatctataatttggggcatatgacttaaccagccctgctcagtatctgttgctcctctatgaaatggaatctctgctcatttcaccgagttgtgaaaatcaaatacagtcatgtccatgatagcattttgtaactggtaaagcattactcacttaatgatgctcccatttatgtgtcagacctgtctctttcccacagctatttagtagggtgctgctggtggccgtgtgatagctcagaactacatctgtattgtgcactgcctcttaggagttttatacttgtattagggagtggaaaattttagattttttcctatttgcatcattttatttgtggtgtttgttagaaaaataatatgtatgtatttactgtagagaaattagaaaatgcaaatcagcaaaaagaaaaaataacaattacctctaaatgcagaaataattactgcatttacttttgtttaaaacaaaaattcaattatgctgaaataatgttgtttcctgtttttatcacttatatagtatataatttcatataatttaattttcttgtataatattttaatgactacataatattccatgatgtaatatactgtagtttatttaactatttctaattttttcattttgacgttttatggctgtatacaatgtactgcacaaatataataatatgtattttgaacatccttatggctaaatatttacacctatcctccatgatttttttaattaggataaatcttagacatggaattgctgcatcaacggacatataacatgttaaggcatttaatttttgttacagttttatcgaggtataattgatgaataaactgcacatatttaaggaacaatctgacaagttttgacatgtgtgtacacctg

SEQ ID NO: 28490 - DNA, 1089 bp, Homo sapiens
agtcctggcacatagtatgcagtatttttttttttttttttttgagacagagtctcgctctgtcgcccaagctggggtgcagtggagcaatctgggctcactgcaagctctgcctcccaggttcacgccattctcctgcctcagcctccagagtagctgggactacaggtgcccaccaccatgcccagctaattttttgtatttttagtagaaacagggtttcaccatgttagccaggatggtctcgatctcctgacctcgtgatccacccacctcggcctcccgaagtgctgagattacaggcgtgagccaccgcgcccggtgatcattttaatttttcagctttctcagtggcccattatttaaaagaaccatatttgaaatcaaacagactactttatatttttgtaaaatcatttttacatcacacacatcttttggtccttctgtggcttcagacttttaattccagtcttaactcacccttctgctgcatctcctgcttcatttcctgaatgtagtgtgaccaggggagagcagaaggaagcagggattggatctgaaatcagtagacctctgtagtcaaccttacaatgagcaagacatcctctctggactaaagtccttagttaaattgattcagttgctgctttttgaagttttaccaacagaataactttaagcctttgtttactattagagaatatggtgagaaggttttgaaggaaatacctactttttttcagtgacttcgaacggtttttttttttagagccatcatttatccaaatattttttcaaaaatgacagctactaaaactactgataactaaacaattactgtatattacagatactgtgttaaggatagagttaggtttatcctataggaaagttttaaaaaatatcttctattttgtctacagtaagttacttgatagtacaaggagtttattagaattttcaaagtttttaagacttttataatgaggcagtgtgtggtttgttaggtggttgtagtgagaatttgaagagttcttgttttggatagtcatagttctggctttgttattaatggcttggctttga

SEQ ID NO: 28491 - DNA, 1140 bp, Homo sapiens
tcaatttatgaattttggggagacacaacattcaggccatagcatacctcatagatcacatatggatatgccagccaatttgactaatgtcagtggtgaacatagtcttcttgatctatatccaaggcatccttcttaatattcgaccttatacctcctctgtatcttgtgttttccttctcaaaaacttttgccagctgtcttgcttgggatagaaacagatgaaggaaggatgcataaatacatgcaataaaataatgtatttgttaagattatagtgaattggccaccttcttttactataatacagatgtaactttattagctgaatattcatgatttttattcatatgaaataatacaaaaattggtttttaccgattttcttaatcactgtcaagcagtgtgaatttctagggttggttgaatacagtcttttaataagtctccccagcatgctgcattgaacttttaaaatggaaactctgtgtttaagattattatttattggcaaaccagcatattcttcctctttttgtcggttacgggggaaaggcaaaagcaaataagaaatgtaaataagcaaattaggtctgtgaaagaacttgtaaatgaacccaaaaaattaaatttaaaatatactttatcagtaaaataaattatatgatcagaaactggattttatggaattcagagttatcttttcaaattaaagatgagaatgaactattataaatatttcgtataaacattcacacttagctataaagatggaagttataattttaatgctaatatgaattatcaattcatgaaaggttatcatatctcaaaattaaaggtatgtttcaatagagttgatagttattcttattaaaaagaaactgcaaagaaattgaaagtttagctgaaggattaaatcgacaaattcccatgtatattcaagataggaattagttttaagtaattattttgaaaagaaatcataatgcataaggtccttttaagaagaagtttcttatttttatacaaaacctcctgaagtgtaacttcatgtaatcaaatagacacccttatttgctagcttgattgttgtttatgtaagtatagtctgagtaactagcaccctactccagaagg

SEQ ID NO: 28492 - DNA, 1049 bp, Homo sapiens
tgctcttcactgaaggtgaatttcctgactcttttctaagagtcatattcaactacattaataactgctggtaagagacagaaaataaaattattttgaaatggagctcagagatttctagacgagaaatttattttaaaatgctaatagaaaataaattatatggatatatatttataacactgatttttaacagatgctcttaaaataactttaacctagtttcttgctttgtgaagacaaagttgtttgttgtttcttttttgtttaacaaaggtaacttcatgagtatttgacagtatatttcttttggctcatatttctgtgtattcacctgcttgtaaatcatagcaaaaaggaacaagctaatggactaatatatgaagtaaaagggcagaaaaatgagcacatttactatttatgcactgtgttctactgtgtgctttcctccagtgcttacttatcctgaattcctgaacaattttttccctcattgttcattagtgtcagtcggtatgttatagaaatgtgtgaatttctataaattagttgtgagtgtgaatttcccactgttggattcctcagcagacacccaaacttaatttttatttcatgaactaaaagttgtagctaaggcatgacatctgatcaaaattaacactattatcctttgcaatgaaaagggtgaataaaactaaagttcctggtagttgcccctgatacaagtgtttgcttagctttgaccatacatctatctatttattttacattttacacatccatgggtattcctcccgataatgccaaggaatgctttcctttgcaggcatcattctaacaacacaaacacattcactgtgaattttaaactctcgttctcttttttcctcctttaataaattatctcattgagattattcattgttttggcagtactctaaacgatcttgcttttgcaaaatcattgtatattctgtttaatggcatgttactttaaaactgtaaagtttagggttgctaaaggcaaaagctgacaatatttgttaata

SEQ ID NO: 28493 - DNA, 1078 bp, Homo sapiens
tgttgaagagacagtgaaataatagactttttaaacaaatggtgtttcatctgcctggcccctaagtgtcggttgccgcctggagtatgttgaagtgtttttcaccttccaagtaagtgagttgctctggttttgcccggcagttcggtaacgtcgatagggtttatttggttcagggagcactggcttcatcacctacagtaactttttttctgcctgggcatagttcctagagacaaagaaggagaatcaattagtggagcggctactgccctgcaggttgtaggattggttgttctagtctgtttcatactctggtggagaaagacctctttccaaacttacctttaaaagtgccctaggagtgtgagtaaaatatacatcagaacataacagaaaaaaaaaaggactgttcgttgttgattttattcaaatgagttagttgaaaaaccaggtttaatgcctgtgggaagttagttgaaaaccaggtttaatgcctcttttacatgcatttctaaactctgcagaacttggattttgctaattttaacaccctaaaatattgttaactttgcactaaagaagtgtgtgaagagactaaaggcttttctgactcttgcagttataagtgcaaaacatcatgataaaaaataacctataccaccacctagagtctgtttgttagtttattgctcatgaagtttgcttaaattgacatgtctgttacagttctgatatagtcgaaaatgattaagaagtactagctttcaaaagcccgtccaagagaacaattatttaagtaataaatagcaagtgccactttaaattatccgtgccacctttagaattgaaaattatgacatatcaagttgagtgggctattctccaaaagatgttaattcagaagattttaaaacggagttttcagtttgtgcgccaaggcagttctgattgcttaaagacttctgcgttgttatcagagattcaagaaatcttcccaatcagatgccattagaactttttgaagtccagatgaaacaaaagcaaaaatacaggagagcattacaactacagaaat

SEQ ID NO: 28494 - DNA, 1050 bp, Homo sapiens
tctcttccctacagatttcagaacttatatttccacctcttccaatgtggcaccctttgcccagaaaaaagccaggaatgtatcgagggaatggccatcagaatcactatcctcctcctgttccatttggttatccaaatcagggaagaaaaaataaaccatatcgcccaattccagtgacatgggtacctcctcctggaatgcattgtgaccggaatcactggattaatcctcacatgttagcacctcactaacttcgtttttgattgtgttggtgtcatgttgagaaaaaggtagaataaaccttactacacattaaaagttaaaagttcttactaatagtagtgaagttagatgggccaaaccatcaaacttatttttatagaagttattgagaataatctttcttaaaaaatatatgcactttagatattgatatagtttgagaaattttattaaagttagtcaagtgcctaagtttttaatattggacttgagtatttatatattgtgcatcaactctgttggatacgagaacactgtagaagtggacgatttgttctagcacctttgagaatttactttatggagcgtatgtaagttatttatatacaaggaaatctattttatgtcgttgtttaagagaattgtgtgaaatcatgtagttgcaaataaaaaatagtttgaggcatgacaacgcgtgtttctgttgtgtgcataaaaggggaaaagaacgggtatttcccttcaatgtatttaactaaatagcaaaaacattaaacagaacgtaagaattttaaaatttcctttgaaaaatcaactattaaccatacttttcctaaaagaccacatatcagaatatgcatatgaaaagttaaaaatttgttagtggtagttattgaaaatataataaaacatcttttaactatcagtgtcactatacatagggttttttaacaaagaatttggctcgtactaattttgacatgacatctgacttacatgtctaatgccattgcataaagtagatgtgttcttacagctgctcta

SEQ ID NO: 28495 - DNA, 1024 bp, Homo sapiens
gttacataattatataaacattttggacctatgtatttaaaatgcttaaaataagtctcagtacctgaacataaaaactttagttatacggacattctacttcagtagacatttcattacttgatgatgcctggtaggaaaaaactgctactttgctttcatcttattaatcttagaaaaccttttcattcagtaggcttctaatttatatgtaaatttgccaaaaattggctctgatgtgatttttttcacagctaatagaaatcacctgcgagtgtcaggtgttcattcaataacagaaccccaaaaagaaagacgtattaatcgtttagtagaggtggttgatataagttaacagaagaaaaagacattgagaaatattttttcaccaaaactggaaacatagatattttgaaaattaaagctgatctagcaagtatacaattgatcaaatatctgagaatctttaaaaataataactcattggtatactagagactaagattgtaaaaaaaaattgagatgcactgagaacattcttcatagtcttcacttactctgatagaataaaatgctgcaagagtacaaagagtgccatatagttagaaaggttatcacttcgtgatacagaatagaaaataaatcttgcctatgatgagaagttctgagaacagatgccagcttatctactcaacatattttacaactttttttttttttggtgatttctgccatcctttttttcccccaatagagtgttaaatactattgattgtttctaaataactaaattagccttgatgttttatcagtgatcattgaaaaatggaaagtttaaaagttgtccaggtgtctactaattctcctaagatatcgactgcacattgtaatgttatagtagtatagtcagcagcttctcttaccatgaagagagagccttcataccaaaatagtacaaagggaaaaatgcagaaccaaactaggtgtcaaagaaatctgagttaataatgctgatccttcaatc

SEQ ID NO: 28496 - DNA, 1022 bp, Homo sapiens
tattttcaaagctttagtgaggtataattgccaaataaagctgtatatgtttaaggtatataatgtgatgatttgatgtatgtatacattgtgaaattattaccgcaatctaggtaggtaacacattcatcacttcacatggatgactttctatcgtgtgtgtgtgtgtgtttgtgtgtgtgtgtgtgtgcatggtgagaacacttaagatctactctcttaccaaatttccagtatacatataatgcaggaatttttcagttcttctccagccggagacctctgcggctggaaatgcccctgcccaaggcctctgttggctccgggattgcctctggagatatcctgcccactcagcccagtccgctgagcatggcttgcgccccggcctggatctcacacccaccaaaggcgagccaggtgcggagtggcgagggatgtgtcagcactggctgctgctgcagggcggggagctccaggtggccacacaggtgccggcgctgcgtgaggctgcggctggaccaggcatactacaagttgcttctgccttgggtgttcgtgtctagatgagaggaacatggtggcgccccccaaatttggagatgccagtggccctggagccccaaggggtgtgttacagagtgttacagctctcgctcagggatccccgaggtctaggaccccagaagggtcataactcttctctccttcccaccacccccctctagcccatggcttttgggctggcccagccctgccattgcctgtcttctggggcagctgcctggtgcttccagagggtggaggactacagtgtttcagcattttttgtactcgtgttccgcaggtcctgggttcttgtcctgcgtctaagaagaatgaggttacactgacagctgaagggtgagcaaggcgaagagttttattgagtgacagttctcagcagagaggggacttaaagagggcagccccctatgggaagtcaggtaatctcccagtgtgtctgatttggggtttatggg

SEQ ID NO: 28497 - DNA, 1048 bp, Homo sapiens
ttcctctgaaagtttaagttgaatatttctctttcatgagtgcattacaataagaaaacactagaaaagaaaaatgttaacaaaacgtatcttattcaagaagactttttgaattagtatcaaaggaaataattgtacctaaacttttgtattctaacttttgtactctaacttttgtactctaagtctaaataattgtacctaactctaactctaaataattctacctaaactcttatactctaacgtttgtcaattttggaaaacataatgaaaaatatcaaagattttggataagttattttaaaactggatattacttgattgaaagtctactcaaagaaaaaatccactttaaacttcagttctgtcaggaggcaggtggtcttaacttgtgtcacctttttacaccctcttcctggctatagataatttcttttatttaatgcctaaaaaaacaagcagcttaaatgaaatttaaatcagacagtatcaacaagaacctctctgacctctctggagagaattctgttatgaccaaaatcaatattctttgtcaacctggagaaggaaatgaaaaacatttgggtgcaattgaggggaaactgtacgaatttcaaaaagaaacaaattgaaaactctacttaagcatatgtattttcaggcaaagactcctgaaccatatggggttcagctttggtgtaaagatttgaacttttcagatttaatctaaatagctttgcaggataaacctccagtggtttcaacagtgttaagaggctccttgtgatcatctcaagtttgatttatttgcacttttcaaacgaaaattcatttatttactgagatgcaaagcaaatttggcttccatttttgataatgacacagtgaccacgataacagtttgattttaatattcttgcttaactctgtgagatagaggctatcattatctccattttcagaagagaaagtgaagaatcatgggagattaagtgatacacccaagctgtgtaactaagaagggccagagatgggacttaactta

SEQ ID NO: 28498 - DNA, 1025 bp, Homo sapiens
aggatactcgagatgtcctgagaggtcctcagccgtctgtgatggccccacagctgtggcttccacttgttcatttgcttcctgtgtaatgtaataaagtgcaatttctttgggcctctttaagtataaatatccagttttaccttaataaatcctctgcatatggacaaactttaaaagattctcccacacattagaacaaaggtcaactaaatgtgggtagagatgatcaaggacatttttagggttgttaattccagtccaggtagaagctcttggtaagccaattatgtcattagacaaaacccagaccacacaatgatctaatcagatcttataataagtcaataaaattaggaatcatcatgattattgaaatatggatttacattcattgccattagcagtgaatgaaccatcccctaagtgcatatttgcatattttacatattatagctttgtgaagtatcctcaattttgacagacattaaaatcaatgtaaaaataaactgaacttagaactgcatctatgaataactggatctcaaagtattagagcaaccaaaaccaatcacatagttctcactaaggtagtattgaatcaatatgaattattttctcatatgataaaattattaagtattttcaataatttttagttgaagacagaagatttctatgccgttaataattaaaattaatttaaaatatagttttttcgttatcaaaaattccaaggtttgtttcaccatgtatatattaattcaacaataaaagcatgtaaatacgaattatatatgtatttctatatactccccatacacaaatacaaacatatatgctaagaaactttgcagatagaggtggaatatatacatatatatgtatatatatacacatacgtatatatatacacacacacatatatatacacgtatatatgtatatatacacacgtatatatatatacacacgtatatatatatatacacacacgtatatatatatacacacacacacacaca

SEQ ID NO: 28499 - DNA, 1048 bp, Homo sapiens
aaatctgtaattttataaaatttgttgcaattatgagtagagagccattttgagtaattattttagtgttgtagaaatattcccattaggaacttatatagacaaaatgttaatattctttcagaccataatgtatttgcaaagcgtggaagcactttccgttatccttatacacaggagacctaggtaatagcattatgtagataattttacctcaacagaaataatataaccatagacattgatgataagaaaagctcaagaggtactttaggccattagcctgaaaaatttctgcatatcttaaacttttgtgtctgatctaatttgtctgactttaatggttccacttttaacaatttccaaagaaaagtttttgaatttttaattgagatatttcttattttacctaaggtaataatcagaaactatatgatagaaattagaagcaacagaatctgttaggtggctggcttcaagctatttgctttctcttctaaacattaggtttagtctcatattatcaaggatgtaacaccaaccagctgaccaggtggtcctttatgcgtgcagcatacttccctcgtcaatgttaaagagatggagacacctgtttatgtgcccaacactctaagagccacgtctgatttcaattaaaagtagatctggtttctataccaatgtttaaccgatgtttccatggaaagtccctaatgcttgtttcctttttaaaaaatatcttttaattttgaaataattatagattcacagggagttgagatagtatggacgggtctcacgcccccttcctgcagtttcctcaatgactacaccttatgtaacaatagcacatgtcaaaaccgggaatttgacactggtacaatgttgccattttatcacctatgagtgagatgtccttttatcagcattgtggatttgtgtaaaaaccatcataagcaagatagaggactatcccatcatcacaacctcctttatgctacctctttatagtgttcatcctcctactccccacaatctctaacccctg

SEQ ID NO: 28500 - DNA, 1016 bp, Homo sapiens
gacattgagatttatacagttcatttactcaaagaagacttcaaattttgcattccactcctttggggactagttgagacattaaaatccaaatattacaaaataaaatgaactgaagcatgaaattaatatttagcatacagatttacataattttactatttaataatagtatttgatttttaaagcctactgctgaccaaaaacaatgcaaattatttattgtgggccacctacttacttctcaaaaaatcctgagaggtacttaaatgtttacccatatttttacagtaggacctgcagcttaacaaaattaagtaaatgttcaagtttatacaaacagtacgtagctaagtcaggaatttcaactgaatacattgagctcccatattataacactccagtttacaaaacatagtctgtgcaactatcaatttcaaaatgcatgtattaattcatcgaatgtttactcagccccttcgtctaaaggcaccatcctaggcagcatgtccatttgatagtgtttccttctaaaactgagagttttgaaagttaattgctttagaactaaaatgcaatttgaattatcactgaatcctcagatgacttttagttgctgttattttaattcaaagtgaattaatccaaatgaaaaatgtcccagacattctacataatttttgctcttaatattctatttttttggatcagaaaggataatttaaccttagtaggttgtatgtgtaacaaaatttattcatttcttctatgttttcagttttgtttacatatagccactcatgataccttcttatgatcgtttgtatttctttagtgttggtcaaaatgtcttctttttcacctctgattttatttatttgagtcttttcaattttatcttagttattctatataaatgttagtcaattttgttcatcttttcaaaaaataactattttgttgatcttataaattatttaaaaatctttatttcatttatttctgttctgagcttt

SEQ ID NO: 28501 - DNA, 1048 bp, Homo sapiens
atgaataagggaggagggaggaggagatgtagtcagagaagtaatggggccagctcatgtaggtcctggtataccatggtaaggactcttagtttttattctgagtgagatggaaagccattgaaaggttgtgaatagaggagtgagattatgttttcatggaatctctatgtctgttctttggagaatatgctgaagctggacaaacttattataaaacagtaggtcaggtaggaggtagttgcaataatacaggcaaaaattattgtgttgtgtaccaagttgatgttttgtgataaacagccaaattctggatctattttgaagatagagaaagtagggcgcattgacaaattttgtgtagataaggaaagacatacagaatggtgcccaaatttacatgtcctagttagatatgagctgtatgaggacaggagtcataaatgattgtttagtattttatccttttctagtatctagttcacagacagcaataagaagtactgaatgaatgaataaaacattcatgtaggacactgtatcagaatttgtatataaagcagagatccctcttttctaggctaccaaattcttgatctttctgaaagtcgcttttttcaggcacagggatggaagatgtatggattcttccttttcggattcaggtgcttcttccaaatatcctcctgtcagtctcactctggtggctgtcaccctgcagggctgtggttggttattctttacctttctagataatgcagagaaaggtgttgtgtagaccagcttcttctgtttcctccaagattcagactactcaaactgcatgttcattctcagagagaaagaagggccatattccattttctcaagatccaatgcactcactcatctgttttttgaaagagtctttgtattttgaaagagtgacttctgacctctcaaggaaactttcacaacatgagtcttcagagccctcgatttggcactacctgtagcacagagcaccccaatcaaaggcctaatgagtcattttaatcctgttactctg

SEQ ID NO: 28502 - DNA, 1026 bp, Homo sapiens
gccacagaggcccagatatgttatgaaacattatttctaggtagcttgtgatgatgttcctgggtaaaattcacattggaattggttgattgagtaaagtaatttggccttctccatgtaggtgggcatcatgcagtcttttcaaagcctagatagaacaaaaagtggaggaaggaagaatttgttctctgactgatggtttgagcggggacatacatctactgtccctagattgagacttacaccattaactctcttggttctctgtaatctgaatctgacaggcttaaatcctgaaggccattgttctttcttcttgtatctctaaccattaaatgaaccactcttactaaatgtacatgccactttaccatcatacttgaaaactgaatccacaaattattctaattgagaaatgacatgaaagaattcaagacattctatccccattgggtcaatttgtggaaaatagaagattcaacctcatatggagaaaagatacatatgagttagtctgtaagcaacttcggccttctatgaagaataaaatgtgtgcaaatacaaacataatcttgcagggagttaaatatcctgagaccatgtaagtgcccaaggatgagcaagcaaatccaggataggctgcatattattaaagaatctgttatacagcatgcaaacatggttctagaagcagctacctgtgtaactaattttggggtataggaagcccaggtaccacaagggtagtaagataattttttgtttcatcccaatgaaagcagctggatgtaacccatttttgctgcagccgattgcaaaatcagccttattgctcctgtctctctgggttctgtgaatatgggttctggatgtagtgtgtgtgtgtgtgtgtgtgtgtgtgtgtgtgtgtgtgtgtgtgttttctttttttctgttgttgctgttgttctctttgccattacagcattactatcttttgtaacaaaacttttaatttaatttttcagagcattaagcaccttctta

SEQ ID NO: 28503 - DNA, 1034 bp, Homo sapiens
ttttctttttaccaagctttatttttaaattattcagctatcccaatggccttttaaatccttttttgcatctccaggtctgttttaagaacagcattctaatgttaattctgttgaatataattttaaacttatcccggtgctaggtttagggtgtgggacaaagtgaatccaagggagtagcatgaataggggcagtaaactgtggaaatgagctaaccttgagcttcaagattatcattcgtgtaaacaaatgcattacgaaactaatacaaacatacccaagaggtcacttgacattattctattttacagaaaacgtatgcatctatataagttccaggctcagttatctctgaaataacaaaatgctttcaggtagataaacacaaaaggaatatctcagtttcccacgttttcttcaagcctcaaaggaatgtgtagttaaaattctttttttttttttgtagaagtgaccaatatctttgatatcatcagagaacaaaactttagtcatgctgatttctatcctgtattttgaacacagctctttgttggagttctatatatttattcttctaaaaaaatcttccctgacttatccagctttcatagtctaaactttttgtccaaactcttatggcactgatggtcagatttctttattattattttagagacagggtctctctctgtcacccaggatgagtgcagtggcacaatcatagctcgctgaaacatcacattcctagccttaagtgatcctcccatctcagcctcacatgtagctaggactacaagcatgtgccaccatgcccaaccaatttttttttaaatttttattctttgtagagacagggttttattatgctgcccaggctggtcttgaactcgtggcctcaagtgagcctcctacctcagccacctaaagtgctggaattacaggcataaatcactgcatctggcccagatttctctattattaactgttgcatttcatactatatcatttgattttcttattgagctgcatt

SEQ ID NO: 28504 - DNA, 1043 bp, Homo sapiens
ctgtcgttttcagcttgcctgggttccattccagaccccaccagtgttactagctgtgtggtatttggcaagttaataaacctctttagggcttagttgcttctctgaaaatggagataaagaataacctattcaaaaagtctttgtgaagatgaagtgacaatgcaaaacatttagttgggtgccagcctcataatcagggctcagtgaatgttagccatgatactaatgacatcagtcatcaatgcttggtgagtactttgtaagtaccctacatctatcacatgttacacttgctattttaaaagaacaagcccagatacatttaccactgtataattgaaccattatataaattagaggttatctacaagcaggtaaaagccaagttaaaataattattttgttcatcctaatctttaagtcataaagtaactgctaaaaggtacaccaaaatgttttcttggaaataattttcagaagtattttagtagtttttcttttggttaaggagaaggatatgcattctgaaacaaaaattctaaaaaccaaacaactttttaccatgtcagtgtggtctctgaaaattcatgacacagtaaaatgtctttaaaacgtctttactttctcagactgcatttgtatctcaccttccaaattgatttcttataatacacaagatcatctagtgaaacaaaataatagcaaacacttacacaggctccctctgtgccaagcacctaagtgtttgacgtatactaactcagttattcctcctcacaaccttaggaatgagtattcacaccctccccattgaaacacaggggccttgaggcacaggcaggtgaaataacttgcgcaaggttaatcagtggctaaggagcatgctgctgggatgcctacctgggcaatctggcacctgtttcccatgcttggaaccattatttgtgtgagcatataaaggaccatagcattttgttaagacagccaggaacttataatttgtgtagaacactcttgtttatggagaactggcataaatg

SEQ ID NO: 28505 - DNA, 1347 bp, Homo sapiens
gacctgcctttataaaaactgcatctgtcagcgtgtttcccttcccttttacttaagatagaattccttaccattagagccatctccattgggtgggagagccaaggtgacaggtaaggtctctggtaggttgttcttgaaatgcagacaagttatctggggaaaaagggttggggttgaagttgacacatcaccttagatgtgtttattaggttagttagtcatctttgaaagcagaggtgaagggctgaggagagaggacccgggataggtggattttaatgggaataaagagtaatttagaggaaagataaggatgtaccccaaatagtttgatagctcaatagttttttatttataatttaagctcacacttttcatgtccagcataaagcagcaacaaattaagtatttagactatcatctgagttttagttctctgagtttcaacctctctacatgctgtaaaatgtcatataaagtgtttaatttctcagaaattcttcaggaagacttgcaatgttctctgacaaaaagaaaatccaaatgactgcctttctaaagtgtattcatttgtgtaaagtttatcacatattttctgtagaatatgattctgtgttacatctcaataactgacattaaagatgagtcaacttctctgctaccagggaatgaggtaaagagtattatgtttcctcttgacttcacatgagttccatcattaacaagggattgatggtgtgacttactactgattgagatggtggccaactggcgtcacatcttctgaagtacacaaactcatctttaaaggtaaaaatggattgttctgtaggaataacttatatcctgaaatcttggtgaatgataagattaccacttttcagatcattaactttacatataagaaaaattccctgagtaagccattgctgggggaaaaattataaacttttcatgtcatgatactttatttatttccataaaaacttaacatcacttcttgatattttctaattgagagctctttattgaaaaatagcaactttctaaattaagagctccttattgaaaatagcagtttgtgcacacaatagcataacattcttttctgtattttgagaattaagaaaataaatgtttttaaagatatatgccaatagtgatatttaacacataaaggtgtgatgtatttttgaagtgtcttagaagaaagccaatgtggatattgcagggtcactgtggaaatgtgtatcagtgaccgtttagttgtaaatgcacaaaagagaaagaatgtcagccttagaggattatcctgcttttcccaattttagaaccaggaagttt

SEQ ID NO: 28506 - DNA, 1070 bp, Homo sapiens
ttctaatattctatgttctgtatatattcttcagtcctctgacttgactttttccctcatattcctctattttttttctccttaattttttagctactgggtccatctaactgatgacagtgaatacgaaaggcttggtcttgaattccgtaaatttctggggaagtgggtcagatcctagataaatctcttaacattttgcaattttttaaaaccatccttagtttgtaacttaaacacaaacgcgcgcgcacacacacacacacacacacacacacacacacacacatatacatatatataccttgttacttaccccttcctccaatccaaacacagactcagtcttgctcatgctccaagaatttttgtaatgactggtcaggaggaatccctctaagatgaggagataggcagtcagaagcctaggtgggctgggcgtgagagaaaacccaggaaccctggttctttgggtcgtcaccacgggattgattatagttagtttggagctagagtgtctttggggagatctgctatggtagatcatttgatttaaatgactgaaatgtaaaagtttgaaagtttgtgtttaacacttaatgcataatagacattgtgcttttcacatgcatgatttcatttaagcctacatcttatgaaatatgaaatatattcatcattttattgatgaagaaattgaggcttagaggaagattaagtaactttccaaagcttcatgtgagtgtacccaaatgctcttcaaataaggcatttcccagcacagcttttctttaagtgcctttgtaatgtttatagctttttattgtaacagcaggaaggttatactacaatagtttattccagtcctaatgttctatgactttgtgtctttaggcagcaagcaggattttgaagaactgggactcaaagcaaggagtcctcttgtagatatacagtggcagataaaatgaattgaacagacacttttttttttttttgagatggagtctcactctgtcacccaggctggagggcagtggcacgatcttcgttcactgtgaactccacct

SEQ ID NO: 28507 - DNA, 1111 bp, Homo sapiens
agcttgtccaactcacagcccatgggctgcatgcagtccaggacggctttgaatgagacacaaatttgtaaactttcttaaaacattatgaggttttcttgcgatttttttttttttttagctcattagctgtcattagcgttagtatattttatgtgtggtccaggacaattcttcttccagtgtggcccagggaagccaaaagattggatacccctggtttccttagttgtttaaggtaatccttgattctcttttcccctcatagccatgccccagcccatccatccgcaagtcctttcaacttttaactctgaaacatattctgaatctatgcaccttataacatctcatctactactacttcccttatccaagttcctctttgttttcactcaccttccttgctttcactcttgccatctacagtgcattttccacttagtagccaaagtgatctttttaatacacaatctgttatgtacttcctctgccccaaactttccaatggcttcccttgaacaaatcccaactctttaccctgtctcacaaagccctgcattatctggtccctgcctgcttctctgactttatctaacaccactcctttcctcactcactatattccagccacagcttaaggtctctgcaccagcagttcattccgcctgagtcaggcatggttttccctttaaacataccagtcagctctttccctggaagggtttgtatgttgatatttattaattttaccttttattatagattttatgagctcattcagtgtggagtagtcactggcctgcccatatgtcttgttaccactttcagttgacctaataaaattgatgtggtcatgatacactttgcacagttttctttaatgcattctgataatcctctgctacaggaggttgttatggactaaggaaattgagtttaaattttactattgtcttgggaggctgaggcaggagaattgcttgaacctgggaggcggaggttgcagtgagctgagatcgcaccactgcactccagcctgggcgacagagtgaaactccatttcaaaaaaaaaaaaaatttactattgtctttgttaggttttacttat

SEQ ID NO: 28508 - DNA, 1017 bp, Homo sapiens
acttctcagtaaatgataactccattcctccattcctgcacatacaggtgcacactgcacatggagaggaactgaggcccccagccaaactcccaagctgacagccaacaccaactcaccagccacatgagggcgccatcttggaaacatacccccatccttcggctcagctgcctctgttgagtgctgtgtggagacaggagcattcctcactgagccctacccaaattgcagatttgtggcaaaatacaatttttacttataaaccactgttaaaggtggtaatgcttatccagagacttaacatacaaggtgttgaaattaggaccatcttttttttttttttttttttttttttttgagaaggagtctcgctctgtcgcccaggctggagtgcagtggcgcgatctcggctcactgcaagctccgcctcccgggttcacgccattttcctgcctcagcctcccgagtagctgggactacaggcacctgccaccaccacgcctctgtggatgccgtgtggagcagacaggagcattcaccactgagccctacccaaaaatcgcaacgcactggttatctgttcaccttattcccttgtcttcttaggtctttgatcaaatgtcaccattttgatgatgcttttcctgaccatggttgccaaaacttaactctctcccctgccctaacagcatacgaagaagcatttcatatatccttctcttcatcacttttctcctgggcaccatctgactcatatgttttactcttttatttgcttattgccttcctctcacaagaacgtaaacttcgcaaagacaagatttttttttgtctgtcttcttcacggatgaatccttagtgtttagtctagtgccttgtgcatgatgatgctcaaggagtagttgttgaataaatgagtgaattgaaattggcacactttggcaagtagcacagagaaaggatcaaaaaggtaggaaaatgggaggaaggagaaggacttactaaaatattaga

SEQ ID NO: 28509 - DNA, 1958 bp, Homo sapiens
gcagacagtaaatgccacacacagctctaacagtgacagggggagaaaaacgtcttcagttactggcctgaccttagaggtaaagcaacatattaacagagagggtctgattttaaactttgagctgaacatacttctatagtatcttaattctcagtttttaaaaaattacatcatctagaatggcgtcgtccttgctcttccttttttcttgtgccaaataatagccccctttggtatatgttattgttttaattgattctcaaacctctccttaacattttaacaaacataaaatttgatagaaatgggctagactaaattcagcagtccaggaaatcgagtatttttctacacagatttgagtgtcacccaagatacagtatactttgctgaatctccctccatgatactcttgtggttttatctattttaccaaaacacttccacgtaaaacaggcttccgttgactctgtttgtcctttatggacccaacaggggaggaaaaaataccattgcactgggtttatccacttactgtggagttggggaaccagaaacaaccactggacacgttgcaagcgcgtcaaggtttccaccgccacctggtggctagatggagcacagcatctgtgtaactggtgggcaaaggcgttctgctccaagatgtcaaagtgggggagaaaattatgggtgttctgcaatcttggcaaaagaagagtactgtactccttatctttttactgcttctccatgttcacccttaaaagattgatttttattttttactcagctctcctcttgtttttcaggttgacgccgctgtcaccccagaggagcgccacctgtccaagatgcagcagaacggctacgaaaatccaacctacaagttctttgagcagatgcagaactagacccccgccacagcagcctctgaagttggacagcaaaaccattgcttcactacccatcggtgtccatttatagaataatgtgggaagaaacaaacccgttttatgatttactcattatcgccttttgacagctgtgctgtaacacaagtagatgcctgaacttgaattaatccacacatcagtaatgtattctatctctctttacattttggtctctatactacattattaatgggttttgtgtactgtaaagaatttagctgtatcaaactagtgcatgaatagattctctcctgattatttatcacatagccccttagccagttgtatattattcttgtggtttgtgacccaattaagtcctactttacatatgctttaagaatcgatgggggatgcttcatgtgaacgtgggagttcagctgcttctcttgcctaagtattcctttcctgatcactatgcattttaaagttaaacatttttaagtatttcagatgctttagagagattttttttccatgactgcattttactgtacagattgctgcttctgctatatttgtgatataggaattaagaggatacacacgtttgtttcttcgtgcctgttttatgtgcacacattaggcattgagacttcaagcttttctttttttgtccacgtatctttgggtctttgataaagaaaagaatccctgttcattgtaagcacttttacggggcgggtggggaggggtgctctgctggtcttcaattaccaagaattctccaaaacaattttctgcaggatgattgtacagaatcattgcttatgacatgatcgctttctacactgtattacataaataaattaaataaaataaccccgggcaagacttttctttgaaggatgactacagacattaaataatcgaagtaattttgggtggggagaagaggcagattcaattttctttaaccagtctgaagtttcatttatgatacaaaagaagatgaaaatggaagtggcaatataaggggatgaggaaggcatgcctggacaa

SEQ ID NO: 28510 - DNA, 1088 bp, Homo sapiens
agtcacacatcagggctcagagtgctatgactaggaaaatgctgacctcctttcattagtatgatcgtgcctttccagcttttgatagatccaagcgctatcttcccaccactcaccaaatgttccacctgtcaaagggtttcaggtccctgcagacttcggttttgacctgtggggaaagtagacttcctcgaactggggaagccacatgttgtacatccttctataaactatgattatcattcttagtaggaaaatatgtgatttctttttttttttttttttttaaagtaagcatcaaatatttgaccaaccagttgggcagagaatatactgaaactttttatataacctcatccaaatgtcccctgcatttaagaaatgaaattcttctaattgcgtttataaattgtaaattatattgcatttagaaattaaaattctttttcttaatttgttttcaaggtgttctttgcagaagatgtgggttcaaacaaaggtgcaatcattggactcatggtgggcggtgttgtcatagcgacagtgatcgtcatcaccttggtgatgctgaagaagaaacagtacacatccattcatcatggtgtggtggaggtaggtaaacttgactgcatgtttccaagtgggaattaagactatgagagaattaggcttagctttttgctaagaactagctaagtatctcttttaaaaaacgaatcagtgtgcttccatgatgcttgggttacagttgttctttcttgttttggttttcattcattgcaacttaccgtgaatattctgctcaaggtattgagagtgtgtgttgttatctcaacttacaatttgtgttgaagttatcaaaataatacaaatgataatgcatgactttaaaaaagcatgattactcttagacttttttttttcaaacacaagcaacaaaaaccagtacaagaagttaaaaataaaaatagaagtaggaagttgctttttccaaaaaaactaaacatgtttattcttggatttcttttgtcttaaatagtctggcctctcaatacaaccaggtaatagtaaataatgtgacttttcag

SEQ ID NO: 28511 - DNA, 1504 bp, Homo sapiens
agagaagatagcttcacaatctgtaagccaggtatagagtgacattgattgtgggtctcttttcaaataggttatcaagtggaagctttttgaacaattggatgaggaaatggtgctaggtcacaaccagcgtggatttcctaggttttgtcagattatccttaccttctccttgtataggctgtgctcttagactggcacatcatatgctgtggacattgtgcttttcagtgtcagcaagatgtgtcacaagtttcccagaatctcgtagacaagattgaaagagtgattaggccaagagcaggaagtgaattcccctgggagccaaaggaattgggaatgtgtagcccaagtaagacaagaaccagcaggaacatgcctctccttagggtcgtgatacctgttcaaggttttaatgtggaagggaggattaggcttgctctgtgttgaatcaggctcaaaggatggaagttacagggaagctgattctggcttcatgtaaaaaaaggacagtttgggcaggcaaatctatcaaaaaatggagggaaattgatacattcctctatgttcaaacaggaactgacaatctgcccctgggtgggaacacggtagagaagatgacttcaaaagcccttttcatcctaaaattctgatgtttgataattaaatgttatagcatggacactgacatttacattttttacttatgtttttggtttttaaatgactctgcattttgttttaagcttcaaattattatttgaataatgaaattcatcagaacaattagtgttaagaatcatatagcaatttatagaaaaggaagagttcgtaggttataaattctgttagttgctaagaagcatttttaaaattatgtactatagctctttattcagcagacgaaccaattacaatctgtgtaactagaacacttgactaaaattatataatttttacaacgcttcactgcatagatacatgaacataatttatttgtaattggaacaaagccccaaagtagcagttttgttctaccaggtaattaatgctcatttttaaagccttttattattatttctgaagtaatgagtgcacatggaaaaagacacataataggctaaacaataagcccgtaagccaagccaacatattccaggaacaaatccttgccaacctctcaaccaggatttaacttctgcttttcccccattttcaaaaattatagcatgtatttaaaggcagcagaagccttactttcaggtttcccttaccctttcatttctttttgttcaaaataggtagtaattgaagttttaaatatagggtatcatttttctttaagagtcatttatcaattttcttctaacttcaggcctagaaagaagttttgggtaggctttgtcttacagtgttattatttatgagtaaaactaattggttgtcctgcatactttaattatgatgtaatacaggttctgggttgacaaatatcaagacggag

SEQ ID NO: 28512 - DNA, 1025 bp, Homo sapiens
gtgcgatcattgtatactagggacgtctaactgtgtcaggaggaaatggcagctgagcccctgtggcctttcacctctagcagtgccacgctgcagcacattggccggctgccatgctcctgcctgcagtcctgccagcagctcttgtgagctgcgactttgcataagtagcttgaatgccatgtgcctcagttttcacatctgtaaaagggagatgataatggtacctatgtcatggctctaaacgcgatcatgcacgtgaaagcagttgaagtcttgcctggcagaagtaaatggtggctgctgctgctgctgctgttgtgattgttgttactcaccaaagagatggttttgtttggtttagatgagctgcttcagaaagagcaaaactattcagatgacgtcttggccaacatgattagtgaaccaaggatcagttacggaaacgatgctctcatgccatctttgaccgaaacgaaaaccaccgtggagctccttcccgtgaatggagagttcagcctggacgatctccagccgtggcattcttttggggctgactctgtgccagccaacacagaaaacgaaggtaagagtcccctgagccagcaagggcgttctgggaggtatatatacacatacataacgtgtgtgcaagagagagagttatcttttgtatgttcttgagtggtgaattttttttgatgtagtcataaatattttcattataattttactttaaaaagtaaatactaggagttactatgtcattaaaataatatatctgtgtaaattattctttatattttttatgctgcaaagcatgtaaactgccaattgttggaaaagacaacaactccattgtataggtggcaaaacaaaatggtaatgatttacataacatttgcaggtaaagggcctcttgtttcgcacatgtccaggtttgcattctagggaatattatccttcgagtgaacactcccggacgaaggggagccacagtgtattattgaagaggcagttcttca

SEQ ID NO: 28513 - DNA, 1044 bp, Homo sapiens
tgtaatacagcatccgttttcctgaatgatttttatagttttaccattggcaaacagatactttcttttatgtatttctactccataattttaggaaaaagtaaatccttttagctacattaaaaagaatacactttctaggaataatgaatgtaaaaaaagtttccttttttaaaaaaatattgcgctctctaccattctggcagacaaattgttgaccttaatatgtataattcagtgcagtatattgatcttgtttattgtgctccaaatggacgctggcagaaatttgaggaattaaatatcaaccacagtgttttcttcatgcgattgcaatggtttgttatggattattttgttcagttcaaataaatgatgtacgttcagattctttgcccaattttttaattgggttgtttaccttactttcttaattttatttttatttttatttttatttttatttttggagacagagtcccgctctgtcacccgggctgaagtgaagcggcatgatctcagttcactgcaacctccgccttacggattcaagcgattctcgtgcctcagcctccccagtagttgggattacaggcacatgccaccacatccagctaatttttgtatttttagtagagacagggttttaccatgtttcccaggctggtctcaaactcctgagctcaggcaacctgcccacctcggccttccaaagtgctaggattacaggcgtgagccactgcactcggcctgctgttattattgagttgtaagaatttttatatattctggatactattaaattcttatcaaatacattatttggaaatattttacccattctgtaggttgtattttcacttccttaataggatccttttgacacacaaaaattttcaatttagaagtctattttatcagttttttcttttgtggcagttactatggtatggtatctaggaaaccattgtccgaaacaaggttacaacgatttatacctgttaccttctaagagttttgtagttttagctcttacagttaaat

SEQ ID NO: 28514 - DNA, 1032 bp, Homo sapiens
acaaaaattaggtcggtgtgagggtgcacgcctgtaatcccagctgaactcaagaggctggggcaagagaattgcttgaacccaggaggtggaggttgcagtgagttgaggtggaggtgcaccactgcactccagcctgggcgacagagtgagactccatctccaaaaccgtgttagcttttatcaggaaaggccattaaattttcttcaatattacctacatcaatttgacatcaaactataagaacacaatatgtgagatgttttgaaattaatgaaatgaatcttctctttgagacgagtttgtgcacgctatgaagtccattaaatattttctgggaagagttcccagttaaaactactttctaaagtacccaagcacactatatagatacatcaagtaggtttattaatgtcagtatttcggtgaaaattgggaaggccactattctgagtagagaggtgtttgttttctacttgaagactatgaaggatattctgcactactgggcctatttctgaaattgtatctagctgcaagttactcattaatttaattaacaaatatttattagcaaccaaattgtggcaggaactgtgcctagaggtagaaatacattacgctcttgtttccagagaggaaaatgagtaatgttctaaaatgtaaatcttatgtttctctttcctcttgctgtaaatgatgtctaagccatttcggtggtgcctgttcttaatcctttaataaattattttgaatgattttttaaaaggcagtgtgattgtgaggtgagtttagtacaaattaaaaaatgtcacatcagttgcaaacagacagcacataattatgagctaaacactgtttcagaaacagtagtgacaataaataggattcggtataattagtcctcctgggacagatctcttcctctgttctttgccatatattttaataatgagattagccatctaatgccaatataaccagactgtagtattaatacacagaaaaattattgctagtaacagaagatt

SEQ ID NO: 28515 - DNA, 1047 bp, Homo sapiens
gggtacaaaaacatgatctttagagccacagagatcttggtttatattcttccctctcccttttttacctgcatagcctcgagctggtaccttaacctggttcgtaaaatgggatggccctggctaatctcacaagctgttgtgaggaatcaattaaattagatagattttgtaaagctcttaatacagggtcagcagtaatgctacttgttatcagtcccacagtgaaattcactgttcacagggagatggtcagcctacatatagtgtgtattcatttgcagtagagtcttagtgggatggtgcaggtgatttgtttatttgtgggggtataggatattgttaaattgttctgaaaatcaaaatgtgagttaatttctatagtaatgcttatttgcaactcattagctaaataaatctctttaattatttcatggattcccccagcttaaagcttaaagtccagtttcttaaagtgtatgaggtaaaatggaaaaaatgtaaatgtaatatgggaaatcagttctcacattgcagtagaacattgaacttctatctcaaactaattttgagattccttgcttgaagaattgttggtagagtaccaccactgtgaacattcccaaagcaggaaattgaaatatttatattgcaaggcttatctcatctataaagcaaagatggtcttccatttcccccttgcccacaggttccctttattaacgtggtagaagcaccaaagcagatgggacaatatgtttcttttcttccatgttctattcttgttcattgcagcagggcatttgtcccaattttgctgtgaaccttgagattatttttgatatgcttttcaagtgtaatgaaatatttattccatcttgtttcctccatggttttacaaaaacaacaagaagaagctaattgcctatcatatacaaagaatgaatgccaatggacaataaaatctgtaattaggaacccacatggtgatttgatatagtattgtctcatagaagtcttctatctatagttatttattccaagcct

SEQ ID NO: 28516 - DNA, 1071 bp, Homo sapiens
aatctgagtactggctatcaatacctgataattttattaatgagttgagacccagatatgccgtagaggtaaataaccatataaaggaaatatagaagtgtaggagaagattgctctggaaggctggggtaaaatgaaatcagctttatccttaagacctccatagaggttaactgtaccatctccttttactgctacagtttatatgaaactggacaatattgaagattttgacttttcgaactcatctattgagtgttgagcagctatgacaggttatttctttatgtgcctccattaacgaagtcaagaatagcttctgacaaattgacaaaaaacaataacctaaggttaacccattctggacgccagttattgctattgcttcacatatattttttagattcaaacttgaggttgcttttaagttttagtgtgatgtgctgaatagagaatagatgttaataaaaaaataatgccagcattcgttccttcacattcagttcatatatttgaaaaaattcccatgtcagtatgtgtccatggacataaaaaagaaatgtagcttgactagagtaaacacatcatagattatatttttattaccttatgtccatgtgatgcattgatagtgttctccaccaactatgattgcactgactataaaattgtaatacaagggcatattagggggagaatgcctttgttttttcttttgttgttattttgtttttaagagagtctggtattacactggaggatcacaaactgtattttcttgttataaatggctcctctatcttggacttaatggttaggataaatatttgaatgtagaatgcgttaggagttttaactatttttgaaattaggaaaatggagagacactttttttttttttagagacactttttttttaagttataataagcatggcactcggaaagctctgccatgtttcaagattaaagtttcacatgaacgctaacaagtttatatttcactcatatataaatgatcctccttgtctcctttcctaaattatagccatctcaaatgacaacattgctg

SEQ ID NO: 28517 - DNA, 1034 bp, Homo sapiens
tgtccacaaagaatttcactccaatttgaaatatctattcagaactaattttttgtggttgagcattattttttgaacaatgaattgcataatcattttgtataatccagggagctctggcttagattctgtattattttgtgttatactgatttttagaaaatggaatgtagcgttgacacgagcacaaatctcagcaagggcctaccttacaaagataaaatgcgtggagttttattagaagcacatgattttgctttgtgtttcgtatacaccagcatttcagtgtagtaaatggcattttgtcttgaagagtgagcagagttgttacaaaagaaggcataatgcttccttgccagcagaattcagataagtgaatatcagaaaagctatttgtgatcttgaaagtgtaagaaattcaacatcaataaaggattgtggttccttagatagccatgtaagtctttgcctatgtttctaacatttctctttaggaaatattcttgcttttatttttctgaacaaattttctccattattatctctgatatttactttgaacagaaaggtggattggaaatcaaaaaataagtttgatttcaaaaatgatttcaaaatgttagttttctcagtattttacattttgagaagagaacaaagaaggcagatgaagagttttttgttttttcttaaatttgttttcttttcaactttatttttaattgacataataattacatatagtatacattttgaagatacggttttaattttcacaggaatcttatttgggtttagttatataaggtctaattttgcatcctctacatttagtggctgatttataaatttccactgagtgataatagtaattaatgtgaaacaggttttttgctgatgtttttagaagtttcagtagattaggaaggaagaaattatgctattgagaaaaatagaaaatgtaaacataagcatttgaactctctcttgagatatttttatcttccatgaaactagatgcggcttattgaaga

SEQ ID NO: 28518 - DNA, 1051 bp, Homo sapiens
acacagagatgttgtattgttttatttcctgtagaaagacgaaggcagttaaaagaatttcataaacaaaacactccaggctaaaggcaaaaaagaaatgaaccttaaaaaataacaagttaataattttgttggcaagaagagcaacaaaagcaaccttctgaaagcaagatacctggtcattgagagatagcaactgttaatgccccagaaatagaggaatctttaatgcaggtccattcattccacctcaaactcctgaacaaaagctctaattgaggcaagtcttcctgggaaagggggcctaacagaaacatgttatggtcagttgtgcccatgcgagataatttttttgtgcttgtagctaattccagtaaagaagtagatgttttagagggtaacgttaaaggggtcagctgcaaagagtccttttcctcctcctcactgttacaaaaggtgacttgtggttcttccctaattgagagcaatggcaacgccataggtgattactcattttgtaaaactctaattacaagtaggttgcttctgtgttcaacataaaaattagaagtgacttgcaaagatgagatactgcagggaggcttacaatcttgttttcagtgttagtgtttcagtacctggaacaaaatgtgatttacagccatcctttctaagaaaattgtcatcattaccaacatattgctactgataccagtccttaatgtgcttcataaaaaactcaataatttcataacccgttaaaaccggaaagaaatggagggaagaaaaataagacacttttagcgtagtcataatcttctctgccatattgtgttagaatcgatgatacccaaatgagaagatgtctgttctctgtcactgattccagtagaataaaattattgtttaaaagtaagcacattcgctgcactccagcctgggcaacagagtgggaccctgtctcaaaaaaataaaaataaaagtgagcacacgattgcaagatctatctggttttgggggcttattgtcatctttggttgttaaaaaaata

SEQ ID NO: 28519 - DNA, 1075 bp, Homo sapiens
agttttgatatccaccaccccactttttataatggactacatttttcagagcagttttaggtttacaaagaattcaagcagaaactacaaaaagttccctctacctctcacttccccactccccaacagtttcccctggattaacattttgccttagtatggtacgtttgaaccaatatcgatacactattattaaccagtattcctgttttaacatgagaggcgactttttgtgtagtatagtctcttggttttgacaaatgcttaatgctgtgtatctattattacttatgacagtatcgtgcagagtagtttctaaaaatcctctctactccacctattcatcccttccccactccccctgaaccactggcaaccgctgatctttttattgtctccgtaattttcccttttccagaatgtcctgtggttagactcatggcatccccttttagcaactgcagaaactaagaactgtccccaaggataaaaatttttgcagacccactgagctgggatttatacttagacctgctgaattgaagttttgggtgtgtttcttctcaaattgccaaaattccatatggacgacttttcttttccttccctgaaatgtgtttaattgactttttctgttatttgtgtttgccttcacagtgaagacaaagtagtagaagtagcagaggaggaagaagtggctgaggtggaagaagaagaagccgatgatgacgaggacgatgaggatggtgatgaggtagaggaagaggctgaggaaccctacgaagaagccacagagagaaccaccagcattgccaccaccaccaccaccaccacagagtctgtggaagaggtggttcgaggtaatccaccatttgcttggattccccccacccccaaggaaaagaaagcgtaataccagagttggaaatatccaccctagcaccactgccttccccaatcaaaaacatgtttttttttccaaaaggcttcttatgcttgtgaaatttttttggtttaacaagcaaacaatttcaaataatgtgaaatctttattatacagtttgttttgtacctt

SEQ ID NO: 28520 - DNA, 1047 bp, Homo sapiens
gaatgtaatctctctgagtacagggagcttatctttttcccttttggagcctcggatccagcagaatgccagacacttagcagccactagcatttgatgagtgaatggcttttcatacacaattttagacattgttcctgattggtctctctagtcaataatagatttatcaaatctaatcgataatagatttctttttcttttctttttttctttttctttttctttttttttttgagaagtcttgctctgtcgcccaggctggagtgcagtggcatgatcttggctcactgcaggctctgcctcccaggttcacgccattctcctgcctcagcctcccaagtaactgggactataggcgcccgccaccatgcccagctattttttgtgttttagtagagatggggtttcactgtgttagccaggatggtctcgatctcctgtcctcaagatccgcccgcctcagcctcccagagtgctgggattacaggcctgagccaccgtgcctggccgatagtagatttcttttattgattagagagactaatcagcaacaatgttttaaaattctcacatagatctctgaatgggaaagcagtcttgaattatgcttgcagggagagagaggggaaggaaggaggaggaatggtataattagacttcataaggctagattttgtttctacttaaataatggtatcacagtgggacatattatccatgcagaaagtgagtgggcatctggtctattatctgtggtctttcaggaatggcagctctttagtttaaaaaacaacaaagtgcagcactgtttatttaatggaaatagaaaagcagtgcctgtgtattagtggctcagatttttttgttctttgttttcagctgtctgctgtatgcctctccagcggggtcttacagaatctcaagtctaccatgatcaaagctgaacccattagctccatttcttaattcctcctgtatcctctgttaccattagtaactattctccaactcaaagcatcagattcctcctcttactcactccct

SEQ ID NO: 28521 - DNA, 1041 bp, Homo sapiens
taatcaataataatacgtaatggctccttaagcacttctatcctagataaggttgagaacattattaaaattagttttggtagtaatcaagtaatgataattcttatttatgaatttaaatatgtaggagtttttttattttagggaagcaaaaaggactagaaagtatgatgtctcatgattagaaaactgctataaaaatgaaggtagaattgatttgggctgttttggacattttaaatagaaatttaaataggtattcaaatagcaaagtcattctactttaaaacttctatacttttttaggatcttcaattttatatttaaattatatttttgaaatggttttagaagaaatattgtatcttaaactctaactactaataagtaagagaagatatatcaaaggtttgatcttttatctcctagaatatactattcattcgtttcccattgtacgtcatttgaatgttaatggttagcctcaaatggttttcaacataattgtatagctactattattggaaaattggagccaaggactcatacacatatcagaagtggtaatgaagcactttggttttatgaaaatatgtttacaaggtagtcacaggatagcaatattgcatttactgtaatacaatgatggtggaactaagtgcagtggaacaggatgctgagaccacagttaccgcatctctaagtgcctcgtctagttatggtccaacctcagatataactcattggtgttgaaacacacctagcaacattttaagcatagaccgttcattaaaaggtacctttttaaaaatttttatttttaaaaattgacatgtaataattgtacacatttacagggtacacagtgatcagatcagactgatcagcatattcatctcaggcatgtatcatttctttgtgttgggaaaattcaatatcctgcttctagctgtttgagattatgtcatatattactgttaactgtagtcatcctacagtgctgtagagcactagaacttattcctcttatctagctgtaat

SEQ ID NO: 28522 - DNA, 1040 bp, Homo sapiens
tgcagacactggtgagcgtgtgctgagaggtaacttgatgtatctttctggataattagatgattttttttttctatttctttgaacattttttttttaaagagctgcttaagatctggaggagtgattccttttgaccgtgtcttattttcattaagactgtataacttggaagagtttttttttttctttttctttttcttttttttttaagatgaagtttttgctcttgttgcccaggctggagtacagtggtgtgatcttggctcactgcaacctctgcctcctgggttcaaacgattctcctgactcagcttcccgagtaattgggattacaggtgttcaccaccacacccagctaatttttgtatttttagtagagacagggtttcaccatgttggccaggttagttaatgttactctctggtttggggggcagtgatatgttttggcttttttcccacccagatctcttcttgaattcccatgtgttgtggaagggactcggtgggaggcaattgaatcatgggggcaagtctttcccatgctgttcctgtgaagtgaataagtctcacgagatctgatggttttaaaaagaggggttcccctgcacaagttctctctctttgcctgctgccatacatgtaagacatgacttgctcctccttgccttccaccgtgattgtgaggcttccccagccatgtggaactgtaagtccagttaaacctctttcttctgtaaattacccagtctcaggtatgcctttatcggcaacatgcaaatgaactaatacagctcggggtggcttgtgtgggtgcgtatggccatgtatgcaggtgtgcgtgcattggaatatacaattccgtattgaacccagtttaaacttcatcagttctggtgattgctggagtgtcacatatggcaagacgtcaccttgccctctaactacaccagaaaaccaggccagcaccattgactatctagatacagtgggccgtttatattattattgtttcatatttttagattatttggtaa

SEQ ID NO: 28523 - DNA, 1045 bp, Homo sapiens
tgttccctagagctacagatttccaaacagcacattcaataggagttgtaagtttataatcggcaaactacaggatgcttgtttttttttcttttaatttctggtgtaatctgctactagggcccccatagagtttattgtctatatcagctagaacactgggaccacagtcataaactgaaggatccaggcaaactgggtcatatggttacccccaccaattacagtcttcagtgatgatgtcactatccaggttgatattcagttgaaatgctagccagctccttcctagttaccttcatttacatcccatttcagtacctgaacacagtcatgctttagactctgaaattccttagaaatagtaccataaggtttatagctttgatattcctctctgatcatgatcttccctcataatcacctccccagttcaggcttttagtccattatcctctttttccctgcctgcctttctaatcaggatggaatcaatggataaccattcttacctattccattgaacatccttgacttggctgaaacccttcacattttctaaacatatttttgtcaattctccatagctaggaaaaattaatttctttctttagttgcttctgggatttctaaagtatcaagtcatgtaaccttaccacttaattccatttcttattcatgctgtaacatcagctgggatcttaatgttactagatgcacctaattatctctgtcttgatgacctatcatcttccccatagcagttgatccagcccaacttcattctccttggttcccagcgtaactctctctcatgctctacagatgacccctccaccgtcatccattgtgaatttctgcaacatggtacctgacatttggtaggtgcccagtacgtgtttgttgaataaaccattgaattttctcctgtacttcagcaactcttgtaccttcttctatccctttgtttcctgtcttcccttttatgattatgttctgctggactctcaatcatctcctctccctttcttgcattttcagtctc

SEQ ID NO: 28524 - DNA, 1080 bp, Homo sapiens
gagtgagctggggatctacctggaatgcgcacaatttctggatacacgaattaagccagaaggcattaattctctggtatctgttcaccagtggagactgctacatcttatttcccaattagtttccattccagttgttcgtataaacctctattatataacatcgtggtcttattaaataaataataaacaagaataaaaagagtaccaaagtgtaacccatgctaaaaaaaatcctgttgtaaattcactcaaaaagcaaataatcttttcctttgtgaaattggttcctaatatattgggtctgcatgttgattattttatgtggagttttcttacaatgaaacacatctactctaccactcactgttttctccttacactttgtagacatgcagtgagaagagtaccaacttgcatgactacggcatgttgctgccctgcggaattgacaagttccgaggggtagagtttgtgtgttgcccactggctgaagaaagtgacaatgtggattctgctgatgcggaggaggatgactcggatgtctggtggggcggagcagacacagactatgcagatgggaggtaaggtggcctttgtgttcagcctcagagatgctgaaacatcttgtatggagtatttgtatcctgtaaattaatctttctgtttatcactgaaaaggtctctgcccactcccatcagagtctgctgttatgcaaaaatctgaactatgaatttttatggcatcctgttgaattaataatatcagtcacccatcacagagttaattttaactatttaatattaaacttgggatcaaaatcccactgataactatcataggttactggtagttctaacagggagttgaaataataatggcgttctgttttggtcattaatttaaaaatatttttaaatgctctctgggattgtcagtcattagtttaaggtgaattttcgttaaaggtttggtttgagattttgggcgttctctgtgtggatgtgtaagggtttttttttggccttttatcatttcttttccttcatagtggaagtcaaaggcattaataaatgctt

SEQ ID NO: 28525 - DNA, 1105 bp, Homo sapiens
aaaaagaggcaacaaaaaagcacctataacttatcttgggttggttaatgaggaagctgtcattcaaaattagtaagactactgtaacatttcttggggtcctgaacattggaatgagagtcggttttcagagttgagcccacctctgtcattagctttgtgcaaacctcatcaggctcaagattcctcatttgtaaaggggaatgaattctctgaccagttagtttacattcctaagacaaggttaaatttggaaagcaaagaattttcggtatatatgtgataattttgaaattcttgaatttttaaaaaatttaaatgccacattacttatatttttttctaaaaaaaagtcaaaccaagcgctgtctagttattaatagataccacagatgagatgcctgagttggtaagctctttttaattctagttcttttcaactacaataattttatagacttttttttgaaggctagaatgttgatgtggaatcaaataggtatgcctctatgtatggtagatgcacctgacagggatcacttgacttgaacatgccctgacaatgatcctgtgtggcaggtgcacctgattctgagttctgagttaagaaatccgggagtgggccgggcggggtggccggtgcctgtaatcccagcactttgggaggccgaggcaggtggatcatttgaggtcggaagtccaagaccagcctggccaatgtggcaaaaccccgtctctactaaaaatacaaaaaccagctgggcgtggtggcgcaggcctgtagtcccagctactttggaggctgaggcaggagaattgcttgaacccgggaggtggaggttgcagtgagccaagatcacgccagtgcactccagcctgggcgacagaatgagactctgtttcaaacaacagcaacaacaaaacccaaaacaaaaaaacaacaacaaagaaatccaggagtggctaacccagagagccattccttatctgtaaggaacatctgagccctcatctccttctgtggaacatgggcctcgccggggattgagaccctttgttatgagttaagtggaagttgccaggtggagattgttagggggagggt

SEQ ID NO: 28526 - DNA, 1023 bp, Homo sapiens
ttaaaggcgtcctaactttgaattagataaagctaaactgtggtttaattgagctgagtttgttgtatgctatatctcaacttcacaagatgtttgctttttcttggctataacctaagattatacaaatataaaattacctttatgcccatttgatagactttagggctgaatttccctgtgtaagatgttgtagaggtttgtacttgtgattgtttttactctagaagcatgtttatcttcactcctttagtgacacgtgtttgttcaggaacttcaaactcaatgtgatcaaaactagactcatgttccctgaatagtctctcctgactacaaatctgttggaaacttccaatcctaattaataattgtaaactttttaatgtaagtcatatgaggggttgttgtgagcataggaggtagggagatggtagtgtgagctggagcatatggtaaaagttgtttgaaagaaagtagacccatgatgtggatcctgagggatacgtaaagaaaatgaagaggtgtagatttaaaaatgtttatggggcctgggcgtggtagctcacacctgtaatcccagcactttgggaggccgaggtgggcagatcacctgaggttaggagttggagaccagcctggccaacatagtgaaaccccgtctctactaaaagtacaaaaattagccaggcatggtgatgggcgcctgtaatcccagctactcaggaggctgaggcaggagaatcacttgaaaccgggaagcggagattgcagtgagccgagatcgcgccactgcacgccagcctggatgacaagagcgaaactccgtctcaaaaaaaattaaacaataaataaataaatatattcatggggatgttccagggaaagtagtttgtgttggtagccttgagaaataataatagaaaattagaatagaactaagttggttcattaaagttggaacacttgtagagatttttgatttggacagacattaattcatttgattatttctcttattcgatg

SEQ ID NO: 28527 - DNA, 1054 bp, Homo sapiens
gatcgcaaggtcaggagattgagactgtcttggctaacaacggtgaaaccccgtctctactaaaaatacaaaaaaattagccaggcgtggtgcgggcgcctgtaatcccagctactcgggaggctgaggcaggagaatggcgtgaacccgggaggcggagcttgccgtgagccgagatcgcgccactgcgctccagcctgggggacagagcgagactcagtctcaaaaaaaaaaaaaaaaaaaaaaaaaaaaatggagcccttctaggtaggtcatcctccatggctcactgcagcacttccttggccctgtcccaagttccataattgcctcaattgcattggctcctgcttgatttgctttctaaaactcaggacagaggatgagttgaggagactgacttttttaacaatcgcattttgaaaagaaggaagcgtagtggtgtttcttggctccgtttccagttttgtttcttttcattttaattattgtacctggtattgtgtcctctttctgggacttttaacaactaatgttttgattgataagagctctaatagcatgggtgatttatacttcattacatcttcagttttgtcttctttactggagttgtattcaggtgtcattaagtaacgaggcattaaaaagaaacgataacttttgaaaaactgctgttatggcttatgagtgggctttgctgatattttcttgaagcacagaatttatctatctctgtaggtcctagatgataggtgagaaaaagaaacccagcttatttggcatgatattgtcccaaggcttgttagtaattgctttgaaaaatgaatagcaaggctaatggacatctgatttgtagtacatgctaagaattgcaaatgtgtgctcaaaagaaatttctctgattacaaaagtaacatatattcaacgtacaaagttgagaaaatacaaccactagctaaaaataatcaaaaccatttggcttccttgcagtctacatttttttcatgtatgttttgcttttgtttttagtgttatttaatcgtttcctgtt

SEQ ID NO: 28528 - DNA, 1073 bp, Homo sapiens
acatttgtatggtggccataccaaaaattactcttcttgaccccaggaacacccctcttttcccgtttcacttagagatcctactaatgcctgggtagctttactttctgtcttagcctgttgtttgtcccagggtgtattagtctgttctcacattgctgtaataaactacctgagactgggtaatttataaagaaaagaggtttaagtggttcacggttccaaaggctgtatgggaagcatggctggggaggcctcaggaaacttagaatcatggcaggaggtgaaggggaagaagacacatgttcacatggccagagcaagaaagagaaagagtgtgaagggagaggtgctacacactttcaaacacccggatctcatgagaacactgtcacgggacagcactcgagggatggtgcttaaacattgaaaccacccccatgatccaatcccttcccaccagaccccacttccaacactgggaattacaattcgacatgagatttgggtagggacacagagccaaactgtatcaaagggttgagcacagagtggttcttcccagttctggactttaccagattgttggtggccaccatgagtggggagaattagccctttgctgtcaccttcctcttgcaattctggtattatctgtcctctgcctaccacccacccacggaagtcttgttggatgatacacaccagccagattcttcaacattaggcgccataagtaagaaagggccaaaacatcataccttgtgagccattttaatggatttgggctttattttgtagcaacaggaagtcactagactttattttttatctatttatttttttctttttttttcttttgtttttgagacagagtcttgctcttgtggcccaggctgcagtgcagtggcacaatctcagctcactgcaacctctgcctcctgggttcaaatgattctcctgcctcagcctcccgagtagctgggattataggcgcctgccaccacgccgggattttttttatttttagtagagacagggtttcaccatgttggccaggctggtctcgaact

SEQ ID NO: 28529 - DNA, 1073 bp, Homo sapiens
actcttaacagacttgttaagagttgagactgataaccagagaatattctgggggaaaccaggagggatcgccaacatactcagttatatttgtggatggtgaattctacagtgaatttttctgttcaaaatcataatacagtcacttgctaactaccaacgccatacttgctctcagtgctgagaggtggcacaaatattattttcagtcttggtcatcaggcagggcctggcaggcatcatgctctgtgtgagtcagtggagtttattataagaatgcggtagcctccacagtgattatatttattataggaaaacgtgtaattttgttgtcagaacctttcagcaggtaccacaaaatctcatatgggaaaacgtgtaaatttttcatgaataaattcctttcggtattggtaatttccttctctgttttagtataaaagaaagcattgccttataggtggctaagaacatctgtagcatacataacacttaatctaaaggagtgttgaagaccgggctgattcctaattgagaatgagcaagaatagaactctttttgatagttatccctgttcttcctccaagcctctgccttggagctatggatactataactaactgaagcttcttctttcaggtacccactgatggtaatgctggcctgctggctgaaccccagattgccatgttctgtggcagactgaacatgcacatgaatgtccagaatgggaagtgggattcagatccatcagggaccaaaacctgcattgataccaaggaaggcatcctgcagtattgccaagaagtaagtcctgtccggtggctagcaattcacgttggatcacatgcatttgttttcaaaaaatttaacttcttgtattttgcatcagtattttaaccctacagtaaaaatcttggttcctaatgattcaccataccattaatatatttatttgcattaccctatgatatacatataaatgtttttaaaattatgatgtcgtattatgaccatcactaaacagtagtttaagatgtcacagcacttttttttttcctcactctgtcac

SEQ ID NO: 28530 - DNA, 1028 bp, Homo sapiens
atagcttttaatgtttttttaagagagaaagaggcccacgaaagttgtcctggggcccccgcatcctcctcatacactggtgggatgctgctcttgcttgctttggaatgtggcagcagctcccagtgacttcacacgtttattacaaattcaaggtcatttggacgctagccttgtgctacctttcatgcttcctgtccgacccatactcagcctgggcatgttttctgctctgatctttggtctgccttccttctccttctccaagtcaaaccagtcactctttcctgagagctcttcggtgtacccttgccagacctctgcattaacactccagcacctttggttagccaatttggccttatttgtgtctccaccattggattatctgtccatcaaggtcaggaatgttttcgggttaccccactgtccccaactttgaatatgttcactgcctggaaaatgtttatctgaatataaggcatcaagccagaacttgcccaaaacttaacctaggactcaaacagctttgaaatcttatctgtgtagagtgggaacggcatgtgtttgataaccatcagcatttgctgttttgcttagccatcaacaatccgtttctatctcttcctcatagtattttcagctgtatttttgtacagcagtcattcacgttaggtgttaggttacactgaaatctctgacaaccagttctgtgctactgaaggcttttagcagcaggattaaaaaaatagttgattgcacattcgaagtctcactgctcacactgtttatgtaattcttggagtccagttagatcatctgatttttaaaatgttgcctgaattacaaaggagttcaggaatgtgttatcaaagaattaggaaattaacattgaaatttattgagcaacatagctaataggttgtcttgctttttaagccttcttgttttctaggaggagcctgaagtccgtggacaagttgaactgtagctggtatttaggaattggtaaagacagaggtgtggat

SEQ ID NO: 28531 - DNA, 1030 bp, Homo sapiens
tgtttgttttgagacggagtctcgctctgttgccaggctggagtgcagtggcccgatattggctcactgcatccttcaagcaattctcctccctcagcctcctgagtagctgggactacaggtgtgtgccaccacgtccagctaatttctgtatttttaatagagacgaggtttcatcatgttggccaggatggtcttgatctcttgacctcgtgatctgcctgcctcggcctcctaaagtgctgggatacaggcgtgagccactgagccctgttgaaaattcttattaataagatgtttctcatagaatgtttcaaaaaattgtgactggtttcaaaatcagatgatttgcaagaattagccatagtataaacacatagttctcaaaccgttttctgggagtgggcccagagatctatttaacaaaaccttgagtagagtctggtgcaagttaaaattggagaaccactaatgtaaccttaccttatctgtggaccacattttgagctttggaagaaataaccctttctatccttcacaaggtaacagatgatttttttgcacaattatttgataatgagcttatatttgagattaaggtatgcacacgataatgtacattctcactctaggtctggggaccttgattctttgactcttctgtccttttctctccagttacttggttttgtgcattaacaaacttttcaatttacttatttttttttacttatttacttatttctcatcccttacgtaatgttgcatcattgttttttgtagcctctgcagttcaagatactaatcacccctttctaccacattaaaatacagactctacctaaaatcatgtatgggagtaacttgatatatacgaaagtgtaaccgtgtcacaattccccgccccaccccgccagtctacataaaactgcaaacactttattgcttaccaagaaagtagacaataatatcgaagaaagccctccttttcctcttctttgaccaacaagggagcagttcctgacaaatg

SEQ ID NO: 28532 - DNA, 1033 bp, Homo sapiens
tgcctcagcctcccgagtacctgggattacaggtgtgagccaccacgcctggctcattttttgtatttttagtagaagcagggtttcaccatgttggccaggctggtctcgaattcctgacctcaagtgatctgcccactgcaggcatgagccgctgcatgcagctggtacagaaattttttagatcagtcatttagaattttatgtacatatcccttgatctaggaattctagaaactaattagttcatagtatattgtataaatgcgcacagatgaggatattatgagagcattatttgtatcaactaagcaagcctttaaaaaactcttatacagtagaatattatgctgatacattaaaagtgggcataaccatactgatgtatagaaatatctaaaatcataccgatataagtgaaaacattcagaatgcaggcataatcacagattaaacagtaatttatataaaaaacagaaaatttatatgtgtattatgtcagtagcagattcaagtgaatctgacaaaatctgactctgggcaatgagaacattggaatggaggagaaggtagtacatatttactttgtatattatcaccttttgtactatttgagtctttttaactgtacgcagatactttagagcaggggtccccaacacccagccatggacaggtactggtccatggcctgctaggaaccgggccacacagcaggaggtgagtggcaggcaggtgagccagtgagcattactgcctgagtgctgcttcctggcagtagattctcacaggagcacaaaacctattgtgaactaaacatgggagggatccaggttgcctggtccagtccttgtgagaatctaactaatgtctgatgatctgaggtggaagagtttcatcccaaaaccatcccatcccatccagtctcatgccatcccacccccaacaccccatggataaatggtcttccacaaaaccagtccctggtgccaaaaaggttagagatcactgccttagaggctgctccctcttg

SEQ ID NO: 28533 - DNA, 1061 bp, Homo sapiens
agcttttggggtacaagtggtttcttgttacttagttgaattacgtagtggtgaattctgagattttagtgcacttaagtagggtaccttgtacctaatgtctagtttttcttttaatccctagtcccctattaccctcctcctcgtgagtctctaaagtccaatatgtccctctgtgtgcctttgcttattcctaacttagttcccacttataagagagaacatacggtttttggttttccaattcctgaattactttacttagaataatggcctccagctctatccaagttgttgcaaaagacattattttgttccttgtaatggctgagtagtagtccctgatatatatatgccacatcttctttatcctctcattagtcagtggccacttaggttggttctgcatctttgcatttgtgaattgtggtcctgtaaacatatgtgtacaagtgtctttttcatacaatgacttcttttcctccgggtagatacccagtattaagattgctggatcaaatggtagatctacttttaactctttaggaaatctccataatgttttccatagaggtggtactagtttacattctgagagaataatttttgtaaaattatgtttaagctagatttggaattgggaaagaattacattctttataggaagcttttgaaaaatatatttaaaaatatataaaaatatgcataatcctaccacccacaaatgtctgtattattatgtcatttctaaaccatttttgagattatgctatagattacgttttagatcctacattttatttcttaacattaaatctcatactattttaagttctttgtacatgtaatgtttactgaatgggtaaatctgtttagggaaactggagctatgtagttgtggacttgtgcttttgttttgttttgttttgtttgtttgtacatttgctttttagaaatgtctattcagatccttggcccatttttttttttttttttttttttgagatggagtcttgctctgtcgcccagactggagtgcagtggcgcgatctcggctcact

SEQ ID NO: 28534 - DNA, 1049 bp, Homo sapiens
aatctaattgaggtcattatgattagccttgtatcttgctagtattttctcaatcttattttgaatgttttgtgtcaagtgttaaatcctcttataccacagaatccagaaaatttaaatgcaacagaagtaaaacgaatataaaaattctatggttgttgtggaggggcgttcttggctaacccatagggtgtttgaatgtaaaggcagcttacagaactgctgctagttgaattgtggagggtttcacttttaagagtacatttgagacaaaattgcaattttggaatcacttattcctgcttgttcagtgaaataggagaggggggaattcctgagggaagctgggagatttccaggtgatgatagagtagccatgtgagtatttggctgaaacagagtagaagccacctctgtctgttggacagaggtggccttaacactgagtatcaatcagcatggccattagagctgtccaggacaaacataatgaatgttgtggtggcagagagggtatacttaaatgaacaaaattggaggctgactttccttgtttcttggtagttcctttcttcgtatttgctatttggatatttcacttcacttttgtgagctagactcaaaggttaaatttatatcattgtgaattttctgggtcatattgtagggacacagatgggaagcatcccttcagtttattgagagtatttcttatgcgcatgtgtttttaattgtatttattgatttaataaatagccgatgagatgagaaaaaaatattagtgtcttgttgttgcagagaaaaagacattggatgcattcttagaatttattatcacatgcgaagttatttagatttacaaagcaatctgacatgttgacttcattgctcgtttgctcatttctatcagaggttgaacacaaagccaagcctaagcccgtgattcttctgtgtgcagatgagggggaaggtttaatgcagaatgtttagctgaatatttggattgtgcattccccttttatgtctctactgcaagttttctcagggca

SEQ ID NO: 28535 - DNA, 1083 bp, Homo sapiens
gtttagtttttccttgtctgtgtgctcgttatttcacagtaaaattagtgaggcaacataaattttatttttaagagaaagtaaagaaaatggctttatccattaaaggtttattcatcttaaaaaaggacttgttatatctactcctactattggatgaattttcaaaagcatattgatactgtgtttggttttgtttgttttcgggacaagtcctcactctgtcacccaggctgaagtgcagtggtgtgatctgtagccgtggcctcctgggctgaagccatcttcctgccccagcctccagagtagctgggactacaggcatgtgccaccacatctgactaatttcttaaatgttttgtagagatggggtccccactatgttgcccaggctgatcttgaactcctgggctcaagcgatcctcctgcctcgaccttccaaagtgctagattacaggtgtgagctattgtgcctggccaatgttgtttttataaatatcattactcagttattttgtttataattgaattgataggctcatagaataaagatggataagcactgtttcttaactgtatttattgatttttttatctttcaaaaaaaaaatcctcatctacttcaaagattaagcctttaaaaccgatgcaaagtttttgaagtcttagcttaagtcttcagagactaacattaaaacccatcatatgaaaagtgatatgtagtagcaaatattctccatcctgatgctctcaattgcttattatggtttaacacaaatataattttgtcattacagtaaattagtttgaggatataactgaagagtacctaagaaactcccatagaaatgtgaaaatatgcagactaattattctaagaataattaatcatagatacttacatattaaattgattagcaatttaaaattaaagccaaatttctgtggaaattagcttattttcatacacaaagaaacctagattcttaggggtacaaccaagaaagggccactccttcatttcacaaatattttcgaggtccttgcccccaagagggtagacagaataaaaaggaggaagga

SEQ ID NO: 28536 - DNA, 1062 bp, Homo sapiens
ctaaactatcagtgagaagtgcattaaattcagtagaaatgtacattgtttctgcaaattgtattaccttgagaatcttacaaagcatctttcattaatacatttcttttaaaatctctatcaattacaaatgtaaagataaacctgtacagatgcattttaaatttaaagcttccagaatgtaaggtttagttcgactgcatacctcattacctccccttccctcctccctccccttactcccaggaagtttgcagggtaaataaaacatgcacatgataataaaacaaagtggaatgtactaaaataccaaaaggaaaatacagattaggtatactgagtaaatatgttacagagaaaacttcctgtatttaaaaagtaaggaacaatgggatgagatcatagataatcctggagcatttcctggtagtaaatttccagccaggtttatatcccaggtctggggattggaggttaagtttctgcatatacaatatttgtttacattcctctctgcctctaccagacagacagacagacacacacacacacacacacacacaccctctgtctctttctctctctttctctctctctctctctctctctctctctctctcacttgagtgacagatgctggtgcagggtattctcaacaggagtagggaatttgaaataaggagttgagaggtcaaaggtaaggggctgaatgcaggaccagagagcttcagtagcatcttgatgggcagagtatgagatgaacagtggcaacgaggaggatagggaaaaatcacattttctgtttgtgttttgtttttgtctggtggttttcaacctctctctgtttcacttgactatgcttgattatgaaatcttttttttttctttttttaatttaaagatctcaactggctttgttgtgattctacattcaggcaacactattctgtaaaatagtataaatgttccgatgagttgaacagaggagattggctttgtagacagaaaagggctgaagaaaacagaaataaaaaaatcttttccttttcatagtgagagctc

SEQ ID NO: 28537 - DNA, 1051 bp, Homo sapiens
attgggttggcagagaagactggtagaatgccgagacattaatggacagcctgcttccgagtgtgcaaaggaagtgaagccagccagcaccagaccttgtgcagaccatccctgcccccagtggcagctgggggagtggtcatcatgttctaagacctgtgggaagggttacaaaaaaagaagcttgaagtgtctgtcccatgatggaggggtgttatctcatgagagctgtgatcctttaaagaaacctaaacatttcatagacttttgcacaatggcagaatgcagttaagtggtttaagtggtgttagctttgagggcaaggcaaagtgaggaagggctggtgcagggaaagcaagaaggctggagggatccagcgtatcttgccagtaaccagtgaggtgtatcagtaaggtgggattatgggggtagatagaaaaggagttgaatcatcagagtaaactgccagttgcaaatttgataggatagttagtgaggattattaacctctgagcagtgatatagcataataaagccccgggcattattattattatttcttttgttacatctattacaagtttagaaaaaacaaagcaattgtcaaaaaaagttagaactattacaacccctgtttcctggtacttatcaaatacttagtatcatgggggttgggaaatgaaaagtaggagaaaagtgagattttactaagacctgttttactttacctcactaacaatggggggagaaaggagtacaaataggatctttgaccagcactgtttatggctgctatggtttcagagaatgtttatacattatttctaccgagaattaaaacttcagattgttcaacatgagagaaaggctcagcaacgtgaaataacgcaaatggcttcctctttccttttttggaccatctcagtctttatttgtgtaattcattttgaggaaaaaacaactccatgtatttattcaagtgcattaaagtctacaatggaaaaaaagcagtgaagcattagatgctggtaaaagctagaggagacacaat

SEQ ID NO: 28538 - DNA, 1101 bp, Homo sapiens
aaatctaacacttcacatgcttgcaattgctcgctattactcttttatatgcaaagaaaagctttttggacagtcaagcgctcctctgtgcgactaggcttcacatacagctcatagttagatacattttatattcacacagtaaccagtagttttggaaaatagtctatgcatggtccaaaatacttgttactgggtaactagcagtagcaggtgcaaacagaataatagaagtggtagtctgagtattgattatttttatgtttgaaaacacatattgaactaggaaaagcatcatttcttttgctgttttgctaagggaatacatctggatctgagacagaaaatggaatttaatgtgattgagatgatcgtgtgtcattagcaccataggctatgaaaatattcccaagttgcagattcaatattcagcaagtgatttctgaagcacttactcttgccagatactaattattctaggctctgaagatacagcagtaaacaaagtgacaaacagctctactttcattgaccttagctggaggagacataggtcaatagataaataatttttaaaaatatctaatttcttcagatgtctatacgtagtactgaaaaatatgccaaagtgaagggtaaatgcatgaaatgcataatgtgtagagggtactgtgtttaattagcatggtcaggaaagtagagagaaaatgtttacacttatcattgcagcatctccttcctttgcttgtatgtaacactagacatgtgtccttttttcaggttgtagatggtactccatgtagcccagattccacctctgtctgtgtgcaaggacagtgtgtaaaagctggttgtgatcgcatcatagactccaaaaagaagtttgataaatgtggtgtttgcgggggaaatggatctacttgtaaaaaaatatcaggatcagttactagtgcaaagtaagttttaaaacacctatttgcagaccttataatttaaatgggcctttcaacaggtctgggaaaaaaatatgtctcataaaagattaatgtgtttttaagctaaataatctaattagccaatgaatcagagatttatgcctgt

SEQ ID NO: 28539 - DNA, 1048 bp, Homo sapiens
gaagggaccctattatgaaattacttaaaaaggcaaaaatgtggacaaaagttgactcgtcatttcacccttggtgcttaattagcatttccatcctagcattcctcacaggtttatgggtattaaagatatttgtgtctttccccatttttttgtccagatgatggctctttgaagacttatatgtcactcaccataaagcctttctcaatctatcgtatcttatgggcactaagaattcagaaaaattctctaagtcatttaaaaaaattccccttttatgatggtattagtaatatcattacccaatttcagaattgcatgcttcatttatggcctgtcccaccaaatccagaattctagtagaaaggaatgcagagactctactcacctctagtccaaaaactaattaattctgtgttcccaagttagtctgcacattggaacaatgtgagaagtttcaaaagtgctcttgactgtgcccgaccctggaagatggggatttaattggtctgaggtgtgggtaggctctgaaagatttaaaagatccccacgtgattctaatgtggaagcaatctgagaaatattaaagaattatgtgagattaagtgaaggcatatttttgtcagtttgtgtttaaacagatcccattttgtgccagaaagaatggaaagtagatttgtaaagatgataggatctgataaggatgaaaatggttgtataaatcttgaaagttagtataaatgttttaaatgaaggcaggttgctagcatcatcctaattttgaacacctcaattaaagtgtatacaatactgtagtataattgcaattttctcataaaaaataatttttaaacccaattttaaactaatccattaaaactgtgtgttaagagaagactttttagagaacttctgtttgtgtatttatttgttaagtgtttactcatttttttctccctttttttaaccaccttcccccacttcctgtgaacattcctacttccagtaagggttacactgacgtggtgaggattcctgaaggggc

SEQ ID NO: 28540 - DNA, 1032 bp, Homo sapiens
gaaagcaaatttattaagaaagtaaaggaataaaagaagggctacttcacaggtggagcagtggcaggggctctttgactgaatatatttatagttatttcttgattatatgctaaacaagaggtggagtactcatgagtgttctgggaaaggggcagggatttcccagaactgagggttcctcccctttttgaccatataggataacttctgggcattgccaaggcatttgtaaactctcatggtgctggtgggagtgtcttttagcatgctaatgcagtataattagcatataatgagcagtgactacaaccatagatcacttttgttgccatcttggttttggtgggttttggctggcttctttactgcaacatgttttgtcagcagggtcttcgtgatctgcatcttgtgccaacctcctatctcatcctgtgaataagaatgcctaaccacctaggaatgcagcccagtaggtattagctttattttatccagcccctattcaggatggagtgactctggtttgaatgcctctgacaagagtaagttgacatactgagaacaattaaagtctacacagggaatggcaagaccacactagatctctttacacacagatctaccaattggcaactagaattataacttgtataaaggaaatgaaaaaatttctctttgaagaaaccaactagtttaacaggctccttggggttccctagcaggacagccaatccagatcaccttctaggaaaatccacccgtgaacagagtttgcaatcgttttgtggcacgtcactcccacttgtaaatataagttcaaaaaatgaaagaaacacaataatacataaagcctcaagaaaagaaagttgctgggagggtagatttatgggccttcctatggagaacatccctcagtcagatacagtatttattcctggaaaacatttaggtgatggagacgcaactactttatacaaagcatgtttcaatattttaattttcataatcctatcaacatttacattttat

SEQ ID NO: 28541 - DNA, 1032 bp, Homo sapiens
ctttattttaacaccagtttaagatattgtggtagcagcctgaaaagacagatatggattcctcttcaatctttttatggtggtataagactttttctttgaaaactgtgatagaaaattttagcctttttattcacaaacatatgcataatgtttagctccactaatttaagtttttttaagttaatttttaatgcataatcctggtttagaaattcaaacatcgcaaagatgcttattgcaaatgcaccatttctctatcccaccactttcttgctcccagatctttcccaggggcaacatttaaatctatctttctcctagcatttgtgtatcactagtgttataaataatatgtgcatcctgccatcttataattcatgaatcttagggaatatctacttactggatattattgtggtggaggattaaactatctgtgccttatgatttcttccttcctttcaatatggttatattataatttgttttattcaagatttattggacttctttatctgaggatttatgtctttcaataatctggtaaaatttttagccgttatcttttttaatgtttccccttccctattctccctataatttacttctagagctcagaatagacaaatattgggctttcttactctttcctccatgtctgttaacctttctctcatattgtccatacactctttttcagatatgtcatccaactcactaatttctaactttgtgtaatctgctgctttatatttccactgagtttgaaattttagttttataattttatttctagaaattctttattttaaaaagtctgccttgtcattttttgtagttttgttttgatctttctctgatttccttacacatgttaacataggtactctatgttctttatctgataattccaatacctggagcctttatgggtctggtttggtgtttcagctgattttcactgaaggtgatacatttattggattacttctgatatttatttatttatttatttatttatttatttat

SEQ ID NO: 28542 - DNA, 1049 bp, Homo sapiens
acaccaattattcttagttttggtcatttagcataatctgaaacttcttggaggctttgttctttaaaaaaattttttgtctttgtcagattgagttaattcaaaagccctgtctttgagctctgaaattctttcttctccttgttctattctattgctgagactttccagtgcattttacatttctctaagtgtgtccttgatttccagaaagtgtgattgttttttatttatgctatctgtttcactggagatttttccattcatatcctatatctttttttttttttttctttaagttggacttcacctttctctggtgcctccttgattggcttaatagtcaaccttctgttgttttttttttttttttcctggcaattcagaggtttcttcttggtttaaatccattgctggtgagctagtgtgatcttttggggatgttaaataaccttgttttgttgtgttaccagaaccgtttttctggttccttctcatttgggtagactatgtcagagtgaagatctgggactcaagggctgctgttcagtttctttttcccacagggtgctcccttgatgtggtgctctcctctttcccctaggggtgggcttcctgagaactgaactgcagtgattgttgtttcttttttggatctaaccacccagaagagctactgtgctccaagctggtactggggagtgttggcaaagagtcctgtgatgtgacccatcttcaggtctcctagtcatggatactagcttctgctcccatggaggtagcaggggagtgaagtggattctgtgagggttcttggttgtatttttgttacgtgtgctggttggcctccagccaggagatggtgctttcaagagtgcatcagctgtggtagtagaggaaggaacaggtggtgggtggggccatagagctcccaagagattatgtcctttgtctttgacgaccagagtgggtagggaggacgttcaggtgggagcaggtttaggcatttctgaggtcagactctccttgggcagggcttgctgtggctg

SEQ ID NO: 28543 - DNA, 1069 bp, Homo sapiens
atcaagcattcttattttgctgtttccaggaatagcttacaattttaatttatgacctttagaaatattattttgtccaggcactgaacacaaagtgccatatcatgagctgctaaggtaggaagaatcagcagattgtttggattgtgaagagacaacttttatatgcatctctccatgcggcaatggccaatgctttgtagagctgagagaactcatagtattgtgactagaggtggcagtctgagagcttacagcaatggttggctgattagcagtaagtacttatgaggtgtgaaagggaagcagtgagagatttgatactgacaccattaagggacttcagtatgaaatcagcacaaaataacataatcttagcatgtcatgcaaggtctttcattatttggtccttgtttgcatctccagtctcattttgcactgttctccctgcctccctctactccagccctgccagatgtgcttcagtttctcaatgctaaactgcttcccatcttagggccttggcattggctgtgcctctgtgtggaaggttcttctagatcttcatatacatgtaaccttcctcagcaaggctattccagaccacccaattcaaattagccaccaagtcgctctctgacctattgccttgttgtacttcactgtctggcttctatgtctaagtcttatttttcttgtttatttatttatttttttcccttaccaactaattgtctgtggccagctcactggagcctaagctctatcatagcaagactttatatactttgtatcactgtgcctcagtgccttaaaaagtgcttggtacctgatggtttcttatttaatattggtgaagtaactgagcaagaatgacaattatttgattgcctgccacgatggttagatccaatcctgagtgatgtgttgagttttttgagttggagagagagaaactggaatccatccacaaatgagaaactagaatagcaaagggtatacaaatggtacttgtagggtaggaactggcaatattcaatctggaaaatatttaaatgactaggaaata

SEQ ID NO: 28544 - DNA, 1026 bp, Homo sapiens
aaggaattctaggctgccaaacctctgtttttaggtatctacaataaccctattgcagaaaacaactaacttaatgtattaacctaatgtgcagaaccacttttctaaaattgggtgctttatgctaaaactatgaattccaagcagatttcattgacttgtttcagtaagtctgaacctgtagccaggtttttgtttggacagcactgaaaatgagacgttaagagaaatacattaaaatgtgtgttttatttttttcgagacagtagaaactctgtcctggcaagttccacgggagagaacatctgctcagaaacaattcttatgctttccttgacttagagtgctggtgaaaaaatagctttatggatctctaacttttgtgcctttctaccaccaaaaaaagatactacttgtcagaggttatccttcagtatccttcccttccaaagtgagtaactaagcagagaaagaaagaaaatgctggagataaccatgaaagctgttagtagacttcaacattttttagactctgtgcaggcagacagtatacttagttgcacaaaacactgtgctgtttttgaaattaacaaattaatggcctataaggatatggcccacgatccataacttactaaatgctctttcattgtacgaacctgttctgatcggccttcaagaagacagtgagaccagtgcaatgttctgtgactcaaatccacatgttttctcagagttttatcagatcttcctcttcatggttgctgtactttctgctcatttgacaattgtcacatcatttttgttagtgactttcaaataccattggtcaacaataattccagttggtaaacacagtttgcatataggttagcgtttgaagttgttttatttcattagtctttttgacttaaagctaatgacttcaagggataaaaagatagtttacagttttttcttttgctaatcatagagccagatacatttttcatgatcatttaggcttacataatttctcaataatat

SEQ ID NO: 28545 - DNA, 1013 bp, Homo sapiens
aggcttcatcttaacttgaagtgggttgtatttattcctctgctacctcatcaggagccccactgaatcagaattctgttctatgcattttcttagggccctcaagccaactttcccactctattggtttcgggcatttttaatatcctttgaagtagcctctaaccaaactgagctactggaactctagaggctccagttattcttttattagtatcctagttacaaaattgtttgggttttggatggtaggactttaatgttgtttctcttttaggtcctattattttggtgttagagccaaataccatacagagattagttgagatctgtccctacaacctatatttgacatgcacacttgagttttggagtcataaacataatttcaagcatcccacaacttctaggatttctgcacacataccaagaaatggcttgtcttaattcacagaactaccattcaagaagtccatgtccccatttattcaaaatttgaggtattttaagaattaattttattcctttgcattttttctttttgcctttttcctctcaatatccatgttatacagttaatagccctagggtaaagagctgtttcaatccaagtctatctaggaagcttggcccaagataccattatttatggttagaaaagatcattgttgtgctaagttatttttcctggttggcagccttaaaggtttgggttgctggctgctttttggggattatatcataagtatggatgagttgaagtacaaacatttaaaaaactccagtattctttgtccaaacaaaagaataaccttccaagttatgaggatatgaatctcaagtgttctgacttccagaggtttttttgttttgtcttttctctgcagttacaattttcatggtgttgttgtagtctgccaatgtcaaccaatttgtgttttctggtaggataattgagttgagatttttctcctttgacatgaagtcagaatattaaagttacaaactcatgg

SEQ ID NO: 28546 - DNA, 1065 bp, Homo sapiens
cttggctccatcttaaagaattttaaaagtcattttttccagaattatattgttgtaggactctctccttagttccactaaagatgtgggtccttgccacatggccataaaaaattaggctcacagacaatttgaagggtgagaataatggaatttattgggcaaaagggggaaaaaggggaaatagggaccctccacaaagccagggtccgctagtgtgcttcctgcctcacagattgaatcctgggtaccacccaggaagaggaggggccaggctcctcgctgctgcaaaggcgcgaacttctgtggctacaccccagtgcatgctcctcccagtgtgcaggccagttggagtttctctcgggaccccctcccacctggctgtctctgtattttcaggattttgatctttcaggatttcaagatgatgatatttgggattgtgtcttttgtgattatgatcagctcctgttgaagtcctaaccccctggtacctcagaaagtgactgtatttggaaatagggtctttgaaggggtaattaaattaaaatgaggtcctattgtgggccctaatccaagctgactggtgtcttcacaaaatgaggagattagaacgtagacacacacagagggactaccatgtgtagacacaggaatctaccagctaaagacagaggcctcaggagaaatcaaccttgttgacaccttgatatcaggatttcagcctccagaattgttaaacaataaatttctgtagttgaagccacccagtctgtggtagtttgttatggcagccctaaaaaccatacaccagggcagtttgcttcaaattctaccttgctagcttttgtactttatctgctgctgagctttggctctgactccgaaggcccagacagtggaattggggttaagcatgaaggattctgtgttggagtaaattccacggggcagggtaatgcccagctggacttgcaagagaaagtggcccaagagaagaaagaacttcataattccaaatgagaaacttcctgtagcagctccaggcccttctaagaagagcta

SEQ ID NO: 28547 - DNA, 1035 bp, Homo sapiens
gagtagctgagactataggcgcccgccaccacgcccggctaattttttgtatttttagtagagacggggtttcaccgtgttagctaggatggccttgatctccaatctcctgacctcgtgatcctcccgcctcagccttccaaagtgctaggattacaggcgtgagccactgcgtccggccctgaatcttgaaaaagtaattactccaagaaccaggaagagataaatgttccaggcagagagaagaaaatacaaaaaaaaatagaggagggaaattgaacatttgggaaatgcaagtataactacattgtagagtgtgtcaaggacagttgaagaaagaggatagtgtagtgaggcagggaccagattatggctggttttgagaaccacattaagggcttagaacttcaaccataaatgatggagggaggctttaaagaattttaagagcttgtaatgttgatgacctcttagtgctatactaagattttctgtaccttccttttgttgtttttctcatagtacttagagcattcaaagatgatgtgtatgttagttatatagatattgcacacagacttataagacattcctgcaaattaggtcaaagcaaattctacatgttgggtagtctactatttatggcaagtatgtaccgtaaccattaaaagaaacaagagaaaacggaaagtaagcctcagagtgtacttggtatgaatgcccagtgtgcttgaggaatggaattgtccaagaaactgtaggccaggccaataattacaaacaggtacccttcctttgacaatgtacttttgaaactgcctctgtaattacattgtaatggttaagcagatatatttggtaatcatttaatgctttgtttgtactatctactactcatacatttgtaaataaatttttaaatgggtacattttcctggaaatactttgaaaaaaaattctctcttgattgtgtgggtaaagaagtgaaaaatccatgttgaattttaattcagctaaacactgattaagaaagac

SEQ ID NO: 28548 - DNA, 1047 bp, Homo sapiens
aaattatagtagtaattgtattagaggtaaagcatatatacagttatgaacagtgccctgtgtccaaaaaaatgcattacataattttcaaaaatgtaatgtatttattaacatacttatccatagtcaggttccacaggagctaattctgaatatggttcactcaaggccactctgcccaggaagttgggcagaagggatcaattcccttaagaggcattgatctgttaggttctttcttgcctatctagacttgagcagactccagaagaataaagccaataatttctaggaattcaatcttgtaaacttctgggtcaggtaaagatagcaggttgcttttgatagtttttggcctcatttgaattctaagcttatgaaaacactgtagttgtgaaatactttagcatgaagccgaggctggtgaaggaagggtaccttttctctcccacaaaaatcctctccaactagatttgatatattttgcatggattaattcataaacaatcactattgcccatatggaagctatgatagccaacggactgtaaagtaggctgaaatctgcagttggccctcaggttttgacccactgtcatttgaattcctgctttatgtcagctctcatagggaataagacattccaaagggttacccacacaataaaggactttgtctatgttcatgtgttttggccagtttgaaaatcttattgcgtggtctgggctacacaaatagacaaaagtaaatagagaaacctgcttcatggaatagctttggaaactgtggttgctaagatatagataggctttaagtagagagaatttccattataaatatactaaaaggatcagaaaagtgaatttacatgaaaaacatacactgggtgtttggaaagtgctttttctatagacggtgtgtaaaacgcatatcaagggaactctttgggggaagacaagaatttacacaaggtgttgggatgaaaaatattgctaacttgttttaattattggctgaaacttgatggaaagaggaaaaaatcctcca

SEQ ID NO: 28549 - DNA, 1051 bp, Homo sapiens
atatttggaacgcctctcagaatttccgcttcctaaagagcctgctgctctagcattttgcccacatgctaaaaggcatcagaatagattttgataaaacagaatatttttaggcattgtaatcagcctcactctgccaaattcctggcctttggtatgtgctgctgagtaatgtcagaccctcacacgtacacacactgacatttacaaggcacgaggtaggctccgccaagttcagaacaaagcccccctgttgattggttcaccagaactttctcagatgcatttattgtttgctactggaggaactgacagtctgctggtaccgattgaatttccattcttttcttcacttccattcttctcttcactcggggaagtgaagttgtggactcatgaggttatatactcaactgtgcgagggggcccttgggcctctctggcattgacactgatggaagctacacataggagtggggctgcattagatctttctggtatgagatttgtagaaatgaaaatgaacagggcttcactccaaacacgtactgaatgatcttagaaagttccttcctgaaaaaatacttttacctaaaaagacaaaaacagatgaaaagagagcattattttattattgcacgccatgaaaaagccagagtatatttagtaacctttggaattccactgcctttttagatggaggagcatcccaaaaaaggagacaggagggcattgcgtgtgcacgtgtgtttgaaaggaccaaatctctatctagacaaaaatagtagataggtaggttatagaaaagaatttcataaaactaagcagaataaattctttttccgaaatagtgctgttttgtgaaaggtgtttcttttcacattactgtatatggctaactctcagatttgtaaatggctacccttagagatgaagttactgctgaggattcaaatcacctgccttaaaagctgaggtaggatttatgatgtactgggcattattttctctttaggggcatcctttcttcaatgatgattgagaatgtcaa

SEQ ID NO: 28550 - DNA, 1091 bp, Homo sapiens
gtacttgtgcttcatttcttcattccaaaacaattgtcagtatgaatttcctgaggaatatgctacagtcattttggaagaaattctgttagcagtacagtgttgataactgcaactgtaacaaggacagaaattatttgtgagtatgcataactcgttgcccttctcttgcccatgaaagacaattctggcattgctctaaagttctgcctcccctaacccaacccttataattcagacaattactctaattggggtacccaagaaatagaaatggatgattcacatttgaataagtgagaagagggaagagtagtagaggtagaaagaaatgaggtaaggaacagaaaatctatgtgggtgaaggtggggtgtaaacgggaggagagagttttgggaagcagctactattaatagctttatggaggagcctaatagaggtagtgatgagagagaatttaaaatgtgtttttctgggcattaagaatatatttccttctttggcattttcttaagaagctgaaaaagaaaaccttggaagtttctttcagtactttctggctgctaagctatgattctttgactgtagcagtagattgagattggaccacattgggctccagactttatttgggtttcacaatttaattgagtgcagtaaaataaaaacttattatttcaaaaaactgactatgtatacaaaggccatttcttaagattctattattttgcatgatcacaaatttgtgatcgaagatggttagtctccaaagcttgaggttttaggatgtgtatgttaatcccttgggatcagcacccgtatatattcaggttaattgcttaggaaccaacagaacatgaagtgtatgtgaaatcgagggaaatgattttttccaagacttctgctgcctgggtttttgagaagccagttgcttccctttgggaatgacattagtattctgaattttatattctgatgagtacagttgtgtgcaaccagggctaacttcacaggtgcctgacccattcttagaagggccccagtgattggtttaatgctgtgctgctgccatcttgaagttcttaaaaag

SEQ ID NO: 28551 - DNA, 1066 bp, Homo sapiens
ttcctccttccaaattcctcaaactagggaagagaaactagaatttactaagtatctattgaaagtcagtttctttcacataggtcaactcatttaaatatttccagcaaattacccagttttgctattatctccacttttacagataaaggaatagaggctcagagaggttaagaatcccgcagtggggcagcggagattcagattgaggttgccgattctggagcccacagcctctccctctgtggtgcagtgtaattagtgctagacaatggaataggttttggaaggtgtcagtgaaccaaatggagggggccggggtcgggtgatggtgggtggagtggaaggttggcaggaaaaatcttcaaaaaaaactgaacaacagagtaagtccaaagtcagacaaaaactgcatttcaggcatttattgtttatgctttactatctttattaagagtcacagaagtataaatataagaaatgaaaacatttggtttatggaaaagtaagaagaggaaaggaatacactgataggtaggggagaatgctcagacaactgggatacctttggaattcagcccttgatgtacgtgtcgagaaaccactttacttgtgtatttcacataggaggtaaaacaaaaacatatgattgcttcagattccctgcatttcagcttccccacatttttataagacaaagaaaaccccctatggaagacattcaaaaaataagagccagaaatatagtaacccaaaagttacacactttttgtatgggtgaagggaaagcttggaaggtttgctgaaaaatcaactcacaaaaatttagattaataaaagaaaaggcacacagatttattactattatgtgcatgtagggaatctcagagtgattgtccaatattccaatgggatacaggtgtttatatactctatttcttagggggaatggagatggggaagtgtggataattttagggggataataaatgatttttaggggaaatcagtgggcttgaagaacatacagtggtctcttgggcccacagagcagtcaaggttttgt

SEQ ID NO: 28552 - DNA, 1078 bp, Homo sapiens
aaaggaaataaaatgaagatattttcttagtacaagtgtatgcatgcaaaaacatgtttttaacaaaaggaggaaatactcatgacaattacagtccttctttctgcagttggtcacatggtcgtagctggtactgatgactactttctttttttttttttgagacggagtctcgctctgtcgcccaggccggactgcggactgcagtggcgcaatctcagctcactgcaagctccgcttcccgggttcacgccattctcctgcctcagcctcccgagtagctgggactacaggcgcccgccaccgcgccaggctaattttttgtatttttagtagagacggggtttcaccttgttagccaggatggtcttgatctcctgacctcatgatccacccgcctcggcctcccaaagtgctgggattacaggcatgacccaccgcgcccggcgactactttcttctactactcattctgtattccttttgccttcagcaagcatctcagcaggtcgtggtttttttcctagtggagtgacccaaacctttattcctgaagggtctgggtcatttgtagtcctgcctggattgggctcttgtagtttcctactgaccttaatcacagggcatggtaatactaagagacaccctaattaatctcctgtattctatgcaaactcttccttacctcctttgtgaagtagtagactgatttcatcttgaaagtccaggtcagtaaccccaaccaacactgtaactcccttcttagtgtgttgacttaaaggtaggaggagcccaaagtgtccaggtggcaatcttaacttccagtttaatggaattgttgtgtctcctggtggcagcattcctccctctgcaattaagacctctaggccagcacaacgtaatgtggcgggaacaggaagcaaaaaatttggtagctgattactaaaggtgatggtgagtggtgccacttccacttccaccccttgattcctggacctgtgaatcctggctgtgagagaaacagtaccgtatattggacactgattcacagcatacatggccttctggagaactttgc

SEQ ID NO: 28553 - DNA, 1030 bp, Homo sapiens
gaggtcttacatagggtggaatattttccactgagagacgcaatcatgatttaattgaactggaagtttaagactgctcctcagccatttggggcttcttatgcctctaactcaatagacaaatgagttacagtgctggctgggtgattgttcctgactaccaagtagaaactggactaccccgaatggtggtaaggtaaagtatgttgggaatacacaggattccttagggcatctcttagtgttatcatgccctgtgattaaggtcaatggaaaactacagcctaattcagacaggaccactaatgatccagacctttcaggaatgaaggtttgggtcaccaccaggtaagtaccatgaccagatgaagtgcttgctgaaggcaaagggaatacagaataaatggtggaataaatactagctttgatcatatgaccagttacagaaacacagactgtgattgtcataagtatgtcctccatattttgctataactacattttgtgtgtgtgtagctttgttttcttctcatttccttattctgtaacataagatgcattgattttatagcatagtgtttaaatattgttaatttttttaactggctccagtgttcaaccttgattaattttacatcatagtatttaagttatgggatatcaaggagagagtaaacatcacatgaagactttaccacctcttctgggaaacgggttaaagtgtttctggtggaatgctggattgttaatcgtgttagatggaattatgaccttgttgttgtctttatgtggcagttaagtatggtttaaagagatgtttatgggtgccaagttgacaagggtaaacttgtgatggttaattttatatgtcaacttgaataggccacagggtgccaaatatctgtttaaacattattctgaagtgtcttgagtgtgtttacagacaagatttgcatttgaactgggggactcagtaaaggagatagccatccccaaggtgggtggacatcatccagtttgttgagggcgt

SEQ ID NO: 28554 - DNA, 1054 bp, Homo sapiens
tgggatttttttttcctttcttgccgttgagttgtttgagttccttatatattccttatgttagccccttgttggatgaatagtttgcaaatattttctcccattctacagattgtctcttcactttgttgattgtttcttttgctgtgcagaaagcttttagtttaacatagtcctatttgcctgtttttgttgccttcgcttttgaagtcttagccataaaaatatttgcctagaccaatgtcctatagcgttccttgatgctttctagttgttttatatagtttcagttcttaggtttaagtctctaatccattttgagttgatctttttagatggtgagagatagaggtctgttttcacttttctacatatgaatattcagttttcctagcacaatttcttgaagaggatgtcctttccccaatatatgttcttggcatttttgttgaagactttgtcaattgcctgcaaatatgtggatttatttctgggttctctagttctgttccattggtctgtgtgtgtctgtttttatacaaataccatgctgttttgattccaatggttttgaatacttttgtatttcatcgggctctaattttttttctggcaagtggacgttcaaatgttgaaccctaagaggacttagggcctcagcaaatttccctgtttcaacaaatggtttagaattataggtggtggagtgacttttacaagatggtattaaaggtagagaatttgcagaaaccctgtatcagtcttgtttgtaagccctcagctgtaacacagttactagaagggggaatatatgctctgtggaagaaagttgaaacacctcttttgggcagccaccttcacatttagttaagggaaaggaaacaagcctgtagtttaacattgctcacagggtgaatctgtgcaaatccaaaactagtaagtagagtaataattttttgtgttactaattacaaattggcaatattatttctttaattttatcgagctcattagtcagatattattgttgtttttgttaccatgacttgattag

SEQ ID NO: 28555 - DNA, 1023 bp, Homo sapiens
ggggagactccataaagtaggtgggatttgtactgattttcaaagaatggatgggattttaagttaaaaaaaaaaggggggggtgggggaatatttatggctgggaaggtaacagcaaagcgtggaagtgaacatcatacaggcttaatggggaacagggaggataccagtcttcctagaacttcaggaggaggaggaggggggatagaattggagccatgataacgaagggatagtaatatggtacaagtaatattttggacagagagagtatttgatcttgctgttaatctttgctttaattttatggttttaggcatgtcctagttcagataaacatgctttagtaactccttggctcaaaggcgatatccttggtgagaaattggtcaacttggcagattgtctttgtaatgaggacttggaatccagggtatcttcagaatctcacttctcagaaagatggactcttctaagcttggtattatcccaacatgttaaaaatggtaggacaaatatggcttttgttttctaatggggaatagtccatttctcctttgtgggggattgcatggggctcagcttatgtgttattggttaaaaataacaggacttactcattcaaatttttttttttcttttcttttcttttttctttttttttttgagactgagtctccctctgtcgtctaggctggagtgcagtggtgtgatcttggcttacaacatctgagttcaagtgattcttgtgcctcagcttcccaagtagttgggactacaggtgcatgccaccatgcctggctaaattttatatttttagtagagacggggtttcgctgtgttggccaggctggtctcgaactcctcacctcaggtgatctgtctgcctcagcctcccaaagtgctgggattacaggcgtgagccgctgcgcccagctcatttacatatcgtaatattgtaagcaccctaattgtttattaatcttcataccatgacttagaagatatttaatatttttagtt

SEQ ID NO: 28556 - DNA, 1050 bp, Homo sapiens
ttgcagcatttcagtcacatcttgaggcttcatgtctcattctagttctttgcctctttcctccacatctgcagttgcttcctacactaaagtcttgaacctctcaaagtcatccatgagggttggaatcagcttctcaactcctattaatgttgctattttagccttttcccatggttcatgaatgtcttaatggcatctaaaatggtgagttttttccagaaggttttcagtggactttgcccagatccatcagaggaatcactgtctatggctgctatagcttaatgaaatgtatttcttaaatattaagatttgaaagttaaaattactctgattcatgggctgcagaatggatgttgtgttagcaggcatgaaaacaacattaatttccttgtacatctccatcagaggtcttgggttacccaggtgcattgtcaatgagtagtaatatttctacttattgtagaatttttttctttttttccttcgtttttccaacagtgggcttaagatattgaataaaccacgctataaacgtgctgtaatttagtccttgttattccacttatagagcacaggcaaagtagatttagcataaggttaagaaccctgggatttttaaaatgagaaatgagcattggcttcaacttaaagttaccagctatattagcccctaacgagagtcagccagtcctttgaaacttggaagccaggcattgacttcttgctagctatgagagtcttagatgacatcttcttctaatatgtgactgttttacctccactgaaaatctgtttagtgtagccaccttcattattgatcttagctagatcttctgtataacatgctgcagcttctacatcagcacttgctgcttcaccttgtacttttgtattgtggagatggtttcttcttttaaacctcatgaaccaccctttgctagcgtcagtcttttcttgtgcagcttcctcacctctcagccttcatagaattaaagagaattagggccttgctctggattcggttttggattaagggaatgttgt

SEQ ID NO: 28557 - DNA, 1048 bp, Homo sapiens
atctaaggtttctttctactctgcttgactccttttcttcaagccgagtatttaaaatgctacttggtgatgaaaaacagagtattgtccaagccaaacctcttgaaatagccaagcttgtacaaaaaaatcctgcggtgcagtttttataccagaaactgataggttggctaaatgaagatcaaaggaaggattttggtttcctggtggacattttgtacagtgctctccggtgctgtgacaatgatatggaaagaaaaaaagtcttggatgatctaaccaaggtattcctgttgtatatcttttcaaactatttgaataatagatgagtagaatgagcctgcttattgttttctggttgtttcttcactgtgagtgtcaattttaggacaagcaatatattcttgatcatgatttgggaagtatctagggctgctgggtagatgttcagcagtaccagggtgacaaatacttgtaattaaaaggtgaattcttttaatctatacatttaaaaagttggataagaacattttagttttgtattggttacatgggtacttcatttactttttaaaagttttagctgggcatgttggcgcatgcatgtagtcccagctactcaggaggctgaggtgagacattggcttgagcccatgagttctagactagcctgggcaacatacaaaaccccatctcaaacaaaaagttgttctagcagattgtttctaactctttttcttttttcaggtggacttgaaatggaattctcttcttaagattattgaaaaggtatcttagggatttttttttctttttttttttgtatttatgggaatagaaatattataaccgtagtcctatttacacaataaatatggtcagatagtcaggttctgtgttagagaacttcctcattattgtaactttcttcctataatgtgggaagatatttgttcttttcctttcctgtagtagtatttttctggttagtaatattagggaaaaatgaacaggctctggaaaatccagtgtttctttcctagaaggt

SEQ ID NO: 28558 - DNA, 1102 bp, Homo sapiens
tatccacagagcttcctttttaggaggactgatatattgggctctcactcatccatattttttggtccattttaaaattgcagtttggttatttttgagttgcaagtgtgctgtatttatcctgagtagaagtatgtgtcagataaaagtatgatgaatgatttcttccagtatatggcttgccttttaatttcattagtgtttttgaagagtagatgttttaattttgatgaagcttaattgatcatttttcttttatggttgtgctttttgatgtcttattttttatttttattatttgaatggccagttaatagattgatgtcttatctaagaaatctttgcccaagtttgcaaagattttctatattttattttagaagttttataggttagctccatgtagtggatttagaggttttttttgcatataaactgaaggtgagagtcaaaattaattttttggttatggagtattcagttgctgaaagactatcccatccttattctgacatctttgtcagaattcacttgaccgtatatgtacaactttaattttagactctgttctgtccactgatctgtatgtctatccttacacccaataccatgcacttgattatgaatgttttatattgtgttgaaaacttccaactttgttcttttcaaaattcttttggttatcttaggtcttttgcattctagaataatgttttacaatctgctcagtccttatggtttttgtttctttcatgaatgaatgcttgatttctaagcaaagcaaaattttcttgatttttctgatgttttatgatcaaagtttcttggcatagctagaagtttgctgtctttataaatgtcatgtcttttaaaatactttgctaactttgatttggtaatattttatataaaatatacataaaatattttgtggggttagatatgtatgtatttttaaatctcacaaaatattatactctcaatctttgtttacatttgcctatatatttgttgctttgtgtcagaaggtgtttttattttgccctcattcttttttttttttttttttttttgggacggattcttgctttgtcacccaggc

SEQ ID NO: 28559 - DNA, 1057 bp, Homo sapiens
aagtagactacttctaggaaaaggcattgataaatctgttttataacttctgttttaaatgctctagaatatacattttgaaaatgtttactttggaaatttcttttcagactcagaaaattaaactggaagagaattttaattcgccatcgagaagacattccttttgatggtacaaatgatgaaacggaaagacaaaggaaattttccatttttgaagaaaaagtgttcagtgttaatggagccaggggaaaccacatggactttggtcagctctatcagttcttaaacaccaaaggatgtggggatgttttccagatgttctttggtgtagaaggacaatgacatcaagagtagttgaaagtatcttgccactgttggccttttgatttttttttcccactttttcttgaaagattaagtaattttattttagttccattctagaatgttggggagtggggcacaagaaaaaatagtatagctgaaatgcatctgttaaaaatgtcatgattgaaagcagaactgagtttcaaattacaaccttaaaattgttgttagatatttcttcacatatcagctgcccattttgaaaaagaaattatccataaaggtaatgttggtgctccaatttgccagccattcccaacccccttctcccttacctgccttcactaaagaacccagaaaagctaattgctcccctttcagcctctgttgcaactaacaactctcagtggcctcaggacacagctttggccttgggaattctgggaaaacttttacttcctgattaaagatacatatgcagctaggccacctcctcccccccttactgccataaacaccaaagtgatgactggagctggaggagttatttgaaccacgacgaagggccaagagaaccacgaagatgccagttgccacattgttgagctgctgacccaacaccagccattgcctgtctctaaacatcttatgaaataaaaccagttttgtttaatttctaggctttttttttaaatagacggagtcttgctctgtcgcccgggctaga

SEQ ID NO: 28560 - DNA, 1028 bp, Homo sapiens
agttggtgagaagcacattcaacctctcaagtgttcactttccccacgagagagtgcacgctgcttattctttcaggactctatatgccatagggctggcaacaggaacaggcattctctgggccaggagccacttttcagacaactatttatgttctcatgtaaaagtccgtaacaggcatcacggcccttcagtagtactgtctcctatactcagcttcccaatctgtgcctccatattcactgaagaacttagtacttctccgtccatctatgattctcacaggactttaaatgccattccattttagtcaaccacacccaggactagagtctgggcttgtcatcactcagaattgttcaacttcataaaattttttttgagacagggtctcactccgtcacccaggctggagtgcagtggcatgatctcagctcaatgcaacctctgcctcctgggctcaagtgatcctcccgcctcagcctctggaatagctgggactacaggtgcacaccaccatgacctgctaaattaattttttgtagagatggggtttcagcatgttgcctgggctggtctcaaactcctgagctgaagggacataaatcttatttttagtcttagtccacaagtcttctatttattcaactctcatctcacctattctgtactctttaacctaacaggatctccaatgctcatattctcctcacctatgaagacttttggcttcattcctgatatggtttggctgtgtccctacccaaatctcatcttgagttgtagctcccacaattcccacatgtcatgggagggtacccgttgggacgcaactgaatcatgggagcaggtctttcccatccttattcttgatagtgaataagcctcatgagagctgatggtttcttaagggggagtttccctccacaagctcttgctttgcccgctgccatccatgtaagatgtgacgtgctcctccttgccttccgccatgactgtgaggcctccccagccatgtggaactgta

SEQ ID NO: 28561 - DNA, 1045 bp, Homo sapiens
ggctggtatattggcaccaagtactaggtaactgaatggctaagaccagttctctgcctttggttcttcccagtacatggaaggacctcccctccctaaaagtagctcattccctcagtgatttctgcctcgagcagaagggtgtgctgtatgtccaccactccaccccttatcccaggagtcactgccttggtttatgactttattttagaaagggatatttttggtatatggagaatcaacagtttgaccgtaatgttattttcaggagattgctgatgagtttggtattcaattccttagggctctggtatcagttcctcttcagtattgcatggcatggtttttaagaaggaaaccgaaggtgatgtaacatctgtcaaagatgcaaaaatagcagtgtactcttgtccttttgatggcatgataacagaaactaaggtatgtagacttcaaaccttaaaagtaataattggggttgcactttcagattgtttgagttagctcttaaaccagtaagtacttcttaaaaaactgaacattgcaggatcttacctatttttttatgccagatttatagtcttcaaatatctaattcaactactgaacattaaactggaaatataaagatggtggccgtattatttataatctgacacacagcccttctagtagagcttatacattcagcaagtgaaagaatatgagaatgtgagtattttgtgtgctcttcacgaaaataaagttgacattctgtagcatcctaaaacaagataagctaatgtaatttgaaaatggtaagtatgtttctaaaaatacatgttagaaagtttgaagtttgtgtttatagtcaatagtggctgacttcatctctagaattcttgaaatccaagttgttgatagttttaaaattttgtagcatgaggggggtctggtcatttggtccatattttattttattgtattttattctttttttttttttttttttttttttttagagtcttgctttgtcacccaggcttgagtccagtggtacaatctt

SEQ ID NO: 28562 - DNA, 1052 bp, Homo sapiens
aggctgagataatagcttccaatttgggtttttttcactaatacagttttggaaaactcgtgtatcacaaaacattatttgtcattccagtgctagtagttttttacagaacactgagctatttctttcaataaataggtactgaaggaactgcagtgaaagacaaaagtcccatttgtcgtagagtttatgtccttctaaggcagaaataatgattaaataaaaggagaattccaaataatgatgaaagaaactgcactatagtagaggatgacaggaggtaaaaatgtctgtaaaagaaggatcaggaatagacagaacacttagacgtttagggaagaactcttagctcagtgcttagtgagagaagcccctgagcctgggctgtttcccccgacctcttacttagggggaaatgccaggctcagggactaactagtacaaagaccctgaggaaggaatgattttgacctgttttttttttaaaacaacaacaacaacaacaggttgtagggctgaagcttaccaaagaaaggaagaatggtaagttcagaggaggagccatacaagggccgggatacgtagggccttgtttccttgaaaagggatttgcattttatcctaagctggttgggaaaccattgaagggtcttaagtatgggaatgaggggatctgatcaaatggtagtttctcacagaatggggagtgaggggaagaagcaagagtgtaagccaggagttcagacttaagtgttattgctggaataacagttcttattgctgaagatgcttttaaagcagtggctattggcaggggttggtggctcacacctgtaatcccaacactggggaggccgaggtcagtggatcacttgaggccaggagttcctggccaacatggtgaaactccgcctctcaaaaaaatacaaaaaaaaccaacctggtgtggcgcgcacctctaatcccagctactcaggaggctgagcctccagaattgcttgaacccgggaggcccaggttgcagtgagctgagatcgtgccacgatctcagc

SEQ ID NO: 28563 - DNA, 1079 bp, Homo sapiens
gaggtgttatatttgctacccttcagttgttattttcttttgctcatttttctgtaatagcccagaaaagttggtctgatttttatttattaagagctctcttatgaagacagcttgtccaggataattcttatgtttcagatctacagactccagcaatatcactaatcccgggagtgggatcccaggctgccactgccatgtggtggggcctcagaggggatccctctctgccatggagcttgtttttataagttaagaaatggtcatgctttctacaaggaaatgttcctattgtaccttggtagatactatgtttaagaaattttgacatggcaaaaataaaattgtcttggggaggcaagaggaaagctggcatctcaagctggaaaagtccaagtcattggttagattctgaaatgactctgaaatgttttattaattgtattagtccattctcacattgctataaagaactacgtgagattgggtaatttataaagaaaagaggcttaattggctcacagtttcacaggctgtacaggaagcatggacaatcatggtggaaggcaaaggggaagccagctggagcaggaggaagagagcaaaaggagaagtgatacacactgtttttttgttttgtttttttgagatgaagtctcaatacagaggggaagagtaagaaaggaaatgggtaacaagcagaggttggaacagtttggagggctcagaaaatagaaaaatgtgggaaagtttggaacttcctagggatttggagggctcagaagacagaaagatgtgggaaagtttggaacttcctagaaacttgttgaatggccttgaccaaaatgctgacagtgatatggaccataaagtctaggctgaggtggtttcagatggagatgtggaacttgttgagaactggagcaaaggtgactcttgttatactttagcaaagagactggcagcattttgctacagccctagagatctgtggaactttgaactagagagagatgatttaggatatctggcggaagaaattactaagtggcaaagcattcaagaggaagcagagc

SEQ ID NO: 28564 - DNA, 1029 bp, Homo sapiens
aggaaactgaacactgagatctgactgcgtcacctgccccgtagagaatgtgtgtagatacttcctgccctaactctgcccaccctcctgtaccgtcgacaagaatgtccccttaggtcgcgctcttgcacacacggttttggcagctgacttggttctgaagccatgtagccacccaactttgtcattttcaacaacatcagaaagaattgatcagaatcccaaataagcttgagtcctatcttctgtatattactaagggcttttatttattctcaataaatcagggcctgaacaattaaaagaaaaaagattctatagcactggaaagcaaatcaccccaggagttaacggatgtacaacagattaatttaagggatagtagcacacacacgatccttctatctgaaatcagtctcctagctggggaaacctctttcacacacaaaatgaaatgtgtacagcttgccgtgttctgactgtacccttccctcttccatgtctgagaatctccgtgtattttaagaatgtgtgaggagagggtggcgattcatgtttcaatgagcctctttttttttttccttcctgttttggtctatggctggtcttactctgtgtccatgttcggaagctctagttttgcatagaattatagagatgccaaactctttgaaaagagatccaaatttatcgcttgagagaaagaaaagaaacactattttttgtattttacctgagatacaggggcacaaatagatgagaattttacagtgttagtgtatgtatccctgagcctaaaaaatgaggatataaccttttacagagagagtgaggcgtggtggttttatatttatatatgaaaggccagcaagctcatgcgaaggatatacttttcttccaaaaagcggattttttttttttaatgtttgaatctatatttgagatgggagtttggttggattaaacatgacaccccggtgggcggtgtgtgtgtctgttgcacatggcagggaggggagcctccttctc

SEQ ID NO: 28565 - DNA, 1027 bp, Homo sapiens
agtagaatttttatatgggcaagctgcttttccttaagtgctctgagaagacggtggaacattctgagagtctccagaaagtggttatgtcgccatagttcagcatatggtggtttttgatggtaaaaggattaaggaaacattttcttggcaaacagttgcaccaacagaaagtttgattttaaagaatctctggaaatcagcttgctgttccttaacacttcactgtagctgccaagtaaacagctgctgatcaggtccccggatatgtaaataatgttcttgtgtttatgtttgctgccaaagagaactagcttgacttaatttaaaacctattataggaagtattagcacaatacagatctctgggtaacaaagagcctgccccagataaaaacagtcttaacggtagtggtggtctgtgcaacagagttctggtggaacctcaaatgaaaaggggacctgggattctccttgtcatgctgcctgacctttcccgtgtgctgtgttgggcatatggctctgtgtgtgcagtgtgtttcttttaaaacctttattgaatgctaattgttacgagattgttaaagtaacaattttagagtgctttgctccacagtgaaattatatacccatctctgcccttgagcaatttgtgttatttttaatcactcaattagattaaattctgcccccatggattttttcttaattcaataagaaaaatattatattatctttcaaaactatcccttaaaacagtgggaatgacccatatttttcttttcttttcttttttttttttttttttttttctgagatggagtctcactctgtcacccaggctggagcgcagtggtgtgatctcggctcactgcaacctctgcctcccaggttcaagtgattatcctgcctcagcctcctgaatagctgggattacaggtgcacgccaccatgcccagctaatttttgtatttttagtagagacgggggtctcaccatgttggccaggctggtcttgaactcctga

SEQ ID NO: 28566 - DNA, 1022 bp, Homo sapiens
tttgtaaatataaagatatcacttttttttttttctgtgatgaagttttgttctgttgcccagtctggagtgcagtggcgcgatcttggctcactgcaacctctgcctccttggttcaagcaattctcctgcctcagcctcccaagtagctgggaatagagttgcccaccaccacacccagctatcatctagcaaatatttatttagcatttgtatgcctggcactactctagctgttctaggcactggggatacaccaaaacaattctgcttctggtggaacctgtattcaagtttgcagaaacaagtaaaaatacatgtgaatgtgtaatatgtcagggaatgttcaaagcctggagagacaagaagttggggcaagtagagagagggagatggcacatctgcagtgggtcttgttgctattttattttatttattttttgtgtgtttttttttttttttaatgtgatgttcgaacagggtgagtgagtgaagagagggagtggaatcatagaggtattttgcagacaagtgttctaggctggccaggcatggtggctcacgcctgtaatcccagcactttgggaggctgagcaggtggatcccctgaggtcaggagttcgagaccagcttggccaacatgctgaaactccatctctactaaaaatacaaaaattaaccaggcatggtggcacacgcctatggttccagctattcaggaagctgaggcaggagaattgcttgaacccgggaggcggaggttacagggagccaatatcgtgccactgcactccagcctgggtggcaaagccagattctgtctcaaaaaaaaaaaaaaaatgttctaggctgagagaacaaagctggctaaggcctgggcagggggagggtggccatggtggaggtggcttacctggtgtttgaggaggattggcggagagggcacgaaagaggggatgcaggagatggtgggggggagggaaaaaggataggccatgtagagcctaagtgccataggaaac

SEQ ID NO: 28567 - DNA, 1060 bp, Homo sapiens
gtcatgactaagactgctagtttgacctattcaccgcatgcccttgtgaaaagtgagaggacgtcatcgactgacttgatagaatgatctctccttgtttgctcggacagttccagccattaatttacttaagaaatgaattttagaaaagagattagtcctgaaagctgatgccctgagtcccttagctgactgtgatactcattggttttttggttttgttttgttttgtttgtgatggagtctcgctctgtcacccaggatggagtgcagtggtgcaatctcggctaaccgcaccctctgcctcccagttcaagtgattctcctgcctcagcctcctgagtaactgggattacaggcactcaccaccacgtgcagctaatagcttattatttttatatttttagtagagatggggtttcaccatgttggccaggctggtctcgaactcctgacctcaagtgatctgcccacttcggcctcccaaagtgctgggattatagacgtgggccaccgtgcctggctgatactctctgttttaatgtggcatttccctatccttgatggaacctgcggagagcagatgagcaaatgctaagcgagtgtgagactgaagcagtttcgcagtttgtcttgtgatctttggggagagtagatcattgagcttgcttccatgggttttacttttatgtaaatctaaagaaaaaactgtggaggaaagtcaacatttcatcagaaaaataacaaaagagacttgatggttctcagttaaaacctgcaaaaaggaggacatgaaccatcagcatttctcttctttttttttttttttttttttcttttttgagacagagtctcactctgttgccccaggctggagtgcaatggcgcgatctcagctcattgcaatctccgcctcctgggttcaagtgattctcttgcctcaacctcctgagtagctgggattacaggcgcctgccaccacacccagctaacttttgtgttggtcaggatggtctcgaactcctgaccctgtgatctgcctgctttggcctcccaaagt

SEQ ID NO: 28568 - DNA, 1027 bp, Homo sapiens
gatgcgtcaacaaggaaagatccacaagctcgtggagctcgttggggtgaagtgggtgtgtgtgtggcagaaaacagttagcataataaggaagcgatgtgctgtggaagaaagacagggcatgttgaggaagatggggtgtgggggatgtggggggcaatttctgacagggtggtcagggtgagggcagacctggatagggacttggaaggagaggaggggaggagggagctggctcctgagttgcaatgtgggagggtgcccagcacattcgagcaaggaggaggagctcagggtggctggggtggggtggaggtgggagaggagatgctgtggagaggttggcatggtagttggaggaagcacagagaagccttctggttgtagtaaaaggggggacgtgagtattcttgggagtgagaaaggttgggagtatgccctggaatgagttcttcaatttcactagtgggtggggacatcgaagctcaagttttaacgcgggacaccgggggagggtcttgaacagcagtctgaggagtcctccacattgctcctggaacatttacctggcagtggtgtgccggatggattgatggaaggaagatgggttagaagagagagcttattgctcaaccagtgatgtggcactcggaggggaagagaaaaaactgagtctctgatatattatggatagtgaggagggaggggagggatgactgtaaggtataagcacatacatagaaaagcagatgaaaggagaggcaatgattcatttaacttagacataaagcttctccaatcaggagttacctgaaggaacatttcaagcttttgccaacttactttggaatccctttttagtaacagtaggaattttggttccaatgcttgtagctgaaattgtgagtcactcccattggaaatcgttagaagaaaaggaatgggttgttggaaacataaaaagaaaggcatagagattttgccctaagaaaggaaggggagggaaaatagagttgatttcctattc

SEQ ID NO: 28569 - DNA, 1086 bp, Homo sapiens
cgcctctcgcacaagacgcggaggaccaggcacgcttcctcggggaaggtgatccacaggaactccgaagtgagcacccgatccagcagcacccccagcatcccccagtccctggctgaaaatggcctggagcccttctcccaagatggtaccctagaagacttcgggagccccatctgggtggaccgagtggacatgggcttgagacctgtgtcttacactgactcttctgtcactcccagcgtagacagcagcatcgtcctcacagcagcctctgtgcagagcatgccagacactgaggagagcaggctttacggggatgacgctacatatttggctgagggaggcaggaggcagcattcctatacatccaatgggcccactttcatggagacggcgagctttaagaagaaacgctccaaatctgcagacatctggcgggaggacagcctggaattctcactctctgatctgagccaagaacatttaacaagcaacgaagaaatcttgggttccgccgaagagaaggactgcgaggaggctcgggggatggaaacgcgggcgagtccgcggcagctcagcacctgtcagagagccaattccttgggtgacttgtatgctcagaaaaactctggagtgacagcaaacggggggccggggagcaaatttgcaggctactgtcggaatttggtgtctgatattcccaatcttgcaaaccataagatgccaccagctgctgctgaagagactcctccgtacagtaattataacacacttccctgtaggaaatctcactgtctctctgaaggtgccaccaacccacaaattagccatagcaacagcatgcaaggcagaagagctaaaacaactcaggtaaagtgattgaaatttgtttcaatattttgggaatggtgcatgactctttaagtgcatgactttgctcttagaagatttccatcttttaatcgggttttaccctgtttgcctggtagttgctgcagctggtgctgttttgggaggatttctctctcttctgctttgcccctcttagagttctgtggttaaggggtggggattaagggaagt

SEQ ID NO: 28570 - DNA, 1027 bp, Homo sapiens
aatgagcttaggtcacttttctggggtccagctcagtggtacttttgccttaattgaatcacctatactgaaaaaagaatacccagtagagaaaaatctcatggtggttaccattgtgatgcccgtgggttttgacttgagaaagttaaagaaatatggacttctttccaggcgtagggagcacaaaaacttccagaccatccacctaactttaaaaagaatgggtgcttaggagagttgggccaagtcacttgtgtcccatagttaacccatgtctttcttgccatccctctgtgcccatcaccatgtgctccactctcatcctttgctggtctggtcactcacataaaccagggcattgcctgagatctgcatggtgttgcaaagctattgacttcttattttatacactcacagaaaagttaaatgattgttcttaaatgctacatgtgtttaagtggcacttgggcatgcttatttatgcattgcagatatattgcactgtgatttgtacagctttgatcattgcctgcattcagtgatcttatttaaataataagagtgagttcaagatgtgagtcaacagcatggtgggtttcctgcagcctgagaatattttggagactgaacccaaatctgatttactttttaactttatgatgccaaggctgaggcatcctatttttatttttgcattaaattattgaagctgttaaatccatttattattacaggtattgatttagtccatacaaagtgtggttgagataatgtttgaaacttctggcctctcatggataattagagggtttggttttgtttttgtgtgtgttttaagttccataaatctgcattggaattggccattatttgtgtctccattccaatatcctccctgatctaagttttttgggagttgctatgctctgaatgttggtataaattcatatgttggaacctaatacctgaatgtgatagtatcatgcggtggggcctttaggacgtgattaggtcatgagtgctctgc

SEQ ID NO: 28571 - DNA, 1044 bp, Homo sapiens
atttatttaacacggagtgatatatttgcttctttctctgactcatttgtagcaggcctgtgaaaagggatttgaggtggggaggatatataccattatacttctcatggcccagttctctctccatctgtttttctctctctctctctctctctctctcattgtttttttttctctctctctctgtttctcacacacacacacacacacacacacacacacaccctcaattggatctgatctgatccatgcttggtgagtaagaagtacaggagccaaggatgacgtctgtcacgttagtgattaccttcttcatggtctattatgtgtggtacttttatggttgatggaaagttttagatgagggaagacagacaattagagagggaagaataccagatgagagtagagctggccagccatgacactgatatttggaaatgccaattaagtaaacaccttgatcacttgattattacaagtagatggaatctgtaggagtagaactgagcacatttcattaagattatttcccgcggtagtcaccatgacacactaactctttcacaggttttcaatagacagtttacaaaatcagttttcatgattaagaaagtttagaaaacactaggttaaataaagtgaaatccatttcgttactgttggagttggagtgcccaactttggccatagaatgcatatttcttggagcacctggtaacattcctgtatttctacagaaatatgcatagttattggaaggcagggtggcggagtgaagtgggcactgcaggtttggaaggaagcccacctgggttctcatgacagtcaagccactccatccgctcagctgtggacaggccacttacacagaaatgggtgtaagagtaagtcatgtgccctcccccacccaggtggctgtgatgattagattatctaatgtacatagaaacgtttttcaaattatgaagcaccctgcaaatagcagttattattacaccctctaatgtttttattgccataatatatgtatcgtcatactcg

SEQ ID NO: 28572 - DNA, 1043 bp, Homo sapiens
tatttattacacgtatatatacacacacattttatatatattatatatattttatttatttatttatctatttatctatttattttgagatggagtttcactcttgttgcccagactggagtgcaatgacgcaatctcagctcactgcaacctctgcctcctgggttcaagcaattctcctgccttagcctcctgagtagctgggattacagttgtgtgccaccatgcccagctaatttttatatttttagtaaagagggggtttcgccatgttggccaggcttgtctcgaactcctgacctcaggtgatccactctcttctgcctcccaaagtgttgggattacaggcgtgagccactgtgcctggcttccattctatgttgaataatgttttcattctctaagccaaaatcccacctagatagcatggatggataactacctatttattctatgttttgattaatttacctagaatgtaattcctgtctggtcttttgtgctgtagaatcccaatggtgtcttgttttaataccctcatctgtgttccatagttacgggctgttattaagagaatctagagaagaatgagaaattgaacccagggtttttattgtagaattttaaattccactgtattaatctagttcttaggaattaggccttctagaaacaggccactggcttcctggccttgttgtggtctggatccttccaggagaactcgtgaggatagcacatctgcattcgagctgatacaacttccattctcgcccctgtcctaagcactgggaatattcataatagctgttgtgtatggttgttaacaaaaagtgatcacatcttataatctcactcggctccaaaattcacaatgcagtttcatccttactgttactttcatacataactgggggttgtctactataagccatgtttttggtgctgcctttcttgagtcaacttagcagcaaatacattttactactggcacctcctaccatgagatagctggaatttgattatgcctcaaaagtgtgact

SEQ ID NO: 28573 - DNA, 1050 bp, Homo sapiens
ccccacatagctgtgatgggcctggaaatgtacatttccttacttcccaggtgaaaaaggaattgatttagcatctctgccactgttgggtatttaaacttaatcttaaggtgaagtgtatctattaggaagacattagctgtgcaatttacttcacttggtagctgggtatttgatttgcatttctggacttatttttgcgttaggtggttatgagcttctcacagatgggaaagaaggggatttgggttttttactttttaaaatgctggagacttttcttctttgcctgatgatgtctttatatccagctcagagagccagaatgaatgtctggtcacgcatgatggattttagttgaaatcagatttgggtttttcatatagtttcttatagggatctatgctgacttcagagatgcccttaagtttgtcctgagtttctcactgatcctagctctccagggcttgtaggccacatcttcatttttttcatttgtgaagcattctcatgacttttcagaaggacgccagccagactctccggtctaggactctagaattctaggcacatgactcttcctgctgaaagatttttttcccaataagtttaaaagcttttcacctttcaaataattttgcaagagtttcgttttatttttttattcatttatttatttagttttgagacggagtctcactctgtcgcccaggatggaatgcagtggtgcaatcttggctccctgcaacctcagccttggaggttcaagtgattctcctgcctcagcctcctgagtggctgagattacaggtgcatgccaccgtgcccggctaatttttgtatttttagtagagacagggttttaccatgttggccacgctggtcttggactcttgaccacaggtgatttgtccacctcagcctcccaaagtgctgggattacaggttgtgccaccgcacccagcttaattttggaagacctttaaacctttcatctgttactagtcgtctttgacagaatatgttaaattactctaaattgatctttag

SEQ ID NO: 28574 - DNA, 1032 bp, Homo sapiens
accccacctttataaagctggtagaagccatggaactgctctttatacaaatgcaggtacgtccctgcacataatttttacactcaattccagaaggttcagatacctttgaaagtcctccagggatcgtgtgctaagcatccttgtcctgggtccattcccagggcctatgcagaagcgctgaaattagcaagtctgtgtgacccctaccctttacaagcatgcacgttttaaaaatacaaatagctccgtgtgcaaaattgtaatttccgtctgggtagcgcttttcaactgagggttgaaaccttttgggagtttataaaataattttagtggtttgcagccaatatttctaaaaaaatatattggaataggataaaaagtaaaccaagctattatgtgtgtgtactggggttgagaaataaaaatatgggtccctgtttaagaaaaactgatgtatgtgcagcttgttttactatatatttagggcagtgggagcaatttaaagaaatatttgctttcttttcattaaatgctttgactatgttggccctttttcttcttcataggtagggtcaaagagtttagtgggcttactaacattttatataatatatcctactgccaatcatcatttatccacagttattctcaggatacctctaatatcagtgagcttaaatctgctgaatgttctgattttctgtgatagtaaaacttaaaaaaaatatatccttgccaagggtcagtgtgattggccactagttaaccatttcatgtgggagacttctcctccttggcctcacttttctcatttgtaagtgagaaatggtcctgataataatgatatttttctctctggattgttgggaagactgaatgagcttttatatgtaaaattcatagcgtaattcttccataaacattgttcttcttagtagcagttgtactgtttgtctaccatgcaggaatcacatcttacactcccattaggatttctgagaatctgttaagttgtccattctgactgca

SEQ ID NO: 28575 - DNA, 1003 bp, Homo sapiens
taccgcacctccacctcctaggctcaagtggtcttcctacctctgcctcctgagtaggtgggactacggctgcacaccaccattcctggctaatttttgtattttttttttgtagagatggggtcttgccatgttgtccaggctggtctcgaactcctgggctcaagtgatctgcctgcctcggcctcccaaagtgctgggattacaggtgtgagccaccgtgcctggcctgtaaaaaaatacttctgttctttcctttggttattacagtgttggtgtactcattgtttacccttgtggtcctactgagggatgctggtatggagtaggtattcaccatttccctgtactttgggggcagtacagggaaacattaccaaaatatttcttaaacatttttgaaatacttaaagaaatgattttgttgtttggaaaccaaatcaagccaaaatctttgtctccagcctgaatgtcacatattctagttgggcagttaatctctttgcttttggcaatgttaggggccctgtggatggaatcctagaattcagaggtaggctagaggcagctgtctgaaaggttacaggcagaaaagatggctgagagcagcactgtgggaataaaaatcactagctccatcacttacaggctgtgtggccttggataagttgcctgagttctctgtgctttggattcttcatttataaatggggacaagtactttcctgatagaattgtcagaaaattaagaaacttcttcagcgtctgacttacagtaggtcctctacaagtgtcaattactattactgttgttatcaccatcatggacagcatccctctgcccataagcaggcaccaaataaaattttttttttgagacagagtttctctccgtcgcccaggctggagtgcagtggtgccatctaagctcactgcaacctccgcctcccaggttcaagtgattctcctttacagtatccacccacagtctgtccactgaatt

SEQ ID NO: 28576 - DNA, 1024 bp, Homo sapiens
tcatccaaagccatggaatctacagctccaagactgaaccctaatgtgaactatggactttgggtaataatgatgtgtcaatatatgtttattgattgcaacaaacagaccattctgttgaaagatcttggtagtcgggaggctgtgcgtgtggggcaggaggtatatgggaaatctctgtgctttctgcgtaattttgctgtgaaccttaaactgctctataaaatggtattatgaaacagcaacaacattcaaaccaaattgaggagacacagcactgcattctactcatgacatctagtaaagtgtcttttgacctatagtacttcttgaagttctttgcagcctgtcggcttgggcagcagtcactgggcagcaggggagaatccctcatcaagcaggaggctctgatactctaagaatgggattttccctggcggcttcatagctgtgaaagcactgacttcatgttcctgttttcttccttctggccatgtgctgcgctgtggacactaaggatgcattttctggtgagctgattcatatggtagatgccgtgttagccacactttcctgcatcaagggtggttacggacagcagggatttggtcgtatttgaatgtactgtgacctggggaccagaaatgctcaaatcctgcctcagtcttatcacccttcccacaaggagtcgtcaggactgtgtgcacaggcaccttagcacgaaagtgagcagttacgaggatttttctgggagccgacctcagcgtttcttcttgcgggttgtctttgacttttgaagtcagcatctgtgtgttcactgcgttcacgtgctcagttgcaggtagtaaggagacaatagggcagaaggctgggaagcatccttaccctcagggaactgacattctggatacagacaatatcaagagatgttgtccctgcgtatttgtggggggttcgttccaggacatcccctccctgccctgaggacaccaaaatccatagatgcttaatctcttttggaaaa

SEQ ID NO: 28577 - DNA, 1050 bp, Homo sapiens
gctcagtcatgtatgtttaaacaaaatgattatcattatttgctagttagtatttcattaatatgaaatatgagaaggtgagcactgggctagaaagaggtcaggagaccaaagttcttatcctgggctcttcctgactcttcaaccttagttgagcctgttgctcagggctgtgagttgcatccttaggttccttgagtgtatagaaatttctctctgtatagttggcaaagcctgtaatatggatattatgtaccaagactcaacttttagcttgatagtgctgcattatttatttacacattatttatttgtttctttcagtctcagatgccgtggctggattttatatttttggtgttgtattttaaaataccgtgttaacttgtggttgtttccttttctttctttcctttttactccaggagtagggggtttcatgtaggatgaaaatgaaaactaaagaaaaaataggatctggaagtaattttgagagcagaaaaattaaataaaatgggaaaatataccattttgttactagccaggtgaagagaacacaggagcatgtacgtgctttttctcagtaattggatatgttagacacggattatgttttcgctgggaccttgtagttaaaagaaagcaaaaagctgatctgaatgttcaatatttcccttttctcaagagcacatgaagttggtattgaaatgtgagttgcctgcctcttatttccatcgtttgaaatcagactgaaatcctgcatgtgggaccctcattctgtgacctctgtctgtgtatccaccaggcttccttgccagccctctttctgactcacaaatggcagtgggtgtgagtgcccaggaatacttagagtggtaaatacaggatttgggaaatttatctgcagaatgtcagccctcagtaggaaagtagtgctgtccaatggaaggcctggtcaaatgccttttggttggatgtttcaagctggtgtggcatagccggagattcccagtcctcaggagtgtggtagggtaggctctgtcctaccag

SEQ ID NO: 28578 - DNA, 1100 bp, Homo sapiens
aaatttatttctcatggttcttgggtattggaagtccaaaaccaaggcagattcagtgcctggtgagggcctgcttcctggttcatagactactgtcttttcactgtgtcctcatgtggtggaagggaaaggggtctctcttaggccccctttataaggacaccaattatttcccaaaagtcctaccccaggctggagtgcagtggcgcgatcttggctcattgcaacctctgcctcccgggttcaagcgagtctcctgcctcagcctcctgagtagatgggattacaggcacgtgccaccacgcccagctaatttttgtattagtagagacggggtttcaccatgttgatcaggctggtctcgaactcctgaccttgtgatccacccgcctcagcctcctaacccttcttcttcttttaaatgtatttttccttttatttttagttgacatgtaataattgtacatatttatgggacacagagtgatattttgatacaagtatacaatgtgtgatgatcaaatcaaagtaattaccatatccatcatttcaaacatttattatttttttacgttgggaacattcagaatcctttcttctagctttttgaaaatgtacaataaattattgttaactgtagtcaccctatagtggtatagatctctagaacttattcctgccatttagctgtaatttggtatctgttaagcaacctttccttatcctcccttccctcctacccttcccaccatctaatatttcaccttctaataccattgccttggaggttgggatttcagcatatgaatctgaagggcacacagacattgagaccaaagcaccttgcaactgatgcatgtgtaccttcagtctcatgtagcttcctcattatcatccctttctttctttctttctttttttttgagatggattctcgctctgtcacccaggctggagtgcagtggcacaatctcggctcactgcaagctccgcctcccgggttcacgctgttctcctgcctcagcctcccaagaagctgagactacaggctcccgccaccacggccggctaattttctgtgtttttagtagagatggggt

SEQ ID NO: 28579 - DNA, 1034 bp, Homo sapiens
gctgccctcgggcctatgagtgcacacgtagcatcgtcctctaccttgccaggtcagaactaagaaagagcccctagaaggcctggacgtgggcattgggtccagggtgccctggtatcatctagaaaggtatctgcctgtctgcctttaagaagaggcgtggctggtagaaggccagagaagtccctttgatgtgcgtgcccaggtcctactacgaatctttgaatactggtctggttttgatcctggaaaagctagtcgtcactttctgcatgaagaaaggagaatgaggagcctccatttggaatgtattagaattcagcagcatgcaattaaaaagttgtttttaatgggtgaacatcagtgtttcctggcataggttcatttaaaaagctctgggctcgatcaaacagcaaaatatacatttatacaaggtggtttgttgttgtttttagactttacttttcaagaaccataatgaagttttgcttaaaaatttcagtctttggttgcacggatcatggttctcttctgagctgatacaatgtttcacctcctggaatcttgtctgatgaccttcttcctgctcataacatctgtgattgtataggtgctcctgcattcttaattcttactttcggggggatgctgatgagaagagctaatgtaatttcaatacataggaaaaggcaaagccaagatcaagtttaaattggaagatattatcttaaagggtacaatagtgaagtgaacgtgtatactggtaaatcacttgtcatttttgataacagtaatacaaaagttttacaacttgtccattagtgagattctcaaattgctttagagaatatagaaaaacaagaaagttggagtcctgaggttctgttctcctggtgattggagagaatctaaataataccttgtttttacatcattaattatttaatcaaaactgaaaacattatgtccataatactgcatccacaaagtgggtactgaggaatgagtaagtataaattctccaaaaatctctc

SEQ ID NO: 28580 - DNA, 1050 bp, Homo sapiens
tccatggttcatccattctacaaggtagcagggaagaattctgaagttcctttgttatctgtaaatggttagtgtgagacctgttgcctctgtcccttctcatttccctgttttccatgtctttcgttttgccctggcagaaagcagcccagcatcttcacattctgacttctggaatggaatgaaagcgtttctttctgtatagagaggtttgttttacacagagctgcctttgactgggaagactccccctaacagatttggatcataacgtgttggcaccaagccaggaaggatggccataaattgtaatttgaatgaggtttcaccagctctttgtcctgttatctcatttctggcgcggggatattgggcaacttaaaccaggagctgatttggtcaatgtgattttcatgatttaaattagaaatgttcattttgggtggcaggtatcaagatttttgtatattggtttctacttctgaatttttttcaaaggaattaaaatgggaggaaaagaggagagaaaggaaaagaggaaggaagcggtttgaaacatggacccttagagcttttggatgcaaaaagatctgtataggaatttggcacttgctgtatatgtgactttgaacaacttctctgcctcagttttttgctgtttataaaatgacacttacaaacgggcatgatagttctttgttaagagatcatatctcttcagagccaaacatagtgcttagaatataaaagatacctaaaaaatcctaattccctttcattacctctttgatgttacatctaaagatctgctgctaagttgaacacagactttatcacttccaggctggtctgaatataggtcttgctagaatgttgttcgcttaaatacaatcatatcacagcgatcgaaggatccctttgctttggtttctttccactattagaaaagtggaagggcataaaatattatttaaattttttttgtgtgtgtgacggagtctcactctgtcgcccaggctggagtgcagtggcgcgatctcggttcactgc

SEQ ID NO: 28581 - DNA, 1630 bp, Homo sapiens
gatcaagtgatcctcctgcctttagccttccgagtacttgggaccacagtttgtgcaccaccatatctggctaatttttttatttctgtgtagagatgagggggtctcactctctcgcccaggttggtctcaaactcctgggctcaagcattcctcctgcctcggcctcccaaagtgctgagattacaggcatgcccactatgcctggcctgtatctgcaagttttaagggccaatatcaaaatattaggatctaggaggaacagggagctgttggatattggtagagctctgcaaaatgataaatgtcatgagtgtttttttaaactttatttttaaataattgtggacttacttacaagaagttgaaagataatagagaggtcctgggtacccaccacccagctttccccagtggtgacatcttacttagctatactgcattatcaaaaccaggaaattgaaattggcacaatgcaagtcacagaattgcagacaataaataggtggaagtggtagctcaagtctgtaatcccagctactcaggaggctgaggtaggaggaccacttgagttaggaattccagaccagactgggcaatataaagagacccatctcttaaaaaaaaaaaaaaagaccatactggaatttcattagcttggcatacacttttttttttcctctttaaaataggacttagtgtaggatttgaccagtgttttttgatgagggacagaacctctgtctaaaactgtaataaatgttgtatagacacatggctttttagcatagctctgtttgcttaagtatttttaacacggcaaacagttgagtggactgtgaagtccagcagctcagttatgggatagagaccaagcaatttggttattttcatttatggtcttgaactccttggggttattatcttcacttttttgttgccttttcagagggaggatattttctaaagataaaaggataattcaaggtcattgtgtcatcttaagagctcttggagggaatgataaacaaatgttgtttttcctggaaaagggtgggatttcgattaatcagataaaaggtatggactgataagactcaaagatcatggatgcaatttcatgataactgttagagtggatttccttttacaatgacagccctgtgtgagttgcggctaagtgtcgcctgcttggcttgcctgtgattaattgctcctgcctccgtgatcccatcacgctttgctgagacttccaattagcctctgtcactatctgccctggatttgagctatttgtgagggtgactgtcttctcagctagactaggaagtctttgagggcagggactgtctaattcattttttgacttttctcctcgttctttcttccagtatcaagcaagatgcatcaagcagaagggatctctctattctccagcccccagcaatttttagactattccttattctagcttcacttctttatgtatttatctgggcatctgtttgtatgttatgtgtatttgaaaccagtaaggctgaatccatggtagattattttataattttgagctatcatgagtcagactggccttgttctgtagcgctacctgaatagctgaaaaacagcc

SEQ ID NO: 28582 - DNA, 1035 bp, Homo sapiens
gagttctgaaagcaattctactctgctggacaaagtttggaaaatacacacttggttaaaaccacatccaacactaacagtgatgtagaccacagtaaaacaagtcaggtggtcaattcaatgaattctaaatggttgcatcattttggacaatctgatatgctttgcttcgaggctttattgcatgtactcacctttagactctttagggtctgggatactggaaaagtttttcacaaatttcccttaagtaagcctccctggaaaggtcaactggttctttctattagttcctggaatttctgtggagcttgtgttcactgatgtccagaggagatgcaacagaagaggagaaggctctggtgcatgggtattttttacagacatggaggctgatgtggctgtcctgggctatgagctgttttgtccctttcaaggcttgttttctataccatgacatatcattattattatgtggcaaagtcaggaaattgcatctcatccaaccttgcccatttgctaggttctcaggtagctcaggttctcctgacagatatttttcctaaagtcgctttttcaaaaattgcagagaagtttcttataaggatgttatatagtttatttattttttatttttagtttttgagacggagttttgcttttgttgcccaggctggagtgcaatagcacgatcttggctcgctgcagcctccacctctcgggttcaagcgattctcctgcctcagcctcccaagtagctgggaccacagacgcgccaccacgcttggataatttttgtatttttagtagagacggggtttcaccatgttggctaggctggtcttgaactcctgacctcaggtgatccacccgccttgacctcccaaagtgctgggattacaggtgtaagccaccacgctcagtctaggatgttatgtagtttatttaattgcttctttttgctcatcattttgttttccacttttgtttttctacttgtggggtgtattaacttctttgtgtgtaaatctttgt

SEQ ID NO: 28583 - DNA, 1033 bp, Homo sapiens
gatggacacattcagtacagtctggtaagagctactgaacatacgtggagtgcatctcagagtagtttgggaggtgaagttgaaggcggtgcagaattaggtaggtcttcagatgagccaagttcaagttaagtcttagatgatgagtggttgttcttccagtggataagggggagaaggaaagcattttcaagccaggagacccatacatgcagaagtacagaacaatcaaagggcctggtcacctctggggatgagaattattattattgtcattatgttcttattattactattacatattcttaagtcagggttataagatgagctaagctggcaagatcagtggccagatcatgccaagaagtttggcttttcttctggaaaacaaccaaagatgtttttagcagtgaaatgaagtaatcatatttgcaattctgttacatatatacaaaaaatagaggcttttttaaattagaaaaattactttatgatagactcaaaatctaaggtgagagtggaggaaaagatacagaacaataaggaatttaaatgaagaaaacaataaagaatttagaacctaattcttagaaattcatacaaaatcttcagagaattttaattctaaaacaaatccatgcagaaaatctacagaaaactttaagaacggaagaatcaaaagctaactcagttcagcctagactgaaactatttttattttgcaggtatactttgatttcatcttttttccccctttgtctggtctttgtttattatacataatacataagtataaacgctagcttgatgtttttcccatttagtggtaaaaatggttgtgttgcaggtggccttaaatcatttgtaaatattcatttaacaagtgtttcctattccatgggtgctgcactggggtttacttagctcttgtttgcatgtatggtaattatcagtttgggttcggtgaggcgcatggcagagggatttatcatggggattccccactgtgcaatatatatatatatgtgtgtgt

SEQ ID NO: 28584 - DNA, 1098 bp, Homo sapiens
ctgatgtattcgttttcattctccttctacccagtttgctcaacctaatcacctgaatgatgttaatttgggtttaaggcacatttcagaagattttggctgtaaagagcaaggcaaacttagctcttctgcatagctctaaatgataccaataactataaatggcatcattcatactggtgaagtctttcttactttttaaaggctaggatcaaatctaggaaggcttgggtgactcccctgctctgaagagctctggctttcaatttctctagtacctattgcttcaattggttatttatctaccttatgttgttttggaaatgaaatgagagagactgaaaagagaacacaaaaggccattacttcaatgttggataaagacatacccacatacatttaaatttgttacatgtttcccttgcagtttcatttggcatttctttatctgtaatgcacagaatgtcccctccaatgccccttttatcattcatccagccattagagttgttttccgacatgtaattctgatcattgccactcccctttgacgggagcgaccacatacagattaaagtctgatctttgtgatacggcacttcagaccttccacagtctggccccaaattattttctgctcccgtctcccatcacacattctatttcatccacaaggcacatttcctgacactgcaggggcatgtcatttattttaacacccctgtgtttgtttctactgtttccctggaaaatctttcttactgtgccttcccctcccacttcatgcatgttgccgcatctttccagtctttacaagtggagttgcttttcttctctgcattcctatggctttttcacaaactggccggagagtgtgtctgggaaggccatggtcactattaccaggaaggtaatttagaaagcaggccagatcacccaactctggctcctcgctttggtactgccagcctgtcatcattatagaggtagaaacgcagtggcagaataaagagtatggaagggcagggcgtggtggctcacgcctgtaatcccagcactttgggagcctgaggcgggcagatcatgaggtcaggagat

SEQ ID NO: 28585 - DNA, 1050 bp, Homo sapiens
ggaacaagagtcctttgcttattaagtggctgccatgtgccagaggcagtggtggacactggtgattgaatgacgtgtatattacgtggtgcttgtccttgggggagcctgcagtctatagtggaggctgataaatgaatagatagatcccaccatagtgcagtaagtgttgctgtagggatgagaacaaagttctatgggacaatagaggttgaatagccaagtttcttcacagatataaaatgaggctttatggaggaggtggcatatgtgaaggatcttgtcttagttttgggctgctataacaaaataccacagactgcataatttataaacaatataaggttatttggctcatgattctggaggctgggaagtccaagatcaaggggctgcatctggtgagggccttcttgctgccctgatgcaaagcatcacatggtgagagagagtgagagagaacaagaaagggccgagcttgtttttataacgaacccacttccaagacagtgacattaatccattcatgagagcagaaccctcttgacctagttacctcttaaaggtcccacctctcaacattgttgcattggagattaaatttctaacccttgaatgttggggaacacattcaaaccatggcagatcttgatggcagtgtagaagtttatgaaccaaagtggggccaagaaacactaggccaatttttcatttgctttctgtaatgtgaatgggagctgcctacttagtttcatcccataatctataagttgctgtgtgaatgaaaattagtactattgtcattagtactacatgcagcaaacgtgtatgaatgattcagggctcaaattccactgggcctttttatatgaaaattagattcatcaatttcctggaattaattaaaatcttgtttacaacaattgacaaggcatcttgtgaccttataagcatgtatctttagagtaactttaaagttactctataagcatgtatctttagagtaattcctgggtgcataaagtaaaccctttttatcttcttgcctta

SEQ ID NO: 28586 - DNA, 1033 bp, Homo sapiens
gtgaaagatattggcctcgtctctcctcctctcctttcagttgaaggcctgaatggaacaaaactcgggccctacccctgagtgagggggaatttctcctgcctgactttctttggagctaggacatcattttttccctcctgctttcagccttggactggaactccaccattgctctcctagttctccagtttgccaactgcagatcttcagatatgttaacctccataatcacacgagccaattccttataataaatctcttcatgcagatatatacatgtgtgttgtgcatatatgtgcatatgtatagattctgtttatcatgagaaccctgactagtacaagcactcatccctggtcactgtccacctcctcatttctcaggccagcaggcatctgaccaacattcctgcagatgcttcagggaaacacgtgagccacagtctcttcacttccatttgcttttgctcctcttatctccgaactcacagttcagtttttaacacattcagatcactctcatatttttcctcctttattctaatttattgatcttcagagaatttctttcctatttctctgctttctccatttttctttccttttttccttctccttgcttttcttccttttttaaatcttcttgagatagagtcttgctctgttgcccaggctggagtgcagtggcatgaacacagctcactgcaggcttgacctcctatgctcaagcagtcttcccacctcagcctcctgagagctgggactacaggtgcacaccactacaccctgctaattaaaaaaaaatttttttcccagttgctaccagctatagtaaaataaagaaagaaaaattttgtagagttggggtttccctttgttggtcaggctggtctggaactcctgggctcaagtgatcccccttcctcagcctcccagagtgctgggattacaggtgtgagccactgtgtctggcctacttttctatctttcttattatcctaccctatcctgtcctaccttaaggcccacaa

SEQ ID NO: 28587 - DNA, 1032 bp, Homo sapiens
aagattaccctggttgagatccactggcttagtgaaacacctgcatacccaaggttccaccattattaaccttttataccattctttatcatttacctattagtgtggctgagatttgctaatgtataagaaagtgctttgaaacatagcatgttattcaaatttagatatgacaatgaccgtagttttcttttgtcatctacatttgtggtctccgttcctttgttatcattgtcttacttttcatttgtcatttatgaaatatctcccccctaaccagaatgttgctcttcactaatatattgaagtgtgtttgatggttaaaatcacagagaaagtcttgactggaaggaatcttgagggacctttggacaaatattaaatgtcctgttaatgtcgttgtcattgctgtcattatcatgatctttttcaatgcctttaatttaaagatgaggaagctaaggggacagtggtgcacccaaatcttggctaatggtagagcaatgaccgtctgggtgtttctgtggaatttacttgcacttttgttttctgtgaagttcgtgctgggattagcagagctctctacctcctcctctgagctccctgccggagcctgaacataaagtgcccgtattctgggctcatggaagatttgttaataagaaattttctaaaaaaatgatcagggaggagacatggggagtcagtaaaaagggggagagaggagcatcttaaactgcaaagatgttgaactggaaaaggaaaactgtgaaaaacattgcaaaaggaaaagaaatagaaggaatctgtggaagaatcaaatcaaccaagtgcaatgttgggtcttgtatggatcctgatttgaacacaacaactgtgagagaaggagagagaggcagacagaatcagggacatttaaacagggaatggttaattggtggtggtaaggatttttgggtggtgggtgggatgatgtttaagtaaaaggtccttctcttttagaaataagtgttgaggtattaatggatgata

SEQ ID NO: 28588 - DNA, 1026 bp, Homo sapiens
gcattccagatgtaaacagcttcagaagcctgacggtcatatggtgagcagtttacactttcatatacgccctgtcatgtgctttgaaggactttctaggggcatcaagggtatgtgaataaatttgctttttcacttatttgtctattatctagccccaaatctgtgcctgctgtttgttgattttcaccccctattcttttttttttttttggagacggagccttagtctgttgctggagtgcaatggcgctatcttggctcactgcaacctccgcctcctgggtttaagccattcccctgcctcggcctcctgagtagctgggattacaggtgcccgccacaatgcctggctgatttttgtatttttagtagagatgaggtctcgtcatgttggccaggctggtctcgaactccttacctcaggtgatccgtctgcctcggcctcccaaagtgctgggattacaggcatgagccactgcacccggcctcttacttcttttttaacatgacaatattctgttggaagtgaggcaagagcaaagtcagggagaccaattaggaggtgacagtgatgagggtgctggcgatgtagctggtactggcaatgggctgctggcgatggagatgcagcagattctggaaccctttgagggttgaattgacagggtttgctccgggcggagtgtgaagtgtgagaggaagatgtgtccacgagaaggaagaacccatgtatttggggtttgtgaagtgacagtggttgatcacggctgctctgggctcagtgggctcttctcggcccttcggcaggtaagagttcaaagctggagtcgaaaggcttatgtcttgagctctcatcgagttgttgattagttcctgggtaaggtcactccctggtagagcagttacctcttttgaattggtgaccacagcctgcgtccccagccctggtgtgctgctagacataagaagaggcaggctggctgggcgcggtggctcatgcccctgtaatcccagcactttggg

SEQ ID NO: 28589 - DNA, 1073 bp, Homo sapiens
tgttaaattctctgcccctcttcttcttctactgttgtcagtcagaggcttggcaggaaagtatatcgcacactcacaggtgacagaagagagtcacgagagaaagtgttttcacggagttaagaaaagcagacaggctgggtgcagtggctcacacctctaatctcagcactttgggaggctgaggcaggaggattgcttgagccctggagtttgagaccagcctgggcaacataatgagaccctttctctaccaacccccctgctgcttcccagattagccaggtatggtgtggtggcgtgtgcctgtagtcccagctacttgggaggctgaggggcaagatcatgtaagctcagcacgggagttcaaggctgcagtgaactatgatcgtgccactgtactccagcctgggtgacagaatgagaccctgtctcaaaaaaaaaaaaaaaaaaaaagggattggttccactggggcagcaggaggaagcccctttgttccctagaactgaagcctgagagaaaaagggacttgtgatcgagagacctccaggtgctgctgtggggaggaagcagggggtcagtgttcctactgtcttgaccctcttccgacagtcatccctgcccgtggtgcctccccagggccagaaagtgtggaagggcagcctcccaggcacagatcccagaggaaaaagaggaaaagtcatctgaagggcaatctgagagtatttagcacgtcgcccttctaggttcgttttttttgagatggagtctcgctctgtcacccaggctggagtgcagtggcaccatctcggctcactgcaagttccgcctcccgggttcacgccattctcctgcctcagcctcccaagtcactgggacaacaggcacccgacaccacgcctggctaatttttttgtatttttagtagagacgggtttcaccgtgttagctaggatggtctccacctcctgacctcgtgatccgcccgctttggtctcccaaagtgctgggattacagccctgagtcaccgtgcccggtcttttttttttttgagaggtagtctcactttgt

SEQ ID NO: 28590 - DNA, 1034 bp, Homo sapiens
gttgggcgttaagcaccaagagctaaaatgcatagctgctgtgcagaattagctgatgctttagcagggctgactaaatggacaatggccgcactgtatagtaggtgttccctaggagggtggagaggggtaattactgcatgctgtgagagcacgtgtaggggcatctcaggtggagggcagacgccgggaatggcttttctaaaagagggaaaacaggcagggaatcccagtggggaatagggtttcaagcagagaaaatatgaagtgtatcaatgtggagatatgggggaacagcccacttggaggactttgtaggcacttacaggtactgtttctttgtctttcttctcctcttcttatccttcctttttcacttccttcagtggcgtgttagtaaattggctcccaaggtgaataaagaggcctgatttgtagtgttttgtcgatttctatggtataaattttcccatcatcgccaattccaagctatcagcatgatatcaactggtctacaaaattcctaaaactttaacaattggtcacaagcctatacaatcccactccagcagacctctgccgctcatccatccttccatccatccatccatccatctatccatccatccttccattcatccgtccgtccgtccatccgcccgcccctccgtccatccatccatccatccatccatccatccaatcatccatccacatgcataattataaccagacagaatcacaggaataaatcatgttgcagattttagagtttttttaaatcaagtcctctcattttatagacaagaaaactaatgtctagagaggggaagtggctttttaaaattctgttcattgagctattaggaccgttttctccagaattcaagtaaagaatatggtttagcaattcttgagttgaagcaatgtggaatctaagttgtgcagaccacagttgtgacagtcctaatgctcacgaagctgtttttgttccttgtctcaatagttgcttgttcccaccaggctcacgattt

SEQ ID NO: 28591 - DNA, 1052 bp, Homo sapiens
aaatttcatgaatgaaaatttaggactcaaaggaaaaagtaaaaccgcactcaaaaacctattattcttaaacagttattgctagtacttcttttttttattacagtaaaatatgtataacatcgtttgtcattgtaaccatttctttttttttttttttgagacagagtttagctcttgttgcccaggctggagtgcaatggcgcgatctcagctcgccacaacctccgcctcccaggttcaagcgattctcctgtcccagcctcccgagtagcttggattataggcatgcgccaccacacccagctaatttttgtattgttagtagagatagggtttttccatgttggtcaggctggtctcgaactcccgacctcaggtgctccgcgtgcctcagcctcccagagtgctgggattcaaggcgtggccaccgcgcccggcccattttaaccattttaaagtgtcaagttcagtggctttaagtacatttacaatgtaacgttgcctcaccagcagccatctccagaacttttcatcttcccaaatggaaactccgaaactccgtacccattcaacaataactcccatttccaccctccctccaggccctggcaccgccattctactttctatctctatgtattcgactgctctagggacctcatgtaagtggaatcttaacagtatttgtcttttttggcttatttctcttagcatgatgtttttagggttctgtgttgcagtgcgtgccagaatttccttcccttttaaggctgaatagtattccattgtatggatatgccaccttttgcttatctgttcatgcgtcaaagcacgcttgggttacttctatcttttggctgttgttaacgggtgtacaaatatctgttcaatttcttgctttcttttgggtgtttactctgaagtggatttgttggatcatgtggtaattctgtttaatttttttttttttttttttttttgagacagaatctcgctctgtggctcaggctggagtgcagtagtgcgatctcagctcactgcaacctctg

SEQ ID NO: 28592 - DNA, 1040 bp, Homo sapiens
gttctcgaactcctgacctcgggtgatctgcccgccttggcctcccaaagtgctgggatcacaggggtgagccatcttgccccactgagtacgtactattatctccactttattgatgagcaaactgaggttcagagatgaagagatttgcccacagtcacacaattagtaaacagctaggttgagcctggaggcttcaggctgtatccctgatgtctgggagcttttgctatttcatgctgctgccctgaactattagtcttccttcctcactttcaaaatccagacatctttctgcattttgaagagtcttaaatgagtggtgcatatgacttgttctcatttgggaagaagatttctgctgcttatataaaatcattgtgttgttttagatttttcttaattgcactgcttaggactttttctgcaaaagcattgaactattcagttcattaggctatatttagtgaaaattgcacccagtaaaatttcagggcatcctttttatgtctcgatgctgtagctctgtactttgataccgtttgtaatgggaaaataaacataacttacatgttttgtttgatttacctctctttgcaggtatcttttgtaaggtgtgataagttgcaaagagaaatattgctttgcagaggagttactgctgcttaaaaacatggcattgggtgctgttgaaatccgtgaatgatgacagtttattgagaatgattgagaatgtgctaaaaatttattttatagctggtcggtgaattattgtgattgctcctaaatttaaacgacagaatttgtggttgtagcttaaaaacctatgacattgaaatacggggtagtgttagatatgagaataagtgttagatatgagaaaaaaatgttgttttaattggtcaaatcaaaagaaacttcctggtcatcactatttccaattcttgatatgttatagccagtgatcccatttggatagaactttataaaggactgcttcggttggacagatgggccttacaagtgttgtggaacattcg

SEQ ID NO: 28593 - DNA, 1048 bp, Homo sapiens
acaggggttaatagcatggactctggtgccagactgcctgggtttgaattctggccctgctagcagtgtgactttggggaagtcacttggctctgtgcctcaagtgccttgtctataaaatgatgattcctaatagttggggtatttgtcccctccaaatctcatgctgaaatttgtttcctagtgttggaggtggggcctagtgagaggtgtttgggtcttgggggtggatccctcatgaatgccttggtgccattctcacaaggagcgagttctcgctctatgagttcccgtcagatctgatttttttttttttttttgagacggagtctggctctgtcgcccaggttggagtgcgtggcgcaatctcagctcactgcaacctctacctcctgggttcaagtgattctcctgcctcagcctccgaagtagctgagattacaggtgtgcgccaccatgcctggctaatttttgtgtttttattagagacaggtgtcaccatgttggccaggctggtcttgaactcttgacctcaggtgatcggcctcccaaagtgctgagattacaggtatgagccaccgcgcccagcctcagatctgattattaaagagtctggcccctctctcttttcctcctccttgccacgtgacatgctcgctcccccttttccttccaccatgagtggaagcttcctgaggcctccccagaagcagatgttgctgccatttttcttgtacagtctgcagaaccatgagccaaatagaccccttttctttgtaattacacagtctcaggcattcctttgtagcagcacaaatgtactaagacaaggatgtgtctgcctccctgagatgttgggaagagcagatgaatcacatgatagaagtttggaatggtacaaggcacacactaaatgctatgtaagtttttgctgtaattatctagctaaaggagcattgcatgataaaatggatataaaactcttgggcatagtgttcaatacacttcagctcttttgcttataagcttggcagagagagagtaaact

SEQ ID NO: 28594 - DNA, 1027 bp, Homo sapiens
gcaatcttcctgccttggcctcccaaagtgctgggagtatagggatgagccactgtgcctggctttgggaagtattttaaatagaggtcacatacttagtgcattgatagtgctgcctcttccctggaagaaatattttcattgatcggcatcccccctccctgctcccttaatctccctagttatctctttctctctgtcagtgaatgttgtttaaacactgaagtctcatcaatcttgtacgctggaaagcctagaatcactagtttagggcttcccatctcagctatattaacactgtaacacttgtatcaacaacagtctagcatcctgttggaattaacacacatggtgctcccactctgttcctgtttgtgtagggagaagcaagacatttccttgggagcaaatctgtttctgaagggtagtgatgggcttgatcaggggactcaatgtgatcaacattgagagactgttgaccacaagtggcccaggtgagtggagactgggacacactgaggagattctaagcattgggttgggactggtggcctttaagatcatatctgtattttaggattttgtgataagtgacagggtggaatggggtggggcaggtggctgatagatgggtgattttagctccatcccttccctctgggaatgtcttaacacccaatcagaagaaaatggttaaaactggagagtcagctgtgaatttagtaatccatcagggcagatggagagctggcaaaaatgtgtgctaggtccccatgctcttcgaatgtctcactcatctttgtcttgatcttttagatactcaacgtgtttgctatttaaataatagattgtagtttaaaatcacttccacttgaaatcaggccctctatttttagaactttcctgcaaagttgagaggcacctaaatgtggtctttttgtgtctctgggcctcctctaagattctgataacctgagtttaccctactcattctctaccaaaattttctatttagaaaatgcttgtg

SEQ ID NO: 28595 - DNA, 1034 bp, Homo sapiens
agctggagtgcagtggtactatctcagctcactgcaccttctgcctcccatgttcaagcgattctcctgcctcagcctcccgagtagctgggattacaggtgcgtgccaccatgcctggctaatttttgtggttttagtagagacagggtttcaccatgttggccaggctggccttgaactcttggcctcaagtgacctgcccacctcagcctcccagagtgctgagattacaggcatgattatgttgagatacgcctggcctgaaaatttaaaattatgttttcccctggcctagagaaaggctgtccacctatcttgctgggataacctgctagggtaggtatatttatttatttttttctctttgttgcccaggctggagtgtagtggtgtaaccacaactcactgtggcctcgacctacaggacacaaggatccttttacctccccgtcctgagcagctgggactgcaggcatgcgccaccacacgggctaattttttgtagagatgggatttggccacgttgcccatgctggataggatggggaaatttctcttatttcaggaatttcttaattttaatgggccccttcaccccacaaagcgtgtttgaagctagagtgcggggagattaaaaagtacaaggctaagtggtttccaaaaatgaattttcatcactagcatattggaaagataggaattttctctgcagcaaaattaatgtaggcacatttaaaagattaggtagacattatatcagtgcctattgtgagtaacaatagctctgtgtatttaattgcttgactcccctttaaaagtctaagaataaagaagtaagagtagtcataaaaccttaaaatagtttaggaaaaattaatgaaggacataaaagcaagcagcatagcatcggagggggaggctcagcctatcaagaagagattttgtgtgttggttggtcatgtgtgtaattaccatcagcactgggctgttttggtgtgtgcagccaaggctgtgcctagttttagttggacca

SEQ ID NO: 28596 - DNA, 1401 bp, Homo sapiens
ttcagcttttctctaggattgcctcctggttcatgaatgatcccatcttctctgaatgtcccaaagcattgatgatttccaagacatttaattcatgtctttgttagtttcctcccggtaacaaggtacctcaatctggtgacttaagacaacagaagtttattctttcacagaactggaggctagaagtctgtaatcaaggtgtcaacagggccacactccctctgagggccctagggaaaattcttttcttgcctcttccagcttttggtggctccaggcaatccttggcttgtcacattatcattccaatctctgacattatcacatggctgcattctccatgtgtgtctgtgtgtctgtttccacatctccccctttctcttataaggttatcagctattggctgtagggcccagcctaattcagtatgacctcttcttaacttgattatatctgcaaagaccctgtttccaaagaagctcacattcacaggtaccagggattaaggttttgacatatcttttttttttgagacggagtctcactctgtcacccaggctggagtacagtggcgtgatcttggcttactgcaagctccgcctcccgggttcacgccattctcctgcctcagcctccccagaagctgggaatacaggcgcatgctgccacgcctggctaattttttgtatttttagtagagatggggtttcaccatgttagccaggatggtctcgatctcctgaccttgtgatccacctgcctcggcctcccaaagtgctgggattacaggcgtgagccaccgtgcctggccaggattttgacatatctttttttgagggctacagttcaacccataaccatgcccagctgctctgttagactgcctgtttgtttgcttgtttatttatttattttgagacggagtcttgctctgttacccaggctggagtgcaatggcgtgatctcagctgactgcaacctttgccaccggggttcaagtgattctcctgcctcagcctcctgagtagctgggattacaggcgcccaccatcgtgcctggctaatttttgtatttttgtaggggtggggtttcaccatgttggccaggctgctcttgaactccttcgtcatttcgaggtttccatttcaccggaaccaaatgttagctctggtggtctgggacagcaagagggatcgtggcccttttgagaaagaaatgggcttttcatcctgacctcatgtaatctgcctacctgggcctcccaaagtgctgggattacaggcgtgagccaccacaagtggcctatttttatttatttatttattatttattttttgagaccatctccctctgcccccctggctggagtgcagtgatatgatcttggcactgcaacc

SEQ ID NO: 28597 - DNA, 1024 bp, Homo sapiens
agcctgggtgacacagcgggactctctcagcaaaaaaaaaaaaaaaaaaaaaaaagacacaaataacaaatactattcgagatcacatgttgaaatgtcttaggaaagaatcttgtactttctagatatttggaactgagctatcttgaggcatcagcttttggttattattttagctggaattaaattaagaaagtgtatcttccttttatacagtagaaagttctttaaagctagataataatttcaggtgttttgggcttttgtgtgcttgagcaagttctttcaattaatgtcttctggatattgctaataactgtgtcatgcaaagctcatccttaaccctcaaatctgttatggttaatatattgctgggtgattattacaaaattactcctcttaagcagtttatcgagcattgaaaatattttcagaaaacgttccaagtgtggtgcatggtctaccatgacattttagaaaagatgtgtgaatgttcaaataattatctcatcttgaaatctctgtgattagaagttacaatttcagtgccacaattatatcaattgaactttaacatttcattgtaattataaaaattaaaaccttgtaactgtggttcttagttaactaaacaatttagcaatcgaattccttaaaagtagattgaaaatcctcaccctgtagtttttttccttttttccccctgctgacggacagctaattgctttaattttgagggttggatctgcctgcaaccttggccctgtgaaacctcaccaattgtatcaaacaattcaaattatcttaaaagtttgtgggagtctgttgccacaatttcagtggacttcaagtaagaatacacaaatgacagtctctttcttggaagatgggctcaaaaccagatatactttgtttctaaaagttgccggttagcatgaggaacctgcagtcttcatgacaaagactttagagatcccagttaactgcccattctttaaaacaggaccagttaatgtagcttatt

SEQ ID NO: 28598 - DNA, 1033 bp, Homo sapiens
tagcctccacctcccaggttcaagcaattttcctgcctctgcctcctgagtagctgagaccacagatgcatgccaccatgcctggctaatttttgtgtttttagtagagacagagtttcaccatgttggccaggctggtctcgaactcctgacctcaggccacctgcctgccttggcctcccaaagtgctgagattacaggcgtgagccaccacgcccggccttttaaaaaaatattcttttggatgtaaacctaagaatggagttgctacgtcatacgtaattctatgtttaacgtattgaggaactaccagattatttcccaaagtgggtgcaccattttacatcccaccagcagtgcataaagagtccaattttcccacatctttgtcaacacttgttattgtctgtctttttgattatagccatcctattggatgagcggctgtatctcctcatggttttgatatgcatttctccaataaataatgtcattgaacagaacatcgtttcatgtgcttgtaggctaatcgtatattttctttgaagaaatgtatcttcagacgtgttgctcatttttaatttttttttattaataagttgtaagaattctttatctattctagttataagtcccttatcaaatatatgatttgcaaacattttctccattctgtgcgttgtcatttaattttcttgatgatgccctatgcatatttatttttaaaagctgaaagtcaataaaaaatgtttacttagtcatgattctgccaatacttttcactacatatgtaggtggtatgctaatttacatttccttttctacacttctggcatgactaattaagttatagatcaagaaaaggaacacaggaaacattttgttttaaaacaccaatttcacacttaaaaaaagcaaaactttgtttacttaaaaaaactctgaatcactcagttattttatttatcagagcttcttgaaggaaatatttgcaatgagatttggaagtgaactacctttggtatcagctttt

SEQ ID NO: 28599 - DNA, 1048 bp, Homo sapiens
gttgcccaggctggagtgcagtggcatgatcttggctcactgcaacctctgcctcccaggttcaagcgattctcttgcctcagcctcccaagtggctgggattacaggcacctgccactgtgcctggctaattttttttgtatttttagtagagactaggtttcaccatcttggccaggctggtcttgaactcctgacctcatgatccactctcctccaagcctcccaaagtgctgggattacaggcgtgagccactgcgcctggccttatggttcttgaattgattattcttcagtctttatattactgacatagacctttaatttagttacatcaaccaatgacagtgacttttaatccctccctgcccttgtgaaattagaaatggatgtcctgatcttctctttttctccttaactttcttcctggctctacccccagctccgtcagcagtcaggagtggtaatgttgtgttggtacattgtatttctgtaatcatgattaagtcttctaggttttctctatagattgtttttatttttatgacagtattattaagatatacttccacctctttttaaagtagacatttcagtggtttttgataaatttacagagttgtacaaccatcaccacagtcgattttaggacactttcatcaccccaaaagaaaccctgtacccattcacagtcacttcctttctctacccttcctcccagcacttggctaccactaatctactttctgtcaccatggatttgcttagtctggacattaccgagaaatagaatcctataatatgtggtcttttgtgaccggcttctttcatttagcatcatgttttcaaggttcatctgtagtgtgacgtgtatcagtattttactcctttttctggctgaataatattccattgtatgggtatactacattttgtttatccatgtatcagttgatagacattgggttatttccaccttttggcctttgtgtgtagttactgttatgaatgaatatggcacaagtatttgtttgaatatctttttttt

SEQ ID NO: 28600 - DNA, 1033 bp, Homo sapiens
agaggttcttctccctctgggctgaggcagagctgggagactgcatcctaccacggagccctggagtggggtctcagctcactgaaaggattgcagaggtggagggggtgggggtactacgcaggcatgatctgagagccgatcaattgtctgctttcagaggatgttaaacaaagagtgatgattcatcgaagaactctgtgggaggaagtttctttcagctgagcacaatctcagtttcagaatgggcccagggccctttgaggcttggtcctgtcaccaagtatttctttccttaaaggaagacttgggtgtagttggagtgggggcatcctagccttttggaacctagcaaaactgaagtataatatggatgttttctgtttgggaccactttgaattcatgaaagaaagatgaaagggagggggaagtgtctttggttttaagaaaataacacctgtattatttattccagcttctgccccgctagagtatgattttattaaagagcaaaggactctaatgcagttgtgctgggaaaaagatataattgggaggcagtggggctgagtgtccaagcttggaatgggtggagaaactgattggagattgggctatgaggattcagttgcttttccttaaagacccaaaacacgcttctctgtgaccatgaggaagacaggatatcctgccaaaaaatcctggctttgcaaagcctgtttccaaaggagcgttctcctgcctcccttccactgtccctcccaccttgcctgagagctgctaaccttgtaaacataggtcaatccatcaatcctagttcctgctcttggtttcctctgcccactctgcaggggtaataatgagccccagaaagccaccgcgtcatctgggggcagggggaggtcacgatgaggagtgggtcttggaatcctcttcgctaggggaaggggagatgtcaggaccatggaaatggggtgaacaggatttgctacccattgcttgctcaggagggaaggtgggatcgggacaata

SEQ ID NO: 28601 - DNA, 1078 bp, Homo sapiens
taaattgagagattccaatgcttttctgtacctaagtggtgaaccccaagcagaaaatgacaggttgttgaacttgcgtgactcttatatcagtatgagcaaaccctcatgtagataggaaaataaaaccaagaagtcattgttatttcagcagcaccaaccttaccagacttgccacctttggaagaatgaatagaaataatgaatagaaggtgaacagctgaacattgagcattattcaggtcgtgatggcctcgcaagttaaatatcatgctgtgccttgaaaaaggaactgtaacagtaaacttcacatttgtgtatggatctttgttttgtagacattagtgtttatttgatgcacattgcatagtaactgcatgaggcattttaataatatggactaagtgtagcatggagtcaaagagatcttcctctttcctgggttttctaggtcagtgacctcatttttttctagtaataagacggggtgtaaattttctaagtgtgcacctgcagtatgcttagttagcttgaatagttactgatagtgaatgtatttatctcattaggacttagcacactgtgtttctcaaatgtatttggagtgggaagacagcttctaatgaaagctacaggagattttgacatactctttgaaaattggtattaccattactattttatttcccagtttattctggcctctacctgtattagatactttaaaaatgtctttgcaattgcttgccttaggttgttactaggcctcacactgggtttgtgacagagtggcaaactatgaaatttgaagattgtgggttgaattttattttgctttaagcgccacagaacacagctgaaactggagtgccatcttcggtggtgtttacatttttatttttgtcgtcttttaggcactcaaggagttgcccctggtcctgtaattggacttcaggcaccatctactggtcttcttggcgcccggcccggtctcatcccactccagcgccctccaggaatgcccccacctcacttacagcggttccctttgatgccgccccgtcccatgccaccgcac

SEQ ID NO: 28602 - DNA, 1047 bp, Homo sapiens
attacaggcatttgccaccacacctggctaatttttgtatttttagtagagacggggcttcaccatgctggccaggctcgtatcaaactcctggcctcaagtgatctgcctgccttggcctcccaaagtgctgggattacaggtgtgagccaccgtgcctggcccataaatgtttatacaaccaaaataaatgtatattgtcttacatctatccatccagattattcagtatcaagtttcataggctctgcctactttttttctgagtcttcattcttcagggactttgtgtcctgaagaaacttggatatgtacccaataagctgctgctttgagggacagggattttcttaattttcaccttggatgctatccttatgaaatttttaaatggattgaaaacttcataataaatgccatttaacatgaagatgtgttcttattataaaatatttgctgtctagtcagccaacctgttacttgaaaagcaatactagattctggtagaactgggtttaattctcaactctgttgtttatattcagcagtatggtatttggcatgtaacttcacttataagcttcagtttcctatttgtaaatgtgcaaattccctttcctggctttggcattcctcatgtgttagagttgttttgagggttaaatgagataatatatgttaagtactcagtatgttttttgtcacgtcataagggccgaaaaatgaaaaaccctttgaaaattataagaacttgacccatagttctatgtgtgatctactggatttttcttgtcttccttcctcagtttctcacattaaatctgaatcagataaatctgagctatcatgaaagtgaattgtgtcttcattttctcaatgtgaggggaaaactgtatgctttggtacattcttggctgtgatttaaatggactcccctagttggcaaactcttcagctgaccttctggatatgcccctccagtgcaggttctaagcaaaattcaatgtgtgtcagcactcatttacagaaagctgcctgatctgttca

SEQ ID NO: 28603 - DNA, 1043 bp, Homo sapiens
caacctttatattcaaacctcatgtactattttttcatgtcttgggtttaaagtgttttataactgttagcaaaactataaaagaaatgttaccactgtgttgatttttatttgaaatattgctttcttgtgccttgtttattcattgatgtatacccttagatttgctttcgtaccttaaaccagctataaagcagcagtaaggagtgaaccaaaaatttacagaatgtattcacttgcattattttctgaatctcatcagatgtcttcagaatacatttagtaaggtgtgctagacatatatttgatataaatcagtaactattaagatgactaagattttaatttataatatgactagggcatatgtaagatttctgattccataaggcttatcacctaggacacaacataaaagaaaaaccatcaacacttaagagtggagaaaggacagttacatgcaagtgaacaaagcactgagctggttggtaatcaagagacttgagctccaatcctagttctgctgttcattggcagggtgaggtgggcaagttattgcttccctggcttcagtttttatagatgtaatctttagatccatctacaaaaaaaccagttttttccaacttttatgtatatctttcactatcccagttctctttctggaagtactaatgcagttttctagaatttttaaaatgtatgtgagatttactatttaaacttgtggtgttgtaatatagttcatgaatattttgtgtaatgattttttaatgtaagctacagtgctgctcattatcaaatgtgaatctctttatgattgtaattttattttaagtttgcagtactaccctctgggtggggcagctggacaaaagaactactcagcaggatgttgccagtctcttggaagagtttggtccaattgaatcaattaatgtgagtgtttattcagttttttaagtacgatggacaggtgtgattaatgtcattttatgaaatggaggacctgagaccaaagttacaatttgcccaggtttata

SEQ ID NO: 28604 - DNA, 1304 bp, Homo sapiens
attcctctagtatttaaccttaagtggactggcccataagtttagaaaaaggaattctgtgcttttcttttgactaaaaaggtctgtttcaagcttctcactggaaataatttgtctgtttcagctactttatagatcttcagtttcctaaaaagcaactaaaatttctttttgggtagaccccattttaattttttaattgctttaagtattttaaagcagtattcttcaaactttaaagaacatattaatatgtaataaactgtgaagatcataggttttgttttttataggcgactttgaccagattttaattttggctccaattacttacagactgtcctgttgttgaattaatgtttactgttcagtagtgtaaaataaagatggtagtaaaaatattttattgttgccatgagggttaaataaaaatatgtaaaacagcaaggtacctgggctgtgatggttcctgttcagaaaatactaacttgctcatttgtaagaactttactcacttggcctagaactacaaagaaacataagttagctctatcccaaaacacactttacacttagtttagtcctatatactgtgttgtctaaggacagaacttttcatttgatttagaaatgtgttgttcaataaagcaaaaccagaatctctaggcagaactattatagaatgacaaggttcaggaatttaaggttgaagtctataagcagaatgagcacggcttgaaaggaaagattgcttattgaaagccagagactgagggctttgaagtcaaaaggactagtgtccgcatcctgattctaccattcactgactgtgcaatcttaatcatgtttcttaatcacctgagcctttgtttccttgtctgtaaaaaagaagaaactatctacattgcagtgttcttgtgatgaagtctatatgatctgatacacattagtaggtatttaagcattatcttttttctgaataaatcttacttaaaattgttcttctagatatgtgatctcattaagtctcttgaatttttttttacatgaaagtttctggtaagctgtgaagttatgagaaagaagcaagcgaacctcttaggaactgctagtgacttttttgtgtccttgccattttttttctttttttatattagtatattcttgaggaagcagtatatggacacttttctatatgcattatggtgattgaataagacagtctttttgtacattttatgctgactgaaaatgtatacccattttcatgtgcacaaagttccagacatttttaggctagggaa

SEQ ID NO: 28605 - DNA, 1129 bp, Homo sapiens
aaagaggatttgagttaggtcagtgtctcagctgctctatcgggcctataggtttcttaggcatgtttaagaagctgccactaaggatatggatatgctgaacagcttagagcttctcattgaaatttaaccctaacagctccactcttgtctgttttatttggtttatggctttataaaacatcatttgacttttcagttttcactgcaaaaaaactcaaaagtttgaaaatcagaactgatgcctttggtttcatcatctttaaaatatctgattctttccaacatcctaactataaaaacagaaggactttattgccaatagtctaaattaaaaatccacctagtaaataccagttttcattatatcttagtgatttatgagtgatgactgattaaacaaaagttggatacatttttttgagtaaaaaggaaatatatacttgcagaaaaaaaaaaaaacaaataatacagaaagttataaaataaggaaagaattccacactgcagtttgaacagatttgttcgtgtatattcttgcactcttgtttgcatgcacatacgaacataaactcacatatttggttttcctagttttttgttttatgttgtgattaggaaaactcctcatttgtattagaaaagatttctatattctagtaaggttttttttatgattgtctgttcagtccctctggaatctgttttagaatatggttgaagatagttaaaccattatgtttttgaaaatagccagttctccctcactacttttttatacactaaattcctgtatgtttctgtgtcttatctctggacactgttctatcccactaatatatttgtttatttctgcatcataataattcttgtgacagactgtctttcatttcctggtatcccgtctctccccctcccacttcactctttttcaaactccccctcatactttttcaaactttgttcatttatcatgaagtgtattagtcaagagttccagggaaacagaaccagtaattgaatctacatctgcatctgtctatctagattcttgaatgaaagatagatttatcttaagaaactggctcacgcagttgtagggactagcaaatttgaaatttgcagggca

SEQ ID NO: 28606 - DNA, 1677 bp, Homo sapiens
ctaggggtaagggaaacattaggagctgctaatcaataggtatgacatttcagttaagcaagatgaataggttgtagagatctgctgaacaaccttgtacctatagttaacaattctgtattgtacacttaaaaattggctaagtgagtagatctcatgttaagtgttcttatcacagtaaagtaaaatttttaaaaaataatatgaaaggcgcatcatctttaaagaagatatcgttggaaagatgtgcttgtgtagttgagtaaggaagaaattgtgcagtaggaaaagacagcgatcatctgattgtggttattccagaaagaaagagccaataatagatgttcttccccaacatatagagatactaaagtttaagtggtattcattagcaatcagactacagtatttaattccttatatatacagttggctttacaacatactatataaaagtagaaaaacattacagatatagtagctgactataagtagataggaggaattatactagtaaacatactcagaataatgaagaacggagacatttacaataaacagcatataaatttcagtgtcataggtgctgtttttatattcttggaagaatgctcttgtgggaaaaatacacccaaaaccaagatgattccttgagtaaagataaaagttgtgcccatgaataacatatattctctggatcttcatatttgcttggccacataatttaagttttgactacaggccagttgcttaaatattttagctgttataattactctgaagaaattctccttcatttacttcaagatagcttttttttggggggtcagtgatagtttatttgtaaccataagtaaaataaaatgaaaatgtcaaataataaatttctttttattgtctgggtctatagtccatctctgttccttactctagatgataccactgaagaaagactaattagtttaaccaggttgtaattctgatttttttttttccttgtttatgaaacacacatagtatggaaatattagcctagggagttttcctctcttttttttgtaagagtataatcggttatttatgcaaatatttattgtatatttgtgtttctcatgcgtaacagagtaaaatagttcgtgtgctgaacctttggcaaaaaaatggagtgttcaaaattgaaattattcaacctcttttggacatggcagcgggaaccagtaatgcagccccagtagcagaaaatgttaccaataatgaaggtatggtcagatgtatctgtgagctcacacaatggtatgattttttgcacatgaaacagtcagagtttatgtgtattgaaggaatttttctataagaaggaaacttgagtttacatcttggaaggtatgattttctttccataattcctatttataataaaggtctgctcttctggtagttgttacagtataaactctagtgccacaatctctatattttatactttgttaaattggataaaatgttattttagcaaagaagcttaattaggaaaacttgtaggttaactttttttttaggccttaatgcccttttcttttttaggctcacctccacctccagtaaaagtttcttctgaacctcccacacaagccactccaaactccgtcccagctgtaccacagttgcccagctctg

SEQ ID NO: 28607 - DNA, 1036 bp, Homo sapiens
atgcttatcccttctaaagaagtcttgtatttggaggggctgttgttatttttatgcaggaggatttcatggttttctctggctgctttgacactttttattcattcacagataacattaattgtgaatacaggctataatgttgggggagctctgcacctaacggtgtttattgaatacttgtcctctgcggggtgacatagtacgagtcattccatatacaaaaactcatttagttctaactgaaactgatacctatcaagcagatatcagtatatcctttttacaaatgaggacattatggcttagagaaattaatttgcccagagtcatctgcatggccagacccagattcaaaaccaaatctttctcactctctatagaagaccacaatttctggtttttctcactagtagattttgttggaattatattaaattttgtggcttttagacttgatatataaagctaatagcttttttcctgaggtttgttgactgaaattggatgttggtcataagtaactgaattatctttgaatctgttgtctactctgtgtataatacttatgtgtatctaaacttgattgaaaaacatgaagtttttttctgacatggcagtgcttcttccctgccccccccaccccacccccgctccggtttgcccatgagaaatttattaatggtttgaaggaacctacacattattgaaaggtgactagcagttattttgggccttattttcctcatttctaaaaacaaaataatttttccctgggctgttgtccttcatatttttgaccacagtacacacagtaggaattatgtaattcattcctggatctcaacccacagtttgaaaaacactgctctggattaactccaggattctctctttttctcaaaagaattacgtgtagtactcattaatatctattgtgtatttactctgtgctaggtgttgctctaagtgcttttgtatgtattgtttgtatttaattcttagacttaactaaataaggagggactactgttat

SEQ ID NO: 28608 - DNA, 1947 bp, Homo sapiens
gcctgactaacatggagaaaccccatctctactaaaaatacaaaaaaattagccaggtgtggtggcacatgcctgtaatcccagctacttgggaggctgaggcaggagaatcacttgaacctgggaggcggaggttgtggtgagccgagatcgcgccattgcactccagcctgggcaatgagagtgaaactccatctcaaaaaaatatatatgtgtgtgtgtgtgtgtgtgtgtgtgtgtgtgtgtgtgtgtgtatatatgtgtatatatgtgtatatatgtgtatatgtgtgtgtgtgtgtgtgtgtgtgtgtgtatatatatatatatatggcagcagtttcccaaaaatttttttttttttgcacagtgtatgttgttcattttatccacagggcttcagttattgtaaggatttgtggggggaggggtgtttttaatttaattttttaatttaaaaatttactaattttgaaaggctttattaaagatttgcaagttactgatttaaacatagtaactgagcttcaaagacaagatttactctgtggacaagttatgtgataatggtgattctgtataaccatatttctttatcacttagttatatttataatcaaaagttgaacaaagatgtatctcagacagatacaaattaaagttcatttttaaatccatgaatttaattgttttcatttaaaaattaatgcaagttagataaatttgaattagtagataaaacaatcccatcaaacaccattagcattttagagtatttcctttgtctttttttctcctccacttgtgtttggaattttttatgtagttaccagatctttttaatagcatgaaattctctgtcattttctcaataattattgtggaaaatttgagaatatctaataattgccttagataaatttctagaagtagaattactggttcaaaaggtatggacattttttagttcttgttttatagttttaaatttctcttcggaattaaaactcgtccattagatctcaccagcccagtactctttttgctttatgctagtccacatgcatgtccgttggataatgtaagaattttatctccttgtattaatttgtactttgattattgattggtatggttgaacactttttcctgtgtttgttaattagatattgggattttgtttgttaaatgaattgcttctgtacatttttcagtttcattgtacctcttactgtgtgtatgtaccattgattaactcatacacagtattctgctttcaggtaaagtgacatagtggtacttgtttaacatgtgattggctttctttcctcgccccattatattacctgatattaaaaaagtattaacccagacacacatttagtaaattatatattgaaggcataagatgaaataccaggttaagaaaaggactgtacatgatcccttacctagttgttctagcagtagtgttttatggagttgtcttcaggtttaaattagatggataaagcatctttacaggaaagatgattttaaaacttgtttaaaattatcttttgttaagaaatttagcgtgtgctttgttatacagtgtctatgtgttgctaataaacataaaagttgtgttggatttaactatttggtttaagacagtgtctttgatatattaagttgagtatgaaagaggaggaaagactgtagaactaaatgctttgatatttgcatctaacaggaaggagatttgaatactagcctgtcattgtgagtatatatgtatttcttttaggaaacatttctattttttctttaaattcaacttcacatagtaataggagcttaagggaaaattgctttgtcatcttggaggtcatactaccaaaggaaggaatactggaaataatcagtgtaatccgttacaaagtaaatttaggaaaatacattttt

SEQ ID NO: 28609 - DNA, 1062 bp, Homo sapiens
gtgttcatcccccttctccgggattcacgcacttgggaaatagggctaataaacggagagggggtggctcgttataatttaaagtcgtgaacataaccctcttataggctctatggccccaacgtgacgcctaaaaagttgaatgggagagaagagtattcgctccgccttagtccgctagaaagctggcgttgtcctccagttccctaccctcgcaccccctcccgaggtagttaatcctcggctcccttctacgaggacatttacatgtgaaaacctctccaaactgggaacaaagctgcctgcggccttaaagttctctagttgtttctctgatcattccaggtgttgcttttggagtgtagagtccatacatcctatttgtcagaatcgatttgggaggaggagacttgaccattgatgatttaaaatgcagttacagaatgggaactattgtcatgggttgagttgtattgtcttccctttccaaataccaaagataaagcaacattgaaaaatcaaatgttgtagttcgagatgtgtggatgtggcgttaaaaacgtgctgcatctcacagattttgtaggtttacttgtaacaattatggtgcaataactttcctttagatttgcagtgccataatatatgggactttccaattacactgcagttgagacaatttattgccatataaattatcctaaaagtgattttcttcaattgatgggtacataaaatgccctaactgcagaagttgcaactggtattggacagtgtcttgtaaaagttcagttgtgatgattttcaaaacaataaaaataatatgtcctagtttttgatcgccagagaatttgtgataatgctccaaacatttcagggttggaagctgattgttttctgaaggtagaattcactggcatgttggctcctggctccatgagggcaggaagtttcagttcttttccccgcttctctaccaatcaaaacaggtgcctcgcaaataattgttgaatgagaatttaaacaaatggcacaacaatagttaaaatatttcaagtacat

SEQ ID NO: 28610 - DNA, 1050 bp, Homo sapiens
tgcccctgactgaattccatgttgtcctgctgtcagtggcctgccagtgtctgctggtgtccgttgcgtgatcttctgcttctctcaacgtccagctgcttgtgtctgtgcccgctagggtctcagggtttttatgggcacaggatcgggggtgaagtggttaggagtagtcttggacaatgcaacatttgggcgtggaaacaggagtgctggttatcacttaggtccatgggcacaagaccgagggtggagccctcaccaggagccctgcccttctctacccagcacttccctgcccccctcccgtatcaaaaccaccaccatctcttgcttgggcttctcaagagtctcctcactggtcttggcccactcccatctccttcacagccggactgagctgctggaaactttcatctcattgggccacccctctgcataaaacacttggcttccccatgtcctaaggacagagattaaaattcccttccttgctttctgcctgtagtcgatccttgaaagcttccacatccttcctgctttgggggtctccctacgggctgttttctctaactggaaagccccttttcctattagacctcagggctcagtctcaagctcactctcttcctcttcacatgaggccattacctgccatcacctgtcacaccacctgcactctgccttctcagcctttattacagattataatgcagttggtgttggtatttgcttcctgactatttcccctgctgtaagctgcatgaaatcagggtttgtgtctatttgcccatcattatcccagcacctagctcactgttagtgcctagtaagcactcctaagtaactgttgagagaatgacaaaacaggaaagcaagcctccattgtatcagattttgggagttgcaatttagcccttaggcaaatctaacagaattctagacaggatgtagtctatgttagtttcctgtggctcccgtgacaaattacctcatgctgtgtggcttaaacaagagatatttattctctgacggttttggaggccagaaatc

SEQ ID NO: 28611 - DNA, 1903 bp, Homo sapiens
tttaattttgatgaagtatgatttatcttttttttgttatgctttggtgtcataatcaagaaagtactgcctgacctaaagtcacaaagatttaccccaacagttttctcctaacagtttcatagttttataggtttagctcccacatttaggttgatgatccattttgagttaattttggctatggtgtgaggttggaatctaacttctgttgtctttatatggataaccagttgtcccaacaccatttgttgaaaagacaatttccctattggattgtgttagactcttgtcaaaaataaatttgccataaatatgaaggtttatttttgaactcccaattctattccattgatattttggtctatccttatgccagtatcatgctgttttattgttaagttttgaggctgggatttgtaagtgctccaactttgttctttttaaagattgttttgattattcttggtcctttgcatttccatatgaattttaggatcatcttgttagtctctgttaaaaaaaaaaaaggaaaggaaaaagaaaaggaaaaaaaacgcatctgggattttgatagcaattcctttgaagctatacatcaatttggtttttaaaaattgtatattcttagggtgtacaacatgatgttttgatatacatagtgaagtgttactatagtcaaatggaatattattcacagtttctttatccattcatctgttgacagacacttaggatgttaccatatcttggctattgtgaataatgctgcaatgaacacggaagcacggatatctctatgaagcactgattttgtttcctttgggtatatgcccagaaaaaggattattgtatcctatgatagatctatttttaatttttagaagaatctacatactattttccatgaaggttgcagcaatttatattcctatcaacagagtacaagggtttcattttctctacaccctcaccaacacttgttatcatgtgtctttttgataatagccatcctaaaaggtgtgaggtgatatctccttgtggctttaatttgtacttctctgttgattagtgaaattgagtgccttttcatataccttttggccatttttatgtcttcttcagagaaatggctattcaagtcctttgcccattttaaaataagcttgttttcttgctactaagttccatagaccaatataggggagtcttgtccttctggcagtatgaagttttctgatccatgaacatgggatggtatctttgcatgtttttaggtcttctcttatttgtttcaacaatgttttctagttctcagtttgcaaatcttgtacaatcatgtgccgtataacaatgtttcagtcaattgtggactggatgtatgacagtgatcccataagattataatactgtatatttactgtagcttttctgtgtttagagggttagatacacaagtacttataattgtattaaaattgcctacagtattcagtcaagtaatgtgctatataggtttgtagcctaggagcaataggctataccatatagcctagttgtgtagcaggctacaccatctaggtttgtgtaagtacactctatgatgtgcatacaatgatgaaattgtcttaaagacatttctcagaatgtgtccctgtcattaagtgaaacataactgtacttgttttgttaaatttgtttctaagtattttattctttttggtgctattatagatagaattgtttataaaatgtttttcaaacagtttattgtcagtgtatagaactacaattgaattttgtatattgatcttgtagactatcttgttgaattcaactttgatgaattcatttattagttctgacagttttatttgcagattcattaggatctttttataca

SEQ ID NO: 28612 - DNA, 1044 bp, Homo sapiens
tggaagcctgagtaggatggggactgggtgcctatatgaatcttccgggctgccccaacaagataccacagattgaggggctgaaacaactgggctttgtttagacacagccgtgtagcttggaagtccaagatcgaggtgcgggcagagttggtttcttctgaggcctctctccttggcttgcgggtggccactttctccctgtgtcttcacacatttttcctccatgtatgggtctatgtcctaatctcctctttttatgaggactgtggtcagattaaggcctaccctaacggcctcattttaacttaattacctctttcataaccctacatccgaatatggttacctcaggagatccaggggttaggactttaacatatgaattttttgtggcccacaattcagcccaaaacaatgtcctccaactgacaggcttgttaggaagacattcccaaaggggtccactctagccatgtcactagccttgcaacaggaacatggcaggctctcttcaaattttggtactcttttcttctctctgcaaagcactagctctctgccactaaggaactccttttccccaagggagatgatgcctggagctgtgaaacaaatcctgagccacgggatgagtgtagacttgagactccagagtttgggatcctggtccagatcatgccactgcttaccaagtaggtaagagatgtcatcgtttgggtcagtttctcatggatgaaatggggtgggtaggtagaggcaagtgggcccaatgatcccatgattcagtgattctaaatcttgccttggttaaggacagagcgccaaagtgaagggtaaataattggtgttgacgagagttgctgggaaagccttcatgcttgctcaaaatggagtgtttcccataatctgcgtttgggttggagccagtcatcatctatgactgactgaattttttttggtcagaagcaactcgtctctttttcttctgacaataaaataaaataaagttccgcccttcagagccaaagcagcacatatttt

SEQ ID NO: 28613 - DNA, 1035 bp, Homo sapiens
gcctcctgggttcaagcggttcttgggcctcagcctcccaagtagctgggactacaggcgcgtgccaccacgcctggctaattcttgtatttttataatagtagagacagggtttcaccatgttggccaggctggtctcaaactcctggcctcaagtgacccgcccgcctcagcctgccaaagtgctgggattacaggcgtgagccactgtgtccagtctcattctaagactttagggattacagccacattctccacctctcctggagaaaacccaaaatacctgaaacaaatgacttaaaattttatataagtagttgatgttatgtacatctattttgctctccccagataggataaataactgggcagttgcttgccagtgaacacccagagacaatttgttagcaatgacttttgaactaagggagaataacttattttttgatctaatctgacatattttgggtattgatcattaatttttttagtgagagctgagttctatctgtaggctaattcactatttaggcagctaatcacgagggcacgagtgcagtcatggccagtctatagagttgtagtttctttgggatagtcacacctgtttaaatcccagtgataagctcgaaggtagagaagggaggggagtttgggatgaggaatggatgtgctggggcctagagttttattggcctaaatgtgatttcaaatagaactggcctcatttcattcaagttggctctgtggacctctactaattagcttaacaaaattaaatgaactctataactctttttttccctgaacaattaccaccatggtttttagttcttctcttatctaattttaaggcagagatggacaaggtgacccttcaagggctcttcaaccttctaattcacgtaaccctgaaaggaaatgagaaatgttgaaaggggggaagtgagaccatgaaccaactgtgtggatctgaggaaatgggataattgaggtctctccaggatgtcgtcactttcacgtttctctccatta

SEQ ID NO: 28614 - DNA, 1030 bp, Homo sapiens
tgaagcaacatagtgagacgtcgtctctacaaaaaaaaaaagaaaaaaaaaattagccaggcatgcgaaacgctgaggtgggaggatcagatgagcttgggaggttgaggctgcagtgagccttggtcatgccactactgtgttctagtctgggcaacagagtgagaccttctctcaaaaaaaaaacccaaaattgtagaattacttctatagctatattttatgataaagaagtgattgtttctcaaaatcgcattttaaagacgttttatggtacttgttggaattgggacttaggagttttgattttgataagaaactgggataattttctgaactttttttcctctgtatcacatttatttactatttttaaaaactttgacatttaacacttgggacaacatttattataaatgataagaaaaatcttagaggtttgtctacccacagtgtcatggaatcttctctgaaaactaatccataaagttccctggagaaattggtcagaatgatctgtcagaaccatttgaaaacttgctcaagagcagttgcttatatatagtaggattttactttttcctgcttatgtactactatatgcttaaaaaacctggaggaatacttaccaaagaggagtaaccatctctgagggtgggattctgggggaatttttgtttttttctgttttctataatgtgaaacttttgtagtatgtatttttctaattgaagagaataaagattaaaacaaagtgctttaagattgatttttacaaactgaattgtatttaactgagatcagaaatcctggtgctgtgaaatccacacattactgagcatggcagtgtggaaggcctgctcaggaatataaaggtaaccccaaatttccccagacccctttgtttctgggtgtgagtgaggtcacggaacagtactcagtggtatgagtaactcagcgtttgctccgaagttccctgattacttgtgagaatactaaagttctcagagcaaaaggtcctaagtcacat

SEQ ID NO: 28615 - DNA, 1080 bp, Homo sapiens
ttttcccatggcgctctggggcgcgggcgatttgtaggtaatggcaggcgttcggtcactgaggtgtagcagaggatgcgctggcggctgtgagtgcggcgacaagggcaaatgcagcgactcctcgctgttgggcaagagactctccgaagactcgagccgccaccagctgttgcagaagtgggcgagcatgtggagctccatgagcgaagacgcgtcggtggccgacatggagagggcgcagctggaggaggaggcggcggctgcggaggagaggccgctggtgttcctgtgctccggctgccggcggccgctgggcgactcgctgagctgggtggccagccaggaggacaccaactgcatcctgcttcgctgtcagttgggtcgagccgggcagggggggcgtggggtcgccttcttccaggggtgccgcgcgtgggcggcccgggaggaggcgggggctccttggggctgcccagggactttaagagcaaaaagtctgagagtgtgagctgtggcaggaaaaggggaggagggtcacccctccactttggctctcgggcggtgggttcttttctggggtccccgatcccagaagagcagtggttgaatcagcatcatcgtgagcattactcagaaacaaagggcgacaaagaataacacttttaaagaccctaaaaaaagagaaacaaatggtcaactagactgtaagcacttgaggtgcagccagtactattactccccatagaaattagcaggctgttggtgtatcagcggatgcctctacagcctccagtgatagagccgcagagttgacggaacacagtgctatagggaagaaagggaaggaaacttgcaataaaagcaccaacaaccccatgaaaactggcgaggaaggaggatgtagcaaaagagttcagaagaaggcaggaattagtttctaatcctggttctagcagttacctcttacctctgttgttccactgttccctcattttgatgtttttgcagtatttagggataaagtggttcacatattttttatgaattggtgtaagaatggctgttgtttttggattg

SEQ ID NO: 28616 - DNA, 1052 bp, Homo sapiens
ggtgagaatgtagtttaggaagcaaccacaaccacaaactacgaggtcatctttttcaagcatctcattttgtcctcccataaatatgatgattttgtggttagctgaggttttgttttgttttttatttttttgagacaggatctcattctgtcacccaggctggagtgcaatagcataatcacagcttactgcagcctcgacctcccaagcccaacccatcctcctgcctcagcctcacaagcaactgggactacaggggcgcaccaccatgcctggctaattttgaaatctttgtagagacagggtctctctatgttgcccaggttgttctcaaactcctgggctcaagtgactctctcgcttcagcctcccaaagtgccggggttacaggcatgagccaccatggctagccttgtttttatattcataatattaatacaaacacacttgtgcctatagaggaattcattttgcatcagccaacttctccatgatgtgcaggaggcatcatgcctacaaaccatgatattctgaaggaccatgaaaatgtttcaatttttttaatcaagagcaataaatgaacttacaggtctaaaaatgttttatgatatcattttaatataatcatcttcatagcaatgtgactataaaatgaaatttttattaactgttttatggagagaaaggcctactaaggcaaaaatagggcccctgaaagtcaccacgcagctcggccttgtattccttctttcctggggcatcctatcatagaatttaagtattgacaataggaacccaaagtctgagacaagatgatcctttgaatccccaagtaactagccacttacttaaagaactcatgtggattgtatcaatgttgtaccagagatattatgcttgaaaacaacagtccaggaaggtcaggcttggctctacaaaagtagaaggggcaaagtatggtgaggcatgcctgtagttccagctacttgggaggctgaggcaggaggatcgcttgaggccaggagttcgagaccagcctgggcaacata

SEQ ID NO: 28617 - DNA, 1070 bp, Homo sapiens
gtctgtgtgtgggatcccttcccattcacgctccaccctgctcttgaccatggtgaacttgtatggattacatcaatatgctacgtgccctgtggattctggctggatatgggcaatggcgagttccagcaggaaactggagggacagaagagagcgaggtcagagaatttaatctcctgcctccctccctatgaggtcaccccagctggtgactgtgaccctggatggaaggtgattgtctcaaggtggtctgctcttcgcaactctccttctttctggtaacctcgcccagcatccctctaggtcgagggaggggtggtgttggcctcattgcttttaacctggattcctgtaccatccctcatggttctctcctacaaacctttgcaaagaatccctccccacacgagcagaattttagtgcatgctctctgtgttcttctaaggtcctcttagggaatagacaattctgtaggcactttcattgcaaacagaatcccagtgaagaaatggtagcgtcagtccaagatactaatcaacatggcaatcttcactacaggatgagaactgttttccctttgccccaggtaggacataggccgccttagccttccctgcctcaggtggggaaggggctgtggctggccctgctctttcccacctcacctgttccctgcggttttcatttctgcctagcctgagatggggaaagtgggggataggacagttttcactttgatatggtttggctctgtgttcccacccaaatctcatcttgaattgcaatctccatgtgttgagggaggggcgtggtgggagtaattggatcatgggggcagttcccccaggctgttctcatgatagtgagttctcacgagatctggtggttttaaagtgtggcacctccccttggcttgctctctctctctcctgctgccacgtaagacgtgctttgcttcccctttgtcttccgccatgattgcaagtttcctgaggcctccccaagccatgcagaactgtgagtcagttaaacctctttcctttataagttacccagtctcaagtagtt

SEQ ID NO: 28618 - DNA, 1050 bp, Homo sapiens
ttagaaatatcttaagtggggcggggggcacagttattttaaaaataaaacctatcaactccctccttgcctgaaagctgtaggggacatatgggtcttctgagatttgctgtgtgatgctgtctcctctccagggacaaggctgctgggcactagaggactagatctttcaagggtcccagatccactgtcacataaagtcacatccagaagacctttcctgccagcttccagggctctttgtgttctgtgacagcatttgggcatagatcctgcttacccggcctggctgctgacaggcgttggctgcctgccctccaggggagacactttcttgggctctgtctttgaaaggctgtggggaggttgaaggtgcaactcaggtccccagactgcagtgagctgacctggcagggcagatgccatcacatctgggggagccggcgggtgttagtggagcttggatgggaacttacccagcatcctaacaaaggtacagaaggaccaggtgaactcagggctgataacgcattacacagtaatggtaaagtggcatagtaaagattagtaagcaaacagcttttcctcttgatttgcatatattttattttcctactcttccctgagcaaatataagcagtaagcaagcaggctaggtgtgctcaataaactcagcaacacctgggatgacctctgcactcgaggggccactgcaatctttgtcaaaggcataggatgctcctgctctagttgcacttgacctaggtgccctttctgctacatgcaaatggcctctaagaagaacgaggaacgtatgtgtccaggttggcttgatttcaccagttcactcagctatggccacgatttactgacatcagctctgcaattgagaggtcctgtctccagggggaggctcgctgggcttgctcctgacgaggggacccccattgagggtcagttcccagaggagagtggggtgggtctggaaacccccgaggggcaaggtggaggagctctcctgtcgtagcggctggtcagggccagttctgc

SEQ ID NO: 28619 - DNA, 1072 bp, Homo sapiens
aaaaaaaaaaagaaaaaaagaaaagaaaataataataacaaaaaaataagcggggaagggattagatggcagtccaaacaccagtattattcagaggaggagatttccagcatttcaatgttgcctggaaggctctctcctcttctggtattcagtgtgtctgccccaccatgccatgtgtttcagggttgttttcttgcagaagcgctggtggacctgatgctgacggtggtggagatgtgcccctctgtctgtgagagcagccactttgcagtgcttctcggggcctatggcgccactctcagcgtcctaggtgagggtgtgagggctgggtagtgtgagcagggggagggagtgagggccgggggtgtgagcagagatagggaatgagagctggagggatgtgagcaggaggagacagtgagaccaggcggtgcaagcagggtgaagatatgaggaccgggccatttgagcagggagggtatgagggcaggtggtgggagcagcaggagggtgtcaggggttcatcttcctaaaccgatcctgctttgacttgtagatcagaagattttacttctgcttcgagcgtatgagcagaacaagctcagcctcatcaacttcaggtgagtgttgggctagaggtagactaggccttgaggtcacagcctgctctccacacagtgagctccagactcgagattttctctcattccattttggttctcagggaaagagtgaggcaggcagcactcccctgactcacactggcttctgcatagggtgctctggggaagcttggccttatgccataaggcatctgggcagggccactgcagctgactgatgggtgcctgtctgtctggaattgcccctgttgtgcactgtcagctggactggggtgtctcatttggttgatttttctgaaaacttttctgctcatgcctttaggtagattgacttatgccatagggatttcaggggaagtgtcagggggctcaactgtacataaaatctctttttttttgtctgtatgtgcatgcatgcttgtgtctgtgtgtgcatgcgtgtatgt

SEQ ID NO: 28620 - DNA, 1035 bp, Homo sapiens
gaaggtgaactgcatggccatttttaaaccctagaaattcaggttctgggatgtgggttagtttccagtgtctgacacaactctgaagatggagaaaggtggagtaattctccccagtaccctgtctcccttcagtctccctactttgtggcttgaggcacagcccattgtgccccatcaggtctgagttcccccacatgaagctggcgggagttgggtacagtagcgggggttatttagggctgtcctgttacgttgaaggagttcttgggtgccaatccatcccatgtcccagggttccctgccctctggggagatgttgatgagttgatgttgagtcgaggcagcctgggttcagctctctcttctgtctccactcactgggtttcagagctgaggcacttttcaattaccccaaatttaatgtaattcccttttgttgaatgcatgggtgatttttactcaccactttgcctctgttttgcataacttcctatcattgatgacagaggttttaaaaagtaagacagtgccctgcaagtcttctagtcatagtccatttaacattggtataacggaagacctgaggatgagtgatttataaagaaaagaggcttatttggcccatgcgtctgcaggctgtacaggaagcaaggagctagcgtctgcttcttgtgagggcctcaggctgcttccactcatggtggaagaaaaagcggagccagctctgcagagatcacacggccagaggggaagcaagaggcacaggaggtggcaggctctttttaacacctggcactctgggaactaatagggtgagccagaactcattcactctaccacaaggactgcaccaagccattcatgagggacctgcctccatgacccaaacacctcccattagaccccacctccaacactggagatcacatttcaacatgagatttggaggggacagacatccaaaccatagcagctaccctccctattccatggctttgaagaatgaatcccatatgaattgagaaccttggc

SEQ ID NO: 28621 - DNA, 1034 bp, Homo sapiens
atgaggtaaggacctggcagcatactgtgtgttcagcaagtgatggctcctgctacgttatgttttgttttttgtttttggagatgaagtctcactctgttgcccaggctggagtgcagtggcgtcatctggactcactgcaacatctgcctcctgggttcaagtgattctcctgcctcagcctcccaagtagctgggactataggcatgcaccactatgactggctaatttttgtattttttagtagagacagggtttcgccatgttggccaggctcgtctccaacgcgtgacctcaggtgatctgcccactttggcctcccaaagtgctgagattacaggtgtaagccaccacgcctggccccatggtatgtttctaatatataactatatattaaaattatatatgtaattatatatactaaaaatacgtaatattgtttaaactctaggaaggcccagatgcagaaattattggaggtgaacgatcagtattttacttactaatgaaaatgtttgtgaccagtagccatttacaactgaagtcattgaccaaacttctgatcatgaaggtgagcattttctaccagtttctaactctgaaaagcattttgtatagatcttccttatggtaagtgtttagttaacagttattgaattcaggaggtattggaattgtttttagttttaaaatagaaggttttatggcagtttaatttattgtgtcttacacttagctacattcctgggaggcagcctggtgcattggaaaaatgttttttttttttttttttaggtaggtcatttctagcttgttgtaggctcaatactaaattttggcttcttggtgtttattaggcagtgcctctttcctccttctcaggctctggcgttatccagggctttcagcctttttgccagaatccatcacccacagcacatgggtcatcaaagccagtggaagagaataggaatttatttccttatcttgttttgtccttgatactcatgtttccagagctatgtcaggtctt

SEQ ID NO: 28622 - DNA, 1368 bp, Homo sapiens
ctgttttctcaccactcttccctctccttcttacacgcactcctctagactcgcacccccctccctgttttttgcatcttgttaatgtgttcagttcatttgtctccctttgtggttgactacaactaatgttctgcttctttttcccatttagattttgccagacctgaacactgtcgtgtgggtctggcagtcacttaaaaagcaagagaccaaacaggatgacaagaaagggcagaaaaggagcgatgggcccccggctgcctgcgatgctcaccagtgcggtaaggtctcaggggtgagggggaccctctgccttttgcatgggacagagctgacactggcagcctaggatagctcctatccagagagtcctggagcagtttttgtttcaaggcacctctggctgtgaatgtgtctatatccttttttgcttagggagaagaattggaaaggaatcatagattgaattttagtatctgttagaaacgtgcccatctttatgcgagcactgtgtctctctgaagacttgagtgttgggtgccatgtgctctggcctttccagggatgacagtatgggggtgctgtctcttggtttgcagatagagctcagagccttgttgttggtcaggcattgaggtttgtgtcttatgtctgtatcgtatttcatcctttcggcagccctgcaagggtaggccctgctgtatgtccctgttgctcagatgaagacacgaaagcacagggagacagagtgaccagaacctgtctaaggtcacagcagtgaaatgaggttttaacccagaccccctgaacagttttaacgttttaccacattgactcattagatctaggtactgagcagtctgtctgcagcctcggtgtacagcatgcagttggctgcagtgtggtgccacacttggttcagctgctcaaggacaaagaaccagtatgttttctaattcaagctattttctttctttctttctttctttctttctttctttctttctttcttttttctctttttctttctttttcttttttttgtgcagatgatgcagaaaccattcttttgaaagctgttttgctccaggtcatatgcctctaccagaaggtggtcccccacgtggtcatgcagtacaactttgacttcagcaagctcctgaaaggtgggtttcaaggtcttgcagacaagccgccactgttgctgccaataaaccagagcagagccctgcagccaagaatcaggaaggctggtggacggttggctgcgtgctcatccgtcagcctgagaaattgtacttgcatcagtattttttaaatagctggtcttccttaagtaaatatcagatgaacacctggtagcag

SEQ ID NO: 28623 - DNA, 1300 bp, Homo sapiens
acgtcaccatgagctctcagggtgctttgaccattttctgctgacctctccccatgtgtctttctctaacagaggcggaaacctgacactcttgcacttcttgctgggtttgaaaactgcagctgatgatgatctggtggctgaccttgtggtaaacatcctcaaagtgtgcccggacttactgaacaaatacttcaaggaagtaacgttttcctttatcccacgagcgaagtctacttggttaaataatatcaaactactaaacaaggtaaaaaaacatgatatttaaaagtctgttagctaagctgggcgtggtggctcatgcctgtaatcccagcacttcgggaggccgaggcaggcggattacctgaggtcaggagtttgagaccagcctggccaacgtgacgaaacctgtctcttactaaaaatacaaaaattaactgggtgtggtggtgtgcgcctgtaatcccaggtacttgggagcctgagacaggagaattacttgaacctgggaggcggaggttgcagtgagctgagatcgcgccactgcactccagcctgggtgacagagcgagactccatctcaaaaaaataagtctgttagctaggtaggggggcatagggagttaggggacaggcagacattctcatctggtaaactatacaatatgaagacctttcagggataaaaagggatattttagaccatgtaaatttggtgtccttatcttctatagcgttttgcctttcactgagctgaatttgaggtttatttagaatcttttgagccaatttatcctgttcatcaagattttgcttagagtgaaatcttgttgagtctcagcacagttagactgggattgatgagttgcccgattatctcttctccatctgggctcataaaaagtaaaataaaatgaaatgtctgacttgtaggatagtttttaaaggttgctgcttcaattagaacaacttgaaataagctgtggaacgttggtctgctggtttaagtggatgtgcgttaccttccttttgatcataatgtcagcatctgcccattttacaagtagaggtacctactgttctttggcagtaatgcctgacttgtttgaactctctgtcactgattcatggtttgcctagtggtaaaatacctgggattgtttcttgtgcctctacctgggcctggcattatctataaaaccagcttttattctgcttgagtgcctatgcgcacagtctccacatttacccttgggatgaggaggatgtactccaccccttgttttggtacagacag

SEQ ID NO: 28624 - DNA, 1082 bp, Homo sapiens
tcctgggtactggtgatcctgccacctcagcctcttaggtacctaagactacagtaagactacaggtgcgcaccaccatacccagctaatttttaaatttttttttggagacagggtcttgctatattgcccaggctggtcttgaactcctggcctcaagggatcctcccaccttggcctcctgtagtgctgggcttacaggcatgagccactctgcctggcttcttgatttcttatgtcatggaagtggttatttctaccggaaacttgtatagttaaaaaaaaaaaacttgaaaaagtaaatggcattgtttgctgtaccacctaaacagtaatattctctcgtctattctcattttcaaaatatttttgaatttaatgctttgaaacttttactttcagaatttattccttgcatttttagctcagggataaaggaagataggatctctaccatcaatattttattatccacactgaaaacaaaggtatgtgcttggtgatccgcgtttctgttgtctgttttcccttgggaatggagatattctccggtgttttacaggactgtagagctacaacatcttatcttacatagattgttgtattggttgagtggaaaactcttccctaagcagaaacttgttcttgttgatgagcatatcctgggactagaaggttaaagaatagctgaagcagccagtgatgtccagacatggctgctgttttattacagcagcagaaaagctgctggtcaacatttcacagcaacccaaagtaatcattgtgagctgtaaattataaataatacttcattcacatatctagcaaaatgttgttctgtgtcatgttccatattctgccttttgcaagcatcttattgatattttaaaacttgctaaaaagatcactgcctttaatacagaaacactttaaatcatcagtaagaaaaactatgaccctcccaacatgacaagttgtccagagtccacatgaaaatggctaataagcatgaaaggactttattttcgaagtattttaaagagtgattctcaaatgggggcaattttgccttctacgggaca

SEQ ID NO: 28625 - DNA, 1089 bp, Homo sapiens
aggagcagtcccatgtcctggccggaactctgggagttattgaggaggagtagcagggtgctgtactcagggtgtttgggtctccagcccttcttctccctcccaggatgggagatctggactgcccctggaacgtgactgccgggacgatttaggaggagagtgcaggtggcggtcaccctgtatgtggtcagcctggtctgtgtggggcgctctattgctgctgtggtggagcagcatgagagtggagatgtggtctctgcataatgcagcggacagatttttttttttcctacttgttaccaggcactaggttcaggatatcttgctgctgccagggccagtagtttcttcaaattcccgtgggccatttcagctgtctggccttttattcagtgacagttggtaccatttacactgttgaagggggctggaacatactacagtttaatgtttctgctgggaagtttggctgtacacatcaaaacttttaaggtgcttatgcatgggtttggatttatgatgggcccgtccccctggacctctcatagtaccccatgccagagcaaactgtagccctgaaccattgcctggcctctgttcccgtaggctgctggcactgaagtgggttgcacaatagataaagaaaaaagataaaaaaacttttaagatacttgatcctgcaattccatgtctagtcatttatcccagtgaaataattaaagatgtgagtagaggttttgttagggaataatatttatattagctggaaatgggtcttctaactatccaccagtaagggattggctgagcaaattggggactggtcataagatggaatgcagcgattaaaaatactctggaggctggccgtcgtggctcacacctgtaatcccagcattttgggagttggaggctggaggattgcttgagcccgggagttcttgagaccatcctggacaacatagtgagattctgtctctaccaaaacaaacaaacaaacaaacaaacaaaacaaaagttagctgggtgtgttggcgtgtacctgttgtctcagctacttgggaagctgaggtgggagaattgctt

SEQ ID NO: 28626 - DNA, 1019 bp, Homo sapiens
cgttattttgaatctttatgcttttttttttctttttccttaaaaaaagagcatgtctttttccttctttttttctggtttggggatagcaaataacacaagcagcttgcagctggctttgtggtgaggcggctctgtgcttctgctgttgttgacgtgtccgatttcctctggttccctgtgcaggttggctcgcgcctgcctgagcctgatgaccgccatggtgacccagggtccggaagctgccagggacgtctgcagccattttgatttgaataaaaagaccctgtacaccctggtgaccaagagggattcaaaggtgaggggaccacagtgtctcgtgccttccatgggtctccttcccttggaggactgtagtggtttttcctccattctctgcccctgatccccacacagatgaaatgagaggtgtctatgtagaaaggtgtgtgtcagcagccacaggatctgtctgtgaggacaggactcgcttcaggctggcgatagggccagaacctggcagagcctgaacaatggggatatctgaggaggctcctgggggctgagtggcacagggccttcctggttgtgaggatgacttagctgtgggcatctcctctcctggtaaatgaaataccctccatgtgcccatggccctgaagcttgtagtgtgtgccagtcctctgttcctgttctgcccacctcggagaaagcccttgaagctctaagccagtgacgtcctcagagaggacttttatggctttttaataagtgacttttgcctcccagttacaatcttgtgatgggtaagggttggattgtgcccaggaaaaatgggagtgtggatggttggttttcaggaaacctgtgaaacaaaaattccctggtggcttttgaaatttcacttgggtttggaaaggttcttggggagcaggcacacttggaggactcctgagcttgagagagggcatcctcccatcgcgtgtgctggctccaggttgtctgtcgtagggcctctt

SEQ ID NO: 28627 - DNA, 1063 bp, Homo sapiens
aggccgaatgtgactggattttcactgctgctgctgaggacacccggggggctgcttatgttttgagggtttaccttgacctaagtgtgatgctggatgctttatgtgtaaattagcctttttacgcttcatacaaaccctgtcaggtaggttctgttcttgttccgttatacaggtgaggtacccagagctcagagttcagtgccttactgagtaccatgcagctagtaagtgactgagcggggatttgtgcccaggagtctggctccaattttgttcttttctggtatgtttttggtgtaatggcgtgctcatgcgtccccggcagatgtggcttagcagcgtcaggacttgaatctgagacacgcagaattgctgtccaagaggaagcatgtgttggtcctctctgctcagctagtggagctcacctgcagtaccaagccctgttctgggcctcatgcttcaagggaacatagagagtgacctgaacacagaaggatctcgaaactctcatttctggagagaggttaaaggaagtgtttggtgttcagaggtgctgactagggtgatggcagctggtgtgggaaagaaggattagatccattgcctgtggccccaaggcagagaaggaaggaccccttagggatgcccagacactccctaaagcagaccacgctattctgatgtgtctatgaagactgtagtgtatttcttaaagtttgtggcattttacattttactgtattggtcattactaagtgggttttaatagaaatatttagtcccttcctctgctttttttttttttttttttgaataaggtgaagtcttcactccccagaagagatgaaggcctcagtaagatgtgttacctttagcttacgctctcatgcggcttccaacccactgccatgccctgccttcctagttttgagaagtatggcccaaagagtggaaccagagagaggcagggttttttttgttttgttttgtttttgagacggagtctcactctgttgccaggctagagtgcagtggcacgatctcgactcactgcaacttc

SEQ ID NO: 28628 - DNA, 1166 bp, Homo sapiens
atccagaatctacaatgaactcaaacaaatttacaagaaaaaaaaaaaccccatcaaaaagtgggcaaaggatatgaacagacacttctcaaaagaagacatttatgcagccaaaagacacatgaaaaaatgctcatcatcactggccatcagaggaagtggcttttcaaaaggattgtaggatgggacagggacaggaaccttactggcagaagaaagagcacgtttaattgttaaaaagatgtagtatctatatttcatggtcttgcacagagagcctcatgacattcaggtgctacatcatttgaacacatgtcagaaggagacccaggttgacagggcatgggtgtaggtgagtagttgaaagatggggcaaagctgagtcaatgggtgaaagtgtggatcccttgtttgaggctgtgttgaacttgtgtttgaatctggtctgtatcttggattctctcctcctctcttcctctttatacgctctcataacctatgataggattgctggaagatcagggaagtgaagttgatggctgttaggagactttgttttcaccaggcatgtgagggaagggttctgatgatgctcccttcgtgtagtggaggaacaagagctgccaggttagattggtaaggactgaggatattccagagtggatcagtgtcagcctgtgggaagatcccccatcaagaagggtttggctctaagccagttcctttgaaagtgtttgcccacgactccactggtgatagagaaaaggccatactgtaagagagtacactaatggttaaactcttgatctccttctccccacattgcttctggtttccccactgcataagtggtaattctgattagctggatgttcctgccagaaccctccgtctgcatcagtctgtcccctggccttggtggttgattctcctcctgagaatttctggaatctgtctgctccccctctttccttcatcatcattctagtccaggcatcatcagtccctgctgggaccgtggctggagttgcccagagttggtctctcttgctgttgcttccctgcagcccgtgctgtgtgcagcagtcaaatgatccttcagagctccaaatctgattatgtcactcctctcatgacacccttcagtggtatcccactgcccttag

SEQ ID NO: 28629 - DNA, 1148 bp, Homo sapiens
tgcacccactttggaaggactgtgatgaaatgatgctgatgggagggtaggaaaaggtcagtctattcagaaggtaaccaaaatggcagcaatgaccccatgaactttcaagaaaggttaggcaaattgtggtactttttttttctggccttgctcctccctacccccaacacccttgcaggcgaagtccccagcctggccccatccctgtactctggccagccctggtgctggagcctgcctcagctctgctccctagctgggtggtcttgggcaactttgttaccctctctgaggctgagttctcatctgcaaatgagactggtcctgatctcacagagttgctacgaggatgaaatcagataaaactgagttcaattaacttttaccctcttcctttctgtttcttccctgaaactgctgctaggctcccctttccaataaagcacctgggagaccaaagccatcaataacagggaccacttgtgggccgagactcttctctgccataaaaagagccggcagaaaacttttcagatgtagtcactttccatggaaacagatgagcagattcagacactggctattcatctctcttcttctgtggcctctagacaactccttcggacatttggtttgtttttctttagttacgagctggcttttcactccataaatttttttaaagtaaagataaatcttgaataaaaaggatgatgtgactgaggcatcatgaaatgcagagggaagggtgtgtgcatgcgtgtgtttgcatggctgtgcatgcacaggtgtctgtgttgcgaggtgctgatatgctggggaaatacagtcctggtctccctggtgatgagccctagggtagggggtgaaggggacacccagccacactctgtgcccttggatgacctgatgcatgggcagaaggtcaccctcccctctgaactccagaggtgtcctcaactctagctgcatattagaattgcctggggagctttcaaaaagagatcagtgactggctctcccagggccaattacatcagaagtcttggggtgcagcctgaatgtccatagatatttttttagtctccccaggagattttattgtgctgccaggactgagacccaatgcttatctgaaagcaaat

SEQ ID NO: 28630 - DNA, 1014 bp, Homo sapiens
tctaccttctggactcaagcgattctcttgcctcagcctcctgagtagctgggattacaggcatgtgccatcacacctggctaattttttgtatttttaataaagacgggttttctccatgttggtcaggctggtctcaaacttccgacctcaggtgatctgcccgcctcggcctcccaaagtgctgggattacaggtgtgagccactgcgcctggcccaatgaacagctcttgaatgaatgacacagtgaagaagactactagagcaagagcagatcaaaagtgaataattgagtagtaggttctaattaatcctcatcagcaaccaacataacccagggcttatagatttctctgtgtgatatgctacacacacatctacggaaagagagagagatcatcaaccaattttaaaaagttaattggttgacatctgtcaaccaattttaaaaagttactctaaatgtgctgcgttggtcttgtattacaatccttagattacactactattttatttcaaacaggactggtagaaacttcttcatgccttttcaaccaaaggccttcaatcctataaaaatgaacaccttgttctttgaccaagtaccaaccttagaaagttatgcagcgaacaccatctgacttagattaatttaaaagtaactggatcaatccccctttaccccaagcaactaaacggaacaattttcttttcttttcttcgggacacagcgtaatcctcaaactgcagagccacttggcgatgaagccaggatcacagtgcatttgataacttaatgcaactttttactagcacttaaaactcagatatgaaatctatacttgatcttttctgcttggaattggccagattagtggttctgccctcacatacaacaaaaggctctcagaaacactcagggtcgctaaccaatcggaaggaccaacagagctcgacaaacagacaggagggtggaagggcaccgcctcccatcccacccgcttagacagcct

SEQ ID NO: 28631 - DNA, 1062 bp, Homo sapiens
gctgggactacaggcacgtgccaccacacctggctatttttttatttttagtagagacggggtttcaccatgttggccaggctggtctcgaactcctgacctcaggtgatcctcccgcctcagcctcccaaagtgctgggattacaggtgtaagccaccacacccagctggatgtagactcttttttatcagcttcacatcgctcagggatcttggtgcagctcatgtgtaactccaagatactcttccctggtgaatcctcccactgtgtatcagcagaaagtcttatagctactgccatgggtaaaaccttcctcaaaggagtatcctgaaaggtttgggttgagcaaatcttagaacagcttagaccaaagttcttaggttttcattttttgaatacagatgaagagttcacgacatgaacccctaagagtggcaggagctctcctctgtcttctgaaagacacagggaagtccttcttgggatcgtcatcctcatcacatttacaaggaaaatccattaatattcaaataatccagtgactatagaaagaccagtgtgagaggaaaataaatcttggggccccatacttactaagccaaagggaacagtcaagctgggaactgggtcgcacaaacctgcctcccatttggttcctaactaagacggctacaaagataaaaagctacatacatcgctcaccttttgctcacaaggagattccttgcaggccccaagatctttacttgaaaatatttctgttgaatttcaccctggcaatgtcaattgatagcttatccacagatgtggaatgggacaggacagaactcaaagtcatccttctgctcgcctgaggcaaatgtatatctgattgcttcctctgcactattgtttacgttatcttatgtaaaattgcagattcccttagccggacaagtgacagcatgaatgactatttcctctactcaccctcctatgaaaattgtatattcccccaatatccatcctttcccctttaaatattgaagccctcaaaattatctttggagaaaggcatagac

SEQ ID NO: 28632 - DNA, 1046 bp, Homo sapiens
ctatcttaagataagcagagagggtggtgaggaaaaattgtacataccttcccctcaatgaagaggtccccgcggtgtggccggccttggtataagccttctggctctgctaattcatgagggctgagtctgattgatcctcatggggaagactaacaagggaatccttgacaactattaggaataacactcatgacccagaaagtggctctgtcttcatggggcatgatctgtcttgtttactaagtgaccttctggctcatttttcttccagtcagggctggaattcaataatcctagttccttcccgaattttagagctgggaaatgcattcctcgggtttctacttttcaaaagcgaaaaatatctgtggagctcaactcctaaatagtgtgactttgtctgtttatgtggttctcttgctgactgcctggttacaactgtgcctgaactcaggcctctgtgtttctgaatcttagaagtggtggttggcatgttaaacttgaagtcatcgtcctttagttatctgagtgctataattgaacagcacatttattaacaagactttagtaaatccatcagcattctaggaagctttgattcattgacctacctctaatgtaagcaaaggctgccagagagttgctaacaagaattccatctttcctcagaaccttcgatccgcttgggtcgaagtttatacctgtttcatgaaaaatgcaagaccaattaatcacagctgttcatagtacgcctattctaagacacccctgctgctcctaccccagggaccgccggaataattaaaagtcacagaaatcaaacaaatgggcctctggctaaattacagaagattaacccaggaagagcacttattaaatagtaagcagtccccgacaatattaaagtacaaaaaggattagaaattgttttaagtgttggttccaacttcaggtgctggtcttccactccactgtggaagggaataagtggattttcccatcctaaagacagtgacattcatcacacccctcagaggcttaat

SEQ ID NO: 28633 - DNA, 1049 bp, Homo sapiens
tgcttggtccctgggcttctccctgaagcagcagcaaatgtaatggctgctacaagccccagcagcccctcagacaagcccggtgtatccagaagagtagaatttcacagcaggcagctcatggatggaaagtcagcattagcagcaagtagctgagctagggacgtgcgaacctcccagagggaactggcttcttttcacagggctcctgagaccccacagcttggaaactgtgggggctctgctgcccagaaagcacaaaagcaagaagtggcagcccatatgagcccgtggtccctgggaggacttccacccgggagcttcctcccagcagcttcctcccagccaccacagtccatcagcagtctctcatccaaatctgctctggtcattttcccgctggactttgtgccaagccaaacacaatctcagcaggacccttcagcctccttccacaacaagaacatggcattcttctttggggctctgaaaatgcaaagaaatatctcactgtatctgcacaggccaaagactgaccctcgagttggcaagcctgttgaccagctgcctctgtagggatcctgggagggtgtgtgtgtgtgtgtgtgtgtgtgtgtgtgtgtgtgtgtgtgtgtgtttgtgtgtgtaagcatgcatgctgggggctaatggggggaaattcagataagcgaaaacccattgtggaatccaagaaaaccatgtgactgaggccaatatgggcacagctctttcttcaactggtaacgtgaacatctgcagccccaagcagacggtcatcagccaccagctggacagcatttgtgttcatggggacagggaagatgctgccttcaaactggaaatagagacagacagctgctctgggagctgggacattatcaaaatgctccttgctgaactcagggacatgaaaggacaaagattctctttgattagaacaaaatcgttatgaaatagttggacaatggaattcactgcattctctgatatgatctggaatagatttctctccaggccaggcacagtgg

SEQ ID NO: 28634 - DNA, 1049 bp, Homo sapiens
aggctgtcaattctcaaaactcaacatttcctaattatttcaccttattttactattgtcttgaggtcattgacattgattgtacctgtagggtagaaacactatatgaaggacgttgtgttacactcgcgttggccaaggagggagtatttacaccacagaaattggcagatgctacaaatcagcacttctctgcccacacctggggttgctggttgttacagcttttccagcaactcctggcctccacccagcatggtgtctggcacagagcagggctcagctcgtgctttgtacatacagttccttgagtcatcccagtgtgaatgtgtcccctgcttctggctggggatctgtgactagtccatgcctcgccttgtgccacttccactcttgggagcagctctggaagcttctgtgctagtttctgtggctgccataactaatgaccacaaatggtgtggcttaaaacaacagaaatttattctctcccagttctgggggccaggggtctcaaataaaggtgttggcagggctgtgctccctctgaagaccaagaagggggtcctgccttgcctcttccggcacctggtggcccctggcaatcctttgcacttttggtttgtggctgcgtcactccagtctctgcctctctagtcacgtggcattcttctctgtgtgtctgtctgtcttcccccttcttagaaagccgccagtcattggagttagagcccatcagtgccacctcatcttaactaattataactgtgaagaccctgtctccaaataaggtcacattctgaggttccaggaagacgtgtatttgggggagcagtgttcaacctactatggaatctctgccatagaaactgcaggtgatgctgtccctctaaggtcgtgaggaaatttccaagggttgcctgacaccagtcatgaccaatgagcaaaaaggccctcactgaaaatgtttggcactttgcttttacagtgactttgtggacagcaagagagcggctccacaatcatgtcctcatgccatggggtcatgg

SEQ ID NO: 28635 - DNA, 1035 bp, Homo sapiens
gtgatccacccgcctcagcctcccaaagtgctgggattacaggtgtgagccaacatgcccagcctactattgccagtttttaaaatatatctgcacaaacacaatcaggtaagcagattcactgactggctaactttaaaaattttgaagttaattgcagaactatagcaaataggataattacaatgtattttgcccaaagaaagtaacttactaaaatatataaatataacttcatttatgtaacaagtaaataaataaacaaaatggcatactaaaacattctctcttgatacccctcctctcactattgcttcacttatctgtgcctctttatagaagaataactttcatagataactttaggacagtggcccacacctgctgtttcctcccttcttctcctgatcctactccagctggctctggtccacattactcacatgcacaccacctcacaaaagtggctctggccaaggtcactgctggccttcatgctgttggatccagtggtccgtcacctgcatgagttctcagcaacactcaatgcagcctcgcgagtagctgggattacaggtatgcaccaccacacctgctaatttttgtatttttagtagagatggggtttcaccatgttggccaggatgacctcaggtgatccgcccaccttggcctctcaaaatgctgcgattacaagcatgagccaccgcgcccggccagtttgtggcaatttgttacagcagtcacaggaaacaaatacagagcccaaagtctaagtccttcacagggacccaccccctacccccaacccatcttctctcatgatcttctgcaaataggctgggtgtccccaggaccttggcacacaccatcccttttcctggagctctctttccacccttcttaaggcttgctcctttgattcctcctggtttctgctcaaatgctgtcttattaaagagaccttcactggccattttgataaaataccacccaccccccagaaaagtgcacaatgtgggcaggactttttct

SEQ ID NO: 28636 - DNA, 1052 bp, Homo sapiens
tcaaagtagcttttaatattgcagaaaaaaaaagagtgaggggaccacagtgggcattggggggtggaaaatgccaactttctgggttaccatttgtggtttatttgctctctttatgcatgtctttgtttcccagtgattaaaacttggtataaatgttgctacttatccacctgtcgaggatagtgtgaaaatgagtaataatgtctgagccatatttttgctccttagtagaaaggtgctatatacatacaaaatgttatttcattaaaaatgcttgtacgataacagcatatgttaaattcaatttccttgaccaattggataaatatattttggtgttacagtatggttgtttttatggtgagtaagtgtgtatcctacactctgtgttctattttccacctgggtggtgtaacatatcaaatgtttaagaaaaataaggacaccattctaaagagatcaggaagctattgctaaatgttattctgggggggatttcaaatagatgttagcgagatacctactgaattattgaggatatgaactgtacaaccgtataataggacattataaatatgtaggctggtatacacctgttttgagtaaacagtatatttttcttatcaatcttagttctatcttggtggtttgcagcccatgagaccaaagcgttttatgattaaacttaagagcctgggcttcagtggccagagatgatgcctgttagcatcatttagtggggcattggaatccgtgcgcagcccggggaaaggacatcccttcttgtctcagaccatccatccagaaacttcttttgctgaagaggaggatttgaatccctcccatcactacagcaagcccagagaatgcagatgtggcagatacatggagacatggcaccattatagcacagtgtggtcatttttggataatttttttctaatgcagtatcgaccttcaggcaagtcatgacaaaggccctctgtgccattttctcccacccacatttttctcagcaatttacttgacttattgcctcacagataaga

SEQ ID NO: 28637 - DNA, 1020 bp, Homo sapiens
ctcgccctgaattctttctagcatgagatccaagaaccctcttttggggtctggattgggactcctttcctgtagcatctttctggtgaccactgaagggactgcagtgcagaaaacccccacccaaaggctaacttttggtaagtggtgggggccagtaacatttttctagtgaaccctgaggggacgatactgaagaaaccccccgacccaaaggaaatagagtgcagcactgataggccaactttgggtaagtggtggggtacccaggtaaaggatggaattgggttagaggcccaacttaggggagtcagagtctctcctaagacagagtgggtcagaggccgctcttgataaaaggcaaggacacctgacctaccttgggttaaaggcccaacttaggagggttagggtcccttttaagatttaaggggttagaagcccctttcagtaaagtcctttttggctaagaatgggtttggtattatgagacgttaactgctattctctttggattaatctgccttgaactctttgctgagggctgtgggtgacaggattaggcacatataggattgtgggacatggggagctttttcctccctaaaaggggaaactcgagagctgatgataccactggaaaatatcccttttctactgacaagcagctgcctgaacttttcagtgtcactgcaatgggtgggtctttctgtggtctccctgagcacctggccttccccaccctgcctcaagcaatgcttcctctccctctctctgtctgtttctgtctctctctctctgtgtgtgcaaactggttgaatgaacggtaaaaatcattgtttatctcctccgtaaaagtttagattaatggaaaaaaaggatttgtgaggctagtcctaagctatagtgaatctggtgtgctttgtgtgtctttctgtattgctctgccataaagaggggtatcataggatggaacatggtcttaggacacctgtaagccgactgttcaaggtggcccag

SEQ ID NO: 28638 - DNA, 1703 bp, Homo sapiens
ggcattcggttacaagtctgtctccctggatggactgtgagatcatgggaacgagggcactgttgttagatttttaattttattgtatttatttgtttgtttattttgagacagggtctcactctgttacccaggctggagtgcagtggcatgatcttggctcactgcaacctccacctcccgggttcaagctgttctcctgcctcagcctcctgagtagctgggattgcaggcacgcaccactgtgcccgactaattttagtatttttagtgaaggcagggtttcaccgtattggccaggctggtctcactcccaacctcaggtgatctgcctgcctcagcctcccaaagtgttgggattacaggcgtgagccaccgcgtccagcctctaccatggcatagcacatatgctcacatactcttagaaagatcacaagaaactggtgaccatggctgcttgtggttaaaactctagggggcctggaggatgggctgggagggagtcacggttcacaggatggtcttttgtacctttgaaatccacctattcaaataaatgcaaaaccagttgcagtacagccacgtccacggcagcatgattcacaataactcaaacgtggaggcaacccaagtgcccatccacagatgaatgagtcaacaagaggatgaatgagtcaacaagaggtggtgtatccgtacaatggaatattattcagccttacaacggaagggaatcctgacacatgctccaacagggatgaaccttgatgacattacactgagtgaaataagccagataccaaatgacaaatactgtaagattccacttatacgaggttcctagagtagtcagatccagagacaaagcagaatgatggttgttaggggctggggacagcagggaaggatggagagttactgtttaatgggtatagagtttaagtttgagaagataaaaacattctggagatggatggtgctgatggttgcacaagaatgtgagtatcactgaactctacacttaagagtttttagtttttagttttagctgggtttggggtcccaggcctcaggcctcacctgctgcctcaggatctccagggccctcccagatcacagacctaacagatcttaggacaattggcccagggtcatcagcgcaattgatgcagctccctccctctcttgtaggacattttcatggatgttggcatttggtatcagagcagctgaagttattatgcattttcagtgtatgtatttatgtagatagtggtacgctcttttaattttttttttttttttttttttttgagacagagtctcaatctgtcaccccccaggctggagtgcagtggtgcgatctcggctcactgcaatctctgcctcccgggttcaagcaattctctgcctcagcctctcaagtaactgggattacaagcaccccccaccatacctggctaatttttgtatttttagtagagatggggtttcaccatcttggccaggctggtcttgaactcctgacctcatgatccacccacctcagcctcccaaagtgctgggattacaggcgtgagccaccgtgcctggccatgatagtggtacactcttaaatgtttaacaatagctttcccaaaatacatgtgcatataaatacagatgtaagtttgttataaattttgctgatatcaaggatatgt

SEQ ID NO: 28639 - DNA, 1095 bp, Homo sapiens
ttaacagggaaggtactaaagtcagcaaggacttagagtgaggtgcgggagtcaggcctcccatggtgagcacggggagaaatctgtcccctgccccctgctgggaggggctcagctgggctctgccccctgggtgggaacacacagtcaagccattcttacgactggccccaggcagggctcaacgtcattaaagaggcagaggcgcagctgtggtgggcagccaaggagctgagaagaacgaagaagctttcagactacgtggggaagaatgaaaaaaccaaaattatcgccaagattcagcaagtaagtactttttgctttaatgtgtcagtagtttttgttatttcccttcaaactgataaaaatgtacagtgaatccgaaagatttaaactactggtacaaatattttaatcttattggctcgggtttaaactaaaaatatcctcttcctgcacaccaacaaaaactggaagaaaatatggattgagtaccaatatctagagtttgttttaatatgtgggggagaggaaatatactatgttaatttcaagcgtaaaaatagggctgcaagtaaacagatatgttccttgaaatgtaaaatttcgcccgtcactgatttcaggctttttcaaactgctgatgctgtgtacaggagggggaggaggaaaggttcgagacctttgaaggacatcgtgtagcgctgtaacctgaggggccgccttggttttgtgggtgctcctacgtcactaggctgtgattttggggaaatggggccctccaccttatgtagatccagagtccgtggctctgagcatcctccctttcccactggacctgcctgcagtgtctgccttgggaatggtcaagacagagatggtatcgtgcagcctctggtctccacacagtgagagtccagggctcagggctgctcaagaccaaggcttcccttgatgcttcacttcgggtgatcagacatgggggacctgtttatctttagtagccggcaaaggcaatcgtaaaacatttgttgtaacttcaggattgtcactctaagaacaccttaatccacaatttgctctgctctcctcttt

SEQ ID NO: 28640 - DNA, 1040 bp, Homo sapiens
agtagctgggactacaggcatgtgccaccacacctgactaatttttgtatttttagtagagacggggttttgccatgttggccaggctggtctcgaactcgtgacctcagatgatctgccggtctcggcctcccaaagtgctgggattacaggtgtgagaaagcagttctttacgtttaaaaattgacctcgtcatttctctacagacttacaaaatactgtactctgtagctcctttggtaaaactctaatctaggatgaattaggtagataaaggaagcttttgtcttgctctttaataagttgcagcttgcttttatatgtattcgacgaaccagatgaaatgaccctttcccttctgtagctcaaaaatggttgagtattggcaatttcatgtgtttccacctaataattgttggcaggtcctcaccgcaatgtattcagagttgtgttttgttactgttcgcaaatgttgggggatctttcgagatggactgtgtgaaagaggaaagggaaagcatgtcagcacatggacttccctgatcaaggacatgcttctctctggggcagagcacttcagtacacggcaaaacactgaggaaattcctctcctttcagtgtttggctgatcatgtggaattgatgataatcctttttgatagcttattctttttaacctgcattaaaagcgccatttaaaacactgtaattgaacagccctaaaacactgttaggagtaaaagaacagtattcctgcaaggcctttagcagctcaaaaatacatttttttaaatatcagggatagtaagaattcctagtattttttcctttcaatgttaacctgaaaaatggttgtcttccacagctttcttacgtaagaagatgtggtaagatgaggaaaaaaaatatgagaaccagttaacagttcattattcatcattaaaccaatatgtaatatgttcttaaattaaccaccttttttttttttttttttttttttgagacagagtcttactctgtcacccaggttggagtgcagt

SEQ ID NO: 28641 - DNA, 1031 bp, Homo sapiens
tatcttaagagtctcagtatatgaggaaatgatggatttgggcagctttttatcattttacctgagtaattaatgaagatataaagtaatccttcattaaaaaggattttaattacatttcagaaaaaaaaatgataaattcagtatagtaaaactggttctaaaggtttttttctctttttggtttttttcttgatcaggttcatcatattccgtaaaggtattagaaataggagagtagatgttgttacaggatttttccctacctgatgaatgtgtcttttctgtatgtttatatgttctcttatacacataggttttttattatttgaaaactttctctggactataacaggtaatcaagaacagagagaaagagcaaatagaaaccagtaatcagtgacttaggctagtccagtaggagctgggactactgagaggcccatatctgaagagtaggaaactgagagctattactgtacctagaaattaagattattaagattgtgagaactgaggaaaccacttcctatgaagatagaagctttttgtcttttctgttgtagctgtccacttaacaatctgaaggttcttttttatatgtaatattactcttcaaatatttatcctccttttttcaaaaaaagggaaatttgccattcactgatcccatgaccacacttggcacaagaactttcttgattctgttgaataccataagtataggaaaagaaagtcaggatttttgtgagtttaaaagttcatattttgcttaaaataaatattgttagcttagatccttcagcaaacatatgaaaatagaaaaaatatttttcactgatgagtctttcagtgtatttaattcggaatattgagttagtcattcaaaagttgtacttctgtgtttaaaagcaatatatatggctgggtggcagtggcatgcacctgtagtcccagctacgcaggggactacattggaaagatcgcttgaacccaggagttcaagtctagctggagcaacatagcaagac

SEQ ID NO: 28642 - DNA, 1062 bp, Homo sapiens
ccataggaagggcctgtatccattttaatcctgtttcctgacatactttccctaaactatttttgatagtctgattcattcgctccacctttccagaactctgaggtcagtaggcggcatgtagtttccaagtgattcctaatgcctttgctgtcttctgtaccaagtcagccacaaacaccggcccgttatgtgagccaattcgtaagggcagtccaaacctaggaataagatctcggagaagcacacgggttacttcgtaggccttttcagtttgtgttggataagcctccacccacccagagtaagtacacacaagaaccagcaaatacttgttaccttcacattttggcatttctgtgaaatccacctgaagaccctcaaaaggagccgctccataagcttgtatgctgggtggaaccgtggggccttgcctcacattgcgctgtcagcaagtaacacaccattgtgctactgctttggcaagggctggcaagtgtgagatgtagaagtaccggcctaacaacttttcaagtgactcttgacctagaagagtggtttcatgcatggccagtacgactgtggctctcagcaactgtggcacagctaccttcccatctggcagtctgatccatccttcttttattacttgccccacttctgtgtggaaaaagtctttttcttccttagaataggtaggtaccaggtcaggtgtttgagggagtaagggggctgctactgatgcacagtaaggggtagatgctgcttttcgagcttctgagtcagtttgggagtttcctaaggccactgaggtggaggctcgctggtgtcccctgcagtgcatgactgccaccttctgaggtttccacactgcctctaataattgtagaatttcttgttgatattttatgtcctttcccctagagtttaacaggcccttttccttatataatgctccatgcacttggagggttagaaaggcatatcaagagtcagtgtagatgtttacagtcttaccttcactgagttctagagcccgagttaaagcaatgagctcagcct

SEQ ID NO: 28643 - DNA, 1048 bp, Homo sapiens
cactaaaatatgatctgaaatcttttaattttaaaaagtgccaagatttctaacaaagaatagttaagtgtgtgagacctaaagactatttattatttttcttgcctatttattcctaggaatctcacgtcttcattctctgggcaaggtttatgatcttgtctttaaacatgaatctgtggcaaaaggaatgaaagcttaactcttgccagaaatttagttgaaaaggatttgctatcacttaagaattgtttggcttagttattgttctgaatgttttgagaagctgttgattattttctcgagaagggtagaggaagagagcacctagatatatttttgagttatataatgaacaccattttctgaaatagtatggtatttagggatggacatctgttgtttgagcatagactcatttcttttttaaaattttttattttattttatttttttgactctctgtttctttaagcacattaaggtggcaccagttaagaataaactaggactattttttatctttttatttcatttaaaaactgacttgactttattagttcatacagtgaggcagtacgtttttattcacacagttcattgtcttgctgaatattttaagccgtgtaattattatagaacttgtgtgttgatatagaatggattatagacactatgttcgcattggtaacaagcagtgacttcaatttttaagagcaatgataaaccataattatagagaattatttttatctaggtacagtcagctttgaattaaccataccaacaggccagacaagtaatctgctttcattaccacccagacacctctatacaagcaatcaaagcaaacagctaggtggtgagaaatctgcatatctgcccctggaaacaatggggatatacttatctaaatcagcagttccacaggtcaaaattatctttacaagaatactaagacatcactcgcctttttcactctcatttcctcataagactgctatatcttggtatcataagagaatatcataataaaataagatcatgt

SEQ ID NO: 28644 - DNA, 1049 bp, Homo sapiens
taaattttatcatttaaccagaaagaagtccttatcaatacttgtagtttccattgatacagtatttgttttaaaaattgaaatgatgggaaataactcagcctagtaaactgttatgttttcagaagctagtcccaaatagtgctataatgataaatttttggtttgattctggtagttcttaaaagccatattacaattaatatattaatgtacttataaaaatttcttgtttgctttttaagatgctagctaaacagttggaagctcttggtttagctgaaaagcctcagttggtgactcgctttcaagaagtttttcggtcaatgtggtccgtgaatggtgattcaatcagtaagatatatgcaggaactggagctcttgaagggaaagcgaaggtatatctagatctatcataacattacagaatatcctctttttcctctcttcataaagcttttaaatggccttttaaaagttaatagatggtttaaattaatagatgtgtcttagaattctgtttaatgtgcttttatgccttctttgatacttcctttcacagtggatactagtgaataaatggaagataggtatttccctaagtttgggaagtatgtatatataacgtatctagtcatttagtgacaatccactaagatgatatatattgctctttttttcatgatttcccttgtatatctgttttactttttgtattgtttgttttgattacaaatatgatttttaaaaccatagacctcttaataaagggttctctcttatttggctttgcgttccctgcacttaacacagtgcctactgttaatagatgtgtgacgtatgccacttggacaagtaagtccatcaacagcttatgcagtgcttactaggaacccaagattagggcataattgatctttacttatcttaccttagaaaggtggctatcaagatgtgccaacgaagtgtgagatatgggccaggtgtggtggctgacgcctataatcccagcactttgggaggctgaggcaggtggatcacttgagacc

SEQ ID NO: 28645 - DNA, 1048 bp, Homo sapiens
atgatttttaaaaatacctttaatgcaagctttttttttcccccaagttggaatttagctcttgttgcccattggagtgcaatggcacagtcttggctcaccgcaacctccgcctcccggcttcaagtgattctcctacctcagcatcccgagtagctgggattacaggcatgtgccaccatgcccagctaatttttgtattttagtagagacaaggtttcaccatgttggtcaggccggtctcaaactcctgacctcaggtgatccgctggtctcgaactcctgacctcaggtgatccagctgcctcggcctccccaagtactgggattacaggcatgagccaccacacctggccgcaacttttttttaattgggtaaagttatggttatttaaagccttaacactttctggagtgctacttttatcacgattggcaatagctctgttattgtaaaacttttctttcaacattgagtaataaaacctagtctaggaggccatgatgggaggattacttgagaccaggagttcaagaccatcctgggcaacatagacccatatttctacaaaaaaataaaaaaataaaaatcattcgggcatggtgacgtgtgcctgtagtctcagctactcagcaggctgaggtgggaggatcccttgagcccaggaggtcgaggctgcagtgagctatggttgcaccactgcattccagcatggttacagagtgagaccctgtctctaataacacaaaaacagaaatctaatctagtctagccagtatattgctatgagagctgtgatacatagctgaatgtatatatgtgttggggaacagagtggtggaaaacaaccataggcattacctggaagacatgaaaactggatttttttcaccttatgcaccgttgcagtactatgcaaaataaatgttaatcagtaaacaaaaatgctaagttttgaacttgtatggagtgataggcaattaatctgggattactccaaagaaaaagtatcaacttgtgagttttctgcagtctaaaatgcttaat

SEQ ID NO: 28646 - DNA, 1049 bp, Homo sapiens
gtcctttcagaatcagatttccctattcttgccctacatttgtgtagtcaagtgttgccattagcttttatcatttaaatgttttgtcagtttctaagtgtcgagcactattctgtcaagaataaaagggtaagaagacagagttcagatcagtggacaggatggattaattaatagatggtcttggaataatttattaactctttgggaagaatactaatgttactagtttaagaaaatatgcagtacatttattttaagaatatcagatttagaaacttttgattgaaactctggatttatacttagctaaatagaatccaatgtttcaggtcatttttcttaaactaaaacttttttttgtagcatctgcagaaaaagaggcaatcaagggtacatactccaaagtactggatgcatatggactcttaggtgttctgcggttaaatcttggtaagtttatcattcagtagaattcatccattttttcatttctattttgtaattctaaggatttgagagggactagctatgaattattgtagactccatatttaagctacacatgtgctaacatcttttaaacattaatgtagctaatattgtgataatgtttgttgcccaaaaaggcgtgctacatgctcaaactcatgtgagtggaagttcggagacagtctctggtttgaccacttgaagagataagtatcagttgtcaaaagagaaaatcagaacattctcctttttgttgattcagtgcatttaggaaaaagtgtctgcatgagaactacactgatttttcttggtttgtattggaaaagacatctgttttgaattcagaaagtgtctgcttgagccttttttttttttttgccacgtaatgtcaccgtgagctgcagagtaacctttgcagttactagtttatctgtaattttgcagctcaaagtgttcttcaacattggtactggtccataaatcattttgttattgatccgtgataagataaggagcttgcactatgatacaaatcaacatgtggcttccttcattga

SEQ ID NO: 28647 - DNA, 1026 bp, Homo sapiens
tgaactataagtagaatgaatcttcttttttcaattttttttttttttgagacagagtctcactttgttgcccaggctggagtgcagtggcatgatcttggctcactgtaacctcagcctcctgggttcaggtgattctcctgcctcagcatcccgagtagctgaaattatgggtgtgcaccaccatgcccagctgatttttgtatctctttattagagacaggtttcaccttactggccaggctggtctcgaactcctgacatcaagtgatccacctgcctcagctccccaaaatgctggggttacaggcgtgagccaccgtgcccggcctctttttgtttttatttttaaattccagaatcttataattaaataaatttctagctggttgtaccttagtgctcattagttgtctttccttggttagcattgggaatatatctttggcctatcttgttcccagttttatcaattctcttagagaatggagtagaaagtacagttttcagatttttagttgtggcaaagtgacgtaggattgatgagagctgggttgaataattatgttggatgacacaattgagatccagctttttgaaactcagataatgggttagaacccacaaaaggaaaatgcacttccccttgcaccggattgagtgtttgtgtattcctgaaccaaaaatgactgttgagatatcatgtgctgtttgcatcaggtagatcattggcagaagaaggtagaaatttctgtgatttccatagtatcacaaactgtttggtggctaccaaatgaggaagagttggaataggtaccgtattgatggtcttaccaaccactgcatatcctcaaacctgatctttccttcagtctcccttatgtcaatggattgcactccatctaccaagttgtttcaaacaacttaagaatcatcctcaacacctcttcccctcacatttcacacattctctctattaccaagtctagtcaattcctcctcttaatttccttgagattccatgca

SEQ ID NO: 28648 - DNA, 1134 bp, Homo sapiens
cttgctgattagccacacccaggcaatttaatatccatggtcttctataatgtttataccacattgtaaatattcagagaacttgttttaaagtttatgctttctgattctgtgattttcaaaagaggaatttttttggaaattaaggactatcgtttgataattatatatgtaattaagatttagccaagcattaaattaatttttaaatatatcctttgttgtattttcctgacgactaaatttgcagcatttcaaatgactctaataaagtgggactgtgagcaggcccatgtgtacccttgatcaggacataatatgcagaacagtgtcatgcactgtatttgctctgttaattttatcttatccctacatatttgtattagttcattctcacgctgttatagggacatacttgagactaggtaatttataaagaggtttaattgactcacagttccgcatgggtgggaaggcctcaggaaacttacaatcttgacgaaaggcacgtcttcacagggtggctgcagagagaaatgagtgctgagggaagggggaagtcccttatgaagccatgagatttcatgagaactcaggagaacagcatggcggaaaccaccccccatgattcagttatctccacctggtcccgcccttgatgtggggattattacaattcaaggtgagatttgggtggggacacagaaccaaaccaaatcagtattcattctggatgaatttttcattacaccttactggcctactaagtagaattaaagtcagaacacctattcctcatcttaagtagaataaaacataaaacatgtatctgtatcacatacagatcatttaggccttaaactgcatattatttccaaacccattagactaattactctgcttttaagaactcttaaaatagagtttttatcctatgaaatctgtcaggctatattggtttcaggaatgggtttgaacatcacactaggaatttgatgtagggtacataaaacaatggtttttctatcccaagcagaacatttttattcctgaaatagcttaaggacattatttcttatgaaaggaattatcaaaagataaatccagagggttacattttaataaagctggttt

SEQ ID NO: 28649 - DNA, 1664 bp, Homo sapiens
attagctgggtgtggtggtgcgtgcctatagtcccacctactcgggaggctgaggcaggggaattgcttgaacctgggaggcagaggttgcagtgagctgagattgcgccactgcattccagcctggtgaaagaccaacactccgtctcaaaaaacaacaacaaaaaagattttaatggtaaaattctttggcaggttttggctgatttgattttgttcttagtgtgtgccattttgttatttgttggcactaatatttttttctctgtgttttctactagataaattttatcacattttaaactttgatttacatatatttaacagtgtttctgtttggaagttaaatatcaacaaatagtgtttacttttctacagaaaagaactttaacagctatgtaagcacctgctttgtgcagtgcacataaagcaggtttcatgtgggttggaaagttttgcaaattctaattcttccctaataggtgcttactacaattctgtagaagagatgagacaattactaatgtcatattatgtcttgtttctcgtgagtggtttaagctaaatgttaaaacagtcattcttaaagtgtggtccctggaccagcagtatcagcatggcatgggagtctgatagacttgcaagttctcggggccccactctgggcctcttgaatagaactcttggggtggggccagggatgatctgcatttcaacaatcctctaggtaattctaatgtgtgctaaaatttgaggattacttcctagtaagaaagcagaatgacttctagctggagtgataaggaaagtcagattatactttatttagtgaattttggtggagtggaaattatgctggatcttgacagattggtgatgaagagacacaaataacgatttgtgttccaggtatacgctaaaacagccaggactctggtttgggaaggaatgggagacaggcctctgaagtagtttgaaaacagattgctttcttttctttctcaatattaatgaaactcattgatctcaatgaattttgttttgcttttttaaaatgggtcccctgtctctgggctagtcatttaaacatatgtaagttttgttctatatggataaatgtaaacttttttttttttaacatgctgtagcttgcatatctgtttcctttctttgaaaatgtgtgcttggaaaaattgattgcagaagctctaaaatagccatgaaatcagtagcaaattttctcttagatatactaattaatgagatgctgctatatttttttcttttagggaaaacataaaacagatagtaaaactccttgcaagtgttcgagctttggatcatgctatgtctgttgcaagtgaccacaatgtgaaagaatttaagtctttgatcgaaggaaaatagatctatgagactgaaaaacctatttgcttgattaccattcccaatgtgtaaattttgtatatatgtaaagtttcttaaactgtaaaatagcaattcttgttttaatacaaaaaacattatattcaatactgtgtccttaaatgatatttcttcagaatgaaaggaattcagattatttctaggagtctatgaatgttttctttactgcctgtcatactttgtttactgaagtattttgtatggtcatttaaattaac

SEQ ID NO: 28650 - DNA, 1561 bp, Homo sapiens
tgtgggagacttaatacctaatgccctaaggcctccattgtctataatgaattcttctttttcccctgcatctgtaacagtactagctatgtatcattcttgggagaactgagtaaagagccacacaaatcattttctgtaggtttagaactcttgcagagccctgcttcagaaaggctactcagtgctcttgctcataatcactggagtaactgcagggttctgaagagattaaggtgggtcagattcggaggatggcagcaggaactgagggaaatggacagactggatggtcgtggagacacacaacttgagagagaggtcaggaatgacctccagacctctgccgcaagcagctggttgaatagtgttaccatttactaagttgagaaacaactgggaaactataagtttttatggtgggatgggatggggctttcattttatgatgatagctttcattttctatatattgattgagcttgggtagcttgagatgcataagtgatataacttggttgtagttcatgatacatggtagccatgcagggttgtagtcagactctcccatcttttgtgggcagcgcggggcggggtgggggtgtgcatagaaccagctagagtgtaattttgaatggaggacacttacctaagactcagcactccctgatagtactgtctgcaatgatggaaaatgttctgtatctgtgctgaccagtgctgtagccactagctacatgtggctgtttcgattttgactaattaaaattgaatattcaaatgtaaccattctaggaaatatctgtacctttgaaagtattaatatttcttagtactttggcaagacatggtctgctgtatttcatatggtgttttactatgtaacttatttactttgtacctaatctaattgtttcacattacctattttttttcttctttccagctgttaggcaattttcttcagtggtatggcattttctcaaataaaactctgcaagagttatcaatagatggtttattaaatcgatatattctcatggcttttcagaattcagaatatggagatgacagcatcaaaaaagcccaaaatgtgagttaaatgcatagtacagtttttaaagcatataatttaaaatgaattaagtttttgtttgtttgaagagggatttgagaattttatgaaacccctttgattactggacttgcatgtaaggttgacagtttgcctacccaggtagttccaaccccctacagcattttttacataaaaatgcatactgttatatatatatatatccatctatatccatatttttatagatattagtgaaagttttgatatttttataggtataaataaaagttttgatttcagaataataaccttattatcttaacctcagtctgggccaactcgacttcccttagcagcatgcatggatgtctattcgtggaattattgcaggggatgggggtgctgtaatttcatttttataccactcatttttacatcaaaagctgctggaaaaggaaattcagtatatttaggccatcctag

SEQ ID NO: 28651 - DNA, 1054 bp, Homo sapiens
tttcttctaggatttttatagttttggggtttacatttaagtctttaatccatcttgacttaacttttgtatatggtgtaaggaaggagcccagtttcaattttctgtatatggctagccaattctcccaacaccatttattaaacagggaatcttttccccattgcttgttcgtgtcaggtttgtcggagatcagatggttgtaggtgtgcggtcttattgctgagttctctattctgttccattggtctatgtgtctgtttttgtatcagtaccatgctgttttggttactgtggccttatagtttgaagtctggtagcatgatatctccagccgtccagtttttagttgtttgcaaccaaaggttaaatccagttcttgtttctcttatcatagctggaagcagaaatagccactattttagtatttgggtaaccttttaaatgtcttttaggcaaaatgtcgtgactttgagaatatgctgtggtttgaatctttgctgttttatggttgtgaagaacgagagcaagaaaaagatgatgtagatgttgccctactacctaccattgtggaaaaggtgattcttcctaaactaacaggtaaatctcctgttctctgaattgagcattcagacacactggctttctcaaatctatttttatgagtttataattcagagcatgtttccttatagaaattacatgagaaataatagttaccacctggcccagagatggctagagggcagaggggttcttatcctgggacttgaagaccactttagggtgggcctgtagttgagtgcagtaattgcttcataggtgaggtttagaaattcaaagactgactgaagcaaaattatacagagtttgagggaggaggatatgcatttatgtggggagcaattaaaatgctttcataagttcctcaaaaaagattaggaatcattgatacaggaatctattttaaatactagaaatgttagtttgaaattcttgatgccaagacaacatttctacagaaatcctcttttttcctaatctttattttccc

SEQ ID NO: 28652 - DNA, 4147 bp, Homo sapiens
catttcatcaaataccttttcccatctgtaatttgttcttgagaatatggagctatttacttagaggggatttgaaagaagagttgaattatttatattagtttgattgaaagttggaaagaaattaaaagatactgggaaagtgaaaaatacagtcctagagggagtatacattaattgccaaagatttgaggaaaatgacatgggatgctggagaatcaattcattttctgatctgttttttaaagaagtaaagaatagtctgaaattcttctgtttagatttataagcacttatctgcaattactgtgtataattcttacagaaatggaggaggctatcacttgagtcatgttagactcacctgtctcctccagtgcacattttacaaaacctatacatgcagtgatgttttaagtataatgttttttttttttttttttttttgagacggagtctcgctttgttgcccaggctggagtgcaatggcgcaatctcggctcaccgccacctccgcctcccgggttcaagcaattctcctgcctcagctacgcctggctgatttttgtattttttttagtagagacggggtttcaccatgttggtcaggctggtcttgaactcctgacctcgtgatccaccagcctcagcctcccaaagtgctgggattacaggcgtgagccaccgtgcccagccgtataatgatatttttaaaaatatttcttgaaggaaaactcttgagtctggaattatttttatagtttgggatattttagctaattcatctggggtgtgtagtgaactcacatctagggctgggaaatctttctggtttagtaatttttcattgtaattgatgcactcaggaacatacctccttcctaatttcagagctattttgaaatatgaatgaaaaactcagtaaaaaaaaaagtcaacttttaaaaatagtagggtctggtcaggcacggtggctctcgcctgtaatcccagcactttgagaggccgaggcggagtttgagaccagcttggccaacatggcaaaaccccgtctctaaaaatacaaaaattagctggtggcgggtgcctgtaatcccagctactcaggaggaggctgaggcgggagaatcgcttgaacctgggcggcggaggttgcagtgaactgaggttgtgccattgcactccattctgggcgacaagagcaagactccgtctcaataaataaatagatagatagatagtaaggtctgataattaggatattctgaagtaagagctaaattttggttttgtttttcctgttgctgattttggtgacacatctctgttgatatcagtaaatatcaattgataagtaaaaaaatatgcaagtcttaacttggatgtctttcatcttgcatgtgctcacctccctcccctctcacccagtcgtttgggttgtttgcctccccttactgtcatatcttcatagtgtggaactaaaacgtagaaatgagggaagtatagtggacagatgtttcccccaccccttcttttacctaggcaagagattaggggagtcttttttgattaaagagagtaggtccaaaataaagaccctgaaacactaaaatctggggatccccaacaaaagaactggctcagtacctagtgatccgacggagacacctctgttagacagctcctgcccacacacacagcttccagtcttgctcttctatatgaacaggcagttaacgatgatcataaggaccaacctgagcagcagaaccaaagggactgaggaaacagacagtgctggtacaagtatgcaagttttctgtaaacagattactttcaaacagttgggagccccagggagataatagaaggtatcctactcaacaggagtatatagaatgctgtagaagaggaatattgtaagaacaagaactatctcttgaaaactaaaaatatgataactgaaatataaatttaaataggattggaagctaaagctaggaaattaccctagaatgttttttgagaaatggaaaatacgaagaccaaaaaaataaaataaaactatgctgtgaaagagaaagattagcatttgagaaggcggaagttggtcctgctcagatgcggttttcagatgccttattctaaaaatagtgatagaaaacaaatttctacaaagcaaaattacaataaatttattaaactcttgcaacaaagctgttttcttatgtcttcctatgttttcctgctgtcattcaatgtgatgctgaagttcttcctccttaaaaatgtaatatttttccctttgcacaggtaatttagagttttaatttatttggtcatcatgatagctattcctgatagctgtcctgttacttagacataaaaatagtgagtaagcccaattacatatttgtagggttgttgaactcttaaaaagaaatcacttctttaatttttctactttttaaaatgggaacgcagaataataatgaaatttgttctaaaccaaaaacctacctggtttaccagttattgcagaatcttgccgttgagattagcaagcagtctgtcgtaatggcttattctgtgcaaactctttcctcaagattgttgaaagatggcttttaattttaactgttgttgttttgcagacaaagctctgatggcaccaaatcttgactcctttggacgcgatcgggcactgtatcaagagcatgcaaaacgtcgcattgcagagcgggaggccaggaggtaattctcaaaacccttgctctggcttgtttgggaagggaggagtctctgttatctagtttgggaacttgatgtttattatttaggactcgtcgtagacaagccagagaacaaaccggtaagatggcagatcaccttgaaggcctttccagtgatgatgaagaaacttctacagatattactaatttcaatctggaaaaaggttagacatttatttggaaataagactcatcatcagtttagtttctacttgggtatggtttttaccatgaaatgatttgaatcttcatggtctctgcattagaaccagacacttcttttttaattgcagaaatttgcatgcctttttattagtgaatatcatgatgaattctcaaaaataggggtaacatcttctcatagggtgtacttagtatttgcataataaatgttgttactgttccaaatggtagaattttaagtgactggaaatgtgtcaggtccttgagggcagctctcattgcagcctgtctggtctggaaaggtaaagcttggcagtagagcactcagccctgaaggaaactcttgatttggggagtcataagtaatctcaccttagaggaatggttagtactattatgtgccaggcattttcagaaggatcccaaataaaagtcttcatttcccaccattggctataattgtttggaattatatcaattgcacaccatttggaacttagttggagaagcttctttctcttactttttttacagtgaacatttctaaacaaaatttgaaagactagcacagtgatcatccacatacctatcactcagataacaatgcttatgatttcaccaagtttgcctggctctttatacaaggagatgtgtgtgtttgctgaaccatttgaaagtaacttacagacctcatggctcttcactccccaaaatttcagagtgtgtttcctctaaatgagtatatttttctgtataatcacagtattattatcttttttctttttgttagatgcctattctgattaagtatttctttttttagcacaataagaaaacagatttcttaatatcatgtccatatataatttttctcaatggcatcctggaaaaaccctttttaggaactatttttatgggttattttgtggtttttgaaaccaggatccacctaaggttcatgctctgcatttggttatgacatttttaaatctggaataaatgagtaaccctaagtacacattcacacacccacccctattgttctttaaatttttgaagagaccaggccacttctcttatagactgtcctatattctagactggtctgtatgtttcctcatagcattgtttaacttgttctttgatccatttcttgtaaactggaatttagg

SEQ ID NO: 28653 - DNA, 1076 bp, Homo sapiens
ggtatgtgtagtggtcattagtgttacgtgaaagtctcatagcatttgattataacataaggtatttagaaaaagaaagttttctgttttaagttagctctcatgttcttttgtattctatatgaatcaagtaaatgctttagggatattaacctggaaaaattattgactttgtaagttcacaattcatgtaaagaaatttttataaaatatgggagaatttaaacatttgacaggaagagaacaactttttaaatttgagatatattgagttcagagaggttagtgatagctggaaattttattcgccctagtaattattttgtttacattaaaaaatctgtaataaagctacaaaatagtaaacagattactgtaacgtacttggtacatatgagtggcagagcaactgaaatgtccaaaattggagaattagcagactcttgttcttacctacttatagagccattgcacttttttggtaccacacagtgataatgttttactttgaactacaaaaatcgcaatgcagataatgctgctggaaaattaaaaatagatattaaaaagacttctaagtacttaaatattctctaagggaaaagctctaaaattgttgacatttctttacttgttctatgaatactgaagtgttacatttcttaactaatgtttgctccaataactaggcactggacattatagctctatgcatggattaaaagaagaagtgtcgtttcccaaacataaaacagaatttgctacttgtgtgctgttggggattcatgattattctgtccatagagagggtactttttcagaaatccggaaatagtatggaaccctcaaataaataagcagctgaggagtttggtgttacggagtgtgttgtatttttacaggtgccactgattaatgaacttgaatcagcaatacatcagctgtacaaacagcgagcttcccgccttgtccaaagacgacaagatgatattaaagatgaatcttcggagttttcaagccattcaagtcagtccatcttgaaggtttttattattcattaaacaaccttgtttact

SEQ ID NO: 28654 - DNA, 3772 bp, Homo sapiens
aacaatttgttttataaaagtaagtaatacagtgagaaaaattgcataaacgtaaacctatttttgttaatagtgttttgaggcagaattcgcatacatttgggtgaagttaagaaaatggcacaatagagaaagtcttggactggatgtcaggagtcttagattctaatctctggttgcccattgattctgtgaccatgggcaaggcatttatcctctttcattgatcaaaggtggccttaaatgatttttgatgtttcttccaactctgaactctgtttttctgaaaattattagaaataaatttagtgattccaccaagagataggacattcattcaatcctgcttttatctaattttgaagaattctgcaattattacataatatttggcaaataggtataatttttgctgttgattttttaaccctaaaggcatattattattttcaaagttttaactaccagatttcatctatatcccatttcttttctaggttcaagccagtcaacccgcagaagtgaatatgtactaccagaacacttaccagacaatgccttacggctcatcctatggcattccttatagttatacggcctatggatcatcagatgccaaatctcaaaaaacagataatacagtccctttcaaaactcccagtaatgagatgactcccgttactattgatttggtaaagaaacagcttaaagacaggtagggcagatcaacttcttaaagacctgtccgctagctttctgttccctcaggcaacatgtagtctggggtagcagatgcagaatatcagcaaagaagattcactggcccagcttcaaaagctaaacagaagatgacttcatactttgttctgctaccttcttggattacttctgtggaagcctcgaaaaattataaaaaatgccactccatgatcttgttgaagacatttctgagtttgtacctcttggactctgaaaaagtgtagtcacgctatggggggaaaagcaaaacagtgagattttggttagcccacaaaactgtgaaatctgtaaactgccattttttgttttttgagaaaaaaagcagtacagaggaaaagatgccattccaaatatttttatgttctaatagtggagctaaatgcatattttaatattgcaagagtcctgacaccatagacctttggatgtaaatgtgttatatttatccttttgtgttcctaaggttggactccatgaaagaattgcacaaaacaaatcgacagcagcatgagaaacatctgcaaagccgagtggactctaccagggctattgaaagattagaagggtcttctgggggtattggtgaacggtataaatttttgcaagaaatgcgagggtatgtccaagacttgcttgagtgtttcagtgaaaaggtaagaatgcaaaaatactaatctctttgaataaggcaaaattagggaggtctagatggccttgtgtagaacattctataattctcagaaagtacccactgaactcaacattagaagtgatgaaaagtcatgcttcatttttcttcacttcattagtggcattatctcttaagggcaatataatacctttgttgaaaacagaaataaagataatatcttaaagcacatttaaataagactttggaaagtcttatttcaatatggtggtagattattattggcctgtgctgaattcttagaatataagggactcatctgataaaattttcttttctggttcaggtttaaacttatttttaaacgtttctacaagcaattctaaatatgcatataaagttgcaaatttttattagttttttttttttttttttttttaccctggatgatgattaccattgttgctaatagtttttatctaagtaagcctatgcttgatttctttcagaaaccatttcattggatatcattttttctaaggtttcatttctcccaagtttgtttttttcaataggatagtcagttgacaaaatgtttggcattcttatactatttattgtttacatttaaaattaggtgcaaacagctagtttctcaaatgacctcctaattgattttttttctttaagataaaagtattggttgaggcactggtttataagcatttgtggactttgcagccttatctttaaaaaaaaaaaaattaaaactgtggtccttaaatatcctgtctgaactttggattggaaggcacatttccctttgttattggctatgtagattagcttagaatctgtaagcatatagtgtggttaaatatgtatttcaacttttgttatctttgttgattacttgaataccctaaaaccaatggctgggaaaagatcattgccagactatgtcttcctgatggatctttcttcctgatgggtcttaatggttccagtcagtctgtggccagattcaggatgagataacattcaccatgtcctctctgtagggtttctcatgttttgtctttatcacctggtttctggagaagcagctgcagtctgagttatgataccacttgtggtgtatcagttgcttagggtggggaagaagtataggcttgtctgtattcctctgtgccgggagctggagtcaagattggaagtggaacctaagtgtcaagagttgacagtcatgtccttcctactggcaaaactcttctgagcccagtgggcatggtgggagctggtctcataacctttgtgactagagaaaggatctttttcttaaactatgctttatgagtttgtccctggagagctgcttcttgaagtgtcttggcgcttgcttcggaactttcttgagtaaattaagacattcataattgcaaacacaactctaaaaaatttgacagtaatatgatcagctagatcataccaaaagtaggacaacctagtttatagtttttaattgttgaattattagtgtatttcatctcgattaccttgttcctagagaagtttacttcagattatgctaatgtggttatacagagtcacttagattttttggaacaaatcttaaaccttatacagtgactacgttttaattaaaagagaggtagacatagcttcatttaaagatgagtattatatttcattctaacattttcatgtgtatttcattttaagagtactgctcagcttagatctttagaagataatcttaaaaataaagaaaaaacaaaaaagtactgctgagttgataatataaattgttatattggagatacttagaaataattggatactttgaataattatactataataatatttcagagttaaccgtaaaaagataaagatccctttttttttcctctttgcttatgaaagtttaggtggtttttaaagaagttttaaatatttgtaaatcattttaacttgccattgtttttgtttccctgtaattatctttcttgggttctttgccttaactttggccctaaaatagtaataattggtgagagttttgagtttggagaggataaagaaattgtcacggtgcagactcttgagataaatcaatattgttaagaaacttgaatgagagctcacagtctgtttagggcttttattctcagtagagtttttctctggacctccggtaaaaggcattccagttaacctaaagagaaaaactacattgtcagaatcttaactatatgttgcaaaattatattctgtatgatgccagcttaggtgggtagttcctacagtacaggaagcttaacaatctctaggattaaaaga

SEQ ID NO: 28655 - DNA, 1051 bp, Homo sapiens
actattcttgggtacaagtgttttattggaatttttaaaaactaatatcattgtgataactcatgttcattgaacatttattgtgcagctggtattgtgcttagcagtttacatgcgtaaattcatatagttctatattcctaggaggcattagattttgttccctttgttgatgtcaagtttacagagattaagaaacacatccaagattttaactattacattaatactgcctttagcttcaaggaatactgtgtttaaaacaggcaaagtcaggactaccaaatgagagaggagatcatattagacattttagtaagattgagttaatagttttgctcagttcttgtgaaatgtcaggacagcatcttttacctctttgctctttgggtgttacttacttttctttgttgctcatggctgtaggaattgaggggagtgatgatgatgctttagtaactggagaacaggatgaagagctcagccgatgggaacaggagcagataaggaaaggaattaatatccctcaggtacgacaaaagaattaaactaaaaattaaaagtagattaaaaagccttttttattttgttaaagtaaaaaattccgtattgaatctttgtcattcatttcaagtaacaaaatcccatgaggagacacacacacacacacacacacacacacacacgcacgcacgcacacagagacacgtaggcttttagaagaaactgcagtgtgttcggctttttgcagtcagaatgatggaggaatttccaatttcttagatgagtttttctcaaagtggtccttcagttagcattagcattacccggtagctcattagaaacgcaaattaccaaattatcagcccccagagacctacagagtcagaagcttggggtggtggggccagcaatctttgttgaacaagccctccaggtgattctgatgcacactaaagtttgagaaccattgctttaaatggaatgtttttgtgcgtgtagcttatttttttggactttaagaattattttgaagaagatggatttctca

SEQ ID NO: 28656 - DNA, 2008 bp, Homo sapiens
gtcagcttgtggtggatgtagttactcagaattgacagcacctttttattttagatattttgtttcggattcgttaataacttggtgatgtggtttttcagaaacattttgaatgattttttcccctctcaaatagatgatttaaggacgacaataataggaaaattttgtgaagttacatgtgctattcctttaaaaagtctcaaaaatctcattacttcacagtaatttaggaagttgacctctgtttttgagtctgtgacagacttgaaataattatacaatgattttggcatatgagtatatatatttgggataatttggacagcacgtaagatcatgtgaaagaagggaaaatattttcagaaaatagttgctacagacttcatttaatttcctttttaagaaaatgaagaagttttcaaagtgaagaaatcaagttatagcaaaaagatagtaaaattgctcaagaaggaatataaagaagatcttgaaaaatcgaagattaagacagaactcaactcatcagctgaaagtaagtaccaaactaattgaattcttttgaaatgacaaaatgaaagctctttctcacagtgatttgctgtatatcttctgaactcattcagtggaccctgtggttgtcaagggcccttattgagtagcagtacagttctgttatttaattgtaacacagatgctttgtaaatgtattttataagaagacagaattgttgccactggaacatttctgctgcaatgactagattctctcacagttttcctacttgtgtgcagactgctgttgaacagagaaagaaggtttctcattttagcctaagacacaggtttatttctgtttgaaggagtgttgtgcaaattcttgtattttgtagagacagatttgcgatttctttggtggtatttccacagtggattttattcttagagaacttttaggaatgccctaaatttaatattagtattactcccattcagcagccttatctgatactagatgaagactccttagaataatgaggcaggtatattgtacagacatctcttacgtctctcaaaacctcagtttaaaaaattttaagcggttattttgtctttaggaaagtggatccagtataatattctatggtctgagttattctcctgcaaatgctattttattttatggaattaatgagaaaatcatgattttccagattctcacttacaggcttattgtgaaaaagtatggctttgtatctcaaatttacaatctagatgtgaagacaatatctcataaatgtgtaagaggactcagtgtttggcaaaatgttcaatcagtgttccaaagggtggctactctttcagaggagagaggactgctttatggaaaaagtgggactcgaagatggatctttgatagttaaaattccgaaagggaaggtattgggggtatgatcaaggattaaaatgactaaagctgttttggaaaagaacaagtacacctgacaggtcagagtagatgatttgtgaaggaagtagttagaagtttcatgtgaaagatacgttgacagattgtgaaggatgttcagtatccagtaagggtttacatttgctacagtggcttgccaagatggtgacatgataaatgcgttttgaaactttagcctggtattaacatgcagcatgaggagagattggaggcctaaagcagtttaaactcaagggccagctttgatccattaatagtgggtttaaaaaggtctcacagttgagcaagagtaaaggcttctactgatttagtaggaaattctggatgagttaaaaatgttttctgttgttttagggggagaagtggaaagaaagaatgatttgagaaccattccaagggaagaattgataggcttaatatacactttgccatattggatttaaaagaaagagtcaaatttgaacttttgtcctggagtgtcttaatccattttctgctcctgtaacaatactacagact

SEQ ID NO: 28657 - DNA, 1027 bp, Homo sapiens
acttcccaggccttaagaaagaatacagttatgcttagccatcgtagttaacagactgctttacaaaataagcaaattaagaccaacactgccatgatgtctaatttaatttttaaaattgataggaatcagtgaagtacctgtcaaagcatattgagaaaatgaattctgtgttgcttgttccatcggttttttcctcatgatttgttttcctatctttctagcactctgatctacaaatttggaagaaccgaagagctatggacctgagatcacttcttaagtcacattttccttttgttatattctgtttgtagataggttttttatctctcagtacacattgccaaatggagtagattgtacattaaatgttttgtttctttacatttttatgttctgagttttgaaatagttttatgaaatttctttatttttcattgcatagactgttaatatgtatataatacaagactatatgaattggataatgagtatcagttttttattcctgagatttagaacttgatctactccctgagccagggttacatcatcttgtcattttagaagtaaccactcttgtctctctggctgggcacggtggctcatgcctgtaatcccagcactttgggaggccgaggcgggccgattgcttgaggtcaagtgtttgagaccagcctggccaacatggcgaaaccccatctactaaaaatacaaaaattagccaggcatggtggtgggtgcctgtaatcccaactacctaggaggctgaggcaggagaatcgcttgaacccggggggcagaggttgtagtgagctgagtttgcgccactgcactctagcctgggggagaaagtgaaactccctctcaaaaaaaagaaggaccactctcagtatctgatttctgaagatgtacaaaaaaatatagcttcatatatctagaatgagcactgagccataaaaggttttcagcaagttgtaacttattttggcctaaaaatgaggtttttttggtaaagaaaaaa

SEQ ID NO: 28658 - DNA, 1034 bp, Homo sapiens
gtttgctatgattgtgcctgtcagtagctgctgcactccagtctgggcaatatagtgaggccccatttctttaaaaacaaacacaaaaaacctcttgaattcatgaaagaaaataaattaacagactgtttaaaagtcaagaatttattttgtatgtttttacgattttgcatttcagtgttggccataggaggcaaaggagcaagttactgcttcctcagcagttttgatgtagctagaaccagcaattactttgactaaaagaaaactttgtaagttcattgacttttatccagagtaagagcagtcctttgctttgggggaattaaattggcattttcttctttcagtttcattatagatgtcttacagttaatgaataatagcagtatgttgtaatatacaaaatgtatcattatgaatggcactgatactttattactgccgtttgcctatataaccgtctaatctgttttactttgtgtatgtagatactgatgtttatccgggactagctgtgttttttcaaaatgcacttatattttttaggtaagttgccttattttttaaccacgcctgtaacatttacagaaatgtcaacttaattaaggcagcatatatatggaacacatataaatcccatggattggttacaatgatagaacttcttttaaaaggtgagaattccactgttacataagagcagagaggccttttaactagaggtcttgctgtgtatcaagactttagctggatcctttatatattttaccctttgaattcacatttaggccaagtgctgtggctcatgcctgtaatcccagcactttgggaggctgaagtgggtggattgcttaagtctaggagtttaagaccagcctgggcaacatggcaaaaccctgtctctataaaaaaatataaaaattatctggttgtggtggtgtacagtgccagctactcaagaggctgaggtgggaggattgcttgagccgaggaggttgaggctgcagtgaggcaaggctgcaccactgtac

SEQ ID NO: 28659 - DNA, 1100 bp, Homo sapiens
gtttatgttacctcatttcataaaaaagcttggaagctttttatggatgtcttttaacaattaaaaaatattaaacattaagattacatcatttccttataccatcaggaggtttttttgtttttgagacagagtcttactctgttgtttgggctggaccacactggtgtgatcttggctcactgcaacctctgcctcccgggttcaagtgattcccttgcctcagcctcccaagtagctgggattacaggtgcctgccactacgcccagctaattttttgtatttttagtagagacggggttccaccatgtttgccaggctggtcttgaactcctgacctcgtgatttgcctgctgtggactctcaaagtgctgggattacaggtgtgagccactgcacctggccaggagttttaaaaaggttatattttggaaaatggaactacttatatccattgtggcttctaaaaaaaggaaattcctgttactaattaatgtaccttgctctaacaaaaatggaaggggaagctgaataaagtgggcatattatacataagctacattttctctgagcttaagaaatggatcatagaaaatcacttgacttttaacacaaagagaaactgtttaactcttgataataatgagaaccttgaagtgggatagcactgagtcattcatgtataaatgtgaaatagacaaagaatccagaaaactggtccctcttgtataatctctggagagaagtgatagaaatctcttaaaataaatgtgttttctgggtgtactttatgaaaataagactaatgtaacatttctatcaactagcatttttattaggttaaaaatatgttaaattattcagatactgattttagttatgaaataatctgttttccgtctaagtgttatataaatatttgagtattttaacagcgaatactgaaattcatttgatgattttgtgccgttctaggataaatgctgtatccaatgctcaggtgagaggtgatagctatgaaagcggctgtttaggaagaacaggtaaagatactttgagctgttaatgggtgttgacaaaacagaaatttgtcaccaga

SEQ ID NO: 28660 - DNA, 1029 bp, Homo sapiens
cacgcctgtaatctcagcactttgggaggtcgaggcaggcggatcacttgaggtcaggagttcaagacctgcctggccaaaatggtgaaatcccgtctctattaaaaatacaaaaattagctgggcatggtggcaggtgcctctaatcccagctacttgggagagtgaagcaggagaatcgttggaacctgggaggtggaggttgcagtgagacgagatggcaccattgcacttcagcctgagtggcagagcaagactctgtctcaaaaaaaaaaaaaaaaaaatcctaataataatgaataacatttaataaggaaatgtccagaataggcaaatccagaagacagaaaatagattagttgttgcctaaggtggatagaggtatttggggtgacaaaaaaagggtacaggggtttttgtttgagtgatgaaaatgttctagaattgattgcagtgatagttgcacaaccacaagaatgtactgaaagccattgaatgtacatgtcaaattcatgattgcatggcatatgaattatatctctaaaactgtttcccaaaaggagagacccaacttgtctgtcactcaaaaaaaacaaatcaattttttttctttttcagatggagtttcactctgttacccaggctggagtggagtagcgcgatctcagcttactgcaacctctgcctcccgggttcaagggattctcctgcttcagcctcctgaatagctgagattataggtgtttaccaccatgcccagctaatttttgtacttttagtagagacggggtttcactatgctggccaggctggtctggaactccccacctcaagcaatctgcccacctcggcctcccaaagtgttgggattataggcatgagccaccgcgcctggcctaaaaaaaaaaaaaaaaatctttttttataaaaaatttgattcatagtttttttaaatacaacgagtacattgaacatgcttcacattcagaacatgaagtcttttaaatgaatataggtagaacttccaac

SEQ ID NO: 28661 - DNA, 1065 bp, Homo sapiens
cacttgtggtgtgatataaaatagacaatgcctttggtgacatgagccacacagaactaatctagcatctgtctggtggacaggtcactttgtggttagaagtcaagcacatagatgctatgtaagaacctcttgcttatttttaatagtacgtgccagcaacaagctggtattcagcttgaactccccaccttcctgtcaccatgaatgtctgttcagagcaccccagcatgcctttaactgtgcaaggcgggtacttgctgcttccagggccttcttggatgagaacttacttttacctcatttctgtgtttggcaaagaaaacatccatcccagaaatccaactcctgtttgacttcggatctagataggaaaacgtattcctttaacagaatacccaggatttttaaattctgaccactatgctttttttaatttttaggaaaaatgctcaatatccacccatccttgctcccttcttttaagggttcaaatgcccatgagcaagccctggaaaccggagtcacagttactgggtgcactgtacactttgtagctgtgagtatgtctttttctaccaacataatattagtagtcagatgtaaatgacactggctagaaggtaatgttcaaaacttttgcttacttttccaggaagatgtggatgctggacagattattttgcaagaagctgttcccgtgaagaggggtgatactgtcgcaactctttctgaaagagtaaaattagcagaacataaaatatttcctgcagcccttcagctggtggccagtggaactgtacagcttggagaaaatggcaagatctgttgggttaaagaggaatgaagccttttaattcagaaatggggccagtttagaaagaattatttgctgtttgcatggtggttttttatcatggacttggcccaaaagaaaaactgctaaaagacaaaaaagacctcacccttacttcatctatttttttaataaatagagactcactaaaaacaagactagttagtgcagcatatctgagacatacagttttcttggtcttttttatg

SEQ ID NO: 28662 - DNA, 1013 bp, Homo sapiens
ctgtgcttttcacaatctattaatccattatcccaagaggaagggagtttttttaatttttaatttgtatgggtacatggtaggtatatatatttatagggtacatgagatcttttgatacagccatacaacctgtaataatcacatccctgtaaatggggtattcatcacctcaagcatttattctttgtgttacaaacaatccagttattttatttcagtttttttttgttttgtttttgtttttgtttttgagatagagtctcactctgtcgcccaggctggagtgcagtggcgcagactcggctcactgcaaactccgcctcccagtttcaagtgattcttctgtctcagcctcctgagtagctgggattacaggcacctgccactatgcctggctaattttttgtatttttagtagagatggggtttcatcatgttggccaggctggtcaggctggtcttgaactcttgacctcagtatgatccgcctgccttggcctcccaaagtgctgggattataggtgtgagccaccacatccagcctcttccagttattttaaaatgtgtaataaattattgttgactatagtcaccctgttatgctatcaaacactagattttgttcattctaactatatttttgtacccattagcatcccctctccccgtctctcccactacccttcctagcctctggtaaccatcattgcactatcatcatgagttcaactgttttaatttttagctcccacaaataagtgagaacatgtgaggtttgtctttctgtgcctgacttatttcacttaacttaatgacctcccgttccatccatgttgttgcaaatgacaggatctcatcttttttatggctgaatagtactccattgtgtgatgtaccacattttctttatccatttgtctgctgataaacatttaggttgcttccaaatcttggctagggagaataaacatgaaactgcaggtatctctttgatacactgattttctttc

SEQ ID NO: 28663 - DNA, 1058 bp, Homo sapiens
ccatgtaatactacttagactttttaagttacctgttacatttaactgtttctgcacgttctccaggtttctaatgatctattactaaaaattaaagatactgttcttcagaggacagtggatggcatgcagcaagagggtactccatatacaggtaggcccacccacattactatggaagccacctatagagtaactttctacttttgataaaacttattttccattcccttttttttttttttttaccactttttaatggaccattttttaaatgtttatgatttttccaaaactttgattattagaagtttatgtagtagattttatatttgtaatacagtgtcttcatcatagattttctttctctcttttttttttttttcttttttaatgaaggtattctctatgctggaataatgctgaccaagaatggcccaaaagttctagagtttaattgccgttttggtgatccagagtgccaagtgggtaaaaatatcaaagtattacttggtagaagatatgtggtattttaatcttggaatttatcagcctggaagtaattacctttgggaaattcatgcaagttctgctagtacaccagtgaataaaatgtttaaggaaaactaaaatttatcccacctgccatgtggattatgtttttccaggtaatcctcccacttcttaaaagtgatctttatgaagtgattcagtccaccttagatggactgctctgcacatctctgcctgtttggctagaaaaccacaccgccctaactgttgtcatggcaagtaaaggttatcctggagactacaccaagggtgtagagataacaggtgagtgtcagggagcaagaggttggagtacaacgtgacaagtgccagcaccacagcagacccccctctcacactaaggcttgctctcgataagagtgtgaagccatcagaaacctttcagagggtcttaaccatgttgcttattggatatgtgtgttcaaatatccgcaattactgtattcagagaaccgttgatttcccttcctgtgcaaggaagacat

SEQ ID NO: 28664 - DNA, 1069 bp, Homo sapiens
cccccagcacaggaccataagcgattactggagggagatggtggccctaacacagggggaatgggagcctattgtccagcccctcaggtacttcccgaagactctgctgaagtcttgtagtagtttggttttctcagagaactcttagatgatactttctattttgttttgttttctgtttgtttgttgctatgaattatgttactaatcagcaattaaatgaggagtatcttttctggtctctaaaactaacttttcctaaaagccttttttgaagaactaaaataagccaatctaaagtatagtatgggttgaatagatcctcctattccctcctctctgcagccaatttttaacacatgggagcctgtcgtggtcttggattcatctttggatatccgtggttcagcacaaaagtgttgtctgtgtgtatctgtgtgtgtgtgtgatatgaattgagaaccaagtcacatcagaatttctagtgtgcgtgtgatatgaattgagaaccaagtcagatcagaatttcttgtgtgtgtgtgatatgaattgagaaccaagtcagatcagaatttgttctgatctttctacttcataacagacaacacgtttccaaacaatttcggcacagtttttgtttttgttgttgttttttgagacggagtctcgctctgttaccaggctggggtgcagtggcacgatcttggctcactacatcctccacctcctgggttcaagtgattctcctgcctcagcctcacaagtagctgggactacaggcacaggccaccacgccaggctaatttttgtatttttagtagagatggggtttcaccatgttggccagtatggtctggatctcttgacccgtgatctgcccacctcggcctcccaaagtgctgggattacaggcgtgagctaccatgcctggccttctgcacagttttttttaggaatttgtgctgttggcatataagtaggttaacaatccgaaaactcacctattcttttcattgaagatagtcataatgtttgtgctaatgtagtgcccctttacatatttttcttg

SEQ ID NO: 28665 - DNA, 1027 bp, Homo sapiens
tgcttatgacgacagtcatatttctcaaattatgaatcccagtttttcaaaaatgaatcattggatgaaaatgtcatttgtatgagtacaaatgattacttaaattatatttacaaatctggatttcttttttttttttgagatggtcttgctctgtttcccaggctagagtgtagtgacgtgatcctggctcactgcgatctcctcctaccaggttcaagcaattctcctgccttggcctcctgagtacctgggattacaggcacccgccaccatgcctggctaatttttgtattttagtagagatgaggttttgccatgttggccaaggctggtctcaaactcctgacctcaagtgatccacctgcctcggcctcccaaaatgctgggggtacaggcatgagccactgtgcccgtccctgggtttctaaaatgtgcatcctaagatataaactgtggttttctttctgcaggtttcattttcctttggaatttctgctttacagacagaacaatggcagcccgagtacttataattggcagtggaggaagggaacatacgctggcctggaaacttgcacagtctcatcatgtcaaacaagtgttggttgccccaggaaacgcaggcactgcctgctctgaaaagatttcaaataccggtaatcatgttttaaagtggggagtaatagttattatttgttattaatggtatgctgtcaaccatatctgtactttatgttaataaagataggctgggcacagtggctaatgcctgtaatcccagcactttgggaggccgagatatgcggatcatgaggtcaggagatggagaccatcctggctaacatggtgaaaccccgtctttactaaaaatacaaaaaattagccgggcgtggtggcgggtgcctgtagtcccagctactcgggaggctgaggcaggagaatggcttgaacccagggggtggagcttgtagtaagctgacatcatgccactgcactccagcctgggcgacagaatgagactcca

SEQ ID NO: 28666 - DNA, 1034 bp, Homo sapiens
ttgtgttttaaaccaggtatcaaactgaattattcagaattataaacattgcattaaatgtttaataataccttaagaaaatttttttacttcataggtctgtgagctttacttctctatataatttgctgaagacaaaactttgcccctatttctacgtttgtacctatcagtttactgtcctgttccgagcagcaggattagctggaagtgacttaatcacagctctcatatctccaacaactcgaggtttaagagaagctatgagaaatgaaggtaaaagtttaggtttaaagtgagaatactatactatatagtaaacctattttggcctaaaagctatttaaatttaaaatgccttttaccagttgattagcaacattaagaaatatattatttctttatttctggctttttttccctcccccacaattatttaatccagcagtccgcaaactttttggcactagggatcagtttcatgggcagtgaggaggatggtttcgggatgaaactgttacacatcagatgatcattctttttttttttttttttttttttttgagatggagactcgctctgtcacccaggctagaatgcagtggtgcaatctcggctcactgcaagctccgcctcctgggttcaggccattctcctgcctcagcctcccgagtagctgggactacaggtgcctgcaaccatgcccggctaattttttgtatttttagtagagacggggtttcaccgtgttagccaggacgatctcgatctcctgacctcgtgatccgcccgcctcggcctcccaaagtgctgggcttacaggcgtgagccaccgcgcccggacaagatcatcattcttataaggagggcacaacctagatgcctcacatgcacagttcacagtaggattcgtgcccctgtgagaatctaatgcgaccactgatgtgacaggagatggagctcaggcagtaatgttcactcgacagtcgctcacctcctgctgtgcagcccggtttctaacaggccacaggcca

SEQ ID NO: 28667 - DNA, 1015 bp, Homo sapiens
cgtctcaatttaaaaaaaaaaaaattcttgtattgtggagaacgtcgacctgaagcagacaggttgaggggaaatatttgaagtcaggaaatgtttcttaaatatgggctttgttagccctggatgcagagtttcagaagcttaaaagatccaaaatgttttaacacttggaatatttctacttcaatacaaacatctatactaccataaagaactgtaaaaactaaaaagtgaaatctgcccctccaccacccctacccccaacaacaaattcccgcttcccataggtaaccatggttaaaagtttagtgtgactcctttcagacttttttacagtgtgtaatgtatttttcatgttatttattatacagcttatatgatttttacttttcagtgatcatgttagctgataaaatctttaggttgaaggttttttcttgatactcgactaatttttgcattctttgttttctaaagacttcacatgtatcattctccgagcctgatattccgtcctcaaaaagtactgagttacctgtggactggagtattaaaacgcgactccttttcacctcttctcaaccctttacctgggcagatcatttgaaagcacaggaagaagctcaaggtcttgtccagcattgtagggcaacagaagttactttgcctaaaagtatacaggtaactctgaaataaaatagttatgtgttaaagtaacaaattaagtgtgaaatgctctcctttgcaaaatagcagatgctgccttccattaagtttttctttggaaatttaaagatacaaagacaggaagttttgtctttcccagatggtgcttatggtgctttcataccttttttttttttaagtcagattgagtaactgctcatacatttagagacttgtcttgcaaattaatcagtgttgcaggcaagaattgttaaattatttttctctaaggctttttgagaaagaaaatacaaagaaagaagtgaaaagcaattgggtgggattgcaa

SEQ ID NO: 28668 - DNA, 1030 bp, Homo sapiens
ggtctcgaactcctgacctcaagtgatctgcccacatcggcctcccaaagtgctgggattacaggcatgagccaccatccctggcccctttttttttttaattgaaaagaaaaataggactcaattggtattttataagtgaagagcttattacagtggtaaatatttaggggttatatatttaaatccacaagtaatcatatattgaatagaatgaccaatattgtctttttatgatgaaataatgatctttacatacagaacagtaagccttatatcaggcatttgatataatttgtttctaaatagacctatacttaatattcactaacaggtggttcatgattaacgtgtttgcttttacctcctatgcgaatgaataaatgtgttaaggtatgttagagtatatttgagttttacctgggattttaacgtagaatagatttgatactctatgtaatcttctgacatagctaaatgataattatgtttcttttttctcagactgtagaaaaataaatacaataactagatgatcattcattttacatttaatgagcaattgctaactgcttaggatataagtgaaacgaactccttgcccttaaacggttcactctctaggggagagacaaatatacacatgagcagattattatgtaagcttggaagaaagttgcttaacctggccagaagaaacaggaaaggcgtcttggagtaagatgtccaaatcataaggggcaagcatgttgagaatcacacctagcagggaggatattatgagcaaagacaagcaagtgaaagtgggatgtgtataagaattacaaagagtttggtattgctagagcaagataaagtcctgggcaggcgtcaagggtatggtacttggtagcagagaaacattttgtcaagaaaattctcctcctaggctgggcttggtggattacacctgtaatcccagcactttgggaagcagaggtgagaggatggcttgagcacaggagtttgagccaacagagcaagaccctgt

SEQ ID NO: 28669 - DNA, 1032 bp, Homo sapiens
aaaaccagacgactcctctcttaaatatattaaagtatgcagtctaatgaaggtttggctgtttagtgttttataatctttcttgaaaagcaaaaacaaatttaagaaagttcgtacagtatttttaaatttttttgaggaacatcattctatataaaatcctggtgcagtgcacagtgtattctgaaaggcagtcagaaaattgtttgattataatctttttttcatatgttcttcggcagtgctaatttaattcataaaatatttaattcataagaaagtgtttgtatggccgggcacagtggctcatgcctgtaatcgcagcactttgggaggccgaggtgggtggatcactcgaggtcaggagtttaagaccagcctggtcaacatggcgaaaccccgtttctactaaaaatacaaaaattagcgggacatggtggtgcagctattcgggaggctgaggcaggataatcgcttgaacccgggatgtggaggttgtgtgagccaagattgcgccactgcactccagcctgagcgacggagcaagacgttgtctccaaaaaagaaagaaagaaagtgtgtgcatggcacatccttcatttgtgctctaaaaaatttaagaaattattttttgatgctttcagcaaatcctgaaggaacccaaagtggctgcttctgttttgaatccctatgtgaagcgttccattaaagtgaaaagcctaaatgacatcacagcaaaagagaggttctctcccctcactaccaatctgatcagtgagtattagaactttttcatttgaggtgtcttgaaactatgactggaaatgtggtccatggactgtgggcggcatcagcatcacctgggagcctgttggcagtgaagaatctcaggcctcacagcaacctgctgaatcagagtctgtatcttaaccagctccctaagtgaatcgtttgcacattgaagtgtgaggagcatcgtctaaaggatactaggacctaagcatgtctaattgtatagtcagtagtttcaac

SEQ ID NO: 28670 - DNA, 1033 bp, Homo sapiens
atgcaggggaccgtttaaagcaaagacattgcagtaagctgaatgtgacctgctcaaaaaacagtctctcttctctaggtcctttcctgtgcaagggacattctggggtaccccgtccctcagccatcatttaatcccccaggaaagatatttgaggctgactcgcaggtttgtggttatttctgttgtcattagagatgtgctttacttctttcagaaagaagttctgatgagcttacgggacctagccccttgtttgtttcacattcatccttgtgtgttatccagttgtctcttaggaacttcagaattgcatatgagcgttttcccctccaagcttcctggtctcaatgatgagcacgcctgtccacacagtgactcaagctatggccataaaaggtgtctcctgtctccctgtacccgacttcagccactctcaagtcctggccattctctcttctatctttaggaaatactctcatactccacccccagagccattctcttaattcagcccccatcatttctcactttattataagcaaagcttcccccattccttctctacgctactgtcagagcgagcttttgaaagcatcaagtcttcaagcctatgtctgatcatcttcgaagaccagtctcagcctcctaacatgcatccatgtaccctggaaattctttctcacctcccgtgaagactgcaggcatgacagggcgtctgcagttctctgggtgtgccatgcgtcccctacctctgtgccttcaccttcgatgctttcctctgactttccagcttcaaatcattcttcaggacccttcttgagcatcgtgtcctttgggaagctttgcctgacatctgctcaatcccaccaagcagaactacatgtctctgctccgggctcctgcaaagccactgcattccccagcacaactctcaccagactgcaacagttggcttccctgcccatctccccagctagtttgccaatgagttcaatgtatttgtttctgatttctcagcacctagcagaat

SEQ ID NO: 28671 - DNA, 1050 bp, Homo sapiens
aaggacatttgggactgtcttgagaaaacagataatgatagtgttttgtacttgttcttttctggtaggttctgtctgtgccaagggcaggttgatcagtgagctcaggagagagcttcctgtttctaagtggcctgcaggggccactctctactggtaggaagaggtaccacaggaagccgcctagtgcagagaggttgtgaaaacagcagcaatgcaatgtggaaattgtagcgtttcctttcttccctcatgttctcatgtttgtgcatgtatattactgatttacaagactaacctttgttcgtatataaagttacaccgttgttgttttacatcttttgggaagccaggaaagcgtttggaaaacgtatcacctttcccagattctcggattctcgactctttgcaacagcacttgcttgcggaactcttcctggaatgcattcactcagcatccccaaccgtgcaacgtgtaacttgtgcttttgcaaaagaagttgatctgaaattcctctgtagaatttagcttatacaattcagagaatagcagtttcactgccaacttttagtgggtgagaaattttagtttaggtgtttgggatcggacctcagtttctgttgtttcttttatgtggtggtttctatacatgaatcatagccaaaaacttttttggaaactgttggttgagatagttggttcttttaccccacgaagacatcaagatacacttgtaaataaagctgatagcatatattcatacctgttgtacacttgggtgaaaagtatggcagtgggagactaagatgtattaacctacctgtgaatcatatgttgtaggaaaagctgttcccatgtctaacaggacttgaattcaaagcatgtcaagtggatagtagatctgtggcgatatgagagggatgcagtgcctttccccattcattcctgatggaattgttatactaggttaacatttgtaatttttttctagttgtaatgtgtatgtctggtaaataggtattatattttggccttacaataccgtaaca

SEQ ID NO: 28672 - DNA, 1027 bp, Homo sapiens
tttaaacaagaatgatttataaattatttttcataataaactacactgtttgtggaaactgaacattgcccttggagcaggcagaagtaatatccattaaatgcatagcaaaacatgaccctcagataatttttgttttcagtttctaatgccacagatttacatgaagcgattaaggacgggtggttagtgtatatttaattttgttatttggattcaggatgctcttatgaatcctctggtgaaagtcagaaagcagaattatgggtacaggttgattttcaaaaagactttgtcaccaggcaagcaggtacacgcttctgcaatggtttgaggaaggtattatcttttcagtttttacctcctttggactgacgtcctctgtgtcctttgtagttttccccctggctgtccctaattacaccatctcatctagcaatttgatgaaaacctcaataggtgttactatcaacaggattatatttcacagtggaatgtaattttccactgcagtcagtgatggaagaagagtggtcagtaagagaaaaccttttttgcaagagggatgtatttgaggatttattcacaagaacgaactatcattatgaagttttatttttgcaaggtacaattttttttttaaccatggtgacatctgttttcttagatgtggtagaaacattcaaaaagagaaatactctggtgttggaaggcttatttttcatcatcattttgctttgaagttgtttggtgaatgcattctgaatgagacagtttggctatttctagcacaattgagtttctgatttccctttggattcttaatatcttttgagggccagggagggatattaatagagattacttgaaataagctgtgagatttttctgcgtctagaatacaggcaacaaattgttgcacgatgacagcagcaggctgtgattgttccaggctgtccttggccagtcctatcttcaggaatccaagtaggagcaggaacaaccattcccttattccattcaggag

SEQ ID NO: 28673 - DNA, 1398 bp, Homo sapiens
atgagggagggttgtgcactgatgtccaattctagggtcctgtgagatatacagcaatcagtgaaaacccaaaaaccaggtgggctaagggagtcccagtctctgagggcaaatagctctatgcagtgggcaacctgagagctaaagtcacagcgggtccttggtaagccttgcagcaagtggaccatttctcatttagctgaaaccatccttctaggtgggaatatgtagtttctgcggtttcaatgtggcagtcttactgttaagactggggtgtcacctttggatgatgtaatgtaaatgtaaatctactttaggttggtggtatctccccttgtgtaaacagatcattaactgcaatgctgacaaaagtccctgggggtctggccgtcccctccttagccagtctgttggatctggagagtgatggtgtgaggaaaaaagactggatcaaacttctttatatatagtcacatgattctgtaagcttagtcttcaaggaaagaaaaaaaattaacctgaactagaattcttttgaaaatttacatcagaagctgttttgtaactataattgcttggccagatatgtaagatttgttttcattggctggctcaggatcaatattgtaaatactgtataatgagtttgttaattaaatgtattagattcacactgttacagatgaatgaaaacttttattaaaatatgattattttctgtttgtacaaatatttgatgaacatattccattatagtactctttttgtgagtctttttttcttttctatttagaaaagcaaaacaattcaaaatgctttgaaccagtaattacatgtgctttgaattgctgaaaatggttagttggttccctggaataagagtttattcagtcatcatcaagctgaccaggaatttaagagttctcagataatattccgttcatttccaagcagtgaatatagttccgtatagtaatggaaacaaatacccttttttcagttgtctgaaatatgaatgtatatttgattcatagagctttgctggaaggctaagtcagaaaattatagaaaaatttactcttttcgcttgagtaaacttacctaaaaaaaacaaaaacaactcacctaagatttgtgatagatgtagtgctatcatgactttcttttaataacaaaatattcggatcagcatgaaagaagtagaagtgacatccttccattctttatgtgagtagagacctttgagcagtgctcccaaccttagctgcacgtcagagtctctagggagctttgaaaaattcccatttccaggccactccaaacccattccaatctctggggctgggaatcgcctggaaagctccccaggtgattctaattgttagctgaggttgggaa

SEQ ID NO: 28674 - DNA, 1030 bp, Homo sapiens
tgaatggttccactcaaatgtcctgcaatttaggattgcagatttctgccttgaaatacctgtttctttgggacattccgtcctgatgatttttatttttgttggtttttatttttggggggaatgacatgtttgggtcttttatacatgaaaatttgtttgacaataatctcacaaaacatattttacatctgaacaaaatgcctttttgtttaccgtagcgtatacatttgttttgggatttttgtgtgtttgttgggaattttgtttttagccaggtcagtattgatgaggctgatcatttggctctttttttccttccagaagagttgcatcaacaaagttaattgtatttatgtatgtaaatagattttaagcttcattataaaatattgttaatgcctataactttttttcaatttttttgtgtgtgtttctaaggactttttcttaggtttgctaaatactgtagggaaaaaaatgcttctttctactttgtttattttagactttaaaatgagctacttcttattcacttttgtaaacagctaatagcatggttccaattttttttaagttcactttttttgttctaggggaaatgaatgtgcaaaaaaagaaaaagaactgttggttatttgtgttattctggatgtataaaaatcaatggaaaaaaataaactttcaaattgaaatgacggtataacacatctactgaaaaagcaacgggaaatgtggtcctatttaagccagcccccacctagggtctatttgtgtggcagttattgggtttggtcacaaaacatcctgaaaattcgtgcgtgggcttctttctccctggtacaaacgtatggaatgcttcttaaaggggaactgtcaagctggtgtcttcagccagatgacatgagagaatatcccagaaccctctctccaaggtgtttctagatagcacaggagagcaggcactgcactgtccacagtccacggtacacagtcgggtgggccgcctcccctctcctgggagcattcg

SEQ ID NO: 28675 - DNA, 1048 bp, Homo sapiens
agctgtcatggcaaatatttagccccatcaatgggaaaacacttccaaccaaaatacctggacctcctaagccccagatttcctactcttaaaaactctctgtgaatatcaggggatcccaactccccccacacttctgctgaatcaggggacaccaggccagccaaaaggacagaagagctacagctggatgggtgaactgcgcagactgatgggtttgaataagggatctgagacaagacacaaagatgaaaaccaacatttgaatatagcatttgaatctgagcatatctagaaggcctaagatattgtattatcaaaatgtgtgtaaaaaagatagtttgaccaaatggatggtcttttgtagtatgacgttgctcatgtgtacatagaagaaggatcacaggcagcattgcagctctttcttttggatgttctcctcacaagtgaaagaactattttcccccaacagctgagaccataacatcattccagtacttatgtccatgacaaatcacggactcactctggattccagtaacttggtaccatcaccacattaccatgtagtagttggaacctactggcagagcatgtccagacattgctgtaaaacagggtgacctttcgttcattttccagtggattcacctttttgtctcagggcaaatgaagcaagaggaataatgggcagagtcatttatttgtgtccagagtattgcatcagatgacaacaaactgactgtatttgcctaatgcttttcctcctgtcccagcttctccgtagactctataaatctaaatggaaaaatggagtaaagcttcctgttaactctcaaacatgtcacagctctccatgtcagcaaaaacaagtgacacagggcttgctcacagatggccccaaagagcgggcagggatgaaccctgtggaatgaggtgtggcctggctcgagaatgactagagtgtggccaaggaagggcagcctcagaaccactgtccgtttacaacgttttccctgcccacatgtctgcctggctttgaaaagat

SEQ ID NO: 28676 - DNA, 1114 bp, Homo sapiens
ccactgcactccagtgtgggcgacagagcgagacactgtctcaaaaaaaaaaaaaaaaaagtttccatctccctgcctacatcatccatctcttcttgcaccttgtcttctttttccactagagccattaacatgttaatcattgttaaattccctgtcttgtaattccaaaatctgtgtcacatctgggtctggttctgatgcttgctttatctcttcagactgtgtttttttcttgcctttcttgtaattttttattgaaagtttaacatgatttatcaggcaataggaacttagtaggcctttagcgtgagttattattctcatgtacccaagagttgggctgtatttaatgttttcagaaggtaccagagacttcaaattcctctagcgtccttgtttttgtctcccatgtcatctgtgagcttctctatgaactcctccttagtcagtatgttgaagctctttcagccataacccactgttataataatatattggatcctgtgagaatctggtggagttcctgaatgaaaaacccacaacagtgcacttcctcctgaaactgtagcccctaggagtgtcttattcgcacactagtctgtactgagcctctagcaatctgtcaaaatcaccattaagtgttctcatcagtttatgaattcagaaattctgctcccagcaagcagacctcactatgattctctatatttgcctgcttctcaaaatttggggttgcagtttgccctgcaacttcagctttccattggacttaagaaaagtcatggattttcagtttgttcagcattttttcttataaaaacaagagtgatgactctcaagctctttaaattttggaactgaaactagaagcaacaggacattctgacatgaattatttaaaagggtcattgttgactctagagacattttaatattgctgcatcaaaagataaaagcattctcctttcttcttgtgtgatatatgccgtgtacacctctgagctcaccactaacctcaactctaccttatccctaacttcccatttcaaatggaagggaatggggatcaaggagtagaaggcctgttttacccattattgatgattaaaaa

SEQ ID NO: 28677 - DNA, 1045 bp, Homo sapiens
tgactgagaaggtgggggcagggcaggagaagggggaagaagggagaatggatcaaccccaggccggggaaagagatgaatgaaggtccacgccagagtgacatgctctaagtaggggaaatcttcctaactagagttcccatgactttggcaacatttgaaaaaaaaaaaaaaaaaaaaagacatccttaaacccacaaagtactcaattgtccaagccccattatggccaacttcccaaagctggctggtcagagaccttggtgttaattcctcagccaactaaaaaaagatggtgtaagttctgttgacttaattgttggagtgtttctgagtggggccgcctccctcctctgcctcctcacagtattatgggctattctgcattacctgccctacctatcttcataatctagccgcaaacagctttggttgaccacaccacttccctattgaaagttaatactgtttgactcattctgtgttactaacctgaagccaaagaaaacaaggcagagaataactggcttgtgtggagtttggaaagctcttggaggccctgctttcaaaatcctatacagtagctttactatatctctccgctgcagctgctgagaaaatgaaggaagcagaagtggttaaaaaaaaaagttgggggtggggaagagactgggaagggagtggggcggggtccccctccggctgggaaaagacagggtaatctgcggcagtttatgagggctgtctccctgagctgaggtcttgctttcacacaccagagtgttcacacagaagagggactgttgaaggagttaaaaggagaggaaagttcaaaacagttgttgaaaaggcagctctcctattgcctgcgtaacacagaggagctgggaggctggtctcaccaggccaggcagccataggcagagactcaaggtagacaggccagggggaagttgtgtacctttcgaatcgggaaaggattgaggagggggaatgttgccggacagaaggctgtcctgggcgtccatccttgccctccatccct

SEQ ID NO: 28678 - DNA, 1044 bp, Homo sapiens
agatgccgggaagtacaaacctggagggaaggacaggcctctgcagctgcccccctcctcacaggcaaggatgaccatgtctagagctcacgggattccttttgggtggaggcagcgttgcctctgctctctgggcagcccgtccttgaggaccaggctgttaacgtagagtcttgtgatgtggtctgtttaagggtggggcttctagcatccatacatcaggtgacatctgggatactggcttagagggcagctagggagtaaggtaaaatgtgcagctttcttttttctttttttttttcttttttttttgaggtgaaatctcactctgttgcccatgctggagtgcagtggtgcgatcttggctcactgcaacctccgccttccaggttctagcgagtctcctgcctcagcctcctgagtagttgggattataggcatccaccaccatgcccggctaattttttaatttttttcatagagatggtaaggtggagccattacttacaaactgtagagtgcttcctgaggcactagctttctttctgtctgatttttgtttttagagggagttatagttaaaataggttgatcaaagggcctaatcttcactcagctactttttaaagtacttggttgagatcatgtcatatgagtataattcttctatgactttgagtgtgtatagcaaacctattatatatgtgaacatgagaaataggatctttatatatggagaatgtgcttcaagtgaagaagagaaatgcatgaaaagtacctatgggccaggcgcagtggctcccgcctgtaatcccagcactttgggaggccaatgcgggcggctcacttgaggtcaggagttggagaccagcctggccaacacaggaaaaccccatctctaccagaaaatacaaaaatcggcctggtgtggtggtacacgcctgtagtcccagctcctcaggaggctgaggcaggagaatcggttgaacccaggaggcggaagttgcagtgagccgagatggtgccactgtactccagcctggg

SEQ ID NO: 28679 - DNA, 1928 bp, Homo sapiens
tcttttccttgttcactggaaaactgagaggcaaatctgaggtgcatgcaaacgtacctagtgttgggacatgcggtttcgcactggcccattcctgcagtgtcttgtcttttctccttttgtcttcctttgtcttgttttctgccttcattcatcttaccttttattttgtgtgtacttatgttagcttctttaaatccttctggcaacaaggtatgagtccttttcggacacttcagcctaaaattaaatacaacaactggctgtttcccagaggtcttccttaggcctcttttcttgcatttgagttaccgcttactgagtgggtgtggagaaagcacgtgtggggctctggctggggcgtttcagttctttctgcctcactagctctgtcactcagggtgagtgcttcaactttgctgagtgtttctttgagtctagcatgcggattatcgtgctttctttgctaggtaactgtgaagattaaattaggtaatggttattcatgaacaccatgcctgacacacagtcatttcctttttctttactgagaactcatttcacctgtcatctctgaaactgaagccttctgagactattccgggctgtgtcttgccagctgttctgaatctaatgggctcctgtttacttccacagcagccatctttcctccccttcgaagccacttccacttccagattctcggtgttcagaatccggtcctccgtcgtctttctcccggtagttcttctttctagtgtctaggtctggcgctgccacctctgctccgcatcctgctgtggctcccttgcacctgccacagcagaccttccagagtgggccctgcctgctgactgagccccgtttcctgcgaacctttgtagtagagcactggaatgacctgcatggggatagaggcttgctgtagattcctccttccagacatggagcatttggctttgtgaattgtgcccagtttgctactattttggacagacggtcacttgaaggaaaacttctgcctttgctccttagtcctctgcctttcggctgtggactcgccctcctgttctgtcactggcttcgttcccatggccgggaacgggacttcattcactcatgggtcagacacaggtttgtgatgataataacattcagcccttgcctgcagagagtacccaccccccgtgcttttattctcagctcctcctcctcctctctcattacctggtcggcttccacatgggagctgcaagtggcatggaggtttggggaatctgcttatggaatgagttgtattatgctcctggagaaataggagaaggagtttatgtgttgcactgaaacaaaaaaatctgttttttgagagcctgctaaaattgtgtcatggaacattttggttctagtacatgctggaaaaaagtacttcttggggaggtaatttcagatacgaatgagaagacaagtttggacatagcccagaaaatatgctattatttcatagaagagactaatgctgtgcttcaaaaggtatgtttctagaatatgacatccttaaagaagtgtcttgattcagcagttccttgttttgtacatgttattagggatagtgcatttcataagagcattgtttagtgccttaaataaataaatgttgatgtaatctctatttttgttttctttgagatggagtttcactcttgttgcccaggctggagtgcaatggcacgatcttggctcactgcaacctccacctcccaggttcaagcgatcctcctgcctcagcctcccgggtagctgggattacaggcacccgccaccatgcccagctaatgtttgtatttttagtaaagacggggtttcaccatgttggccagggtggtcttgaactcctgacctcaagtgatccacccgcctcagcctcccaa

SEQ ID NO: 28680 - DNA, 1025 bp, Homo sapiens
caagctctgcctcccgggttcacgccattctcctgcctcagccacccaagtagctggaactacaagtgcctgcgaccacgcccagctaattttttgtatttttagtagagatggggtttcaccgtgttagccaggatggtctcgatctcctgacctcgtgatccacctgccttggcctcctaaagtgctgggattacaggcgtgaggcactgcgcccggccagctgtttactctttagaaaaaaaatggggagagaatttcctgttacttaggctttcttcttaagtatttgcagactgattttctcttgtcctttggccgaggttgcaggttacatgacatttagcaacctctttaaaaaggtgtttggctcttcagtcatttgctatgaggtcatgaaatactgaaatgatggatttgtcattatttgtttttctacttcagaaatttgacatttggatgggatggaccatcttggaggctactcacagcccttaagttgttatgtctggaagctgagaaattgtaagtttcacatgtgttggtcttaagctgtagcaacaggctagatataactttggagggttggtttgtttgtttttggcttgcattcagatacccagccagggaggaaaaagggatgtcatacattggagttgctttctcattatgtaacttgcccatgtagcgaatgtttcatttctaagttttaaccgttttggaattctggttttagactcagcatacatagttttgataatctttttgtttctactcatattttccttctggtgacctgaaatcctttaaaaagtgtgggcattggcactgttcagaggaaagtctctgagtaggtaggttttgcccaggacaagtagagctagagtccctaacgtcggtcctgccctgggggagatccagaaacctggctgaagagctggacttttccatgggggaggcaggtcggggagcccccggtgtgggtgtgcatcctggccaggctccctcatgttcctgcctgctgt

SEQ ID NO: 28681 - DNA, 1030 bp, Homo sapiens
gcctgtggtgcggagccttccttccttctccctcgttcctccttccgggactgaagcttagcttgctttcctgccccgtcccttttaaactggtgttgtagctgtcacagcatttctcttcgctctgatcgctgactgacttgctctttttcccactgagctctgaaatctttgagaatggggtctttgtcttgttcctctttgtcacctcagtgctcatggcagggcctggcacatagtaggtgttcagtaaatgtttattgaatggatgggtatttgtggggaaagggttctgggaaataatgaaagaaacctgatttgggaggtggtcacagatcgcctcctccccagcgctttccccaggtggctcatttaggaaatgagtgtatttgcagggcatgcaggggtagaggcctggcttggagagcggaagagagtccatcagttggctcacctgtaaccactttggggtgtgttgtggagggacatggctgggatctgtgtcctggccgtcgccttcatctgacattccactggagaagagcagccatgccttgtgagcccacgtgctaagctttcgtgctctctacgtgagatcagagcttagggaggttcccgctctgctttcttagcccaggaacaagggctgtctgcttgttacttttgtagaaagaagtatctttaataatcgggagcaaaggagcctgggattaggtgagtgtttctgtggttgatgttgacgaaataatatcaggagtgtgtagtgtgataggatgctagacatggggactccgtcagcagtgatttatttttattgggacttttggtgcatttatgtgccaaaccaatgagtttatagtttactgtaggaagaccacagcacgaactacagcctgtgggcgtgtggcccaagagccctgagctaagaatggtttttacactttgaaaggattgtgaaaatacaacaacttgtgacagagaccacatagtgctggcaaagctgaacgtatttactctctagctttttaca

SEQ ID NO: 28682 - DNA, 1035 bp, Homo sapiens
aggaggctgatggggaagaactgttttctggcacacgttctgctgggcctttgttttggggcatctttgaggacagagtgagagcgacccgcagtggaagggatttctaaatacaagggttgaaagagtataccgtttttttctttcttttttgagacaaggtcttgctgtgttgcctaggctgaagtgcagtggcgtgatcttggctccctgcaacctccaccttccgggttcaagcagttctcatgcctcagcctcccaaatagctgggattacaggtgtgcgccaccatgccctgctaattttgtatttttagtagagatggggtttctccatgttggtcaggctggtctcaaactcctggcctcaagtgatccacccactttggcttcccaaagtgctgggatataggcaaacggccactgtgcctggcgtatactgtctcttaaccattaggtaagtgctggtcttttttccccctggcatgtttttggaagagagtgaataggtcttttaggcctgtgtagagacaatgatgctgtcattgttaacattttctgaatcattctgaaattttgagtagaatgtatggcagtataggaatctggatgtcgaaggattgatgaaaactttctaaatacattcaggcaacatgagatctttttatcggcaattgtgcaagtaaaaatactgtgatacataatttgtaatagagcaggtaaacttaggaataaaagctttagaactgcaacaactgtatatgagcatattcagttttggtttaggttggtgccctccaatagagcttttagcaatgacagatgttttttatgcattgtccagtatggtggccactagctctgaatggctattgtgcaattaaaacatagcttatcttaccaagggattgaattttaaatattcaattctaaataattaaaggttaaatttaaatagctctgtgtacccagtgattactatatcggatggtgcaggtctcagttctttccaccattttttccccaccatatttta

SEQ ID NO: 28683 - DNA, 1029 bp, Homo sapiens
caaaataaataaagtgttttacatagtaaggaatatgtacgtatttccaagtattaagaagccaagtgtttttttttttgacgtattattgacaaatgtattcagcgccatacacaagagaaatattattactccaaagaacgaaagttaacaaaactccaaagcaaaaacccttttaatggaggtgagaaataaatttaatgtaacaacagctagattgtttttaggatttttcttttcttttgtggaaacttcttgacttgacttttcatctgaacagtttttccccccaagattttaatcttatatgtcatacttaagtttaggaacagcttgaataattagcattctagataacacaagggccatgattcactaaaattccaagctactgtaattttatggcatttatttgcaaatgttctttgtatctcattttatctgtagcagtccccactagtctaccttaaccatcttatagctctggtaaattaaaacttacgtagactttatacaagatccattggccgtattaaacctcccccactcttagggcttagggcggaagggacgaaggcagggctgataggacttttaaaaggataaaaggagtgggggcaagggaggcggaaaatacaggctcttgcagataccctccgcgctgccctccacacccagcccactgctctacaaaggtatgaatggaatggcttttctagaaaagggcttccaagaacataaaggaattcctttccctgggaggccccgtggagggctgagccagccttgaattgggcttatttctcaaatccatttgatctggcatttttgtcaacatggtacatgttagggcctacgatgatttttttttcttttttgtaaaagagaggcatatgtattaaaatgcttcctcttcccctgccggagcctcacagaagtcaagaaacgctatccccagcttaaatgtgcagactcttcaagatggaggtcacaatattaggttgccacagtaacagctctgctgacttc

SEQ ID NO: 28684 - DNA, 2141 bp, Homo sapiens
tcttcttggacccagtggcatacagcacactcgatctcaatgagttattcatggcgtccaagagaaatacttctgagctgtatttcatgtgagatggagtgggcctggcacatgggcggcgaggccagcctgctcgccgaaagcgtcctgtgcctgttccagcagccgtgtgggaagacagctatctcagcagctgagcccctgccctgtgtgtcctgaggtctttttaacacgtgaagggtcttctgggctccttctgtcccaactgaggcctgcatgcgccgtcagacggagctctgtgagccatgggtgcacagtggacacagtgttgtttctctctgcttttaagtatttttcttctcttaccgagttccagccatttgtaaagttccacccagtttctgtagctgggaggggaggatgataagcttctcagcgtggtctttctctagcgctcctttgtcctcagcaggaccactgtggaagcctggagacttattattagaaactttatgttattacaaaatgccatcccttccgcatccctgtcctggctgctcccctccttccaagaaagaaaagaaaagaaaaaaatcaaagaggccccctcatctgcactgacaaagtggccaaacctgatctttgctctgttgatgaatcctacctcgaaccgcgcctgcgcagcacctgatcggcaattcctgggcacgtagagaggaactgtcctaccacggggttaaaatagggagagcgcagcttgcaggaaattctcagagtgggagtttttgtgtgatttttttttctttcctttttttgaaaaaaagttaatatcgactcatttggtggggatgtaatgcccttttctacctatcccccaaaggaaagtttgtattcttttcaatgaaaccattttaaaagcaggactgaagccgaaaacgatgcagagttctcctgcgtcctcagaaggtgtggatttatttaccatagttaaatcataattagttctcaggggatagtgtgtcttttaaacggctttattgccaccatattggttttctgaataatcagaaacttctgttatgattgtgttctagtgttcaaacagaagtgcaccctaagtaggaacaaatgtcaggaattgctagttgtcacttgaagaaggtacatacattgggggtggggggagaaagaacttggcaggatattctgatgaaatagaatctaaccaagtctttaataaatggagtaacggctcaggcaggtacacacgccccctcgcatgctctttttttgatgttaaaaggtgctttcttcatctctttcattctcacgacccaggttagaaaggagggtgatatccctcatggctccacattcctgaaggccagtggaaccaaagttggcccttccatggccacacacccccagatgcatgcaaaccctgtccctcctgtgtgagccattggtgccgcgggcgtgtccatgtctggcctaaccggtctttccccctcttcggcaggctgatgtttcagacaccgcaggaaatgggcttaatagtgatcgcggcccggcagaccgagggcaaaggtcagtcatcttttgtgatcattgctgttacttctgttttctaaactctgcaactcttgtggcccaggagcccattgaatgtgtgtgctgatcatctgggggactcaagttagtagattctgttttcataaccgcctggaatggaggaagaggaagagggaagcagtgatcagaaggttcacccttagtagaactaaagcattctgtcaaatcataatgcttatgaatcactggacatttgcctgtgatggcaaatgtgacctacatgaattccgggctttccaatttggggatcgtcactgtgctctagagacgtttattttcctgaaggttctccataaggagccttctgtgtctgtactgagcgtcatgtgggaggccttttgcatgccagttctcaccccagctggccctgggctgggcttgcatgtacatggtgggctctgcatcagtgcccattcacacagtgaccacagagaagcagagcgctgcccagggctccaccacctgcagatcccggagacgagagcccacatcctcccagacccatctgg

SEQ ID NO: 28685 - DNA, 1016 bp, Homo sapiens
gccagattggaaggttttcagacatagcacaaaatactgtctttggatggtacagccatgagttatgtcagggcagtgttaagagagatcgtgataggctgggagctgtggctcacccctgtaatcccagcactttgagaggccgaggcgggtggatcacttgaggtcaggagtttgagatacgcctggccaacatggtaaaaccccgtctctactaaaaatacaaaaattagccgggtgtggttgtgtgcacctatagtcccagctacttgggaggctgaggctggagaattgcttgaacctgggaggtggaggttgcagtgagccgagatcactccactgtactctagcctgggcaatagagtgagactccattgcaggaaaaaaaaaaaaagatcatgataaaaagtcactttaataaacttgtggatttaggtctgattatttttgtttctgtaggtgctgcattgcttgtctctcctgaatttttatttctggaagttattattcataaacatgggtcccccacatatccctcagtagaagagtcaaagggagagctaacattgaaagtagtttttcttccttctttgttagtggccccgataatgtttggtagagtctgtgggaagactggaaggctcagatggtgcatgggatcatttcctggtttggggaagtctcccaacgccctggattatccgagtcctggttcctcacagctctcgtgggccctgcttatacatctaaaacagattgctgtaaaatgcttaaatagtaaaaagaaatatgcttttgggaattagagaatctaataaaatcattaaattgatcagactaatagatcatttggactgacctagggctactgaaattaccaaatgtctgttctgcatctattcagaaaatcatgtgattttcctcattttgcccacccatatgttatgtattatgttgatacatttttctgatgttaaaccatccttgcatttctaggataaacaatatctgattat

SEQ ID NO: 28686 - DNA, 1055 bp, Homo sapiens
cttggaggagagctgcctgactagccctggacttgggccactgcagttggacttgtttcagctaatgttagcctgcctcgatgaatcacaattttgaaagagaatattatttgctactgttagtgtataaaatagttgtattcttgtataccttatgtcatatacattatgaatattgttattaaagaatattatatatatcatattgctgctaaaattgcaaatgaaaataagatcaatgctgaatgcagtggctcacacctgtagtcccaatactttgggaggccaaggcatgaggattgcttgagaccaggagtttgagaccagcttgggcaacatagttagataactgtctctataaaagaaattaaaaaatttaaaaaaaaaaaagaaaggaaatcaatctgtttgcaatttttataaatagaacataactactcacagtgaagcaaattaatatctgaagttttgctaaatttttgtgcatcccttgactaggaaggaaagttaatagactctctgagatccattcatgctagaaacattaataataataaaaagatgaactgccactgattaagtacttactgtgcaccagacatgctatgccaaaagctttgtagacaggatgggcatgtgccttgcaatgagatggcagatgtggccttgatctatgtatttgttctttctttcaaattatttttattcctgttaaaattgaactatgagacagatgcctgtgtttttttccttttcttgattgtcataacctctccgattgttataatagaatgtggcacagatgatttgggctggagagctaattatgcatgataacctgatttctaaaatatcacaggatagaggcaactactaaaatcaatttctagcggtcagttgcaggttgaaaagttacttgcgtctctattgtgaactgggtgtgttttggctggcacgaatgacaagggtaatcattgagggggcattgacggcttaccagtgattgaccagtctggtctttaattttcctacataaatatgttcagctgcatatt

SEQ ID NO: 28687 - DNA, 1038 bp, Homo sapiens
cgtctagtgatggacgcctctatgctgtccctgtggctagtggtctgttcacaccattcctggctacgttaggtgtccccagtgcagagaattaagtcatagtaaaagtatactctggattttaccaagaggtcacggagagcccctcttcccttggcagtcagcggcattcttattacacttcatttatctacttgggaggactcgggaggaccagctgggcccctgtctgcactcatcaagagttaatttctgagcgaggtgcagtggtcatgaacaagtgcagaaggtaccctggtggccctgccagacaagaggggcccttaattagcagccacgttcaatcaggctgcttaacctgccgcagagctggggaggtcatgtccttcctgccgccctgcctgtaaacacagcgcccggagccgggcccgggactccgtgcggcctgggaggaggaaggtacctggaagcaaggaagacagtgcagacccgaacctgacccacttccaggggatacctggactctgctgttactcttgatggagtagtgagggttaaccgagagagaaatttttttttctttaaaatttggaggcatcttttgtccttgccaacttcatatttcccaagctggacatcttactggcttgctttctttgctattaaaaaaagtattacttatgtcgtcatgtttctggcatcgcctagggctagccatgcactgagacctcttgctgtagtggaaagtcggaatccttcaccgattttgtagccttgcttaatctctccacaatgtcctttgctcagatacaaaacaaggatgattgtactggccctgccacctcatggagctgttaagagggaaccatggagagacagtttgtcaactgtcaaaccctgtgtcaaatatcagctgatagaattggacgccaggattggagtgcttttacttggctcattcattataggtagccaaggtccatttttattttaacagtcacatatagaataccaaaaacctgatgttgttggtagatg

SEQ ID NO: 28688 - DNA, 1443 bp, Homo sapiens
tttttaaaatacaatgatatagtcacccatgtaacatagaaaaatgcatcaaagaaaatataccaaaatgtcttttggtaaagtcatgagtgacttaatgccttagtcttacttttttttttttttattttctagattttctacaatgaacatgagttatcacaaaacttactttttagctattgccagagtcctaaagtggcacggtagtgtttcattttatacacttcactaagtttttctaatagtttttagctgattcttttagattttctaagtgaacagttgtgcaatgtgcccataatataacaattcagttatatattgagtcatgagacctgttaatgtctaactgtctgctttaatgaaggggagtgtccctgagaacattcaggcactgatcagtgcccagaccacagggactcccacctctggatgcgtccagccggatccacagaacagggtcgtggtgaggatgaaacgcggtgatgaacataaagtgccagactctgtacttgaccatcacatgctgtcactcagtgttagcggttattattgtgaggacgaacctctggcagcacatgtttctcagggcaggggacagagctgaacagtggcagcagccacaccaggcagtgggcggatcatcagaaaggatgagttattaacagtgggccccttagggtggtcagttctgagcagctgtgcctaagcatgaattctatctggcctgctttcctgattttaaaatccacacccgtatggagatgctctcgcttttgtgggccctgaatgaatgatgaacagtaataatgctgacatgtggcctagcatgtggcctccctccgtagcttctatcatttcaggaggctcgccttgggagaatcgggctccaggtttattccatgaataaagagtgtctctgtggtccacagcctttgttggtcctggtggtctctgtcctcaggttttcatgctcttgcgtaagcctctccccttgcaggtgggtcggacctactggatcacttctaacaaatcaaatatggcaaaagtaatgggatggcaactccttttttgcacttctgggtgacttctgtcttgcttgcttttcctcttctccctacccccagctctgagggaagcaagctgacgtgctatgagtagccccatggcaaaagattagcagctactggggcaccgaggcctgtggcagactacagatgaggttgggaagggacaaagtggaggcggagccacccccccaggcaagccttgagatgaccacagtgcccgctgacaccttgagtgcagccttgtgagagaccctgagctaaaggcatcctgctgagccaacccagactccaggcacacggaaatcgtgggtttcttaagttgtctcgggctgcttagttttgcgttcatttgttacacagcaatagataa

SEQ ID NO: 28689 - DNA, 1050 bp, Homo sapiens
gcctggtccatgtagctctaatgcagagaaatacttatctaggtaatgcaaaatacaaaacccagttgtgtctaatttacacaggtgatactgacactgtacatctggtggtagtaaacttataaaataaattatatagcacatgccttgccctgaagcacatgtgtacacacacacacacacacacacacacacacacacacaccctgcacgtttgaagctggtaaatgggctgttgttagtctcctcgtagactaagttcacacatacacgtatttgtgaatgcagagtacatggaaggattcctgagtcgtcttgcatccttgaaggaggttaacaagttcgtgtttctagtttgcaaggaatgatcacttcatgcatagtgaagagagattcgtattatttgtattattgaactgactgttccttataatgaaaggctaagagaggggtgtcccaggcaagtgtagagaggaaagaagatggtgtgtcggcaaactgcgagtaattccatatttcacagatgactgtcacctcttagactatccattgattcagtaaatatttgcctggttctcattctcttccaggcattgtgcatcattatccaaataagcaggaaatgtacttttgattgggttcagcttaatgtattactgtttgatcagttctaaaatacacattttaacacttctgaaattgggatgtatactaccatcagcggggtcttagattcatttaaaaaggctattagtcattgttgtatttggcggtgctttaacacacacgagaagtccaggctcacaggtcaagaaaacccgagtggttatgccctaatcaatataacaggtaattttagtgagtgatacatttaagttttactttgttgtttttatttcttttaaccctactctgaattaaatgctgtatttattggtaggttttaaaaattagttatcttgctttaaaaatcactgtcctgctctagctagatcttgtcttgttcttgttcttcccttttctgggaatttttccatgcatggataattg

SEQ ID NO: 28690 - DNA, 2726 bp, Homo sapiens
tcccgttaccacaggactggatgggaaaaggctgatgttactctgtgtgttatcttgcgagggctgctgggacaaagtaccacagcctggggtagcttcaacaacagacattcatttctcccagctctgaaggccagaagtccaggataaggtgtcagcagggctggctccttctgaggccgtgagagaggctctgttccgggcccctctctctggcttgtagaggctgtcgtctccctgtgtgttcctgtcacctctcctgtgtgtgtgtctgtgttcaaatgtcctcttcttacaaggacacgagtcatactggattaggacccacctgaattacctcatgttaacttaatcgcctctggaaagaccctgtctctaaatacagttccattttgaggtgctgaggttgaggacttcaatatctgaatttttagggggacacagttcagcctctaaccctgtgcatgtgcagccgggttgtactacaggagagggtccctaaaccatcagacgtgagctcatatagtgtagctgcgtgcctgcccctccttccctctgcgggagagggccggggagaggggctggcttcactctggaacttaagtaagtcctctctgggaagggaatagagtggggagatctctcaggttttttagtatcttgaaataaaagcaaattacatgagggaggagacagggtcttttttattttgatactagaaacatcttccattggatggcaccgtgaacccattgagaaggaaatgtaatcctaacaaactaggattataaatgtctgcatagttacaaatatctgtatagtatattaatattcagtaatatctagtaatatgacaatatttatagtaatacctgtatattatgcattctcttgtaataagtatcatctgtatagttaatactgtaaattatgtttatatgtcatgacacacaaaattggaatgtgtcaacttaatgaatctggagacaaatcatgaaagataacagttgctactgaacagagtgtgaatgttactacatttgacaaggtaaagggtgacagaggtgggcggggaagcagaggaggggaaagggactgaaaagctgagtgtggttgtgcttctcatacaaactgagcagcaagacatacatctcataggtaaaacagtgaagtacgctatttggagtttcacaggaatccagtagaactgacaacagatgcgtaagtgagcaggaggagagatggatgatgtgtgagctagatcctaacagcaagaatccaaagacaatgtgtaaagttgccaaaccatgaaaaccagtaaggggccgttggaaccagttaaataaaacaagctgcatttcagaaagcatttctcctgttagtttaggaacttggctagatcccaagggactttttaatcctgcattttccttgattagtagtagcatagtctaatcattgtgcatttgtctcccatgggtggttcaaaaattttaaaatggatgttttatttattattttctagaaactaggttttgcagcaatatttttattgcattttattttccagtaagtgagatcaaagtagtgatcctgaaaattatgcttatggtggacttaagtaaaaaggatttatgcaatcaaatttacagattgtttttttattgatcacaacttttatgctagggatcaattttaatctacttggcatctttaattgcttatccacttaaaaaattaactctggtgaatggaagaaccccttctaatgtgaattgtttttgctgttagtgaaaatatggtattatgtatctattgcagttagagggaaaagaagaattacttcataggctattcttcttttggaaaaaaggaagaataaaggaaaaaaagagttttgttcagcaccttattaacgtttccagggtgttgatcctgccgactccagtgaagtataaccatttattcactcattcattcattcattcattcattcattcattcattccacacacttctgaatgccatcagtgaaccaagtactgaactctagagttatgagactaaatttttttaaataaattatggcctattagcaaagctcagctcccttgttgatattccctatactggttccctgctgttattcagttacttctgaacccgctgaatcagacctgaacttgcacacccaacaacattaaatatccttctcctggttctcagaacatgaaacaactgtagaaaaatactcgccactgaggccaggtatggtggctcacacctgtaatcccagcactttggggggccaaggcaggcagatcacgaggtcaggagatcaagaccatcctggctaacacggtgaaaccccatctctactaaagatacaaaaaattagctgggtgtggtggcgggagcctgtagtcccagctacttgggaggctgaggcaggagaatggtgtgaacccgggaggtggagcttgcagtgagccaagatcacgccactgcactccagcctggatgacccagtgagactctgtctcaaaaaaaaaaaaaagaaagaaagaaaaagaaaaatacttaccactgagtttgggggtacgaaaaggatagggggtataatttaaagaaaatccctaaaggtcaccaaggtttcttcaatgagcacactcaagttgtaagtgagaagtattgcccccggagaactgagtttccttctgctgtag

SEQ ID NO: 28691 - DNA, 1042 bp, Homo sapiens
gttcatgtcctttgcccactttttgatggggttgtttgtttttttcttgtaaatttgtttgagttcattgtagattctggatattagccctttgtcagatgagtaggttgcgaaaattttctcccattttgtgggttgcctgttcactctgatggtagtttcttttgctgtgcagggaattgaacaatgagaacacatggacacaggaagggaaacatcatactctggggactgttgtggggtggggggaggggggagggatagcattgggagatatacctaatgctagatgacgagttagtgggtgcagcgcaccagcatgtcacatgtatacatatgtaactaacctgcacattgtgcacatgtaccctaaaacttaaagtataataaaaaaaaattccctcaggattttcactgtcctggtaagcaaataatcatcctgttgcagccccagggtaagtgtagctcttgctcctgtcttgcagtgggagaggtgactgtggaaggacatcggcccttaccagtatggagctgtgtaagtggggccgtgttccagaatagttttgtcacagtgactaggagattttctcgggggacttttgtgggactctgctacgaatacaagcaaaccgtaataagaatgaaggttcggacgtggcactggggataggagtggggagagaccatgagcagatttgcatgacattcttgggtaaggtgatgtgttagttgtgggcagggtggtggtggggtgtagaaggccactctaagccaggggactcctggtttgattttaaaaatgggaatcaggtctttgtgggtattaagaacacacaaaagggcccatggaaagagcatcacctctgacatgcccgaaggaatgttctcatgtctaaaattgtctaggtcctcctcattgctcacaaaacatgacatcttcacagaggctaattagactactccatggcatgcctactggggacagctgatccagggtgtgtggcagcatcttactcctgtgacagctgattctgccctggat

SEQ ID NO: 28692 - DNA, 1045 bp, Homo sapiens
caggtcgtcttgcccatctctcaggtttctgtctgaagctttataataaatgatggtaatttgattacaaaagagaaagataccatcattttatattgtggctgtggtggcgtttctaacatctctatttacaaaaggagagattttaaaattagtttaagctggatggctgaagcagtgcagcaaatgaattagattttttgtgtttttgaaaaggctacaaaaattgtgagagctgttcctggaatggccttttgaaaatccccttgcatcctggaagaaggatgagcggatggctctaaatctggtattgttggaccaatcgagccaagacggggtttgttgacaggaatgttgctgaagaaccacatggagttgagctgtttgccttcagatttagcagttgtttagacaagcaggactctttattcttgctcagacctgagtgagctgagcctcaaggttgaaaagtaaaaaggagatgtaagggaaaaacagttctttctcaacctagatttctgtgcggtatattgactttccttcagaattttctttgttctgaaaactatttcttcccattctgctgcctcaaggattcttcttttagaatttttttgtagtttcattatccactctttgtttcgccaaaaacaaagcaaataataacaacaacaatatcaacaacagcacaaaaactggatatacctccccccgaaaataaacaaatagaaacattcaggggaactgccctgcctggttggaaacaccagtctaggccccttggaaatgtcttggtggaggtcccaaaggtctcaggaggacagaggacctcgacatttattgagtgcctaatgtataggaactttaggaaaccaacatttattgagtgcctactgtgtattttctttaggaaaccaacatttattgactgccgctaggtatcaactttaggaagcaacatttattatgtgcctactatgtaccaactttacaaagccaacatttactgagtgcccaccacacatcaactttaggaaactaaatt

SEQ ID NO: 28693 - DNA, 1033 bp, Homo sapiens
tcctcagagcatctctgcagcaggaacagtcatgggtgccacagggtggcactttgacttataatctgtcgtcttaaaaaaatctctttaaattacttagacttacttaaatttaagcctagagcacccggcattcctacatggtctcccatgcaagtactagccaggcccaaccccgcttagcgtccgtgatcggacaagcagggtgcctgcgggctcttacggccatagactactgtttttctacctttttcctaatgtttaaaaatatatgtttctgaaatgtggaggactcttaagctttttaaaatttttattttttatttttgtgggtacacagtatgtgtatattttatggggtatatgggatattttgatacagacatgcaatgtgtaataatcacctcagggtaaatggggtgtccatcacctcaagcatttatcctttgtgttacaaacaatccaattatattcttttagttatttaaaaatgtacaattaaaatattttttactgtagtcaccctgttgtgctagcaaatattaggttttttccattctttctaactactattttgtccccattaaccatccccacctacctccctgccccccactacccttcccagcctctgatgaccatccatcaacatgagttcagtgttttaatttttagctcccacacataaataaggacatacaatgtttgtctttcgatgtctggcttatttcactgagcataatgacctccagttccgtccatgttgttgcaaatgacaatatcgcattcttttttgtggctggatagtgctccattgtgtatctgcagcacgttttctttgtccagtcatctgttgatggacgcttaggttgctcccaggtcttggctactgtgaataggctgcaataaacatgggagtgcagatagctcttcagtatcctggtttccattcttttgggtatatgcctaggattgggattgctggattgtatggtagctctattgaaatgtagaaggctcttaacctaatatc

SEQ ID NO: 28694 - DNA, 1035 bp, Homo sapiens
aagcaatcctgatacgggttttcaaacagacctccatattagagaagacttttaaacatgttgtttgacctattttggtagaggcatttattgctttgcatggcgccatgtaaactgaaatttgtgcatatcagaacagtgtcctcactttacactgtttgcaatggacatgcgtgactttcagttaatgtgggaccatgcaaagtgagaactgcctgcattagcaaattactaatttaaggtaatcaaagtaagatgctgcctggagaaattaccttgtatgtatgtctgtgtgtgtgtgtggttttacgtgctagtaaatcttagttcctttgctctggttttctgatttcagaatacattagctgtttcatgcactggctcatacccgcctcataacttgaggtgagggaacttgatccctagatgtggttttctcttaactaggtgattattggtggtgggtgctatttggacattcatttttttttccttccttctatttttctttttgttgctggggggactgtgttaccttacctgatgatatacttcctagaacagtttatgtttttatgctttcttagtgtgttaattgggtctggagggtttcaaaggactactattggcggtggtgtgtgttatttatgtcttttcgacccatagaagccgtggtatttatttgcaatctgagatagattctattttggaaagtctcacctatgttcattgccatttgtatgtcctttaaaatgaaagccttccgcagtctaaatagcagaagtgttctgatacttcatagctgttttaaccctgtaggggtcccacctagatgttctggcctacctttttcccctccagttctcttccatgtgagcaagtctggagtagcgcttttcaaccaaatttgaccaatactttaaaaaagctttttgaaatataaaccacatcccatacaattcaaccacttaaagcatacaattaattcggtggtttttaaaattatattctcacttgtatggtcatcaccacact

SEQ ID NO: 28695 - DNA, 1060 bp, Homo sapiens
gctgtgggtttgagacagacttttgaaactaaaagatgaaaatcttccatcttcctacctctgcaaaactcagtccacttacgcaaaagaacaagactacagttgtcctgctcccctctcctcttgtggaccctgtgggggtcccagtggagtttgcagagtggggagagctgagggtgcaaggtcagactcagaacaatggattcttcagcttagaaaccatttgtgagaagccagggaggttctaggagaaccaagtcaggaaaggaagaatgccaggacaaaagacaaaaaactccaagctggccaggcatggtggctcacgcctgtaatcccagcactttgggaggccaagcggggcagatcacgaggtcaggagtttgagaccagcctgaccaacatggtgaaaccccgtctctactaaaaatacaacaattagctgggcttggtggcacacgcctgtaatcccagctactcaggaggctgaggcaggagaatcgcttgaactcgggaggtggaggttacagtgagccaggatctcaccactgcaatccagcctgggcgacagagtgagactccatctcaaaacaaaacaaaaaacaaaaaactccaagccaaacattgggtgacttaggggcctcagaagaggtgtagcctgtagatgacaaacctggtaggaagtcctgccccagtggttcccagcctgttgtagatgtcccaagcctggggaggggatgatgcacgaggagcatttgggaactggctcactctgcaaatttgggtcatttagcctctggtgcgttgtgcatgggcttcctcttcacctggaaggcacttgccccgcacagctgcatggcctgctccctgtctcctgcagatgcccagaggtcctcatggcagggcgggctccctcccagcctgacaacagcagccaccacctcactgcaggcaccctccatccactattcttcaaggcctcctcagcccttgatgtactgcgttatttaacatctgtctctgtctctatcacttaaaccttacaaagtcaggaactttgctc

SEQ ID NO: 28696 - DNA, 1052 bp, Homo sapiens
aactcacaggctttgcatttcagaacctacaaaatcccaaccctgagcatggcagggaagactgacaagcactggccccagcctctctttccagccttgaccctttctgtgaccccgcctgtgaccctcatgctttctgttttagtttcactaaacacctgctatttcctgaaactggatctttgaatgtgctgttcccatccctgattattccccacccccacattttccatctgattccttctcagtggatcggcgatggtcagttctctctcctctgcaagccttgctgatgtctccaggtggaatctccctgtttagagcttttatggtgctatttctaaatctctgtgcatcattctatgcgactgtttttatgtttcttcactgactctgcacccagaaagcaggattactgttttacttgttccatgtcatgcctgggagaataatgtgcactcatatttatgactgaacatacatttctgtctcatgggatttggggaatttgtagcaattaagaaatggtgaagccaggctcagtggcgcgatgtagtcccagctattcgggaagctgaagtgggaggatcgcttgaggcctgagcaacataatgagaccccgtcgctttaaaaaaaaaaaaaaaaagagagaaagagaaatgacaagtgttgaattaggggcgtaacatggcttggtggaaagaataatccagagactttgggacttcggggctcacttctgccattgctgaattccttccttttggtgagtctccaggcctttcctcttccttccccttccaggtccaagagatgtgatgtaggctctataaggctcatcagccatgcgagagcagcgatggtggcccaggccccgactgtaggagctgaaagacaggcgaccacaccacattacaggagggtgagaggaacggatgcggagaggttctgaacttgtaggtcaaaatgtgaaattcgaaagaatacccaaaaaacctaagaaaattttgtaaaggaaaatagatttattattaagcacatgaaaagatgcc

SEQ ID NO: 28697 - DNA, 1069 bp, Homo sapiens
agaaaatgttaatggtaggtggtcctctacatcttcaccaatatttggtgtggtcagtcttttactttcaactggtctggtgggtgtgcagttgtatctcactgtgctttcaatctgcattttcctgaaaacagatattgttgaggatgattatacttattgtacctattacactgctggcattcttaatttgtgaaatgttgttcaaatcttttgcccattttgaagttggggtacttgtcattttattattgagttgtagaagttctttgtatatctcagataccagtcctttttcagatatatgttttgcgaatattaactcccagtatgtgacttgtctaggtggtgggtatgtggatgttcatgctaaattccaaccttgtggtaaagtgtcaatatttttataatgggggcaaataactgtggacagttttttcaagtgctatggtataataaaaatcagtgtaaattgatggaaattgtattttcgtagcgtttttggtagcccttgttgcatggatgtgtcatggtagcctgataaagggccgtctgtggtggtgcctgtgtccctttgttttccttccttgtctcctttcttttatttaaatgtgtgcaattttctctccttccttgaacaaaatagctcaaattatataaaaagtataaagttaaaagtgaagtgttacttttggtaacttgctgaattatttacttctttaggtattggggtactctaagtaccaaaatttaaaacaaaaatcacagtctgtattctcgttttctgaaatcccagtggtctaatttctctttatttatgcccctagtgaaaatattttaaaaatctaaatttgtatgcacataaagttttcatttctcacacctcatatcatgcagcctgctgtcatggcctttccaagtgtgtgcggaatacgaggctccctgctgggcacacggccggtctcagggttgctgtaaaatgttctacctcgtgttaaaaagaaaagatataattagcagcgtttgcattattgaaaatactctcattaatgtatattctgatgtaatt

SEQ ID NO: 28698 - DNA, 1086 bp, Homo sapiens
ttgcgactaagaagaaatttcttaaactgatgacagaaagcaataactataaaagaaaaatgatgttagacttcatttaaaaattctagccaggtgcagtggttcattcctgtaatctcagcattttgagaggtcaaggcaggaggatagcttgatcctaggagtttgagaccagcctgggcaacatagtgaaactccatctctacaaaatatttttaaaattagctggatgtggtggcacatgcctgtggtcccagttgcccaggaggcctgaacctaaaaggtcagggctgcagtgagatatgattgcaccactgcacttcaggctggatgacagagtgacaccctgtctctaaaaagaaaaattctgctcatcaagaggtactgatgaggaaatgaatagataagtcacacactgggagttaatatttgcaaaacatatgtctgacaaaggactcgtatctgacatatacaaagaacttctacaactcagtaataaaatgacaaatactccaatttaaaaatgggcaaaagatttgaacaacacttcacaaattaagaatgccagcaatggctgggtgtggtggctcacgcttgtgatcccagcactttgggaggctgaggcaggcggatcacaaggtcaagagatcgagaccatcctggccaacatggtgaaaccctgtctctactaaaaatacaaaaattagcttggtgtggtggtacacgcctgtagtcccagctactggggaggctgaggcaggagaatcgcttcaacccgggaggtggaggttgcagtgagtcgagattgtgccactgtactccagcctggcgacagagcgagactctgtctcaaacaaacaaaaaaaaagaagaatgccagcagtataataagtgtaataatccttaacaatatctgttttcaggaaaatgcagattaaaagcacagtgagataccactgcatatcccccagatcagctgaaaatgaaaagactgacacaccaaatattggtgaagttgtagaggaactgcaatttctgaacatcgttggtgggaatataaaatgatacgaccattttgaaaaaaaa

SEQ ID NO: 28699 - DNA, 1032 bp, Homo sapiens
ctcaggttctatgaacttgaaaataagacagtaataattatctaatctgaagaagagagaaaaagatttaaaaaataaacagagcctcagggacctatggataatatcagaatgtttaatatatgtgtaggagagatggaaaaaaaatttgaaaaaatgatggccagatgttccctcagtttggcagaagacataaatttccaggctcaagaagttcagcaaactccaagccagatgaatatgatgaaaatacatctaggcatattatagtccaactgctgcagaccaaagattaaaaaaaaaaacaagtactgaaagtaatctgaggaaaacagcatttcatgcagtgaggaacaatgatttgaatgtctgtggactttttctcagaaattattaaagccagaagagagtggaacaatatttttagagggctcaaggaagataaacttgtcaacccagaattccatatccaacaaaatgtttcaataatgatggcaaaatacatgtccaggtaaaagaacactaagataatgtgtcatagtgcaggtctgctggaaggaaatgccaaaggaagtttcaaaaggtgaaaggaaaaacactagagggaaacttgagtctttaggaaggaatgctctctggacaaatatctgggtaaatttaaaatactcccccaacacacatatatctacctaaagcaaaattgtagcatcatcttacatagtcttacattcattggtagaatacatatgacaactctagcaaaaaggaacaacaaaggggtggtaaatggacctataagattgtaacatttctgcatttgatctgacatggtacaatattaatgctaagttgatataaaaggtaaggatgtacattgtaatccctaggataaccactaaacacataaggcaaaagatacagttcaaaagccaatagataaaatgccattctaaaaaaaaaatctaaaagaagtcaggaaaagaggactagaaacacacacaaaaaaaagagagaaaaaaataaaaattaacc

SEQ ID NO: 28700 - DNA, 1048 bp, Homo sapiens
aaacaaaaactctctgctggcatcgcttccaacccaaacacccagaacgcaggaggggatgatacagtggcgtgaagaactcagctgtggtggaaaatgcccctcggctcccacgccctaaggagtgctctgggaggggtaaggggagtttgggcagatgtggagtggtcttggatgaggtcgtggctgacattttggatttcgatgttttgttaaagcttatttgacttactaacatagtatagaacctgccgtggaatcggagtgtggggtctgatatgcttggaatcctggtggagtgttcgaggtggattctgcaagtcgtggcaatctccctgctttcctggtttttattttcatcctttctactcattttcaataccctttccacttccggaaacaacctatggcatcttctcttttataaatggaaacaagatgaaatgtaatatgatttttttttttgcattctgtgatgcccattgaggtaatacaagaaacttagatgttgcaaacctgggctgtgaatctctgatgtggagctacttttagaatttgtttttgttttgttttgttttgttttttagctcaattaaaatgccttctctagcttcgtttcagatcttgttctcttttcttccttctcctgcctcctcttcccttctttctgttgcaaaatatgagcatgtttcctaactgctaagaggccttcttggaacctttgttccaggcagtggagatagagcaccgttgtaagattacaggcagtttctgtttttactgttgatacctggaaaattgtcatgaagtgcaccaaatgtttccagcaccatgttgtcatcattggaaacgaatgagggatttgacttctactgaaccttaaatcagacaaacaaatgtctgtccaaactctggcaggcacctcaggggccagagggcttgaatgccctctgcagtgttgtggatgtgtctgagcaccagatactgggcaatttcctaccatttgttcagtcaaatatttactgagctcttttttttttttttttct

SEQ ID NO: 28701 - DNA, 1026 bp, Homo sapiens
tggaagggcaaggagatgagaaggaggaatgatggggaagtctgtacctgcctctttctttgccctttggttccagaggtcaccttgatgctaatagagttttcagtttaaaattgggtaatatgtgcatacagaatttacctaaaaatgaaatacaaaaacctcagactgggccgggcacggtggctcacacctgtaatcccaacactttgggaggccgaggtgggtggatcacgaggtcaggagatcgaggccatcctggttaacatggagaaaccccatctctactaaaaaaaaaaaaaaaaaaaaaagaaagaaagaaaattagccaggcgtggtgacacgcacctatagtcccagctactcaggaggctaaggcaggagaattgcttgaacccaggaggtggaggttgcagtgagctgagattgcggcactgcactccagcctgggcgacagagtgagactctatttcaaaaacaaaacaaaacaaaacaaaaaaaccccaaaatctcagactgtaactttcttgcctgccattttgacacagcagcttgtgcgatgttggtgaatcactcagcctctccgggtctgtttctcatctgtgagattagagggttatactagatctgtggcttaattttttttttccaagacgaagtctcgctctgtcacccaggctggagtgcagtggcacaatcctggctcactgcaagctccgccttccgggttcatgccattctcctgcctcagcctcccgagtagctaggactacaggcacctgccaccacgcccggctaattttttgtatttttagtagagacggggtttcaccgtgttagccaggatgatctcgatgatctgaccttgggatccgcccgcttcggcctcccaaaatgctgggattacaggcgtgagccaccatgcccggccgacgtggagtctcactcttgctcaagctggagtgcagtggcacaatcttggttcactgcaacctctgcttcccagattcaagtgatcctcctgcc

SEQ ID NO: 28702 - DNA, 1051 bp, Homo sapiens
ataatttttaaattttttgtagagacaggggtcccactatgttacccaggttggccttgaactgttgaatttaagcgatcctcccaccttggcctcccaaagtgctgggattataggcatgagccaccgtgcctggtgtggtaggtgttttcttggaatggagtttttgtttgaagatttcgacagtttttttctcatactagaaccaattgtttgttgctggttactgttgtgccaaaaatattttagtccaactttttttgaaagatgagaaaacatagtcagttgtccatgtttgtgtttctcttatatgtgaagcaagtctctttttcattgaaccttctctttttttgaaatcttaaccctttagttatcattttcacaggtaattcacagtcatttcaaaagagccaaatctgcagtggtttgaacattttcgcagtcccttggatatgccttgtgcatcacccacaccttcctgagacccctgaaccttccatgacagtcagaaacacgtgcacctgacattactacattctctttaagctctaaaaaaaaccccagatgtttattactctgcagaattgcttgattgtaactacatttaatattcattttgtcaaatgcctctgttttatttaaacaagcaataaaagaccacaaaaggtaataaggcaaggtttagggttagaaaagataatcaataaagagggtgacagggacttctctatgctcttttccccccagttcaggtttaccttagagaaaaatccaaatgtgttgattttagtttagtagtgagctgaatctgctgagggttggaactgcttccactctagtctttagattgtaaaggagttattctttagcagaagggccaaagacatgaccttggaataaccagcctgagtttattagaagtctggtttcccactgggcaaggctgcatgggatgctgaaagcagggcaggctctggagcttcattggctactggcctggggcaaattccatgacatctcatcttaaaatggacaagctgcaataatgccc

SEQ ID NO: 28703 - DNA, 1030 bp, Homo sapiens
gttgctcggccaccttcagcacatgtccaggatggtgatcccagtgtttatgttcttacttgagccagtaagtgggaggaaggggtaaagaagctacatccccattcttcaagggacagaagttgcacatggcctttttgtttatgtattatgaacaggacctagtcacgtgacctacaaacaaggctgggaaataaatgtggtctttatagtaggcaaccatggatctaactggaaaccaggcttctatcactaaggaggaaaggagggtagacattggtagacattggaagacaattagaattctgcctcaggcatgtactttcagtttttcagactaccaagaaaaatacttggaggccctgaaagtagtataccttctgatagtgccagggtctaccagatttaggatcacaggtgaagataattatttgacttataacactgcttttgtttcagtgcttactcaaggtaattagaggaattttttttaggtgtttacacatctaggaggatttggagatttctgacagatttttgagggtgtggtattttttgagggctggtatttcagtaccagctgagctaccatggtactggtgtagagagctttcttttgatctctctgggcatgtgagtggcttgtcttagagcatgaaccccccaccgccttcaccttgtgtctccaccccacaaatttggaagtgtgtttgtgattgaatagaggggagagcactctggggagaggaagtagcacagggcaatgtgggtgccgcttgctgatgactgagtcccctccacccccagagtaaaaactcaaaaccccgttagtgatgcgctttccccaggaatctgacttggctgtgccacccaactcatttgcttagaaaacgtgatttcatcctttatcctgggctccagtcattttctctgacatgtcttcccgaccatgaattgcttttccacactattgtcagggtaacaccttctggatgccatgtgtattagtctgtttccacattgctataaa

SEQ ID NO: 28704 - DNA, 1050 bp, Homo sapiens
acaagaagaattttcagaactatggactgggttctctcaatgcttatttctctcttcgtctgtgtgtatcatttcttcagcaattgagcagctctttcctaatgggctgaagtaggagtgaaatttatgttagatatagatcttgatcatatgatttacaaaatctctttttctccgtctaccattccccatcatggaacctgcaccagctgaaaattgggagttgtattcctaaggaagacggggaaggacacagtggggaacagccagcagtttctgctgaggtcccagatatccacatgcatttgtcttcccctccatagaaaactctcacctcttcctcaaggaagatggccctggtatgacattcatttccttccacttgatcagattcaggatctctggatgatgtgccgttttctcttttagggccggatgtacctgttgaggtcttgcaatctgttagctgaaacagacgagctctctgcccccagcacaccatgtgccacactgctgtagtagaaatcacgaccatcaagtctccctgcaccccctgcactggcggccactatgtttccttgtcgctgtctggcaacccgcgttctgccctccgggaactctcttgcctgggatcttttggagtcatggctttgccttctgaaagggtcttctctgcaccacatcggagatggatgctggagaggatgggcttccaaaacccgcttgctgggaggatttggggtctgggtgttgttttgaggactgaatagtcacagctttttataggccagccttaaggtttctgtagagatacaagtctctcaggactttagtagccctctagtctgtttgcttctgattggttccatgtgagtaaccatcaagatcttgtctagacagtttttcagcctaaaaactctggtcttttaaaggcctcagcgctctgccattcctttccctcccaatttaatagcaactcccttgggccaaatgaaaccgtgggcttgggtggaaggccaggcccttaatcatatctttggcacaaggctt

SEQ ID NO: 28705 - DNA, 1044 bp, Homo sapiens
agatcttagtaagttttgtacaggcctcttgagatgatgacttccctcagccctcagttcctgataaaccaccctggaggaaggcctctgggacctctaaggtctggcgtgggggaacctcctccagccttgtggttttggggatagagtagagagctctgtgcctggattggacaacgtctcttctaggttttgccttccttctcctccttgtacctccatttggggcaaacagaaagcagctttggggtaccccactttccctttgtgaagattattgtcttctttgttggtgatcaacttgccttgtctttacaagaggaagcggagattctctaagatgtgaggctgagaccgagtgttcttgtatttgagtgctttgtgttctgtgacttctttcacccagggttttctgttgttgtttttgcaaataggataatgaatttctttgtggggcaaaaagataaaagttttccgtaaaatgaacggaggactggagaactacttatgaactctggactggaggggaatcttgaaaatcatgagagaatgtaagatgtaagataggaagtataatcatgaactgaactgattttcttggatcctggtttctgaagagcttattttatagtataagtatactaagtatatgattatcatattgtctaatcgtttagatgtatggaatatgttaatctagcttttcttggtcatgaattaggaagtactcatattaccaaaatggcattataaggaaaagctaccatgatctaatgtaatgccaaattacgaccatctcatttctttctttatgacacaggaaatcagggatcctcttatgcagtggcttgggaaacatgtggactccgagggagaaataaaatccggccagctctctcttagatttgtttcatcctacgtgtctgaagtagaaataaccccatcttgtatacctgtggtgaccaacatggaggccttctcatcagaacatttcaacttagagatctatcgccaaaatctgcagaccaagcagttggggaaagt

SEQ ID NO: 28706 - DNA, 1018 bp, Homo sapiens
gtattgcagagtgggtagtgctacttatatgtcagcccacttgtcttgatgtctatgatccaaaccttttttcttcagtaacatttttacattgcatggtcattaggagagtttaggcaagagtcatgaattaattccttttccctacatgtattattagcagctgtatatgcaactctcaagtcataatcataatttgagtgcatttgagaagacatgccaggcagatttatatcaaacagatagtaattttggtatttcttacaaccagaattttattcagaatttttatgttgtccagggttaatggtggagcggggagaaagttttgggggaggctaaatgcttcctatggtacttaaaatgtatttgactatagtgaatataaatatttaagagaattatgggtggtatatagttatgtttcataagagggccctggtttcatttgataccttttagattctctttgttctgagtaattcacttggttctgagtaagccctgaaagattatgtaaaataagtataagaaaaaaacctgcatgccttgcttttatcagttttattttgcagatttgtacgtgtctaagtattgctttcaaaaacaaataatttagattgttactttagtaattagtagacataacaatgatgatgtaatttcttgagaatatggctctcaacttgcatgcacataagaatagatgattaaatttggcaagtcaggttgacttactttgccaaagagaagtgtatgtttgaatagtttgagtgaatttttgtcttgtagttatgtgtatgcatctctcttagtccgttttctgttgctataacagaatacctgagattgggcaatttagaaagaatagacgtttatttagctcttggttctggagactggaaaatccaagagtgtggtgccagcatctagtgagggccttcttgctgcattataacatgggaagggaatcacatggtgagagggcaggagtgtgccagcttaggtctttctttct

SEQ ID NO: 28707 - DNA, 1054 bp, Homo sapiens
ttgagatggggtctcgctctgtcgcttagactggagtgcagtggtgccatcatggcttgttgcagcctagctcctgggctcaagtgatcctctcacctcagcctcctgactagctgggactacaggtgcatgccaccacacccagctaattaaagaaaaactcttttttttagacatgaggtctttccatgttgcccaagctggtgtcaaattcctgggctcaagtgatcctccatactcagccttccaaagtgctgggattacgagtatgagttatgatgctcagacatctttaatttttaattcaggagtgttttgtagttttcagtaaacaggtctggcacatattttgttaaatatgtccctaaatatttcagatctattgatgccattaaaatgatattttaaagaagttcaggctccaaatatttattgttagtatatggaaatgcacccaatttttgttttgtttttttttttttttgagatggagtctcactctgttgcccagcctggagtgcaatggtacaatcttaggtcactgcaacctctgcctcccaggttcaagtgattctcgtgtctcagcctcccaagtacctgagattataggtgtgtgccaccacacccggctaattttgtatttttgtagaagtggggtttcaccatgttggccaggctggtcttgaactcctgacctcaagtgatccacccactttggcctcccaaagggctgggattacagacgtgagccactgtgcccagccaatttttgtatattgaccttgtatcccacaaccttgctaaactcacttattagttctatttttttttttaagattcctttggattttcatgtcctgtgcaacatgacccaataaaagacaaagaatatattcacctttcttgagaatgactggtgctgtggctgatttaaaagggccacatttatgtgactataaagcattcagctgttggttccacccaaatcatatttaattaacctgaaatcctagaagaagagaaatactaaattcttgaagattaaatgttagaa

SEQ ID NO: 28708 - DNA, 1050 bp, Homo sapiens
acctgcctcctacatgcattaaggaaaagtttagaaaattaaaattaaagttgaaagtgaatattcttttttctttttctttgagacagagtctcactcttacccaggctggagtgcagtggcacgatctcggctcactgcaacctccacctcccgggttcaagcgattctcctgcctcagcctcctgagtagctggaattataggcacacaccaccacgcccagctagtttttgtatttttagtagagacggggtttcaccatgttggtcaggctggtcttggactcctgaccttgtgatccgcctgcctcggctccccaaagtgctgggattacaggcgtgagccactgtgcccggctgaaagtgaatattcttctcagaaaacttactgagtttgcttttgtatgccctaggtaaacatttggtaagttgctctcttctctgaacaaaaatgaatcctacgtagagtagttcactgaagagtgattgaatgatggcaccactgatccctcttcctgtttttaatttccgtaaataagaaaatacaccttttaaaagaaacatcaaacagtagtttcataaattaaaaaatgatggttaatttgggggtggggggatagccagactctgcctaggattgtctagattacttttcataggcaaccttgatgcatttcaggatttaagtttttctgtagctttttagttaataaaatgctttaaaggtcaaaggtctataattttgaaggttttgctctgtgtattttttccttctgtgatgttggggttaggtgtagtgtctcagattggccaaatgagtttttcttggtagacggctttaaaaattttttttaattttaatttaataggtacatagtaggtgtatacatttatgggatgcatgagatgctttgatacaggcgtgctgtgcataataatcacatcatataaaatggggtacctatcttctcaagcatttatcctttatattacaaacaaattatattattttagttatttgagcatgtacagttaaattattattaact

SEQ ID NO: 28709 - DNA, 1010 bp, Homo sapiens
gatgccctcccatcacagggcacactcacacccgtactcacacttgctcagatcaggaccatgtagacgcatcggttcacctaatgtgcacagcttggggatgtggggggaaaacggagaaacagagaaaacccgtgcagacatggggagagcgtacggacccacagacagtggccccggctgggaagtgatttctttttcccctcatcaacatcataacaaaatgactttgagtgaaacaacattattcaaggacctgctgttttgaattcctgcaaactctctctctcttttttttttctttttaaatggtcgcactttgttgcccaggctggagtgcagtggcacgatcatggctgactgcagcctcaacctcctgggttcaagggatcctcccagctcagcctcccaagtagttgggactacagccgcaccacccacgcctggctaatttttgtattttttgtagagacagggtttcactatgttgtccaggctggtctgaaactcctaggctcaagcaatcctcccatcttggtcttccaaagtgttgggattacaggtgtgagcctttatacccagcctcctgcaaacgctcttaaaatgatgaataacgctgctctcttcctaggtattgttttccagttatggctaataggcaaaatggaagtttccagcatgacccatttgcctccctgaactcactagcaattaggttttcagcataactgtctttctaggtctttttttttttttttttttttttttgcgatggagtttcactcttgttgcccaggttggagtgcaatggagctatctcagctcaccgcaacttccgcctcctgggttcaagcgattctcctgcctcaacttcccgagtagctgggattacaggctcatgcaaccacgcctggctaattttgtatttttagtagagacagggtttctccatgttggtcaggctggtcttgaactcccgacctcaggtgatctgcccgccttggcttccc

SEQ ID NO: 28710 - DNA, 1033 bp, Homo sapiens
gggctgtttttgactattggctgggagcttttgctgatagtgagcagaaagtttagtttagttcagggctttcttgaataccctggttaaccaaaagacttgtgagggaggaacaaggcagctgtcagggttaaatgagcttgctggttaactgaggcttagtcagaaaattctcgttttgttctttactagtaatgatctttctcaaattcatcggtctgctttcttgccttagagcaccccttggttaatataattgagtctttatttaaggtaggaagttgaaaccatcagggtagtgattctagacgtcagtgaccactgcgatgaaatactgcagttgattgccaaggtagttggtgttgaaaacatcttcaggttcccaattcctttcttatgttttgtcactcttccaagtgctgaaaagaaaaacttcaaataagagaatattgaagctacttagatttgtggcatactaatacataggtagggggaaaatggaaagaggatgaaaggaaaatgctagtttctttttcttgcgtaggagatcctttggctcatcttctttttccttttagctttttgtttgtttaagcaaacggtagcggataaactatttcagaattccttgtcattgactccaaatcttttaatccttaggggaaaaggttttcattagagttagatgaacattcacttgccctaaaggatttgatgctctaatgagaaaactacgcagatgtagatattttgtccagaagagttcccaagataagtgtaatcgattttgttttattatagggatctttttattgagatagagaattgtttccttttttgttttgttttcattttgtaatgccttgtctttttccagttctcctggaagctaagtttcttgaattttctggccaaacatttttttccagagtatatatttgtttctttactattctaaagccgactcacttgttcttaagataatactcaagcagagatgcttaaaattaaggaatttggacattaggacaga

SEQ ID NO: 28711 - DNA, 1028 bp, Homo sapiens
gacttcttgttctctcctcttctctgtttttaaagggcagcatggtgtttttccagtgtctggggaatgtccctttatcttttaattccttaaaaaggtggagacttcagttacttttaaatgagagagttatatttagtgtttcgtaagcactgttgtcaggtagagatgagaatgctgaattcaaaacaactctgatattagtaaaatgtaatatccagtaatttgttattaatgactgtaatttagtggtaggagcctcaagggaaaaataaagtatgtggttattttagagaagaaaaatctcaacctgtcttttcccacctcctccctctcctgctttttctcagattgtcaagtggtcagactgttgtttgccattagcttgcagacctggggatccttatcggctaattgctgaagcaagtgtggacaacttcagcaagctgggggtggcgttcatggaagatagactccacatggataatggactggtaccccaaaagattgtgtgtaagtaactttagaaaatgtttttattggccaggcatagtggctcatgcctgtaatcccagcactttggaaggccgaggcaggaggatcgcttggagcccaggagttcgagaccagcctgagcagcatagacccctatctccaaaaaaacaaacaaacaaaaaaattagctgggtgtggtggtgcatgcctgtggtcccggctacttgggaggctgagatgggaggatcacttgagctgggaggttgaggccacagtgagccatgatcacgccactgcattcccatgtgggtgacaaagtgagaccctgtttttatcatagtgggacactataagttattagcttaaggactgttgagcactcttactggtatgacataaaggctatgcttggtttcagtttaattcagtccacaggtttgattttactgtaataatatacaattcatgcatgtgtcaagatttttttggggggctgcagggtacattttcagtgcttattaaatttcttaaac

SEQ ID NO: 28712 - DNA, 1065 bp, Homo sapiens
ggagctgggatcctcactatgagagaagaaagataaaaatatggagtgaaggaaggcaaagaagagctccatgaattggaatgagagattccacagattacttattaattacaaagataaaaaaggaacctttatagtggagaaacttggaaacttggtggataacacaacttttcgtttttttggagacagagtctcgctctgttgcccaggctggagtgcagtggtgtgatctcggctcactgcaacctctgcctcccaggttcagacaattcttctgcctcagcctcctgagtagctgggattacaggcacgcaccaccacacctggctaatttttgtatttttagtagagacagggtttcaccatgctagccatgctggtctcgaactcctggcctcaagtgatctgcccacctcagcctcacaaagtgctgggattacaggagtgagccactgcgcctgtcctgcttttcattttgacttgagttatttctaagatctgtctgctgagagagctggggagcagggccacccaagtagcaatgagcattcctcatgcccatatcttgttttctaaataccattgtccattaaaaggagtcagagctcctaggagaaatggctcattgtgggaaggggagggaaggtcaacgatgagtcaggagcggcttgttcaaaacacaaggaggtgctcaaagaatgatagagacaggtcagaaggacacaggggtcagcttgatggggctccagtggccaaacctggaacaatttgaatatcaaaattaataatggcaataatgaattatcacgttgaataaaagagaatccatgagtccagagtcatactaaaaagcaaataaacttaccaacaaatacataaacagaggtagaagaggagaatgccagctaatgattgctgaaggaacaacagagttggaaaagttggctagtctgaaggtagcaagttatctcaattgattgttcatggtcagttacagattgaactctttgttttattcttttcccccttctcactactgcatttgactaatcatacagaaaa

SEQ ID NO: 28713 - DNA, 1003 bp, Homo sapiens
acataagtaatgaaaatggaatgttaccagatggttgatttttaaatatttttattgttttaataagtatcacttattttagaagtaatgtctattcattgtagagaattttaaaactatagagaataacaaaaaattcaaatcacccataatccatcacccaaagataattactcttaatagtcttgtataagtccttataagcgtatgtgtgtgttatagatgtatatttaacaaaaaaactgggatcacactgtaaatataattttgtgttcctcattttaaaaataatatgatattgtgaacagttaacagctatattataattgcatcaggtggatgcactaacatttattttacaaagtctctattattagacttttgagatggttctaaattttcatttttataaatgtcctaacagcaaatattcttgaacaaaaatctttatccttatctctgatttgtccttaggaaagagttttagaaggataacgggatataaaatttctgaaactcttatggattgccaaattgccaggaaggtagcctcaattttacattcccaccaacaaagcatgactgttcacttgtccacatcacgtattgattgtttatttaataagcattttatgttttaatttttcaagaaaatgacagtagatcttccatgatcattttgagaattaatgaaatgagttcagagaaattacaaagtatggtttggatagctgacaggctacggtttcacaggaatttacttagcaaacttatattaagagcttcctggcagcctaggaggctgaaatcacttatttgtatgacacgacttaaactttcaaactcatttaggaaattcccttcacaggccaggtacggtgggtggctcaggtctataatcccagtgatttgggaagctgaggtgggaggattgcttgagcccaggagttcaaggctgcagtgagctatgatggcaccagcctgggtgacaccacgagaccct

SEQ ID NO: 28714 - DNA, 1059 bp, Homo sapiens
ccttcttttttaatgtggctaccagaaaattccaaattatatatgtggcttccactcgcagcttgcattatgtttctgttggacagtagtatgccaatatctgatcctttcagtaactgggatccagccagaggtaaagattcctagaaaaattgtctctgtctagaccaagcccattcaacccacagcccaccggccaggatggctttgaatgtgacccaacacaaattcataaaccttaaaacatgagattttgtttctgtgatttttttttagctcatcagctatcattagtgttaatatattttatgtgtgacccaagacaattcttcttcttccaacgtggcccagggaagccaaaagagtggacacccctgctctagaccatcatcagtccttcctggccagcgtcaggtgtgcagagtaaaggtttgtaggcttctcatcaagcgtcaaagaaactagttttcttcaaatttccatgaaataaaataaatgtcttgggttttaaaaattgtacaattgggaacatctttgaatgtttttttttttaagagacagcatctcattcttgtcacccagactggagtgcactggtgtaatcattgctcactggagcctcaagcaatcctcctgcctctgcctcccacgtaactgagactacaggtgtgcaccagcctgcccagctaatttttaaaacattttttagagatggggtcttgctgtgttacacaggctgttcttgaactcctggcctcaagtgatcctcctgcctttgcctcccaaagccctgggattacgggcctgagccactgtgcctggccaggacttttctttttaactgtgtgtgtgtcaggttgtcttgaacaccatggcgactccctcagactttttcatgtcttattccttggtaagaaggagctttctagctctgagactaggcaattaggatggttctctgaggcattctctgtacacagagtgtcagtcaggtgccatatgtagagagtcgttgaataattcagccggctaatgtccaagacgtcagtacttcgctcc

SEQ ID NO: 28715 - DNA, 1053 bp, Homo sapiens
atgagatacctggggaggagagagggatgtatcagttcagttcccatgtgtctcaagcacctatgtgtctcatgttgtaaatgaatcattattgtgccagagtcttaaaaagcagagccaagtcactgttcatctccagacccagcgcagagctgccgaagacagcaggatggtggcctccagggggtcggggtgctgtgtccttcagaacgttattagtaattggaaaggacatttccaagtgtgtgctgatggactgaactgatttttgtttacagcctatccagattatcaacagcaccatagaaatggtgaagccggggaaatttcccagcggcaaaacagaaatcccttttgaatttcctctgcacttgaagggtaacaaagttctgtatgagacgtatcatggcgtgtttgtcaacattcaggtgagagcttcctagtcctacgcgactgacttcacaagttttcttctgacaaacggtgtggtctttctctcaacgttagtagacgggcccaagaatttaatactgtgtttattgctgagacctcgcatgtatattcgacgttaatttctcatttccctgataaatgcatttgatgtatggccgttatttctgatgggagcctcaaggcactcgtgctgtaacttcttttccctctgtttcttctgggctcttttcaggccacctcacattgtaagggatgcttttattgtctggtaacagatatgccctaacttctttctggcactagcattaacttgtctgttttatacttacaagtatctctttgtttaacacccaaaggctactactttgacataggctggtgttctttactgaacaaaccttgtcaatgaggggaagtggattatgacttcctgtctacctctgctggttaagggacgtctttgacagtctgctgttgttgtctcaggagcagtggagtccacgcggggtgagatagcctttcctttatgcagcagaaagaaagatacttttgtgatagcagcctcgcagcacttcccttgctggatgagacacaactctt

SEQ ID NO: 28716 - DNA, 1038 bp, Homo sapiens
aaccccatctctacaaaaaatacaaaaattagctgggtgtggtggtgtgtgcctatagtcccagccactcaggaggctgaggcaggaggatcactggagcctgggaggtggaggttgcagtgagctatgatcacactactgtactccagcctgggtgacaataagaccctgtcttaaaagtatggaagtatggtttgaataatacatttttaaatcccagccatcaaagatgggaaagccatgtacattatactacttcctagattctagttctcttagtctcccagctagtgtcgattacattctacattgtcaggacttatattttgcattctcttctttcattataatcatcacttatctcagtcttcttcttacaattaaatggagttaatcctcacagttggttcttttgacatagtttttctagccatctcttggatagctatagtttactatttagtacattcctcaagaaggacttttatatagtattgcttgggatatgtttttttttttagtttggttgggtttttttatttttgcacatttaaaactttcagttacactggaatgacagattaggtgagtataaattctagggtcacacttcactgccttgagcattgttgtatcattctgcttgcattttgaattccattttgctatggagaaatatggtttcttttcctcttatgagtgactcgatcttttttcctgactccaaaaggatattttcttttttgaatgagaacacttttgctacagagtattttcattgagtgctcctaattcctttgcccttgactgtttttgaattatcacagtaaatatttgttctgcttcattatttcagttttcttatttggaacttaattaggcatagctgtgtgtttgttacctgtctccaattttatctctttgtggttctttttgaattctttcttaaattttcatttaatttatttggattttgtcatttctgccctgcatatatccttagacccttttaaatttattttctgtggtggtttgatt

SEQ ID NO: 28717 - DNA, 1035 bp, Homo sapiens
ccgcagcctcccaagtagctgggattacaggtgcccgccaccatgcctggctattttttgtatttttagtagagatggggtttcatcatgctggccaggctggtcttgaacttgtgaccttaggtgattcccctgccccagcctcccaaagtgctgggattacaggcgtgagccaccgcacccagcctgagctctttctttctttacttacttgttttagagatggggtcttgcactgttacgcaggctggagcacagtggcacaatcatagctcactgcagccttaaactcctggtttcaggtgatcctcccatcctagcctcccaaagtgggttgggattacagtgcgagccaccccacctaaccgtgctcttgctttctaacaagggccctttaggctgttagcctcatttgctgctagactcatctcttgtcctctactctgaagtttgcctgcatcctggcttggatttgaatgctgcactatcgtgattcatacatgatttcactctgggatttcaatctgctggctctttggttgttcatatataagtgtgggctggctctacagagcattttctttggcggactccctgtgttccacggtcattactttggcctgtaattatgccaattccaggctcctttgtaattggagccctcctaaatgtttggtttatagtctggagtctttacatgcacttatgccagtagttccaaacgaatgtcaactttgtaaacctacaagttggaatgttatttcttgaatagtccttatccgaaatgcttgggactagaggtgttttggattttggaattttttcagatttggagtatttgtagatatttaatggttgagcatccctaatccaaaaatccagaatccgaaatgctccagtgagggtcttctttgaatgtcatgtcagtgcccagaaagctttggactttggaacgtttcagatttcagattttcagactagggatgctccatcctattgaaatctgaaatcaggtagtctctattaacataattt

SEQ ID NO: 28718 - DNA, 1023 bp, Homo sapiens
gggctcccttgcttcctgctgggtggtggaggaagggaggaggaagggttctgtagcagcttcttatgggccagcatggatatggcttccttgctttcaccccattccatcaagaggagcctgccctcatctgccagggaggctgggagatgaagtctggcctgtacccaggaagtagagggcagagtttgaggacgcaagggagcggagaggttctctctcgactctgcagacctgggcttccaaagcccctccttcactcattcagcaagggcttagcgagaggatgaggagcgcggcccgcccttggggagctcccgttctcagcccacacctggttagggcccctggagcccgggccttgttgggcagacacaggtctccccgctaccttgcacacctgtgggaacagaagaatctatggaaggtggtacctggtgggggcaggggtaggaggagctgaggaaggaaccagctcatgccaagaggtagagattggacttttgaccagacttgggcccgatatgagccaagacagcccccaagagccccctgaagcctcagttgggggaaggccacgagtggggttgtgcctcagtggacagggtgggctatgagacagtgcgcggctggagcgggcgcccgaggaggcatttattagtggcttccctcctccatcctgtttctcatccaagtggttttgtgcatacacaccccatggctgttgggtcactagattgggattgatggcctggactcaaattagtagttccatattcataggctctgagaaaaaccttttctttttgttatgttgtatttactcacgtgctgtagacggcaccagttcaacgcagatggaaccccaaggctcagagcttgctgtacttgcttcggcctccgcagcaccttggtgccaggattctgaaggaaaaccacaccatcaacagcactcgcccctggggctgggtccccgtgggcggccccaccttcatcctcttcgtttcttcaccacccatctct

SEQ ID NO: 28719 - DNA, 1835 bp, Homo sapiens
gtatctctacaaaaaataaaaaaatgaagccaggcatggtggtgcttgcctgtagtcctggctactcaggagcctgagatgggaggattgcttgagcccaggattttgaggctgcagtgagccacgatcctcccactgatcgtgctccagcttgggtaacaaagcaagaccccaactcagagaaaagctttaaagaaaatgtttttagcttcaggaacttaaaactcaaggagctgtttctagtgtgttgaggtatccgggtttatgttaatgtttttgagttaatagactcctttgagaacacaaaactctaaagacagtaataattatcaacatgtttaagtacttaagttttaaggtccttgcatgtattaattctcttggtggattaaagtaaaaacagtgtagagtgcagctaggacaatgtacatttacaaatacacacatagacctttatatttttagggtgttcacaggttgtgatgagaacattcaggaaacccagttaagatcccttcctctgtaaggtacccctagtggttgtagaacatagtaagtacatgatggcaagtaactatggactcatttatataaagttctgctggcctaaagtttttcagaagagtattaccccgtgagcatgtggtagaaagtctgtcaacaaacctgccttcttgatccctagctctaggattgtcttactcagggtgtgtggccttttacttcttgggggcctcagtttctttttctgtataatggtggtattaggtagacggtcttgaatggctctttcagctctcaaattctacagtaacttgagcttactttttattgaatagaaaatatagcttgcagagccaaacactaacttatgtgaattgttttttacagcatttctgtcatcatttgttatgaattcaggagtctgggaggaagttggttgtgctaaactctggaatgaatggtgtagaacaacagacactacacatctgtcctccacagaggctttttgtgtgttttatcatctaaaatccaatccctcggtaggtgggacttgtatgtttgaaaagcagttatttaagtatcacttacatgttatttactggtagtatactttagtatggcaaatctttcagttgctctgtcagtgtgcactttttctgatactaatcaccagtagtggtttgactgttaaattttaaagagaaataagtaggtcaatagtggagccaggaaaataagtattacctaagtgttgtcattcacatgttacatatatggtgatagtttgtggtgtgtataaaacttacttgacaaaaagcgtggaacttgacttttcaggtttttctctgtcagtgcagttgctatgttgcagaagatcaacagtatcagtggctggaaaaggtaagagagaaatgaaaacctgtgaatggttagtctacaggagttttcattttttaagggttcgatgtcttttaacttaaacttatgcagtcagatatttatttctttaaaatattgtgggaatttcttttggaatataaagaataaaagaacttgcttatttaacgtgaccaaccagttgtgttttatacttctgtgtcctcccgtcctcaatgctgaggtacagaagtataaaacacagttggtcctcagcattgaggatggtaggtcacagaagtataaaacacaattggattcctcccgcccatctttctttgtttacatcactttagatcttattaaaaggtaaaagggttcttagaaatctatcaaatccagactcttctacttatagaagaggacatttagaaccacagtgattgaagcttacc

SEQ ID NO: 28720 - DNA, 2070 bp, Homo sapiens
ggtgcagctagttgataatagtatattctcatcctactataaagtgcaaatttcaccttaattttgcatattttaaaatttttgtttaccctttgtagcatatttacattttagcatttgctaacattgatttaatgtgttaaagattcattttggatatagggttgacttgttggagatactagttcataattttaaaattcccaagagaagtgtctttgaagtggtaaacacagtgcactttaagccacttctcttcccacagagtccagctgaaggaggtaagggcatgctgcatgagagtaatgccgtgatgagtgtcttactctggtaaaatgccatttacaatgcctggagactgaacactgaacaaaacatagtgcccttagaatttcactggaaaaacatgtgaatcacataagttagttggcaaaaggaactgatgtgtatgtggtggggttgctttgaataaagtatttcctaacctattctggggagaacgctcaactgatcttagagaagtgtgaaatcagtttcatagacttagggaaaaatctgaagtgcttgcactgtgagggcagaggcctgcctcattagtctagctgtatgaacatgtcagtccacagaagcagtttttacctgtactcatctgcccttcagtcagctttgtgacagaagggcaaacatcttcacagaagaaaaagttcagaaggttggcattggtggtttcattgctacagaataatagtgttacttgatagtatctgactaaaagagctctcattttctagtacttagtagtaaaaagaatgtggtggagtcctccagatgtctagtgtgggtggaggatatcaactggttatttcagtgatctacagccttaccttttgaatgctaaatgtctggaaacttcaggcagggtcctacaaaacaaactgccatcaagattggtgtgtaccatgaaggcagttttagatagtttgactgttcatggctgcaagaaagacctaaaattcaagggcccgtgaacttcagatacgtaaaaggaatatcacttctgttctagaagagtactaattagacttgtttgtgaaatttgaaaatttggctttgagacactggtaacaaacatatctgagccctcctaagtttggtcagcacggagtagtagctctggcatcatgtggctgtgtagagctccagtgtgatttcaagccccctctaaaaactgccttagtctgcatgaagtagttaactctccaaagtgctttttgtctggcaaatcccttcacaattttcacctctcgtctaaaagcttccttaaaggaagccttccttgatcccttaggctaggttaggtttccagtctgtgttctcatagcactctgcactttttggttccttaaagcaactctgtgttattttttagaattttaatctgaatctcgtgtgtcacatacctaggtcagaaaatactggaacaatgaagttaagatttagtaattcaaattatgtaaaatgctcatatatatgtttttagattagcagctttatgatgccgatgctgaaggaacttttcaccccattcttacaagtctgctactgttttaagtgacatccttatagttgtagataagcaaatgtaaggttatatcaatgtgaagaagcccttagtatcacattttaaaatttatcatttagcaatatgacttttaaatttattgtttccgaatgagtgttgttgaggaatgttagcagtagtaaaatcttgtgttacaagatttttgcatttacatgaactttcactcatttttcagaatttgttcctagagacagagaacccaatacaaaagtgagaacatgtatgcataatcagaaggatgcagtgcagatgcctagtgaaactctgaaagcaaaaatggtacctgagaaagttccccgcagatgtgctactgttgctgcaaataaaataaagataatgagtaatctaaaagaaacgatctcaggaccagaaaatgtctggattaggaagagtagcagaaaactgccccatcgaaatgcttctgctgc

SEQ ID NO: 28721 - DNA, 1551 bp, Homo sapiens
tatctgattaaatcatttctcagtttattaatccttggaaacaatgatatagcagttactcacagcttgtaaattacaacagaaaggttcctttcaaatagtagagctgcacctaaagaggaaattgggtttataagaaaatggaggcaaagaacttaagttttaagaaaaagcacttcaaaacagaagggcaaatggaaaaggggaatataaaacaaaccaataaaaataccatctgagggtgttactgtccaaaagtaaagaataagatgcatcactaagccctttgcactcgttatgacctcgtaagtaaaaattatcacttagaataaggggtgcacactacattccctctgtcttctagacttttttttttgtagaagaatcagaaaacaatttactaacctccctgtttgatattaaaaataggaagaattttaatattttctgttagtacaagttgaacttgattgtgccaactgaaaccccagaggtttgtatatcagtagaatgcaagaacattgttaaaggtgcttacgatcttttttgttttcctttccactccattgtatcaattttttgagtaacttttaaatggctagaaaatggtctttttgctttgcccttttaaagctgaaataaccagctccattcttttcatgaatagtaagttgatatatttatttatcaggtatcttgcagttgtcaccaaatactgtagttttcttatgttgtatggaaattatagttcaattattttaatgtgatagagtgcaacaagtcattgtagaacttttcacctgttaatgttgaagttatacctctgaatttctgctgtggatatcaaggaaataataaagcagaaaccccaagaaatttgcaacttaacagtttgagactgtctcttatcctagtatttgggaagagaaggaataaatttgtcaaaactaggtgagaaaatagagcattgtgggaaaaactgagtccaactagattagcaaatgttaattcctagctcaaactgtgaatagtaaggattgaaaagtaaagtatgtaatgctaagggctgtgttgtcttttcttacgattttaagttttaaaggctgttaaattacagagatgttgcccaaggatacatggggattctcaaaagtaagagatttttacctttttcataatctgccaagctggttcctaatatattgttaaattggtagaaaaatatctttaaattggtgtctgctcaagaattgcttttctagatttgatggagggagggggagagtcacatcatttggattctaccaatctgcaggctctatctttggcaacatgtaaataattagactatacatctgtttctcaagtatggcaagaccaatagtttgaatttaattatcaatgctatggtatactttctggtcatattttagttatgtcagttttaaggtaagttttttcatttattaaagcccttaaatgagattttagactgccaaagagaagaggcagtccaattgacctaactgaaatgagatgaccagtatatag

SEQ ID NO: 28722 - DNA, 1055 bp, Homo sapiens
tgaagtggcagacaaggcgaagcatcagactggtattaatgttagagaatgttctgaagtgttcctattttgtagttatctattccatttgacatagtagaaggtacattttctttctactctgatgcatggggaaggatgtttttggacattatcaactgagataggtgggaaacctcctctcatttgtggcttagagagctatcaccatttcagaactatgatgcttttcttctcagaacttgtgttaagtagatagtaaacagattgattcatgataattgtccttgactaagactgaaaagactaatgggatgccttttactttgctaattttaaaaactggtgatagatgtcaaatccattaatttatttaaactcttcttaaccttctcttttataatctgttctcaggttttaactccatgtttaccatcatttgcaaaaaggtaccaaaaaaatccataaataaatatggaatacattcataagtacatacattcttttggtataaaacaatattttgacagtttaggcttcattaatagaactattctgattatttggactgcattaattggtcattgactggccatccaattaccattttttctttcagtccaaaatagttagacccttgcatacagaagtggtattttggtttttaatcagatttggtttcatcagaagcagcaagaatggacctgatgtctttaaaagcatagccgacaatggtagcttctcaagttatgaaataaaactgagagataatggagaaaataatttttatgggtttttttggttatggtgctattcctaaggttaactttgaatatgtgacacacacactcctaagtacctttaaggaaaattaataaatcattaatagttaaaatgtttacattgagcactagaacatgtttggccttttttttctacgttatgcaaaatgcccagggatttaatgcacaggtgtactttaatgtttagggtcagtttgtagtattcttgagaaaaagataaagggttataatttgaatgtgaactgatccaga

SEQ ID NO: 28723 - DNA, 1014 bp, Homo sapiens
gcattactttcatggcagcaagtgtcatgcagttattttctgaatttgtcaaagaggcagtagtttctaacccctgttctatagtagttacaacaatttcacaacctatgtttacagattcttcataaatacatgcatactgacactataatcatgggaggtgtaaccatgattagtaggcgaggtacctaccacttttttttttttcttcccctggctacttgagtagaatgcattataccagatctggtcactttcattgaaatggtttctaattttcttcccaagtgctgttgggtttttttcttcttaaggaaaacgttgtcacttttatgttataaacttgaatttataaagtgctggtaaattatttttaatgatttgagtgcatgttttaaacctctaggaccagagcatagtcagagcattttcttttaaattgtgcactaacaaaatgctatataatctgtcttctgtccaagatctcctggtttccattgtaagggatttaaccaaaatcttgctcttccataatcttactctgtgaaatagaggaattcgtgtgccttagatttagaagtgtgttctttaatagagtgtacagggctaaaagagtatttaagttaatatgtaggtttcccccatctgtattccaattgtagaggtgagttttgttaagagtacaattgcaaatcttatctatataggaaaatagctaaatgtcattctccatctctttgttttagtttactgcttccatgtgcaatcctaagcattctttgctggggcaactaaatgtatctttattagtgacttctagtccaaatataagaaactgtcatgttttgtgggaaaataattttataatccatttaaagtgaaagtttatcacacaaatagtacacttattttctaaccaaatacttgataggttatgctactccagtgtagatggccattcctaacttgtttgtgcctgaagatggacttgattcaaatggtttacatatttag

SEQ ID NO: 28724 - DNA, 1035 bp, Homo sapiens
ctccatcttgcttgtactacagctaagaagaaattgagtgattgtgaaggaagtgtacattgtgaagtaccaagtgaacagtatgcctgtgaaggcaagccacctgatcctgactccgaaggtagtacaaaagtgcttagtcaggctctaaatggagactcagactctgaagatatgttgaattcagaacacaagcacaggcataccaatattcacaaaatagatgcaccttctaaaagaaaaagttcctctgttacatcttcaggagaagattcaaaaagtcatattccagggagtgagactgataggacattttcttcagagtcaaccttggcacaaaaagctactgcagagaataattttgaagtggaactgaattatgggctgcgcaggtggaatggcagaagactcaggacctatggaaaggctccttttagtaagacaaaagtgattcatgattcacaggaaacagcagagaaggaagtaaaaaggaagagatcgcatcctgaattggaaaatgtgaaaatctctgaaacaactgggaattcaaagtttagacctgatactagttccaaatcatcagatttgggatctgtaactgaatcagatattgactgtactgataatacaaaaaccaaaaggaggaaaacgaaaggaaaagcaaaagtagttagaaaaggtaaaacttttacagctaacatatctaaaactgtgagacgtcaaagacaaagcaaacgccctaggttaagtgtggatgataatgactgggaggatttggactatgcaaaatctaaaagagttcttcgacgttcaaaaataaaaacgagaaatcagggtagaaggactgtgagataccatgatggggatgatgacagaagtttagaaaatgtgttagatttcaatggttgcaccttatgaccttgagggaaagccagttcatttaagaggaaatggactggcatttatggtgaaagctggctgttaaaattatttttttgtcttacaattcagggaatatatttatatttttctatg

SEQ ID NO: 28725 - DNA, 1565 bp, Homo sapiens
agatcttaccatatttgtcctttgtgtccagcttatttatttcacttagtgtaatgccttaaaggcttatgcatgttgtagcatgtatcagaactttattccattttatggctgaataatattaaagtgtgtggttataccatatcttattcattcatctatcgatggccagctcggctgtttctatttcttgaccattacgagtaatgctgcagcaaattttggaatacacgtatctctcagaaaccctgctcaattcccttgggtatagacctaagagtagaattgctgggtcatgggataattcatgtttaccttttccaggaaccactacactgttttccatattggctgcacctttttacattcccgctggcagtgtataaaagccacagtttgttcacatccttgccaacacttgttgtttttggagttttgtttgtgtgtgtgtgtgtgtgtgtgtgtgtgtgtgttttcttttttttcttttttttttttgagcctgtctcactctgttgcccaggctggagagcagtggtgagatcttggctcactgcaacctccaactcctgagcaatttgcctgcttcagcctcccgggtagctgggactacaggcttgcgccaccatgcccggctaattattgtatttttagtagagatggggtttcaccatattggccaagctagtcttgaacccttgacctcaagtgatctgcctgcctcggcctcccaaagtactgggattataggcatgagccactgtgcctggcagaataaaatttatatatatgaaatactgaaaataactgtcaaagatcatttcagattaagtataacaaatttcacattcatttgtgagcatatatatatgtatatgagaagcatgtaagaaattcgtatatctcacatactttttaaaaaagttttctggtattggagtgtcttcgccatccactgccatgcacaagaattatatttaagttttgagcattagacttttgcacttattttcaggaaaagtcgtggaggaggatagagtagttctgtacatacatagctgtatccaaaagtatttaagatttgatgttatttaattgtaaacattgttaaaacaaatctttcatatgcattaacgttctaggttatactttctgctactggatgcaaggtatttttgtttcatttttagaattaggtggcattgaaaacagattgcagacagagatgggtatataaaagtgcttttgttcccttgccccaaagaaagacagcgcttttgtagcctaaatagcagccttaaaaccattcaacttcccatctaactttgggagaagggtatattttggggtttgtacatacagatgttagaataggcaaaaacagttgagattcactgacatatagacacaagtcctgaatatagatgcttgacttcaaactactttcttatcatctgagaggtatgtatttgatacttcttacttccagatgtcattaagggaagggggttggaaacagaagaagtgggtgacagccattacctataagcagtgatataatacat

SEQ ID NO: 28726 - DNA, 1036 bp, Homo sapiens
atcaatagaaagtgaacaaatttgatacacagagtaagagtctctgtgttttgtatgtataaggatcttaagtggattggaaacatagatcgagactgtaagaatattaaaagtaaaaaggaaaatctgattgtgagactgctgacagcataagaacatttggatttgaagaaggaacacatgagctatcagattaagaccacaaataatgttacagagccagtggaggctctttgcttgatgtgttagaagctaatattatgacacagggtttttctttttcttttttttttttttctagcctactcaagtgaagtggtgacactgggtttttgagaataagctttatattgaaagttgactcctaaggagacaggagtgaatttcaaatctgactccggtgctggctttaaagcagtatttttattttttatttttttttaaagaaaaggttcagggcatggattctgagattagcaggtgattaatggaaggaaaggagaggtctggaaagtctttgggcatgtatagttatttctttatgttatctgatgggttgcgtgtgcaaatttgggggaagttagtgtgaagcatgctggaaattcaggctctgatgtcagcaggctcattctttgcagactccacttggccatactggttttaaccagtttcagccagttcttcttatctcataagcagagggagttttagtgttttatagtaggttgggtttctttctttctttttttttttttgtcattttgtaaacttaagaatttttgttaattgacttctttaactctttggggcatgcagtttcagtagaaggttactaaagttttgttaacatgttacacattgggtaacttttcaaaacttgatgaggcctgtaatccctggaatttgggaggccaaggtaggcagatcacttgaggtcaggagttcgagaccagcctggtcaacatggtgagcccccttctctactagagataaaaaaattagcccgtgttggcgcttgcctgtaatcccacctata

SEQ ID NO: 28727 - DNA, 1439 bp, Homo sapiens
aggtctatacccttaatgcaaaataccttttctcatgtaaggcaacatagtcataggttatgaggattatgatgtggacatctttggtggggccattattctgcctatcatattatcagatgtgcttcatattctgcgaaaacaaatattataaacctgggaggtgagaggtcatggaatagcctttcactagataatgtgctcttgttagagtatgcttttcatagctaactttgtaatatttctgaaattggttaagttatatgaaaataacttacgtttcatgcatagtttaaaaatttcatttctggaaaaatgtgttgagagcaacatatatgacattattgtatttttatagaagacagtagatcagttacatttttaccacagtcttacaccaatagtgtgatttttcttaagactgtgaatgtatttttaggtccatgatgggaaaaaaagcatcagagctacgaactatgttgaaagcaactggaagaaacagtgtaaggaactagtgaacttaatttttcagtgtgaagattctgaaccatttagacaacctgttgatttggttgaatatccagtaagtttccattgtttaaatgtttggggcttttcttgttttgcagtgaggaaactggggtagagttattaaactttaaagagaaagatacccaggctttatgttaacttttttgctcctatcactaagttagtggtagaagtattgtttttacatagttttcttcaatttatagacacccttgtgagctcatttaagaatttagacttagataatcagtattacataacagtgggatggatctacttagatttctatctaagtaggcccagcactaggagaactgtgaattggataaacgtgtctgtttgcactctttaaaaagggaaattgaaagatgactttataaaaaaagttggattataacagcacagagtgactgtaggatgcttggagtacatacagcaggaaataaaaccatcccatgtgtcactaacaataaatagacattaacattttggtatatttctatcttttctttgtttttatacctctttttaaacattactaatgaattttaagagtcctctaaccttttcctctcttccatcatttcacattttttagagatctgatgcatttacatttctaaaagcaagaaatgaatctatgaattaaatattgtgtttaaaacctaggactacagagatattatagataccccaatggattttggaacagtaagggaaactctagatgcgggaaattatgacagccctttggagttttgcaaagacatccggctgatatttagcaatgcaaaagcgtatacaccaaacaaaagatcaaaggtaattttttatgtggtttattgaaaaaaactgcctgatctgtgtagataattttccaatgtaat

SEQ ID NO: 28728 - DNA, 1013 bp, Homo sapiens
gcacaatctcggctcactgcaacctccacctccgggttcaagctattctcctgcctcagtctccttagtagctgggattacaggtgtgccccaccacagctggctaagttttgtatttttagtagagatggggttttgccacgttggccaggctggtctcaaactcctgacctcaggcgatccacccacctcggcctctgaaagtgctaggattacaggcgtcagccaccctgcctgcttctccttattttttcaagaaataccagtctgtttcatttgcgctcccttaaaatttaagaaaattagccatttgtcatgtgggattatttatccattttgacttgactttttaaaaattttaatttaaaaattttaactgtatgtaagcttaaaattttgaatattgtcaggttcaatttgtgttttcagaggcctcagggttaagtttgcctccttgaagaaatagactgaaaactgcaatactggcactcttatttttaatttttaatttgttagggtaggtagattgtgtttttacctgaatttaagcaatttgttaatctcaatgagtaattttaaaagagttgcacatttgaactctatttttgactgtggagataacctagttttataagctatgaaaattgaattttaataccgtatatatttattttttgtgtttttttcttcctctcattgttttttatggtattcatagttgatccacctgaagaattaggagctagtatttctgtcacaacagatgagctagagaaattgctctataaaccacaagctggtgaatggggtcagaaatcaagagatgaagaatgtgatagaattatcagtggtatagatcaacttttgaatcttggtaagttttttattttttaggatgaaaagtttttttttcaatttttttcataaaggtatttaaaaatactagcataattgaggtttctgttcttttctacactttgtattggttatcttttaatttagcctgtaatgtt

SEQ ID NO: 28729 - DNA, 1071 bp, Homo sapiens
ctgtggctgtagtggaattcaagggcttcatgccttgtctttcagttattgttcactttgggtgcaggccacataggatttctggttttgttcttaaacctgttattttaataatatatccttcttaaaaaaatttactgttaatatttaaaattgtactgctgcagtgaggttaattttcacattttgtatttttataatggatacctattatccacattttgtttttatgaaaggctaaccagagatttgttgttttttaacaggtgggataatactgaaattgaaaaacttagcccatgggacatggaaccaattcctgataatggtatatatatttgttaaataatgaaaacattttatttttataatatgtacatttgccagtgcacatggaacaaacatatttgtattctatgatcaatatattcaaattattacagtaactgaactttactgaaagaagacaacagcatcgtgtttatctgttttgttaattcttgaccttagattccagcttgattttggctgtaccttaatagcttgctgtcgtttctcatgtaaccctgcattaaacttaactcctggctgggcgccatggctcacgcctgtaatctcagcactttgggaggccaaagcagatggatcacctgagatcaggagttcgagaccagcctggccaacatggtgaaaccctgtgtctactaaaaatacaaaaaattaggcgggcatggtggcgtgtgcctgtaatcccagctacttgggaggctgaggcaggagaattgtttgaacccgggaggcagaggtttcactgagccaagattgcggctactgcactccagcctaggcgacagcgagactccatctcagaaaaacaaaacaaaaaatttacatccttcatgtagcctctacttttcctacctcattcttaatcttttacccttggtcttccttcaaggaaaagattgaacttgacttccatctgtcttctgctttacctcaagttgtcttattatggattttctactgaaatagacaactatttaaagccagcctgtcctccagtgctag

SEQ ID NO: 28730 - DNA, 1051 bp, Homo sapiens
cacttgaaatatggatggtttgattgaatgtcttaatatgtgacttggcagagtatgaggcataaacatttttttttaaagaaatgaatgtgttgtgaatgtacacactgcattttgaagagtagttatgaagaaaaaatatgtcagatctctattttgttttgataacatattgaaataatattttggatatatttaaaatatgctatgaagtttactgttttaccttttaaaatatagctggttgaaaattaaaaattacattcgtagatctcatgtttcttttggacagtgctgcttttagactatataacctgctatgtagagagtttaacaattttttaaatttttgtctagatatcatgatatgccagatgttattgactttcttgtattgcgtcaattttatgatgaagcaagacagaggaattggcagtcttgtaagtctatccttactaagttttatatacccttaaaaattaatctgttttattggtctacctttttggctgtgggactcttaattatagtatatacaaacatgtaaattccagaagagatataagtgacctataaatatattttgcttacggcttggtacttactgattatgcagactttcttggtaggggccgggggacggtgggcatggcacgcattttctccctaggtcacccaggctggagtgcaatggtgtgatctcagctcactgcaacctctgcctccaaagttcaagcgattctcttgcctcagcctcctgagtagctaggattacaggtgtgcgccactacgcccggctaatttttgtatttttagtagagacagagtttcaccatgttggtcaggctggactcgaactcctgacctcatgatccactcacctctgcctcccaaactgctgggattagaggtgtgagccaccgtgcccagccctattatgtagacttttttagacgagcaacttttcttctgttcttttggttcatgacgtttggaaaagattattttcactccttgactataggctagggtagacttacttccttttaga

SEQ ID NO: 28731 - DNA, 1574 bp, Homo sapiens
tttgtgatttcgtttgtttttagctcaagaaagaattccacattttagcaagtggcaaagatgttggtttgttaacagttattcagattgctggtggggtgtgtgaagtggtccaggctttctaggggatattttgttaatagtagttgaaactgaaaaatatttggaacttttaattctgtgattttactcttctggtaatttggaaaacaagcagaaatgcttgtaaatatatgagtattgtagttcactcactgttgacagaaacaaagctggaaaaaaaaaattcagatattccacaatagtgaatgaaccaaatcatggtgcattcacacagtcacttactatgtacagcccatcttgtacttgaaggttgaaaaatatttgttgaatgaatgatggatacattttcacagtgtattactaataggaaaaatggggtgtgaagtggtatttctggttatggtagcaaaattttgaaaacatttgcagccaatcaaaagaacaacatcaaaatgtcaatggtgatgatctgtggggtagtagtacacgtgtttttttattttttatatttttattctacagattttgatacttttaaaaacttagaaaatgaagaaaatgctagttattttaacaaatatagctgtttttaacacttatattcaacttaatggctctgcttgtataagttaggctttatatacattggcggttttatttatgtctgtttaacttaggactgtgtacctaagtacagtccatcctcattattcttggattctgtatttgtgaactgcgtacttgctttatttgtaatcccccaaacagtactctcagagccttttggtcatttctggacatgctcagggtggtgaaaaatttgacttgcctgacgagcatgtttctagttgaggttgaacaaggtgttgctctgcctttttttttttttaagctctcgcactgcaaacaagtgtccttttcatggtctattcagtgccacatgttttccatttttgtgctttttctggtgactttgctgtttaaaatggcccctaagcgtagtgctgacatgctctctagtgttcttaagtgctagaaggctgagatgtgccttatggagaaggtatgttagataagcttcattcaggtatcagttaaatgtttgcaaatcaacaacatattaaataaggtacctttaaacggaaacacgcataaaaccaagttacgtatgcactggtttactacagtgttgtgaccagaattttgcaggaacctatccctatatattctctatagcactgatttagtattttatttcagtgttctaggtgactatagaacataactgctgtgaataatgaaaactatgcttagcactttgtttggtacattataataataacatttgttcagtgaataagtggatgaatgatctgttgtattcctagtatcagagaagcagacactggggggaaggttgactatggcaaatccatttgatggatactccatccaggtagggactttcacttgtttaccgtcctgtccctactgcctagaagaggtcatag

SEQ ID NO: 28732 - DNA, 1105 bp, Homo sapiens
atcaaaagcacaatcatgaaagaaaaaatataaaaaatttggactacactgaaatgaaaactgctttgggaaagacactattaaaagaatgaaaagataagccacaaaccaggataaaatattagtaaaacttatatctgataaatgacttatattcacaatatacaaagaactcttaaaaccaagcaataagaaggcagcctaatttaaaaatgggcagaagatctaacagacacctcaccaaagaagataaacagatgacaaataaccatatgaaaagctaccaaaatatgtcacagggaattgaaaactagaacaacaattagatacatctattagaatagctaaagtccaaaatggaaaacatttacattgactttttattaactttactcagaatggcctgttgtatcactttctttgctaatggtggtagtgttaaatcttacggatgttctctttttgtcttatgctttgataagaaagggatgtagtgaagaagtttgctttttaagtttatctgattatatatttactgattactgttcatttttcttagatgatttaatcttactggggaggattgtgtacagcttttttctggacatgtgttgtttaacttcagggatcaagatttttttccccccttcacaaattaggagacttcctgtgatcagagtgaaggttctggttcttcagaagaggatgaatggagaagtgacagaaaaagtgagagttacagcgaaagttcaaggtatctgtttttattgttgtggtcttttaagcattttagtcatagtcttggatggaatcatacttgaattttattcaagaggcaagaatttgcaactgtggaacagtttttaatacacttaaaaggagaccaaaactagatccaacagctgttcctataggagtatttcaggagtttttttttttttttttttgactttaagcagttgacccagcactgttgaacatgcatactgaaaatataaatttaatcttggttgcacttaaaaagactagtatctaaagtatgtgtggtaaaaccacagtatattcattattattgcatgtgttgaatttttgttagttttgagat

SEQ ID NO: 28733 - DNA, 1039 bp, Homo sapiens
tgctgcttcaccttacacttttatgttatggacatgccttctttccctaaacctcatgaaccaacctctgcaagtttccatcttttcttctgcagctttgtcacctctcagccttcatagaattaaagagagttagggccttgctctgggttaagctttggcttaagggaatgttattgctggtttgaccctctatccagacaccaaaactttctctatattagccgtatggctattttgctttcttaccatttgtgtgttcactggaatagcattttatatttcttggaagaacttttcctttgcattcacaacttggctacttggtgcaagaggcctagcttttagcctgtgttggctttcaccatgctttccttactaagcttaatcatttctacattgcgagttaaagtaagatatgtgtgactctttcatttttgaatacttagaagctattgtatggttattagtaggtctaattgcaatattgtatctcagggaatagactggagcagtcagaacacacatggtattcattaagtgtgctatcttatatgagtattgttcctagtgcccccaaaacaattagaatagtaacatcaaagatcattaatcacaaatcacagtaacagatacaataaaaatgaaaaagtttgaaatatggtaattactaaaatgtgacatagagacaagaatgagctcatgctgtttaaaaatggcaccaataaatttactgggttcagggttgtcacaaaacttcaatttgtaaaaaacacaactgtgaagcacaataaagtaaagcacgataaaaagtatgcctgtgtatacatattatatgcagacacatgtatttttttgtctgtatatctgtcattgttatgcacgacttcacattattctgattttaatgatacccgtttgtacttcccttctgtacagagaaacctggctcctgttatttatttagatttttaaatcttttttttttttttttttttttttttttttttttttttttttactttggagatggaatctt

SEQ ID NO: 28734 - DNA, 1020 bp, Homo sapiens
atttcttttgggtcacgctaggagatggtatgctgggtcgtatggcaagttttatgttttaactttttgaggaccctccagactccttcagattggctctaccattttatattcccaccagaaatatgagagttccagtttctctacatcctcaccaatgattgttattattccattttatttatgctatcttaatgggcgtgaagtggtatctcttggtttcagtttgcatttccctaatgaccagtaatgttgaacatgtttgatgcttcttcagatcttttgcttatttttcactttttttggggggtctttttattgttgtaagaattctttatatgttctggatacagtcctttatgacttgtagatatattacttgtagaatttttctcccattctgtgggttgtcttttcacttctttggtggtgtcttttgaggatgaaagttttaaatattgatgacattcattttattttttccttagtagcttcttttactgttgtgtctaagtctttgtttaatatctttgattgatttttaataatcatatgtaagctatttgtcttcattttgatttgtttgagggagaaaccaacttttttggtaaagagtatttaataggccgggcacggtggctcatgcctgtaatcccaggactttgcgaggccaaggtgggcagatgactcctgaggtcaggacttcaagaccagcttggccaacatggtgaaaccctgtctctactaaaaagacaaaatttagtttgacgtggtggtaggtgcatgtgatcccagctatttgggaggctgaggcaggagaatagcttgaacccgggaggtggatgttgcagtgagccgagactgcgccacggcactccagcctgagcatcagagcgagactcttgtttcaaaaaaaaaaaaaaaccaaaaaaaaaagtatttaatactacagtgttaaaatttcctgactgagtaatgttttgaggaatgaagtattagatatgactgaaaagttcattt

SEQ ID NO: 28735 - DNA, 1321 bp, Homo sapiens
taaggtgacatccttttcagattattgttattttccctcattcgtggtaaaccagttaacttacagcatagtttggaaaatgcccatctaatgtgcattttctcatgttttctaaggaccttaaaagtaaaactactaagcttgagttaaaactgtatggcaaaaatgctaccttctttttaagcctttttttctttttgctttaaatccttctggaaacttgacggaatgcccattttgttgatattgtccttatttaggtgttgattttcattcgcatgtttttctgtgtttcagtcggattcagtggttttggtatcacagtctagacaaaggacatgtaggcgtaaatatccaaattatggtagaagaaatcgtagctggcgtgagttatcttctggaaatgagtcttcaagctctgtaagacatgtgagtggaaaactttaaaatgttataagataatcttaaatgaatttggcttaattctttactttgaatgaatataccccaaatttatatgaaaacacagcattctgcagagattaatatgaaatttcacattttgaatgttaacaaaaacttttaatggctaagatagtcacatactgtatacttgtgcaatccagtggttttacatgttgagcatcccaactcagaattttgaaatgcaccaaaatctgaaactttctgtatataaacatgatgttctagtgtgcatttcagattttggatttttggatttggcatgctcaacctgtaagtgcaaatgcaaattttccaaaatctggaaaaatacgaaatctgaaacaattctattccccagcgttctggataaggggtatataacctgtagtatattgacagagttgggccatcgtcacctctattaaattttaatacatttcatcatccctaaaagaaaccctattcccatttacagtcacttgccagtccctccctctcccccagcccctcacaatcactgatacattttctttttctgcatttgcctgttctggacattttatatgaatgggccctttttttttttttgagacggagtctcgttgtcttgcctggctgcagtgcagtggcgcgatctcggctcactgcaacctctgcctcccgggttcaagcgattcttctgcctcagcctcccgagtagctggggctacaggtgagtggtggcccagctaatttttgtatttttagtagagaaggggttttcaccatgttggctaggatggtctggatctcttgaccttgtgatccacctgcctcggcctcccagagtgctgggattacaggcgtgagccaccac

SEQ ID NO: 28736 - DNA, 1067 bp, Homo sapiens
caagatcacgccactgcactccagcctgggcaacaaaagtgagactccgtctcagaaaaactctgtacttgaagtaagaattatgggtagtagctatgttaaaaacatatctaagagagtaatttgagattagtcggagaggcttgtgtaattaccaccatcaattgcactgttctccgaggactcttggggcagagggagagctaaagtcttgttgaaggcttaaaaaaggtcttacctcccttttttcccctttcttaagacatagagaagaaattaaatctcagggatttttctccacattggaaatgacccatagttgctctgttccagttagagactctggggaataagattttagtgaaatatatcgagtatggtgaggggcattagtgtgaaacagcgtaataaagttttacagaaatatgtttccatgcttccacttgcaggaatttcagaggctgctttcaggtttttgtggtatttagtcctctacaggaagacttttgttggctttgaatcttttctctgacttcttggtgaatatgtagagtatctttttaaactggttatttttcaaaaatgggaaattctgaccattgttaatgtattttaatttgtaccctaacgaaatttttttttgttttctgcttttatatgattatatattaaataattgaatttgtaggtgatggagaggtgattgaacaaattataagcctgcaaaccaatgataatgatgaacgcagcccagaatcgagtattcttgatggaatgataagacagttgcagcagcagcaagatcagagaatgggagcagatcaggatactattccaagaggactttcaaatggtgaagaaacaccccggagaggtaataaatagtgataaatgttttacctgaatatggctgcattgaaattaaagagtaaacgaagtctttgtcaggtacatgtaatgtgagaaacttaagtaaacaatgtatttttacaacttaattagtagtctgaaggtagctttatgaggtgtgagataatgtagtaacaaatgggtctttgaatttcaag

SEQ ID NO: 28737 - DNA, 1025 bp, Homo sapiens
atcaattttatttttttggaatagtgattgatgtatatgcttaatgaaacatttgtttttatttttattttacagagtctcactctgtcacccaggcttgagtgcagtggagtacagtggtgcagtcttggctcactgcaacccctgcctccccggttcaaacgattctcgtgtctcagcttcctgagtagctgggactacagacgcacactgccacgcccggctaattttttgtatttttagtagagacagggtttcaccatgttgcccagggtggtcttgaactcctgtgctcaggcagtccacctgcttccacctcataaagtgctaggattacaggtatgagccaccatgcctggctgaaactttttttttttttttcagaagggatatattgtcacaggttatccacattaaaaaagtttacatagcaaatcacttgcatagaattggtcctaacttttttccttttgtgtttcctagattgaaggacaaggacatggagctgtgtttgactgtaagttttcacaggatggacagcattttgcctgtacagattctcatgggcaccttctgatatttggttttggatgcagcaaaccatatgaaaaggtcatttttaatactttgttgtagcatgcaagtaatagttatcagctgtgttttggaaataagtagttatgagctatgttttggaaacagtttagctgagtgatttgatttccttgtttttctagttttaattaactgtttaatatttgtttcctttaaaatgtgtgaaccttaaaatgtcatcctgtgaacttcatttttctagattcctgatcagatgttcttccatactgactatcgaccacttattagagattctaataattatgtcttagatgagcaaactcagcaggctcctcatcttatgcctccaccattcttggtagatgtagatggaaatcctcatccaaccaagtatcagagattagtaccaggccgagaaaattctgcagatgaacatttgattccacagc

SEQ ID NO: 28738 - DNA, 1092 bp, Homo sapiens
agcatacaggaagagatttcattttaacagttcaggacagctaactacctttgacgaatacattcttttttttttttttttttttttgttgactgggctcaagtgatgctcccccctcaccctcctgagtagctgggagtagctgggactacaggtgtgtgtcaccacacctggctaagtttttttgtgtgtgttttttgagtagagatggggttttgccatgttgcctgaactggtcacactcctaggctcgagcagtcctcctgccttggcctcccaaagtgctgggattatgtgtgtgagccaccacacctagcctacattctttttaaattttttgtttttagttgacctataatacttgtagaaagacaaagaatacagtgtgatgtttcagtgcatatatgcattgtataaggatcaaatgagggtaattatatccatcactaagcatttatcatttatttgttgtggtaatattcaaaatcttctcttctagctgtcttgaaatgtctatcacattgttatttgctgtactcaccttactgtgtaatggaacaccagaacttattcttcctgtctgattgtaacttaatacccattgaaacaacttctcatggtcccccccttcccccatactccccagccataggtaaccactgttctattctctgcttctgtgaaatcaacttttaaaattcaagggtgaaattacacagtgtttgcctttctgtgccttgctatttcacttaacataatggcctttaggttcatccatattaccacaaacgacggaagaatattctgtttataatgttccattttgtgtgtgtgtatacacggacacacggcattttctttgttcattcatctgtagatgggtgtttaggttgattcatgtcttgactattgtgaatggcactgcagtaaacatgggagtgcaattatctcttcaatatactgatttcatttccctttggatatacacccaaaagcatagggaacaaaagcaaaaacagacaaatgggattacatcaaactacaaagcttctgcacagcaaaggaaacaaacaatatagatcgaagagacaa

SEQ ID NO: 28739 - DNA, 1039 bp, Homo sapiens
cagacctatctagctaagctgctgttgaattcttggaccatagagactatgagataatgaatatttattgttgtccagtgcagctaaaaattttggggtaagttgtttcatagcagtatataattctcttctgaagttgtgctgaaggggaaatttacacccaattcatgtattagaaagaagctgaaattcagtgatcacaagtgtatttctcaagaagttaggagaagaacaaacaagaagaaagaaattatgaagataagtacagaaattaaggatagaaaaaatgtgcataacggtagtgaggatcaacaaagccagaagttctttgaaagactaaaaatactggtaaaaaacacattgttcagggaacaaaaaagaaacgtgacaaataaccattatcagatttgaaaaaggggtatcactacatatccttcagataataaaaagaggatattttaagcagctttataaaggaaaattgaaggttaatacagagaaaaacaagacacaaaaagaaaatctgaattgacttgtaactatgaaatgcattgtatctgtagttaaacattttctctacctacttattatttaggtaaaaaatgtttggcgctaatctcccaaggaagcaatcagacaaatccaaattgagaaacagtctgtgaaacaaatctcttattcctcaaaagtttggtttcaagaaagatagaaaggtggagagcttttcaataaggaacctcaggaaaagggacaaacgttagtgtaatgtgtgagccttgatttgggttctagatttaggagagaaaaaagctgtaaaggatgcttgagaaatttggaaaatttgaatatggattatataataatgttttatcaatagtaagttttcgaagtattgataatcatagttatgtaggagaatgtcattgttaggagatacacactaaggattttagggttgaagtgatgatgtcagcaaggtagatttggatggttcatgtcagtgtgatatctacatcaggaagcaagtgttgcaaactat

SEQ ID NO: 28740 - DNA, 1065 bp, Homo sapiens
gctgttcttgaattcctaggatcaagcagtccttcttcctccacctcccaaagtgctggaattataagcctgagccaccgtgccttgctgagatagtgttttattttggaagtttaagcaagatttttggtttgtgtacttacttttagttaagtatattgttctctggaagattttatagtttgaaaattaattcaaattcttgctaggtttcacagttaacattttatagtttgatatgaatgtgttgacaatatagcagcaaataagaaaatttatactttgagagagtgcctgttttaaaatcatcttggaattctttgaaagtggagttctagtcttccctgaaatgattcttcttgtaacgggggctcacatgcgtttatcacctactgaatatatctgaacaatctaattgggtagtagtacattttttttttttttttttgagacggagtcttgctctgttgcccaggctggagtgcagtggcgcaatctcagctcactgcaatctctgcctcatgggttcaagtggttcttctgcgcctcagcctcccgagtagctggggctacaggcacgtgccaccacgcccggctaattttttgtatttttagtagagatggggtttcactgtgttagccaggattgtctcgatctcctgacctcgtgatccacctgccttggcctcccaaagtgctgggattacaggtgtgagccacctcgcccaacctcagtgggtgattttaacagcatctgaacacaactgatgaaactgaagagagaattagtgaagtggaattgaggccagaagaaaatagatagaatggagtacaatgagtaatcattgcagccctagggaaaaattagaggactaataagaagactgattgctagcttctttttttttttttttgagatggagtctcactctgtcacccaggctggagtgcagtggcgcgatctcggctcactgcaagctctggctcccgggttcacgccattctcctgcctcagcctcccaagtagctgggactacaggcggctgccaccacgtccggctaatt

SEQ ID NO: 28741 - DNA, 1048 bp, Homo sapiens
taaaattctctgcatttagcatagaacattgaattttattacataagtgtttaatgggtccttctgcattaaaaagttgataaagatatagatgttaagctaaaaagcttgaatttattctgagatgttgtttgaggttttatcaatgtgagttcttaattttccattttgtagctcactcataacttcattgaatgtaattgtatgtgtctaataaactctttaaatgctagaggtatttcatttgatatttagcttctgaaagccctttgttataaagggaagtgattttctaaatttggtagcagcttgaaaacaagcaccacaaatgtaaaactgcatggttctttttttactaatttaatttttttgccaagttatgtgctagcaaaatgtttgaaattgctattctttttctgttagcttggtatatatgacttagactaagtatatgtatgtgatataatatatgtgtacatgtggctaaactgctaatgggcaaagattgttggttcttctgatgctgagtatacatcaagttcatcccatgattattttttattacgagctattgctgatgtgatgctactcttagctgcaccaccagtataaagcttaactgagaaagaacacccctccctcttagttccgtgccagactggtttgttagctttagttgtttcttagtgctctagccatgtcaccctgtggcactaatcaggacactgtttatattcttcctcttctgtgtccctattcactttgtaattattctattttagctggttatatggtagttaattggtagcctgttttcctttgttttctttacttgtgtcaagctccatgtcgttgttttgtgatgagcagtgatttagaactggccagaccttagaagagtcttcagcaagctgccctagggtaggggcgtattctctgtttgttttgtactggtaccccaggaggatgccttgtaactgctctttggtcatgatagtggtaatgaatccattcatgtaaaatgcaatatgtctgttagtttggggca

SEQ ID NO: 28742 - DNA, 1031 bp, Homo sapiens
gccgtcctgctctaggctttccatgtcagaagagatcattctccaccctgttgtcctatctctagccttaggagggccactacagtgcatttcttccagggctgccctggctttagtgtttgggccctatgcagttggtgaaggcctatgggaaaaaattgtggtaggtgtgcagactcactgtaactgaggcgccttaggattctaatcagtcatgccggccacaagtagccattaagtttgttagaggtttgagtggttttttcttattcttttctgaggtcagttcttcctgcctctctgctaggggtgtaagcagctatgagtcccttttctttaactttattttttttagatggagtttcactcttgtcgcccaggctgtggagtgctatagcatgatcttggttcactgcaacctccgcctcccaggttcaagtgatttcatacctcagcctcctaagtagctgggattacaggcgcctaccaccacacccagctaatttttgtgtttttttttttttagtagagatgggatgtcaccatttccgccaggctggtctcgagctcttgacctctagtgatccacctgcctcggcctcccaaagtgttgggattacaagcgtgagccaccgtgcccagcctgagtcccttttctgttcccagaaaagcttgtactttgtgggattagttaatgtagatttttctttgtttcttcagctgtgatgggtttatacattttttaaagtttatccagcctattctcattgtcgagatgagagcaatatcttttatctcttacgttggagtaaataaatgattatttttcatttaaaattataacagacatatatttgtctatagtaatccataggtatatccacttatggctcctggcacctaataggctgtcagtacttactgaaagaattaatgttttttactgcctagtatgttgttgagaaccagttatccatgatttagatactaaatgatgtcttataggatctttgatatcttaacatctctct

SEQ ID NO: 28743 - DNA, 1050 bp, Homo sapiens
cacacctggctaagttttttttttttcccctagagaaaaagactcgctatgttgtccaggctggtctcaaatgctcctcccaaagttggaattacaggtgtgagccaccacaccttccctgatttttgttttgtttttttttgagatggagtctcactctgtcgccaggctggagtgcagtggtgtgatctcggctcactgcaacctctgcctcccgggttcaagcgatttgcctgcttcagcctcccaagtagctgggactacaggcgcacaccactatgcccagctaattttcgtagttttagtagagacggctgttcaccatgtgggccaggatggtctccatctcttgaccttgtgacctgcccgcctcggcctcccaaagtgctgggattataggtgtgactcaccgcatcctgccccttccctgattatcttaaatctctttttatcttgaatagtcttgtttctatgccattgatttactggagaccaaatcatttatcctgtagaatgttttacattctgtatttgtcttattgttccttatgatggtaacttgttcctttttcttagtggttttcatcttcagatgagaatcatctggggagctttataaaatctggttgcccagagtatgccccaaaccagttaaatcagaatctttgtggtgggactggacatcagtattttaaaaagctttttagatgattctagtattagtgtttgtaaagccacaatttatcttaaacttgtgaccatgctgttattccaacctgtatttgggggcaagagtatttttggtacttttgcttttttttttttttttttttgagacaaggtgtcattctgttgcccaggctggagtgcagtggtataatcttggctgactgcaacctctgcctcacaggttcatgcagttctcctgcctcagcctcctgagtagctgggattacagacatgtaccactatgcctggctactttttgtgtttttagtagagacggggtttcaccatgttggcccggctagtctcgaactcctgaccttc

SEQ ID NO: 28744 - DNA, 1050 bp, Homo sapiens
ttgactctgggagtttgaggctgcattgaactatcctcctgccactgcattccagcctgggagatggagcaaggcctagtttcttttttttaaaaaaaaaatttatataaattttttggcttttgttggtagaattgcttaaaaccctacttactattgtttaaaatcacttaaattctgtgataatatggctgtgatttggctatgacatatggcatctatcattgcctccctgatttggtctgtctggtgggtgtcctttctttttttaccttcctctctgccctccagtcccccaggactgagtgatgatgagcctcatgtgtagagaattattcttttgttaatggtatatgtatcgtttctaaactttcaaagtcttttaaaaataccttattaagaagtattccaggccagctgcggtgctaacacctgtaatcccagcactttggcaggacgcttgaggccaggagttctagacctgcctaaagtgaggttgaggatgtagtgagccctgatcaagccactgtgctccagcctaggtgagcgagaccctgtctcgaaacgcaacaacaaaaaagaagtatttcagatgtacacaaatgagaataatgtaatgcaccgctgtatatcatcaaatttgaataataataatttttttttttgagacagtctgttttgaggagcagcctcggctcactgcaacctctgcctcctgggttcaagtgatcctcctgcctcagcctcctcagtagctgggattacaggcacctggctaatttttgtatttttagtagagatggggtttcaccctgttggccaggctggtctcgaactcctgacttcaggtgatctgcctgcctctgtgtcccaaagtgctgggattacaggcacctggctaatttttatatttttagtggagaaggggtttcaccatgttggccaggctggtcttgaactcctaacttcaggtgatctgcccgcctctgtgtcccaaagtgctgggattacaggcgtgagccactgcgcctggccaacaaatttgaattt

SEQ ID NO: 28745 - DNA, 1163 bp, Homo sapiens
gattggcctcgctgctcttgccccgcccgggtctgtccccccacttgttccctaggaatagaatcattggtctctgaaggtggagaaatgttcttgtgttgagctttttattttttgttttgtcagcagcgtcataaaaatcttgcagctgtatgaatatgccactgtagtgcttgtgctcctttctactgtacaatatttgttgaacgcagtagttgattgatgagtttcacactgatcttgtagataacacaataaagtgctttaaataggcacttttcttttgagctcggttaatcttgcattacagtctcatttcttttgtgaacttggttaatgtttctatataacttgcttttatctatagttacagcagttgcagggattcgtttgtttttactggagacatttttcaggaatatatttttgccgtttcgttattaggataaaggaattcattaattgccaggccatattcagcatcttgtataaggaaaacaattgagaaagaaaagagcttctgagtgatcttttaccacagttggaagacctgtaacacttgagtggtagagtatggtggcaagtgaaaagaagaaaaaaaagtggtagaagattactggttttgaattagacaacagaagagaccagaggatgtgttatttccatgaacagttaacacttgaagcctggtgcaagtaataaataattttaatatttgctttcttagattttgaagtaaacactttaacagtggatgttttcaagggaatgagttctaaaaattctgatggcaatgtgttgagtttgacattttgagatagtttatttttgtaaacgttgaggaaacatttaaaggatgccctcttttagttttcttcacggataatatagccttatcggtgaagcggaaaagcattactggttatgacgctgttgtcgtgctacctgagagaaaataacttgaaacaaatgtagtgctgtaactactggaaaagttacttttaaaatacatttataggggctgggtgcagtggctcatggctgcaatctcagcacattaggaggccgaggtgggaggatcacttgaggccaggagttcagaccaactcttgtctccacaaagaataagtaacagaaaattaggcggctgtggtggtgcgtgc

SEQ ID NO: 28746 - DNA, 1035 bp, Homo sapiens
gaggcttgacatgcaagtactattaaaatctccttagcatacattgttttcctgattactgggggggaccttaagttgtctcatgtaataggtgtatcaactgatgtgtgatagacattaatatgacagctgttatggatacagtctatacaaaatgagatcctttcataagcttgaagattggggtttcacgctcatgtgtgagatgtccctctctcaaaccttactatgaagtcagcaccactgggcacattacttgtctgacatgaaggggaaaaagtaaaacaaaatgtaaataaggagtaaagcatgtacttaaaatatattcttattctatcataggataaatcttcagacaaaaaagtgcaaacaaaagggaaaaggggagcaaagggaaaacaggccgaagtggctaaccaagaaactaaagaagacttacctgcggaaaacggggaaacgaagactgaggaggtcagaagtgtgtgtgtgtgtgtgtgtgtgtgtgtgattgctttgactctgaacagtagatactaaattgtacattttttgtagcagataacagtattcattataatattgaacaaagttttgtacggtatcccaaagtgattggacaaatggttttctatgatttatgttattggaaagtaaatatgtaaatggcttatttaagagcaagaaattttaatatgctcaatttcagatataattcaatctttgttttgtttttatattctggatgttgcttttaaatatatttttgaaaatttattccccttacttgcatttttcctggcatttttttcccactttcatttctaatgaaaatgtttttgtttgtatttttcttaaaggtctaaataataacatagatcaagtaaataaaaagactagtgtcattaatctttattcttagagacagtgtctgttagccaggctgaatctttattgttttaagctgtgaggaaaagatgtctttttttttttattaatgaagcagtgggagtagagaaggaacaaagaagtctgtaa

SEQ ID NO: 28747 - DNA, 2452 bp, Homo sapiens
aatgcggggcttccattttgattagctattggagctttatttatactttaataattacggtaaataatttttctagtggtcgaggcaaaaatgtaatggatatattcatcctggtttatagaactatatcacactaatgctgctgcagatgttaggagacttaggacgacaaaaaatattaaatattaagtctacaaaggaaatttattctttgcgttgcgtacattgtggctggtgcttggcttttaattcgtgcttgtacttccttttttgacaataaaagagtcaagatagcaccgaggccaggagaaagggaacgtgtaagtttttatatatacagtttccaagccaacttcgggaagccttaacctttttacggggtgggggtggggaggtaaaaagttgtgatctctgagaaaataaccgccactactctggaagtgttcatcagcagttatacaaaaccgtgattttggctgctccctaacaaattcgtgattgcatgattcgaattgcaggtctgtagaatgaagttggctttgggtgtacgtgtgtttgataacttgcagggtggaaaagcagaacatgtgtaaaacaagtataagctttgtgtttggatatagcattgaaacctgtaaagctctacatgttcttcgcggggtgattaatttttatccaaaacttaggtgagagtttgctatttgaagtctcaaaaaaaatttttgttaatgccttcacctctttcctaaaagtgtaggtagaagtttagcactgcagtcatcagaagaggcaagattaatttccttgacattgaggagttgttggataattactaaatttgtccttgttaaataaaggtataaaacaaagatgttttttcttttttaatttaaattttttacagagctgagtgtaaaaatgttaactatgttttctttaacagaaagttctgtttttgtgatccttttaaaaataaagcttcacggaaggtatgagaatagtatttttcaactttaaatttctcattaccagaagaccatgtggtaattctctgtatacagttagaacagcacggaaacttgaaggcctaaaaaattagctgaccttgttaaaaatgttggcgtgagcagtatattattacctatctttttttattgtgtgtgtgtgtgtgtgtgtgttttaaactaattggctgaaatatctgcctgtttccctctttacatttttcttgtttctttccttatttatctttgtccatcttgagatctactgtaaagtgaattttttaatgaaaacagttccaagttttactctcagtgggtttgggacatcagatgtaattgagaggccaacaggtaagtcttcatgtcagtgtttgttgaggaacgagcctatgaggtcagttttcccaaaaggaaaaagggcagaagggatttgttcatttttacatctcgtttctgtaatacacctttgacttcatggttgatcagactttgaagtctaaacagaacgtaagcacttggtgtatcgattatcatactacacagtagacatgttttcaaggcatatcttgtcactgtgtgtgcttctgacttgtatctttccctagaactaaatattttgaaggtccaaacattatactttgggaaacttgattgatttttttttaatctagcttttcagctgataatggttacacgtggtattatttcaagtccaagatattatgtattctattttaactgtttcccagttttgtattttttgtattggaatgattatgaaattaatgagaaatctttagaaacagactacaaaagagtagttcttaaatacagaagtgattgtgaaactttgtgatagcaatgtgtgtagtagcagttttgtctcaaatacatttatcatttgttactcaaaggatgttgaagtattaaaagtcattatgctgtctgtggaatcctactattagtacagaacaccctgcagtgatttttccgcccgtgttagcattgaagttgtgagctctacttgcttgtctttatggccctttaattcaagtaattggtcagtatccgtatgggtcttttataccacccgctgggggctaaactaatttagctgctgctgtatacttactaacaaggaataaatgttaagctttcttctcagtattgatggatggtatctaaaagtatttttatgtttctttaacatggcttaaattttgaacttaatgtatcaagttagtatggtcatattaatacctgtgcttttcagattcttcaaacacctaaatgaaagtgataaattcaaaactgatccttttagttcctcattatatgatatgaagggattaactgtagcaggatagtcaacctgaccgtacggcatggtgctttttttcaggtgattggtcttaatgtgagggttaaggtcttgtgaggacagtatt

SEQ ID NO: 28748 - DNA, 1035 bp, Homo sapiens
aaagtaacgtctcaggctcaacactgcactgcagtgggtgtccttgtaggggcttctttatttgccttgagaattggccacagcacttacctccagcttcttgcctataaatacttctcaaccaagtaggtgtttttttctcccaaatcatgatccatgttgaccttgcaaggagacaaagtcctgctttaaatactttcaggtgtggttggacctagacatctctcactatctttgaaccagttggtcaccttgctccatttaggtgtatctgaggtgccgcgtctctctacagtctcacaaccaccaaccttcagcatgttatgtatttatctgcctgtcattcccacctgactttgagcttctcaagggcaaggattggctcttatccatcctgtctcctctgcacgtagcacagtgcttgctacatatctgatactcaactaataatgtacattaagaaatgagatgaatatatttttgaaaaatgtgcttgcatatctacagttagttgagtctctacagtaggaatgatgctgataatttattttttaacttcgacaaacactgtgactcttacatcctgattggtaaaggctgaatgaaagttaaggaaactaaggcttattgagatacaatgtggcaggcatttgccaggatctgaacacacgccatcacatttaaaccacaccctaactctgtttgcatttttgtctgacattatggttgaggatataagtctagggaaattatttgctcaagttattatatgttataataaggagaaaatgaacattttgtttttagtgcttattcacatgaagcactgttctaagactttaaatatgtattatcttatttaattctcccctacacctttaagatagagagtgtcattgtatccattttaagaatgaggatacttagacacagggaatgtaagtaaatatgcagatcagatagggagcaggtggccagccagcatgaaaacctagtgacttggtatcaaaggttacagtcttaactgtgaccacc

SEQ ID NO: 28749 - DNA, 1074 bp, Homo sapiens
gcaatctcggctcactgcaacctccacctcccagtttcatgcaattctcttgcctcagcctcccaagtagctgggactacaggcacacaccacccaccacacctggctaatttttgtatttttaatagagacggtgcggggggggagtttcactatgttgaccaggctggtctcgaactcctggcctcgtgatccacccacctcagcctcccaaactgctgggattacaggcatgagccactgtgccaggcctctttgttcatgttagtgtatggagacttttttatttgttcaggctagtctgttcgccttttcttcctttgaagaaattatctgttctccttataagttttacagtgttcaaactttggatcatgtctttttctctctttgatctctttctaaatatccctttatttaaaactgtgcatggattttctcctaaaatcatgtggtgaggaaaatgaacttttacatttcttcaggaaagtaaacctggtcaaagactacagttgggagaaattttagacactcacgtatgtgactagactgtggatgtgaatggtgtctcgttaagcttgtctcaggctttcatatggcaaagtagtatttttaagttctttttaggtcctgcctttacctcaggatgcattttcttataatctgattacaatattttttaatggagactattttctcttgtacaagttatatgacaaaagtacatttggcttgtcttctgtttgtttgagttgattgtgttctgattaggaatgctaagtcacctatgcaaaagcaactgagaactaacttaaaaacatgaattattggggaaatgtttgtacacccatgttcatagcagcattttttgcaatcgccaaaagataggaacagcccaaatatccatcacccaatgaatgagtaatgcaaatgtggtacataacattccctggaggatttgtcagtcttgaaaagaaagagaactctgacatatgccacaacaatcttgagggtattacgctaagtgaaataagcgtgtcacaaaaagacaaatactatatgattccacttata

SEQ ID NO: 28750 - DNA, 1051 bp, Homo sapiens
acagcatgttttattctggtgttgatttgcttggatgttccacagacagtccaagctttttgtaggtcagagaaacatccttaacctggggcaaactttgacacccagcagatgccttcaatcctctttatctatcatagtgtctgtttttctgtggtctcttttactacttcaggtttgctattaatgattatttgaactcatttcctcagtatacaattgggggaggagtggagaagattaatgtcatagtgtcattttttccctgtattttgtgggtctgacctcgaattctgatccttatactctcttaagtttatacatggatagaatgttgtatcagaatgtacttataatggttgcctttactaagagtatattaattatgggttgagcttataattaattgacttcatgattgtaaaagtgaagggcctggtattacaccgaactgcttcttagcacaaagtaggaactcaatatatatgagtggaatggatgaataaaagtgagtataaataaaccatgactgctaagatgaaccactgttcaattgtaaacaatgcaagataacccaatcgttttgacattatgagggacgtgcatcttttcttgagaaatggggtgagacattaagtcaggggcctgatatgaggaagtggtagattcatttgtaccagctgtttagtgacaatgagaagagattacagaagtccagtgtgtctagactaggccacatgtgatttttatcttaaatctgatagtggcatgccagttaggacacatcattcggcaagatgtaattgatatctcaggtctgggaaaaaaccttaaattgttttgtgctcttctgagtggctagtatgcaagcccgcacatttaagattgacatcacttttgagggtgtttctgcccctgagtagggacctgccacatggtggcaaatgtgtttctgtgaaatactttcccagcctgtatttcatggactagtcctaggtggtctttgcaaaatagaaaaaagctgtgtccatgttcaatgattcaatgtatt

SEQ ID NO: 28751 - DNA, 1059 bp, Homo sapiens
ggaaagaaatttgaactatttaattactgattttgattcatacaagccttgactcttttagtattaaaatgaagaaacaggaaacagttttaagtctggttttacataaaatttacacttttttcacactgaaaataaaacagtaaaagccagcttatagttctttctaaatatcccaactttctcattattggatgcttctgcaaaacagcagtatggtgataccactcccagtgttgaccttgatgacctgagggtcccaaagtggcttcagcattatcatggagtcaccacaatgatcaggtagaagctggtgttaggaccagcgtgaatgggtcacaggggctgaggggggctgttgggaggtagcccatgccgtatactgaagagccatccatgccacttcaggtgggtgattgcagtggactctcttaccattgattaatcttcctaatattgagtaaagcattgattcttctcataagcatgaactgctggatgatgggaacatttctgtgattgtatcataagagaaagacaagtagaaagataattagaactgctgcaattctatgtatattttaatttaatttatttttttaaatacaaaagacagctatatttcctatataataaggaaacttattactttaaggaaatatactttctcacgagagaaactcaagattcaattcttttcacagttagccccgctgtggtgtgatttgatcttgggttccatagagatacagaaaatccaagtcccagtctgcttaattgccatgtttattttttaatctcggctgtagagcatttttaataactgatatgtagcttgcagggtagaaataacaatgctttggaatattacctgtgagactttaggaatgagctgaagacacccaacaatgacaacaatggcctctaccagcaaaacgggaaccatgactactttatcactcctgccggatctagttcttgtcagttcctgcaaaggctagtcacttgtctatttcgttggctagtgaaaaggaaatgcacaagaaatgtggaatgctg

SEQ ID NO: 28752 - DNA, 1085 bp, Homo sapiens
gttatattgctttcaacactacaaatttaaagcagttataggagcccagaggtttccaaatggcttccttaaaaattagaagatgattttaaattccaagaggaaaaacaaaactagcattattgtatacttaccctcacaaccgtcctaggagctggtacaattttaagagaggttaagtaacttgcccaaggtcacactgtggggatgtgagccgcgtaccttggctcagtgtctggtctttgccactgtccctatatggatttacttaccttattggagttgtaactagcagacccttctatgtctcagaagacaggagagggaacatcggaagaaatgactgatttctaagcatgtgagaggcaggtgactccgcactatcgtgaccagaatttcccctgttctttttgcagtgatgcctgttcttcaaaagcagtggtttctttacgctgtataggtaagttcatctggagtcccccttttgatacttctaactaggaaaagctctctactttcagaacagtactccctgtgtctctgggggcgtgggagggaagaaggtggggtcacgggttggaatgtgcccagcggcgtctcgctctttccaaggagctcctggtttagatttccatggcctgtagacaccttcagccttgggtccaagggacaccccctgagatcaggcacgctcaagaagctgacaaagccctacactttatgccacccatgagctggaggcccggcaggtctctttctccagaaagcaaaggggggtggcgttagtgagccctggcagccacctaacgtggacttggagcatctgcggggctgtggtccagcaccaccgtgtggccaccaggtgctcatcagccagtgggacccgggaggagggacaagaccagagaacaacagtgctcttgcctcttctctcctgaattttggacggtggcttagacttgggtgtccccatctctgtgtttagagtgcttacagtttccaaactgtttgcaaatgtggaagccaccgtccctctcctctgggatggcccagtgctgtcgtggggccgtggtcctgagctcagc

SEQ ID NO: 28753 - DNA, 1032 bp, Homo sapiens
gcctggaactgctttctcagggaggctgctgtcgaaggcacgctgggtgctggccaggaagtgacaggacatctctgtgtggtgcccctgggacatcttagggccctgtgtaccctgacaggccgcaggaaagattgcttttgtgtggcgtccttcttaatcaggcatgttagtcaccatcaagaagcccaaaaacaaaccgaaaaatacctttacgtgacatacttattttttctgtgaaatagctactggtgtgcgtagagtgcagcagggagtgtgtgtcggggttctgagagtcagcgcctttgttcctgaagacgaagtgtggaagctttgcatggactgaccactgggcttctgggcagtcctcagtagacagttattcaatgcaggaaaactgtaatccagaatcctgcaattagatcctaagttgccattccagtgctgccattcgcctctgagatgggctccctcagtgctcagggctcgattcaaactggaaatatcacagcaactgtctacttcatgaagcagttaaatgtaaatagtatacaaagtaatagtatcaaattaatgcttgatattattcaacattacatatactaaataccaatattaagatactagttggaatcaatttcaacttaaaaatgaaataacttggtttaaaatctcaggctgcatttatatgtccagttagcccaaaacagacgcttttcaaagggtcacacgcgggtcacgttctgctgtgtctttcttttagaggcagcaaaaccccggcaggctgctttcttagtcttgacagctggaccttgaagttgaagggccatgtgcttgggggcagctgtgagccctcagctcttggagatgcagagtcgggtgctgatgagagtgtttgtaactcttgaagcatttgctggtcagagtggatgccacagtagctcgctgttgaggacacggggtgaggggcagcttgggtgggaagatgaggaaaggcggaggggaaatgcagccggccaggagtccgagaca

SEQ ID NO: 28754 - DNA, 1045 bp, Homo sapiens
tgctgagccgcacctgatcctgcaaccttcgaggtcatcacggtcatcatgtgcaaggggtcacgtgaggtcactgactccagctcaaaacgcatcttagtaatatccatgaatcgatttccaatagagtttttttccttttttttttttaactttatttcaaacatacattatgtgttcaagactgttatggccaatattgtgttttagttttatgttaacatgataaagtcatgtgcactgtaggaccatctgtccctgtccacccttcacagctgcccagatgcagagggtcgcgcggctgtgtgtgaggagtgagcctccctgctgcccccaggggctcctccgggttgtctcaggattctctgcaatccaaatgtatccattctggctgaagcccagccagaatcccgagtggaagaaacgggggaaaagtcatattttccttctgtttaaacttcaattccaaaggttggtgtatttcatgaccagttttctataaaaatattgaatgagtttggctctttacaatggaaaagtgtaggtatttctgaaacacagagaaaatgctatttcctgccaggtggtaatgaaagcagagaggttagttcactaatagaagcattaattgcccctaaaactgaatgtgcggtgaacagccaggtctgcgtgtgcggggacacgtgctgtcacgtctgtgtaccagtttcgggggcaggggccagggttgggggaggcacccagccctcctgctgcccacgacaagaaacactgagaggtgtggggagaagtttgctcttaactttcctggtactctgtttgtggccacagtgagaggacaaacctgccttaaggtgtcctgctttgccagttatcccagatcctgcactcactgggagtccatcttgaggaaacactggcatggctgagtaattgatcaggagcagtcctgatgttgccagcagaacaaaggatgattgtgtttttcaaaacgcaactttctcagcacttcactccaaacagcagacttttgaggacagggctg

SEQ ID NO: 28755 - DNA, 1043 bp, Homo sapiens
tgactgaaaccttgtcacatggcgcatgactgcttagctctgccctgggggctacgtgcagtgagtgacccatcctcctaatcctatgaggctggggtactagccctgtctttggacggaggaaacagcacagagaggttaaggaactgaccccaggtcacagtggagtagatgaagaaatcaggattggtccatggcacccggctccagtgttgctgctcaccgtgcaatggcctcctcccagatttgggggcagtgtgtgtgtgcgcgcgtgtgcatacctgtgtgtgtgtgcatgcgtgttcaaagaaagccctagtgaaggttatgtgcgtgatctgcccaaatctagcattcctgctgaaaaagcgggtcacagtgcctgtcctgctaagccggggtcagggcatcactttgcccatcaagcggggctgctgaattttaaatctttctcatccatgttatgggtctttttgacatagatcctcctcataaaacctgaagaaactctatgaaattcctggtatttgatgtcttttgacctgcaaaacagcaatttcatattgccgaagctgacactacccaggggagcaaatgttatttaatgttgccatgaagattctttgctcaagggggcgaaatagatattgactctcctgacccccctcccaaatgacctgattctcatacgagcattgtttccttgttttataaatgcagtgtaatccaaaatattagtagctcggtagcttaagattcttaacttattggaaggttctggtctgtcctgtttgtcagtatgattgaggctttgtaaaatgcccctggttgtccctaatcccaggtccacaatgggctgtgtgggagtgtcccggcgctgcgctgcccccataaaacaccagcaacccagtgccttcacgtcagaaatgtgcctcccgcagtgctggaggccacacgcccacggtcagggtgtcagcagggctggtcccttctgggcaccctgagggagaatctgtcccgggactctccccaacctctggtgg

SEQ ID NO: 28756 - DNA, 1059 bp, Homo sapiens
tttctgcctcttacttctcttcatctcatgctcattccctttaacttaagaggatcgctatgccaaccagaattaattgcctgcacagtaagttatttttgtcttatttttctcaattacacgtagacgtcctaggagtgcagcctgtagctcagcagccagccgacctgcctgcctcgtgttccctcccaactccgcctttaccctcctaggttgctagttccgcgtgttcctcctgacagtgctgtggctgaggttgtacagggcctatcaggtgagggcgctcgctctggtacctgatgtggccaggcgacctcgctgtgacacccacaggaagaagctggttccttttgtcgtcctccagagctaaaaagtagtcgcttctatcaacggaccatctgtggttccagttgaaatccgatgctgttcttgggaagccaaagacaattgttttttttttctggtcattgtttttctttctgctgggttttaagacagaaccttcaattcgctatttatgtctgttagactctgtagagacaaataggaatacatttggaaatatttatgacattagagctataatttagattaattatgtttaaattctttcacgtatttgtttatacttcagccttcttgtgatttgttttttaaaccttgttagaaccagggaaagacttttcttcttctccctgtctcccatttaaaatcttggttacttgcctccaatttcacataaccactccccaaattatcttcaggaatcttgaaggttgtgggtgaggtctaaatctcgcttcttgctgttggcgtagagaaggtagcctggagtcaagtagtcaggcttcatgcaatcaacatggccccggctattgttgaccgtagtgtgaacttcactatcagcaaagggcaacacattctgcgggctcaaagtcaagcagatgatctgcttgatccagaccatcagttactggatcagtcacagtcctccagagaagcagaacccataggttacatatttaaggaactgactcatgagattgacaggtctgaaat

SEQ ID NO: 28757 - DNA, 1070 bp, Homo sapiens
acaagaaagcaacaattagaggtaaagtcactaaaacactaaaatgaacgtgggcctgtatgtgtgtgtgtgtacacatcagtagtttcaatatttgttaggtttttaaagatacaaatattttcttagattgtaaaactctccccataaacataccaaaattgggaagcccttgcccagcctatccagcaataaaatcaagccatttggttacctcctaaagtgagaaagttgttatttctcccagttaactagttttatatcctagttgttagcaagaatcctgaggcgacttccttgattttggagtcccgagaaaactgggatgcccgtgagataagagtcctgagagagaagcctaacgcaggtcggggacctgcacagcatgggggtgctgtttacctggagagaagtcaacttctgatcccattcctgggtccccactccttctggcctcactcaaatttcgttccagcccagcctgatggaatccatgaaatttcgaactttacaaaaacaatgcaaagaacagccacataacctttactcaaactcacgtatccttaacatttgcccagtttcctctactatttgtgctcatgcttggtctctctctccctccccttactcattttcttttacacacacacacacacacaacttgagggtaaattgtatgcatcttggccctttatcctcaattctttagtgtgtattttcccaggaatggagatactctctgctgtgtccacggtacagttgtcagctccctgaatttacattgctgcaattccttagcttatgcccatcttccagtttttgtcactggacgaccccgtgatgtccttcagagcagtgacctttccactccggcacagggccggacattgcctgcctgtcttattgctttagcatcctctgtcctgcagcgtttccacagcctttctttgtcttttatggcatcgacatttttcaaacattctgaaacgtgagcacttccccgtgggctggatgcacgggaggagcgtgttccggctgctgggcgtgtgggcctttccgtcctcacggaa

SEQ ID NO: 28758 - DNA, 1029 bp, Homo sapiens
gaaatgaggtttaattggctgatggttctgctgtccaggaagtatagcaggttctgcttctgcggaggcctcaggaaacttacaatcctggtggaaggtgaaggtcatcttctatgacccagagcaggagggggagaaagaggcgggaggtgctacacacttttaaacaaccagatctcatgagaactcactcactgtacagcaccaaggggagatggtgctaggccattcatgagaactccccgcaccgtgatccagtcacctcccaccgggcccatctggtaacactggagattaaaattcgacatgagatttgggcagggacacagatccacatcatgtcacctcctttatctttcctgctgtagttaacaggtagtgtggggagatgctttgagcctgtacagagcccgttgctccttaaactcttcctcactgatttcgcaaccattggtgtatcttgtgtgcagtgatggcgcaggtgcagttctcttgatggtgactttctgtttcctcttccttactgtctttattatttggaactctcccgcaagacagaactgtcatttctcctccaatgagatatttatctgattgtttagctcaatatggactcatggatatggattttattctgtgggttataatcccatactatcactatttattatattgttgtatcagtctgttttcacactgctctaaaggacttccctgagagtgggtaattgataaaggaaagacatttaatgactcacagttccacatggctggggaagcctcaggaaacttacaatcatgatggtagggaaagccgtcaccttcttcataaggcggcaggagagggaagaaggaaggaggaacttccaaacacttagaaaagcatcagatcttgtgagaactcactatatgagaacagtatgggagagactgccccatgatccagttacctccctccctctgcaggtgaggattacaggtccctctcttgacacatggtggttacaaacagagccaaaccgaatcagt

SEQ ID NO: 28759 - DNA, 1050 bp, Homo sapiens
catggtggcagggaagagagaacttgtgcaggggaactcctcgttatgaaaccatcagctctcctgagatttattcactatcacaagaagagcataagaaagacctgcccccatgatccagttacttcccactgggtgcctcccagatgtggggaattgtgagagctacaattcaaaatgagattttgctggggacacagccaaactgtatcattccaccctgggcccctcccaaatctcatgtcttcacatttcaaaaccaatcatgcgttcccaacagtcccccaaagtcttaactaatttcagcattaactcaaaagtccacagaccaaagtctcttctgagacaaagcaaatcccttccgcctatgagcctgcaaagtcaaaaacaagttagttacttcccagatacagtgggggtacaggcattgggtaactacagccgttccaaatgggagaaattggccaaaacagaggcttacaggccccggtgcaagtccagaattcagcaggacagtcaaatctcaaagctccaaaatgatctcccttgactccatgtctcacatccaggtcaagctgatataagaggtgggctcccatggtcttaggcagctctgcccctgtggctttgcagggtatagcccccactcctggctgcttttatgggctggcattgagtgtctgtgagttttgcaggcacgcagtgccagctgtcgacgtatctaccattctggagtctggaagatggtagccctcttctcacatctccactaggcagtgccccagtggggactctatgtgggggcttcaaccccacatttcccttctgcattgccctagcagaagtttctccatggggccctgcccctcatggaggggacacagccctgcagcagacttcttcctggatatacaggtgttctcatacatcctctgaaatctaggcggaggttcccaaacctcagttctttacttctgcacacctgcaggcttaacaccacatggaagccgccaaggcttggagcttgcaccatctgaagccatggcccaa

SEQ ID NO: 28760 - DNA, 1041 bp, Homo sapiens
acattcttgatggatggagcattttatatttttaggtaattgttaaactcaaatatactgactgtcattaaaacacaaaaattcaatatgttaattgtctgtctgcagccagactaggaaagggtacattgttttcaaaacttaataattgaattaaaatgtaaaaaaaacaagggccttaatgtgaaggtgagggatctgcatctcctagctacccctgtctcctatctagacatctagagtctctagatcctggggtactggggagaatggacaatgttgctttcctgtgcaagatcctcagatgacatattttagcccccagggcgctcatgcctccatcttcctccagcctcatgggcatttcctcccctatgtgtacctttacctttcaccaggcaaagccacctgtggttcccttggattcctcctgctctgtcttgtctctgtagtgttgcatgtactgcagcccagccagctgatgtgaatcttgccctgctacttattatctgtctgacattgagcatgttacttaaccctctgtgcctcggttttctcatctgtagaatggagataataatagtacctaactcctagggttgatgtcaatattgagttaatacattaaaagtgttttcttttgtgtgtgtggcagaataagcacccaaattatagctgttattgagtacctagttactgttctactgaaaggaatggaaaataaatactcgtccctcgaaatgtccttcatccttcctatctcttcccagcattccctataaaactttcttcgtagaacgcccttcctggcctccatctcacctggctctgatgcctgtcatctatactgcgtctctacctctgcaaacatcctgtctgctgctcagcatactggactaggctgatgaattgacctgttctcttcctgcacaagaccttaagctccatgaggcagggccatacttgttaaattgatatcttccatgtctagaagggttctagcacacactagacagatgctagccataagtctataattgt

SEQ ID NO: 28761 - DNA, 1075 bp, Homo sapiens
atttgcattgaattaatttatgttaagatatgaggccgggcgcggtggctcatatcttacaggtggctggcctgtaatcccagcactttgggagaccgaggtgggcagatcgcctgaggtcaggagttcgagaccggcctgaccaatatggtgaaaccccatttctactaaaaatacaaaaattagccagtcctggtggctggcgcctgtagtcccagctactcaggaggctgagacaggagaattgcttgaacccaggaggcggaggttgcagtgagccaagatcatgccactgcactccagcctgggtgacagagtgagactcttcaaaaaaaaaaaaaaaagatgtgagatatgagtcccccacccccttagcatttattacctgaggaatttgaagtgatggtatgaaataatcttctggaatccagttctgaagggttttgtagccattccagggaattggaagttgaggccagggcaagcccttggaaggttttaagccccagcaaggccagatgagcatttctgaaaagcgtctatagtagaaatgtaaagaatggaacctttagtattagaggttgactatcccttatctgaaatgcttgggaccagaagtgtttcagatttcagattgtttgggattttgaaatattctcattatacccagtggttcagcgtccctaatccaaaagtccaaaatgctctaatgagcctttcctttgtgcatcatgtcgttgctcagaaagtagttttgggtttttggactagagatattcagcttgtattataattgtcaaaggagtgatgagtcccaagccttccttaggactattcactcatagttaatagtgaatagttcccactattcactcttccaccctcctacaccctggccaaattaattgcttcctggaatcagtattcccgtagcattcttcacatcctttgttaattattgtctgtcctaacatggaaatgtgagctacaggagaacaagaagcaggccagttactcatctccccatcaccagcacctcttgtgatgtgtggtgggtagcaggcccacgcaagca

SEQ ID NO: 28762 - DNA, 1085 bp, Homo sapiens
agcttacattacggtcctcataccttgtttaagaagacaagaaagtgggttaatccattttagaaagatttctcatggaaaattatcttttaaagctttcctcgtgtacttggagtaaatgatgatctctaaggactagtagtcattaagtttaaatttaagcacccctaaatattgatgttaaaaagaaagtcaaaatttgaagtgctggtttacttaaaagtaactttttgtttatttttcctttttaacactttattgaaagtataatgtgcttcattctgttgaaatagaagttgaagaagatataacccctgccctcgaggaacttacactgttgaatattagatgtgtacactctgaaggaaaaattgtaaataacaaaattggggttaagttaagaaggtctctcgatggaaatgagataattaaagggacaattttttcttttcttttctttttttcttttttttttttttttttttttgacagagtttcactcttgttgccccaggctggagtacaatggcgtgatcttggctcactgcaacctccgcctccctggttttgcaacctccgcctccctggttcaagcgattctcctgcctcagcctcctgagtagccgggattacaggcttccgccacatcgcccagctaattttttttttttttttttttttttttgtagagacggggtttcatcctgttgaccaggatggccttgagatctcctgacctcgtgatccaccccacttggtctcccaaagtgctgggattacaggcatgagccactgcgcccagccgaagggacagttttagttgtccgcaaagccaatggaagtagagagagcagattataagctatgtaagagctaggtttgaccaggtcacagtgataggctataagggaaagagaagaaattttagggtctggcaacacaccaaagtaaatcgggaatatgtgaggacaaacagatgtgggagcagggacgagagttgtggagtttaagtaccatgctggacctgaggatatactgtgatggaaccgttcagtaggtacctgagaggctggagcctcaagagt

SEQ ID NO: 28763 - DNA, 1050 bp, Homo sapiens
agcttgcccaaactgaagttccagtcactgggatgggcaatttctctctggctagggctagtctaagtgctccctccatgggtgggcgctggctgagttcagcccagttttgctttctgttgtgacaaagcagcagcactgagttcaatgcaaagtcccacaatcactgcaccttccctcccacaagcacacagatgattgctctgtgccatgcgacagctgccagcgggcagcagagggatggtgtcagcaattaaagagtgcctttcctaccctctgtggtgcctctttcagtaatacgaagttaaaactgtgattgctcacctcatttttttattattattattattatttttttttcttgagatggagtcccacactatcacccaggccagagtgctgtggcttgatcttggctctctgtaacctctactttctgggttcaaatgattctcctgcctcagcctcccaaatagctgggattacaggcgcctgccaccacgtccggctagtttttgtatttttagtagagatggggttttgccatgttggccaggttggtgttgaattcctgatgtcaggtgatccacccacctcagcttcccaaagtgctgggattataggcatgagccaccgtgcccagcctgatttttagttcttatgcaggtgcttttttgtgtagatcattgttaaatttgggaggacaattggtggaggattccatttggccatcttgctccacctcttttcccctgtgttgttttttgacatgtcccatcattctttgagcactgccttgtttctataaaaaaagatttcaggcttattttgtacctttcctgcccaagctctacaatcagccatttctccagggagccctgattttatatattggagaatggtatttagaaaccaagatctgagctctaggtgtattcattactgttgaggtctaaggccttctcagtggacagagcaaggaaacaagcatattaatacacacatttctatgcggatctatttctgtacttatattgaagaccatgagtg

SEQ ID NO: 28764 - DNA, 1059 bp, Homo sapiens
atattaatgtctttgtctaggtttagaaagttctcattattatctctttgaataagcttctacccctatctctttttctacctcctctttaaggcaataactcttagatttgccccttagaggctattttttaggtcttgtcagcatgtttcattatttttattcttttttcatctcccctgactgtgtgttttcaaatagcctatcttcaagctcactgatgttttcttctgtttgatcaattctgctattaagagactctaatatgttcttcattatgtcaattgcatgtatcaatttcagaatttctgcttgactctcttgaattatttcaatctatttgttaaatttatctgatagaattctgaattctgtctctgtgttatcttgaatttctgtgaatttcctcaaaatagctcttttgaattctctgtctgaaagatctcgtatctctgtttctccaggattggtccctgctgccttatttagttcatttgatgaggtcatgttgtcctgaatggttgtgatgcttgtggatgttcattgatgtctgggcattgaagagttaggtatttattttagtctttacagtctgggtttatttgtacccatccttcttggggaggctttctaggtatttgaagggacttaggtgttttgatctaagctgtatctgcactgggcggggtggggggcacctgaagccctgtaacagtgtggttgttgcagactcatagaggtattgccttcgtggtcttggataagatccagaagaattctctggcttaccaggcagagattttgttctcttcctttactttctcccaaacaaatggagtctgtctgtctgtgctgagctgcctggagctgagggtagggtgacacaagcaccctcgtggctaccaccactgggactgtgctgggtcagacctgtaaccagcacaacactgaatctcacccaaggcctgccgtaattactaccttgctactgcctatgtttactcaaggccatagggctctacaatcagcaggtggtgaagccggccaggcttatattct

SEQ ID NO: 28765 - DNA, 1032 bp, Homo sapiens
ggctgagacaggagaattgctggaacccaggaggcagaggttgccatgagccaagatcgcatcaccgcacttcagcctgggcgacagagcgagactctgtctcaaaaaaaaaaaaaaaccaaaaaacacaaagtcaaaccttacaatggactagactgttgtctccttgagagaagacacggctttctttgtccttggctccctgaaccttgtgcggtcccgtccacacaagaggtgcttaatatatgtggaaggaatgaatgaatgtacatcgaatgaatgaatgagcacactttggatgacttgtaggcccatcacatgggtttggctgcagagggtggctgaagccagtctttatgactgcatttgttgtaaccttcctgtactgtggtgaggggttagcattcactcactcattcactcattgtaagaatatcacaaagggtttgttttttttctcaaccaattgagttgtcaccatgataacccaccaccaaatatgttagtgtgaactacctacgaacagggatgttttcctacgtaaccacatctagacatagaaatcgggaaatcagcactgatgtatcatgattatctgatccacaggtcctgttcgagtttcctcaatggccccagcgacgtcctttacagcacaagagtcccttccaggatcccttgttgcatttagtggtcatgtctctgcatttagtgtttgcatttagtggtctgttgcatttagtggtccgagctgttccttggaacagcttttccatctttccttgactttcaggactttgcccttggatgatcacaggccaggtgtcttgtggagcccccgcccctcactgcgggttgggctgacgattcccccacgatgaggctcaggtgatgcctcttgggcaggaagatggtgaaagcgacgcagagctctcactgcatcctgccagggcacacagctttaatgtggcccattggtggtgatgttaaccttgaccatcagattaacatggcatctgcactaaaggaatcaga

SEQ ID NO: 28766 - DNA, 1117 bp, Homo sapiens
agagggaggccaaggaaagcccttggtgttgggttggctccaaggtatctgtgtaaacccatggtttttaccatgtatatatgcaggtagatacaggaataaatgcagaagcctgcctatgcttgggctattaagtatgcatgtcttttctaggtctttaagctcaaagggtctagaaacgatgatatcccagccacagtgagctcaccttgcactcagatcttcgttttctagcactattctccagcgtatgaaactggcaatccttggagaactggtttgttccaggactggggcagacgaaatcctagctaagcctggagtactttgtagacccaggaaatgaggatgtgtttgaaaaagatggggaattgttgaaagaacccaggggccagcctgagggagatcccaggggccaaacctggaatgagtcaatggccatagcattggtttataacagcataaaataaatgtccccaaatccatactgatatcaacagataactggatacggccaggtggctcatgtctgtaatcccagcactttgggaggtcgaggtgggccactgcactccagcctgggcgacaagagcaaaactcctgtcttgaaaaaaaaaattcttagtagaagcaggagacttccagtcatgggcccacttggactcctcagctacgatggctgcattcccagtgtcgcccacacccctgcctccctggccgcctccagcagggctctgggtcaagcgagaagagaggtccacttgtgcgaggaaggtccgtctttctgtctacaggcctgaagatggacctgggagagcacgacctcgccacaacatcaccatcctgatcagaggcgagaggggacaaggtcataggtgtggaggtgggcaggtggtgtggagtggagcctacagaggggatgggggtgtgtcctggagtgcacagggtgaaggacccccgcccctaccccaccaccttgggtgcttaaccagaaaagtggaacagcagaacaccaaagggtatgtgtgcacacatgcacgcacgcacacacacatacacacgcactgctgaaggccaagacaggcatggactggttgaccctaggaggtagggtata

SEQ ID NO: 28767 - DNA, 1925 bp, Homo sapiens
gactgcctcgcaactgggtctgttctgtgagatgtcgccaccctgtttgccatctgggaggatctcactccttcaatttaatctgctctcttccgttatttttttagtttctatgtattttacttttaggacattccttggactttgttctacctctttaattgatgaagaaaatttggtcattgtatctggtttttttttttgagacagagtctcgctctgttgcccaggctggagtgcggtggcacaatctcggctcactgcaacctccacctcactgcaacctccgcctcccgggttcaagcgattctcctacctcagcctcccgagtagctggattacaggctcctgccaccacgcctggctaatttttgtatttttagtagagatggggttttgccatgtttgccaggctggtctccaactcctgacctcaggtgatcctctcgcctcgcactcccaaagtgctgggattataggtgtcagccactgcacccaatctattgtatttaattctaagcactttcttccagacggtctcactctgtcacccaggctgaagtgcagtggtgtgatctcagctcacagcagcctcaacctcccaggctcaagcagtcctcccaccttggcctcccagagtgctgggattacaggcacgagccattatgcccagcccgtctttcttcattttgattacagtgtgcgtactgtacatccgagaagtgcatgtgaaatgctggaactgggatttcagcaactgaatgcacgtgtgtgactacccacgagaagcaggacacttagcacctgctgagaagcccccacgcccatgttcccttctaggcactgcacaggcatgctggccggcctgacctcagtttccctcttgctgtggccgcttctgctccactctctgtgaggctcatccaccttgttgcctgtggttgtggattgttcattctcagtgctctgtatgccaagtactccattgtgtgaaaatcccacagcacgttcattctattatcaatgggcatttgggtagtttccacagtttggctgttaggaatagtgcagtgatgaacatgctggcacctgtcttctgttttttttttatttttagagacagggtcttgctctgttacccaggctggagtgcagtggtgtgaccttggctcgctgggcctcctgggctcaagcgatcctcccacctcagtctcctgagtagctgggactgcaggtgtgtgcctgcgtgctggctaatttttgtagtttttgtagagatggtgtcttgctctgctgcccaggctggtctcgaacttctggcctcaagcagtcctcctgccttagtttcccaaagcactgggattacaggtgtgagccactgcccccggccagcacccgtcttctggaacatttgtaagcatttctgttgggtgtgtacttgcgcgtggaattgctggctctcagttatgcacatttcttagaagatcctgccagtccttcatcccagaccccgaccccagcgtggaaaacgcagtgcatcctcaacgcctagtgtttgcggctgtggcggctcatgatcgacttggaaggcccacagtgtgtggtgtggagttttgcagggagccagtgacactgcccaccttcgatccagacctaaccttgatcctgttctctgaggccaccttaccaaaaccttgacttacccgtcttagatcacttaccctgggggaaatgtgccgcaagctcacgagggcactcagccagcctacaaaggttaccatggcagagaactgaggcctcctgccagcagccagcagcagctgaccagccgcgagggcccctccgggaaggagagctttctgtgtttcttcctgtaccccatatatgttgacgtgatacgttttactttctgatttcccttgtga

SEQ ID NO: 28768 - DNA, 1147 bp, Homo sapiens
aggactctgggagtcacgaggtaactccctgctgcagggggcccgctgtggtggccgagtcccatgttcctgccccacctggcacctgtccttgttcccccatcacaggctctgccggcgcagacgccagcttcagcagtctctacaaggccacgttcgacaacgtgacctcctacctgaagaagaaagaggagagactgcagcagcagctagagaagaagcagcggcgccggagtcccccgcctgggcccgacgggcatgccaagaagatgagaccgggggaggcgacgctaagttgctgatcgtggcggtcagtggtgtctctcacctcaaattaggaaaagctttttaacttgttcccctgcatcctggcatgtcccttcaagaaggaaaaggtgacatcagttgtgaccagctcagaggatggggctgtcccctgggctctagaaagaacattctgtgtcaccagcacaggctcttgctgggtgcctgtgccccctttctggttgaagggaagccagaccagtggagtggaagctcttgaagcactttcttttcatgtcggaggctgcgtgtgagccggtggtggcggcagctgtctgtgtttctcctgttctcataccgcccttcgtgtccgctgcatcttcctctaggagcatctgtgggctgacgtttctggcatggtggatgttttcatgttgttccgccgtctcagcatccaggtgacgtgctgtcccgcagtagctgctcgccacacaggctgttgaaactcagcacgaatgcttgagcctgccccagccccagccgtagcccttgtgctcaggagctgctcctggagagtggctcccttgtgggaagtgagaaacacgtttcggagtcgcagggagctctgtctggcatcggtggcacagatggtgaacttgtttcaggaagtgtgagcacgggcctggctggcacccggtttacagggaggtgattgaggacgtcgttatgatttgatttgaccttggcacacactgcagagccacagggatgttgctgaatttcaatcaccgatcagcaaggatgaaccttctcaacttcctaggaatgtttagcagcaaccgaatataccaggcaaaactccttggtgcctgcgctgtgtgtg

SEQ ID NO: 28769 - DNA, 1892 bp, Homo sapiens
tcctccgacctggggcattttcttacatgattaccttctgttctctacccctgcctcttgctcactttttctaaagcttgtgttagttgaaccactttaatgctctgattcttattttttttgagacagagtcttgctctgtctcccagtctggagtgcagtggcgtgatctcggttcactgcagcctctgcctcccgggctcaagcaatcctcccacctcaggcctcccgagtagctagtattacaggcacacaccaccatgccccgctaattttttatacttttgtagtgatggggttttgccagcttggccaggctggtctcaaacttttgacctcaagcgatccacccacttccgcccactgggattataggcgagagccaccatgctgggccataattctctgtttttttttctttcctgttcaatctcgtatttctactcctttaggaatagtcttacttcttgggagattgcctcaactttactttccagccttctgtggagacttgagttttattaggattattttgaatctttagttctttcttgccctcggcacgttcttttttgcagccacccattctcggatagtgcacgtgtctcttatctcactgagatgagcgtggacttttctttcttcaatttcttcctggccttgtgtttgattgccttctctggagtgtgttgtctgcctttctcattggaggttttcctcggatgtctggcgatgccatctgcctgtgtgtgatgggagtcagcaccagccggcctcagaggctgggtgtgtgcacccagggtggggcccgaggggcttcagagcaggtgtctgtgggcagcagccccttgcctgtggactccgtagaacgtgtgggtcagtcggtctcttctgggtggtcagtgtcccggccttcactcttgcccaggtctgtcccctggggctctgggaggtgagtgcgaaggggctaggtgactctcttctcagtgagtatttggcatccccgagacaggggcccctcggctccgtttccccagagccttctgctggcctggagtttggggctgaggatgcatcagggaggtcccgtttctctttgtaaagacatttgacagctcccctcaccaccttggtcttcaggctgcctggcccggtttggtctttggcaggtcctggcacctctcgggcttctctgtggctggtgcatttgttccctggcctccagcccccaggtttccttgctgtctctccgcggctgccttctcttcttgcctgttgtctttgtcttagtgggttcatggttattaaacatctttttcttgtcttcgtagagaggtttgggggtgagtgaaatgcctgtagatgtgtgtgttggtctccatgtttatctgccacatttgtagaaaggtgtgtgtgtgtgcgtgtgtatgtgcatgcgtgtgtgtgtgcattcatacatccactcttacctcggcacccagaggatatgcatctactgttagctgtttggggtatttacttttcatctttttcatttagtcatttaaaaatacttacaaatagtgcacagacactctctcattagatttaatgagtattgatttatttctctccactgaattagtgctgtaatgaattttttttaagccaggtatggtggctcatgcctgtagtcccagctactcggaggctgaggcgggaggattgcctgggcctgggagtcagaggctgcagtgagccaggagcaagcctgtgaatagccactgcagtgcagtgggcagtgtggaatagaccccatttcaattaaacaacaaaaaaataacaacagataaaaccaagaaaaaaaagagaaacgcttttttccattgatgatggttttagagcgtggagcc

SEQ ID NO: 28770 - DNA, 1122 bp, Homo sapiens
tctgcagctctgctgcacagctgtgagggaggaggagggatgctgcttccagcctggggtgtggcccaaaggtcctgcctgcccttttctgtcttttagtccctctgcccctgagagaaacataggggcctcattgaggacagcgttcctgaagcttccatctcaatttccagccgcagtgggccgggcgccctgtacttgtctgcctggtgttggctgcgtattgggcagtgtgtgctgccacagccctgggggtggggaagcagggctggctgctgttctgtagtgaggccctgtggctaactgcgtgtgtgggaagctgtgctacaactcatatctatgtaaaatagaacatatgggtccctgccttgtggagaggacataaatacgggacgattccagtagaaatgatgtggaaatgagagccccaggaagtagtgtagccctgagccctggcgaaggagagggagcgaactgtgactttggttcttgctgaagcagtgtgcaaacgtgctgcatccggaactctggtgcatccatgactctgggtcggggttggattcatggatgtgctgatgtggatgtggactggggggagcgcaggcctctcacacgctggataaccgagcttcctcccgaggagggtagggtgctgcctcactgctgccctgggctgggtcctgccctgagggtggccaggcccctccatccctctgcagggcatggggcacggctctctgtctgaggctcctggttcgacgcagcagaacgagcagcaggggtcagtgtgggtcaggggagcggcaaggctggggggccctggagactggtgcctgcctttgtccttgacagtggcccccagcacactcagcgtttatggagagggccgttgtctccctcaatgcatgatgaagactctggggttaaggaaccattcccccatttcttgatgacagttttcaaacacacaggaaagttgaggattttgtcacgcatttatccaccacctagatcccaccatcaggagcaattttctattcttttctttttttttttttttttttttttgagacggagtctcgctctgtcgccccaggctggagtgcggtggcgggatctcgg

SEQ ID NO: 28771 - DNA, 1020 bp, Homo sapiens
ttttttttttggtggagcggagtgtctctttgtcacccaggctggagtgcagtggcacggtcttggctcactgcaacctccacctcctgggttcaagcgattctcctgcctcagcctcctgagtagctgggattataggaatgagccaccacgcctgactaatttttatatttttagtagagatggggttttgccatgttggccaggctggtcttgaactcctgacctcaggtgatctgcccaccttggcttcccaaagctctaggattagaggcgtgagccactgcgcccggcctgctcttggttttgaaagtgatgtcagcagtataacttcgtgtaggaaatgtttgccttaggtggtgtggaagatggaccatgtgatttgatgcagtccaggcagcagattacaaaatcccgcctcgatggtgtggcttggggtttctcctgaccttggtgtagggcacgccttgctgcctcccctttctctagttgaactgcaggacagtgggtacagttgtgaagttactgccactttcaacatctcttggcaaattcctcaataatctttttaaaattcctttagaattgtgggtttgtgaacttttcagcatcgggtggagtgaaattgttaccctttctctcagtgagaaattggaggggattattgtggcaggaggagtaggtttgggggatgcgagtggggcagggagaggggcatagggtgagttttatcaggagctgctttcaaggagaggactagggtgagtggaaccatgctgagctggcaggcagcaccctgtggctggtccgcaaacatgggggctgctccccacacctggaggctttttatgcctcttagatctcagactcttagatctgatgcacccgctccccagaaaaccgcccacgcttagcacatccacctccattcagttttagaggttccatgtactcctagcctctctgcatttcactgaggccctgcaccgctgcaggatgcccctgagctgggcgagaccc

SEQ ID NO: 28772 - DNA, 1031 bp, Homo sapiens
tgcctgcagagggtaggggaggctgggtctggccgtgtgtgccgtaggcctggctggtggtgggggtgagcgggcagggagctcactcgtgtcttgaagacgctgactctttcaagtctggacagtgctgcggctgtgaagttctgaggttgccagaaagatggagacgtgggtggaatgtcaccttacttcaatgtgagcttgctgtccagaggtagtgtctcactttgaacttgggagagaggggatgtccagtctgcctgcccgctgtgtcctggttcctaacagtggagcttcttcaccctgatggaagcgcggaggcccagggctcctccaggggttctgactcctccagagggacggggcctctgctcctggcatcgtgcatggcccagaggagggaggaatctagaattctctccactcaatgtggttgcctgtggcagttggcttcttggaggaggtcatttgaggttgagagctccatgagttgggactcgtggtggatgcagataccgctgcaggctgggcgggtggggggcctcttcatccttggttgtaggtgctttgccaagagggagatgtcttgctgtgttgactcgtcttttgaaggttgtgtgctggtgtgattctctttatggaagcacctggtaaaactctgggaggctggcatggtggctcatgcctgtaatcccagcattttgaggggccaaggtgagaggatcccttgaggccagcagttcgaggccagtctggcctcaacatagtgagatctcgtatctacaaagaaaaaaaaaagcacaagtccaagagtgggcagtgcatctagtttaagtacccctaatctgaaattcacaatcctccaaaatccgaaattttgtgagcatagggaagatgctcaaaggaaatgctcactggaatgtttcggattttggatttttaggttagggatgctgagccagtaagtatttgcaaatattccaaaacctgaacaaatctgaagtgcaaagcacttttcgtcccgagcattt

SEQ ID NO: 28773 - DNA, 1027 bp, Homo sapiens
tcccgaacctgggaggcggaggttgcagtgagccgagatcatgccgttgcactccagcctgggtgagaagagcaaaaccccgtctcaaaaaaaaaaagccaaattctaggtggcatcaaaagcaatgaatgcctgctctgtcctctcttccagtcaggttaaaaagaaagccctgaaacgctgcatcatttctactctatgtgtttttgtgtatacgggttttactatatatgtttttatgtatatgtgatttacaatatgtttttgtgtctttgtgtatcaggtaggtaatagatgcacatggtttaaaaacttaaaacacaacaaaattaaaccaaagagtatgcgtcagtctcccttcttacccaccttctggctcctttcccataggcagtgatggtttcccagtaggaaaatgacttttaaatgcatgtccctacatgtctgagttataactgataataaatggctgcttccacctgactgctgtggatcgcgtcatctttatcttgaaaggcctgtgaacggcatcctcttgctaagatagccacatgagtaagtcatttaggacctagaatagagaagatgggaagtgttttcaggattcagggtgaatgcctcaaggtggccttgaggtgtcctgctctgagcccctccacagggatctctgcaggtggcaggggctttctagtaggttggccttgactttgggtttcttggacaacctgtgggaaggagggatggacaggttttcacctctcagtgttgaaagaagatagtagttgtcctagtctgcttgggctgcccaacaagataccacagactaggggccttaaataacaattttctcacagttgtaggggctggaaaaccaagatcaaggggctggcaggacagggctggttcctctgaggcctctctccttggcttgctgatggcgtcttctccctatgtcctcacagagtcgtccttttgtgtctatgtcctcatttcctgttcctgaaaggacactggtcagatggggtca

SEQ ID NO: 28774 - DNA, 1030 bp, Homo sapiens
aattataaaagtattaatttggggaactaataaatgtccatgaaatcttcacaatccacattcttctgccatggcttcagctggtccctccgtttggggtccctgacttctcgcaacaccaaagtgctgagattataggtctgagctaccatacctggcctgttattagtattgttaatgtgagtttatccctgcctctagccttgggttagtccttgcccatgaggaagagggccatgtgtcattgagggttcttccagcttagctctctgggttctggcatgtatgctgggagattttctgtttagttaggcttcatgctgataaaattagagctgttttgaacttccccatgtccctttaatatgtctgtattttggctacgtgatccccttaacagtttctacctcctcccatgttagaaattaccacgctggccaacaaggaatgcagccttatttccttaggtgaagcttaaccgtcttcctcctctcttcctcagggaggacgcgcccttggaccaggggagcggtgcgattctggcgtccaccttctccaagtctggcagctattttgctttaaccgatgacagtaagcgtctgattcttttccgtacaaaaccatggcaatgtctgagtgtcaggtatgagatgctaacgctggattcttaagatgtcgaatgcacaccttatccttgcatgcctgtagcaatagtgaccataacatggtgataagggtgataagtggttgacacggagccgcagttcagtgccagacaccactttcagtgccacatgtgtgttggctgatctgatcctcacggcagttctgggagggtgcaggggtgctgttctgtcccacgctgggtggtgaacagttagatagcagactccgatcagtgggctcggaagacagagccgggccctgctgctggtccctccacctacagtgttggtgcccctgttttccagggcagtcctctgtccttgtgattagcaggaacaaggctgtgagcctgccctggagagtg

SEQ ID NO: 28775 - DNA, 1030 bp, Homo sapiens
tttggggacttaaggaggtcattcgcgctcagaggctgtcccgggcaccatgcggcgtctgccggggtctttctcctgcccagcctcatttgcctgtgcatgcacttggttatccaacaagagctagaacattctgggagaagcccacggtggctccttgccgggctggtcagactccgtggttgtcctgagacacccaccctctgctgccctgagggtggcccaggaaagtttgtgtgaccttccacacggatcccctgggacatgcaggtgtggctcttgacactggaaaggctgagggttctgcccaaacctaggagtgaattcgacttctttcccatctcacacacacacccgagacgtcacccgaatccacgtatttcccacgttcggctgccactgcctcccgggtgggctttgcaggacccaccatcgcatcccctctcactccacagaaaactcgtggggccatgttccccctgccactgaccacgcttcccttgcagatccgcctcacggacacgctgggcaggctctcgcacatcctggagatggaccacttcgccctggtggtgcacgagcagatccagtgtgagtggggccctgctctgtgcgtggggttctcactggggtcaggccaccaagcctggcctctgccatgggcagcagctgggccccccatcccctgcggggtgttaggggagtgggtggtgccgaccttcagtgacacccagtctttatgcctgggcctcccacatgccctgggctggtgggctgtacctgtgattcctgcagggacccctcatcaggccacactgggtagggccctttgtccagcatgcagaggctcaggagtccaggccccttgcctccggggaggccagcagtcttggggattctcagggacaagcccagaaacatctagaagggtttcaagtcctgaccctggcattcggagggctgctctgaatggaagcctcatgtgggtctcacaggagccactgatgggctgtcctcagagccccgctcc

SEQ ID NO: 28776 - DNA, 1055 bp, Homo sapiens
accctgactccctctgctgcttcccccaaactccagattgggaccgagtgctgcccaggtggccccctaggacttgctgtgactgttttgcccagaggcccctcggacagtaacgccacagacctcgctggtcaccgggcagccaggctgagactggcgctgctctgcacctggtctccggaggcggtaccagggcgggtgtctacagacccccatgccctgtcccctgcacctgcagggtttcctccatggcctgcaagctgcagcggctacacagctcccgagagctcagctgcccttggagggccaggcctggctggtgggtgcccccagttgggttccccagtgtggggtgattcacatctggtgcccagggtcaagatgccctgtgcagggctcctgcccacccccgtcagtgcaagaacaccatctccccacatacttggccagcctgccatgtgtacctgtgcgtgtgagtgtgtgaggggcagagagcgagcatgagaggacgtgtttatctgagtgcctgagcgatggctgtgtgcatgctcacacacgcttgttggccatgggggcgggaagtccagcccccaggcttccccctggggcttccagccagcacttgggggtctctgctgcaccagtgaggtccaggagaggggctgggcaggcagtgcgtgccactcagcaggggcgggggcccggtggggccctgcggggactcggtgactcccccatcccgcaggaccaagttcctgagcgacaggtggatgctgcagaagggctttctgaaggaggaggacctcacggagaagaagccctggtaagaccgctcggccggagacccgctgcctgtgctggccctgcccagtgtgacaggcaggagagcactcccccgtggcctgtgctggccctgcccagtgtgacaggcaggagagcggtccccgtggcctgtgctggccctgcccagtgtgacaggcaggagagcggtccctgtggcctcctgctgaggtgctgccggcgggggtgcgagagcgtttgtccttatcctgatc

SEQ ID NO: 28777 - DNA, 1298 bp, Homo sapiens
gttagcgtcatgcctgctaaggagcagtggacgggtcctagcacgtgctgtgagccacccgctgtccagggagcggttacctctgtcttgccagcttcgtggggacagatagttcagctcatcatttatgagacagagaatgggaatttggagggtctgtggctggcctcgtcctgggtgcgcagggggtcacctgaggtgtggtctgaggcctccggggaagggcatttctttgcaggacgcagtttccaggctcaagaacgtggagggaattcctaagggtcgctcttcaccaagagcgcagagccctggtagacctcagcatcgtcacagagaaagctgtgggtgcagaggccttggggacaaggcggggacggaatttcgtatttcagatgaccaaggccaagtgagttcggagggaggcaggaagggtgccgcggagaaccccgcgacagggccagatggagggggtggagttcgagtgggaaggagagggaaccagtaacatggcttgggactttttcatcctgagatgctctaatgtcccagccgggggacctgtgagagctggggcaggcgctgggggaaggaagtcaggggtcggtgcgttgggaaccgatcgccgattcacaggaggggcctcgtgggagcctggccctcctctgcccccctctagggaaggagatctcggagctgcagcagagcagcccccttcacagagacccccaaggcagcagggccggctctgtgctcatttgtcagacaatagggacccttaactcgtacgcagcacgcgtggctggctcactgtgctccgtacaggatgacgtctaaacttggtggttgcccttgaagtaggttttggaatgcccgttttacagacagacacaccgagggtcaggttggtcacgtggcttgccggaggccaccagctctgatttctgcttcggagctggcccccaggcgctagtgagaatgatctaactgagggtttcacagtatgggacccagaggggtccgagaatgcaggcctgtagagggccagaccccgagagtcctccccaccacacacagcgcctcgtcctggttctaggggcaacacctgtctggtggttgctttcagaaattttgaggtgctgcaggctggtcccaggtccctcaaatcacatttcatgcagcccagtctctcgctcttaaaaactaaatatttttaagagctggagagggagagaggacttgcagtaaggaaggaagtgcaagtgaaggccttggccttgtgcgggaaccgcgcagggagc

SEQ ID NO: 28778 - DNA, 1085 bp, Homo sapiens
ttcatgcatttgaagcccatttccagagagctgcggcgggagctgtatggccgccgtcgcaagaagtgagtattcctgtgcccgttgttaagctcagtggcttctttctcccctcacaaccctcccccttccaaaaaaaaaattttggcataggtgtcgtttctgttttttaaaaggcagtgcttagaacatagtacatatttttaaatatccaaatgtcctctttggagaagaatattcacctgcacacaggtaacttcattatccaacttctcaagtagagatcagatcttagtaatcaagcaagagggcggttagctgggcagccgcggacatgaggctcgtggtgaaagtgggcatgcagtttattctcccagatattacgaagaagaagaatagatgttgtaacctcctttagatcagggatggcttccctgggacacattggaagaagaattgtcttgggtcacaaataaaatacactaatgatagctgataactttttttttaattgcaaaaaaaatctcataatgttttaagcaagttgatgaatttgtgttgggctgcaggttggacaagcttttgctttacatatttcacatgtccactggggtttcttttggttttgcttgttggttttagggcatttcattatgtcttgggatcgctggcatcctcccttcgggacactggcagaatcaggcccagcggtcacatctctctgatcctacatttaaatgtacgacaggtcacagagcagagaaaatcaagacgtcagaatcgaaccgattgagttctgagtctggagaggttctcatccctcttctgttaaacatggactagtaaatagatgggtggcgattgttttattgtcagcattcaagaagcataagagaaaaacaggcctgctctccccagcccaaaaacctgatggacacagtagctatgagcgcctgaagcgtggggtcagtgagggttgaagatggtatgtgtccagctcattttgattatgatttcctgtgaccatttgagttggttctagaagaagacagaagatgcaaggtattacacctgttcacttctaa

SEQ ID NO: 28779 - DNA, 2013 bp, Homo sapiens
gagggcgtccacaataccgtaaggttgcgtgaactgtcctactgaatcttcatggttgcttggattttaatcacatcagaagaatttgagagcataccatggctggcagtccataaaagactagttaggaacatcagcttttaatcatcgaccctgctttcaggtttcattttaaacttatagaagaggggaagacatcagtgtgcttatttggcctttactctaaatcttaaaaggaagaaaattttaatatttcttagtttgagcccaggtgcggtgtctcacgcctgtaatcacagcactttgggaggccaaggcaggcggatcacttgaggtcaggagttcaagaccagcctgccaacgtggtgaaaccctgtctgtactaaaaattaaaaaaaaaaaaaaaaattagccgggcgtggtggcagtcgcctgtagtcccagcaactccagaggctgagacaggagaatcgcttgaaccccagaggtggaggttgcagtgagctgagatggtgccactgcactccagcctgggcgacagagccagactgcatcttgtgggtgtaaaaaaaaaatttgtagtttgagagtcaactttttcctcacagtttctgaaaatgtggcccttttgatgctgattaaagctggttgtgattttaacaccttagtagccagaatcgagactgtcatggggacatttaaaatctcaccacacttgacaccattcacaagtagccatgtggctcagtctcctgagtgctcctgcagagtgcagctctgccaggcttttctctagataatctcgtgtgtgttactgtagcagtttgagtttaaacacaagagttcactcggttaacatgttctaaccagcaagatttctgttgtttgcaggtgccgtgagcgatgtggagatgcaggaacactatgatgagttttttgaggtgagagaactgaactctgtgactgatagacctgttgatcttctgtatctgtttggaaggatttaaaatgtttctctgctaataaacatacatgagttatatctaatgacactttgtaatgtataacgagtcttaaaccactgtggtctcccttcaggaggtttttacagaaatggaggagaagtatggggaagtagaggagatgaacgtctgtgacaacctgggagaccacctggtggggaacgtgtacgtcaaggtaggagccagggcgagacggcggcgtggccgcttagtgtgccagggccaaggccaacaggcgaaagcgagacagtggtgcagccgcttagtgtgccggggccaaggccgacagaggatggggtgcctgtcgccatgcaccttgagatcctggatgctcaggcgcacagcagggctcaggtgcactggctcggcgcctaccagctgcgtcatatgtggcggtggccagcccacacgtgcgcccagccagcagaactgaaggacggaccgtacaccacagccatcgttatttcagtgtagaatatttagtacctgttggtttagaagctgtgtggactaaggaaaagttaggtttactcacatgtttggtttcttttttcttttttagtgaataaaactttatttgcctacacagccatatttgctcctttaaccagttgaatttgaaaaatgaaggcaacatttggcaaaatcttggactatcttgaagttaatctcattgaaaataaaggatttttcaattatcctgtaatactattccaccttactatacctgagtgtgtatatctctctctgatatacttggattggtaattgagaaagtcttattaaagcgtggatggcaagcacttctgtttttgtcttttcagtttcgccgtgaggaagatgcggaaaaggctgtgattgacttgaataaccgttggtttaatggacagccgatccacgccgagctgtcacccgtgacggacttcagagaagcctgctgccgtcagtatgagatggggtgagtgaggagtggccagtgacgtgactgagc

SEQ ID NO: 28780 - DNA, 1024 bp, Homo sapiens
cagcttctagggaggctgaggcagagaatcgcttgaacccgggaggcggaggttgcagtgaactgagatcgtgccgctgcactccagcctgggcgacagagtgagactccgtctccaaaaaaaaaaaaaaaaacagtctggagctgctgctgccccttcttcctttactttggccgtcatcctagagggaatgtactggaattaaacgtcgagtcatattcttccctcttagagcaacaaaatttgaatgtttctctcactttctggaatttttaaaaagcaaactttttaagttattttttcagattttatttctcattagccttttttccttgaactccattttggagtgcaccctgtagttgtaagagcattgtgctgagagcgttccccaaatgagggtctgcagcttgcactgacccctgagttcctcacccaccagccccgtgccgacccgtctaacccgtgtgggggtgctccactcaaataggcccttggcagaaaagattgtccgttctgtccacacactgcctggatacagtctccagctctaggagatggaattggtttgctccatttagaaatagatcaaaactgggcattcagtagatggtaccaatatcttcctgtactgggaaatactaaatttagattgtgaatatttacctaatgataatttttagagaaggagatatcatagatgagtatgattgggaagttcagaaaactaaaatttgatttttacagccatccaactatagaatcattagaatttagtcatttatggataaattaaaatgaacacctggactcttgttaaaatcagaaagtccaaaccaaagataggcacttcccattcaccattctgttttaaagcagtaaaaattgaggtgcccttggatatccacaagcctaaattgagtacacccttgaaccagagcccctcagttaatggggtgaccgacatggggtagctgatcccagggggcattcccctctcgagctggccctgcactgggtggcc

SEQ ID NO: 28781 - DNA, 1034 bp, Homo sapiens
ttgattcaaaacatctatcgtaatccccaaaacagtgcacagacggctgacggctcacactgtaagtcccacagttggagaaatttttttaaaacaatggtgttaaagagcccactcttaattgagacaaataatgttggcttctgagctgctgacatagagctgttgcaaacaggacaaggtgctggaactccttggcgcacacagcaagaacttgatacttggccacgttcaggaggcttatcccttctagggagggtcactggcccggccacctccattgattgacatttgtcatgagagcaggtccgtccatgtgaaacggatttcaacattttgagccattcattggtctttacagtgactgaacccctggcctttattaagttctttgtgtaaaattaaaactcttaggaatattaaggaatcaataaggtaagttgcccagtaagtgtgggttttatttcaccattataatttttcctccaggaagtggagatttcatgatatgtaacaattgtatttctctaatacagtaattttttccatcagtttatgtaagcattattctttccgagttcattaaaaattttctgccacatctaagaacattttggtgctagcctggcaaactatttgtgcttttacctgaattggaattttgaaaaggagagttttcacgttctgtaagcagaagtacaagatgggcatatcatgagacctccgttacaccgcagtgttagggattcaaggcagccgccaactgagaaaacgcctctgcttctccagaaaataacttgctctcttttcagcactgaatctcaactgaagcacttgccagaggcagccggttaagtgtttacctttaattttccataatataaagttgttgcgttttgtatttcagaccattgccctcttgaacatttaccgtaaccctcaaaactcttcccagtctgctgacggtttgcgctgtaagttcatacaagttccttccccggttccctgggcttgcgtgtcagagctcagtgtcc

SEQ ID NO: 28782 - DNA, 1667 bp, Homo sapiens
tgaagtctaaatgtgcagcctctgagctgttgagtagctattatgcgtggtccctgggagctgccaggctctgcctttgagctcacatctgtctgtatacgttttcctgtaagcatttaagaaaatctaccactttgtgtaagtgagctgggagaaggaaacatgggttttttccggttgaagcccatggacgaccccacagcacacagtgtttttagaagggaagaggatgatggcttttccctccattatgctaattaccaagtggttagtataatagcagtctgtcttttgatagctctgaacatgagtttctttttacaaatttcaaaatcttggagaactagctttacattttctgtgtattgcaattgttttttctttaatgttttgatttatgaaccgaatctcccctaactaaaccagtggccatggattgtggtataaccaagcatcttaagtgaccacccagttctttgattttggggggtgtcccaagtgttgggctgagagaaatcaactgttccctattctaaaagttttctttaatctggctggaggcactttctttatgtttttctggatcatagattacctgagaatgtgaaatgtgaagttaatttaggcattccaggtcagtgctggggagagcccattggagctcgatggggtcagtagtatgtgtcagcttaagcatcctagtttgatgcgtgggtttgttttggttggttttaggcaatcctagccacccttggctttcccattagactgcattgcctctttacgttaagcttccttcattaaatagccactgccagaatacctgagtgagaccaactgaattttactgttgaataattgggctcagtttagcttttcatcagggttgtcatggtacggtcatttcagttcaaagctgagtcaagtcagctttgggaagcctcccaggcctgagttcagttgactcagggctgtacttggcggcttatggaagaaacggggccctgatgcaggtctgagtggttcagtgtggacagtttgtcagacctccctcttaggtggggtgggcttcccagctgcacacctttgactgaggaactcttcatacaaccactcccctttaaacagagctagaaatggagctggctggttttataaaaccaccacttacaaaactgcttcacgtggatattgttgagactaaacatttatttttctaaatcatgcgagtgattgctttagcttgtaaatctctagcataattcagggtgggtttctttataagctgcttacagtgatatggacgttaagattcatgtaatatattagcctactaacttaaacatggtttgttttttcagacaacttgattttaagaagaacggtacagtgtaaggtttcaagtctgcctgatccagtttaaagcacaagggctaaaaggattttttttccttaaaagaaggatcggaaaagagcaaatgttttaagctattgtattatgtaaacagagatcccaccaagaaagtgtaaatcagagccgggtgtccatgacagttgacagacctgtttggtgtgcctgttttgctaggagaccagagaacttgatgtactgcagacagctgagttacgcatttggttttgaaaaattatcttgtgtgaggaatatg

SEQ ID NO: 28783 - DNA, 1523 bp, Homo sapiens
aaatgtcctcttcacacatggtagaatctcctgtgttgtttggatgaggaggctatatttctagcaaaattttaagccaaaatctaccagttatagtcactccagaaacatttagtgggggtcaactataggtcagtttctggagacttaaacatgggtaaaatttggatattatccttaaggaactcacggtatgatcttggcgaatgaatagaccagctctatcggaacaagagactcttctgagtttagggtgaagaactaacacatgtaggatcggggcatcattaatttctccttttcatatttgcatgtggcatgacttctgtcttgtaaaagtctatctccctatatttctgctataagcaaccacatttcaatctattgggctatactataaaggtcatggttttaattcagaaaagttgattatttaatctaggttacttgtgttttcttttcagggagacgtggggttttagcttccagggaacaggatcaactcctgaaaaatgaagctgatggttcatattaactttaattattatttaagctaagaataaaatatagatctctaccaattaaaaaatgtttagcttattatatgtttgaagttatagatgttttctagattcagggatatcctaatagcttgtctgtagtttaattgtgtggaataattggatattaattgttgaggcccagggcttgcccattctgaggtagtttttaaataagctttctttatttttagatgacttcctaaagatatgctattgtctaatcaagttaaataatctcaagacctgtaagtttgcaaatatatataatcactttcctctcctgataaatttggactttcccatctttattgctacctgataataaatcagtggctagtcagtcttcatggtccattagatttcactgaggttgaggcccttcaatcttaactctggattgactgtttaaaacataatggcacttggttaaaaaaaaattgaattttgaacaaagtctgtctggtaagatgtcctaattcatcagagatcggcttccctccctgacattgctggcacacaggcatgattgctggttccattggatatggatctggattgtcagcgtatttgaacagtattaagggagggttttgcagtagagacagaaggtgacgtaaggtggttcctaaggtgggttcggtcagtcccctaatagtttgttttcagtgtattgagaccaggagaattgatttacttcagacctattttttgaaactccctgttggtctggtgtcatgcgtttagagagactctgaacttcgttttctgttttccttagataatgatagcacttcatgagcaccatatgtgaagcacacatacgttctgtctgactctcagaacagtgccacattggcattgtcatcatttacagatgacatctgagagctagggtgacttgcccaagcccaagcagctggtagcagagttgggatcttaaccctcaccacaccggtgttt

SEQ ID NO: 28784 - DNA, 1052 bp, Homo sapiens
ctggcgttcgctcaagctcatggctggcgtttaggagggcaccgcgagcacctactgagctgggatgaggtcggaggctgcccctgcccagtgagatgaatgccccggggccatgtgggctcttggccgggtggtgccaggatgtgcctggatttcagagtaggtggtcaggggtggccacctgctgggagtctggaccgtggagccggggcgactgggcttcagcttcagtggctgcacaacatccaaaagcagggggcccttgaggacccagccctgctctccgggcagtgggcacttggccccagcgccccccctttctcggtgcgaggccgagcatctcccaagtctggtgcccacccggctgccttggcctctgcccactccaagccagctcttactccgccacaggcccggcccctctcacttccagcctgggccccactgtcacttcccatcatctccctcctgggtgacagccttgggaagggtctctggcctagactctgatcccaggacacggcccttcctgctccttggtggccttcctgggcctccaagtccgcgaccatacccatgacctgctgcccgctgctggtgggcctcagatttcccggaaagagggaagaggctcagaccagcccatagcagctttccaggtgaggccgtgatcatgagcagtccagggtccgctgcctggtgggggcgggaccgcaggctgggcagggacagcaggcaggggtccctccccccacacagccccccctcctgtgcggggctctggggtcctgccttacaggggtcctgtgtcacctcagtggggagcaggagatgggcccggggctcggggctgccatctccactgcatggtctggggctgagctgtcgtggagcaactcgggccacatgtttgtaatttggggacaattctgtcttcctgtaattttattgtatttagtaaatgcggtttaattttcttcctgtatagacttctcaaataactacaaatcaaaaaagagcttgcagtcccttcaggggcaaccgtggcctcc

SEQ ID NO: 28785 - DNA, 1053 bp, Homo sapiens
gtgtcattgctctcctgggtcccaagcttgcgtgtccccgcgggccagggcagggctgcatgccacagaagtcaccgtttcatagaagggaagactaggaagtcagctgcacccaggtcaagtgggtctgtgcgagtggacgtccctcctcttgctgtctgcgtgggtcacattgaccagagtttgttaagcccgggccagaggaggctcactccctaggctgggaatgagtttggtgtggcttcacacacaccgcactcacacacacaccctctactccacacggtgataagtgagtggctggagcaagccgcaaggagcttttgagcgcacaccagagctgcttctgctacctccaggcctctgatggctgcggctgcagacacagccagcctcgcagcatgtaagagtgggcaaggatgacacacgggcacagagagaccaggctgggcttcaggaagcaggtctgcgtgggatggaagtgcttagaaagtcatttctggaaggccgacaccagtcggcactccctgagcgaaaggacttgggaacacgtggatgcacttcttgtatctccaaggaaatgctccctgaggatttgcgacgtggaaatgcaacgggctgtggagtgctgcgcaccccgcacctcgagcagtggtttagctcagctcggggtttgtggcttcagggggtcatagtccacaggagtgccagggggttgggcgggtgggacagaggaggcgagaagtggttgcggacactctgcatgagcaggacacgcacacaccacacacacacataccccacacacatatacacaccacacaccccatatacacacaagtacacacacgaacataccacacaccccatatacacacaagtacacacatgaacacaccacacacacacacaatacggctctgcaaggaaacgtgtgaggggtgtggtgtgtgtgcactgtgtgtgaggtgtgtggtgtgtgtgaaatgtatgtgtgaggtatacagtatgtgtgtgaggtagtgtgcgatgtgtgtgtagtgtatgtggttg

SEQ ID NO: 28786 - DNA, 1072 bp, Homo sapiens
tatctttgagttctgaaatttctatttagttcttttttgtagtttccatttacctactgagaatttctgtccttccatctgcttcactcgtggtttcttttaccatgtggagcacagttgtgacaggtgctgtccagtcttgacctaattccagcacctagagcatctgttgactctctctctcttgagaattttgtggctctttgtatgtcaagtaatttttttttttttccgagacggagtcttgctctgtcgcccaggctggagggcagtggcaggatctcagctcactgcaacctccgcctcccaggttcaagcgattctcctgcctcaacctcccgagtagctgggattacaggcactcgccaccacacctggctaatttttgtatttttagtagagacagggtttcaccatgttggccaggctggtcttgaactcctgacctcatcatctgcctgccttggcctcccaaagtgctgggattacaggcgtgagccaccacgctcggcccgtcaagtaattttgaattgtattgtggacatcttgaatactatgtagtgtagattcttgttaaaatctgctggaaaatgttgatttctgttcattgttttggcggcagtcaattcagtcagagccagatctcaagttttgtcttctctcctgggggctgtggtctccatctcattgtgctctcaaggcttttcctgggtggctgtgggtgcgtcccgaagccagtgttgtctctgtagggtgctctctgcccctccccaagtaccatgaagtgagagagcagcgagcgggccaggcgccactcctggaggacagccacgatgctcacctggacctgggccccacacacctctcatggtacaaagctgggggcctgcaggctttctgctgcccgcctctccctgggggttccagcccataccccaggatggttgtagggtatggccgagtccatcatttgctcctggtattggggggaagtgccatggtggcctctggcagccatccttgtggcctgcctgcccttgccacccttgatgtgtatatgtttcaatatagt

SEQ ID NO: 28787 - DNA, 1044 bp, Homo sapiens
ctctactaaaaatacaacaattagccaggtgtggtggctcacacctataatcccagctattccgaaggctgagccaggagaatcgcttgaacctgggatgcagaggttgcggtgagctgagatgacgccactacactccagcctaggcgacagagcaagaccctatctcaaaaaacaaaacaaaataaaagttctctgcttattttgcacctaatttctgtttagttagtagagttttaagaagtagatttaggtttgcagaaaaactgagcaggaagtacagagaattcccgcacccgcctcccccacactgtccacagcttccttccctgttatgagcacagccatgccatgggacatgggtcacagctgatgagccagtatccatacattgttactacctacgtccatcttttacaacagggatcactctgtgtgttgtacattctgggcttggggcaaatatataatgacatgtataatgacatcattataacatcatacggaatagtttcactgccctaaaaatcctccacactctgccaattcatccctccctcctcccaacccctggcagccactgacctttttcccgtctccatggttttgcctgttcccgagagttgtatagctggagttgtatagttgtgtggcctttcccaggctggctgttttcacttagctgcatgcgttcaagcctccacagtgtatttgctggcctctgtggttttgatgagaaatcctgggtcatttgaattcctgctccctctgtgtgtgtaagctatcatttttctctggctacattcaagatttttctctttgtttttatgttttagcagtttttaatgtgtgtaggcatggttttatttgagtctagtctgtttgggatttgctgagctcattaaaactgtaaattgatatgttcccccaaatttgggaagttttctgcttttatttcttcaaatatttttctgcaccattttcttctctcctctgggcctctaaggacgtgaatgttagaccttttgatatcattccacaggt

SEQ ID NO: 28788 - DNA, 1049 bp, Homo sapiens
gccatccacctggtgttgcagacatcaagtgcagcgtgttcacgctttggaacactgcgcagcttgctgaagaaaaccataagatatttttctttattaaattggcaaagaaagaataacgtgtgcccccagcattgtgattgtatagctcttaagaagtaaagactcagggcctcttgcaggcaacctggtcacggccacaccttgccagcatcccttgcctgcagttgtatttctaggaatctgttgctcaatcctgtttgaaaccacatctggctacaactggacctgtgtgtccatgtgtttctctcaccctctggtctgcatgtgtccccacgctgtcctggacttcctctgccattggggccctccgcccacccagcccagcacagggaattccagaggccgtgtgtctgttctctgttctgcatcccagcggcaagcctggggctggagcagagggcgcccctgagcatctgtgagcgtgcacaggaggccaggatgcccaagctgtccctgagtagaactccctgagcgctgggacagctggagcccaagtgtccccccatgtcccacctcccagcacagctggggcctctgccacctgccaggagtcagtgcaactgctagaggagatgaacatggtggacgtggccatgctgggggtgtggaggaggtgagctgggggaggcatgagtgggtgagtgaggtgagtgagtgggtgagtgagtgaggtgcttggggcccttggggttttagagaccccccatgtgtgttttctagcagggttccccactgcaccctcctttcctggttgcttttcctggtgggtgtctaggctgtggcacgtgttcctcccaggaacttttagcccagccttggggctgtgttgaattcgctgggttgttcggccccagaagcaaaagtcagacaaaaaatacacccaagtgggcaggcgtgaccggagcagaggctgaggcttgtgcgggcacgtgctgccttagggctgcttggtgtggtcacaccgcagactctgtccgtgcgctgcc

SEQ ID NO: 28789 - DNA, 1086 bp, Homo sapiens
caggtgatgggcactatatttattcccatcacctggcaggatttgcaggatcattgctcagaattaaatatggatccagatttttacattacccatccccttttgttccttctgagctgcagttggagatggctggttggttcacaggaataagcagggttagtctaaaatgtaggcaaaacgcaaaaacaacgaatgagtctagagtttaatgacaaacgtatgataagttttgaaacataatgtctctctccagtcctcatttttaaaaacaaatcatgataggactgagttgtttgcaaaacagactttagtcttatacttggcctgattatttgcataaagagcagcaagcataattattttaacgtgggccttttagatttacatgggctttgatggaactctgtttcacaaggaatgtcagataggcctttctaaagctgagattgtaccctcaaatacttgtaagctgggtaaacaactctcttcttgaggtcccaatagcatggagttcctggacctgttagaaagtgacatgctttactcaccacaggttaggaaccctgtatggggactgtgtagaccagttatgaggccagttttcccaagggtcttttgttggctctgcaaatcgagcttgactccttaaaggtgagcatacccttctagtcaaagccttggtaaaacaaccagtttctccaattgtgtcttgttgcaaaagaaaatggattcttattgcactgatgcaaacaactatattgtcataagttaagaatacttacaactagtttccaaatcccggagaagccaggcagagagagagacaaatatgttccaaattgtgttcacagtagtataccttacttagttattaaaggccataaatagctcaaaatgtttccttgactctaaaaacaaaaggatcagcaattttccaagcaaaagtaaaaaatattacttcagttttctattagttcagtcctttcagttaactcttgttttacttgctatttgtgaacatttcagctcttcatgagtctggtacatttttcctttattctaatgtcacaatctccaaaatta

SEQ ID NO: 28790 - DNA, 1066 bp, Homo sapiens
gattatcttttcctcgagaattgtaatttttaaattcactatatgttgagtaattttatgtgaatattttgaatgttatgtttccagactctggtggtggcggcagagctctcgggagcttttctgtgcggcgtggaccttttctgtgtgtgtgcagctttggggagccaagaacattctttggtccatgcctgagtgagaggccttgcccagccctcttcccaggagctccagggccccttccccaccgtctctggctggaatctggaatgctctgagaatgtctcccctgctccgtgcagctcagcacagctggagctgcctcagaacaaggcagtgatgagcgtggagagaaaagcaatgtaactgttcgtggaagacgccctggactctccccttctccagaagagaactgttgctcttggtccccttggcgcttgagaactggtgggtccacctgaattggtccgagtttggttttaccatttgttgggtggagtctgagaaatgtcacaagggcctcccaagtctctgtacctgagtgggactccgtgtccaccctccgtctctcctgtggctcctgccagggcttgcctttaggcatggccagcgtctagggtagacctacttgagggtgtcttcctcacttctcagttgtggcctttctagtttctcggctggatgcccaggggatctcagagggattcgggggctctttccatgctggcctggccagagctctgtgtccccagcaccctccacttcttgtttcctcccccctcagcccaaggcagcttctctgtaggttgccacgtgctccctccgggcaaatgcagcagcacccagctgaggccttggggccccatgaattttaggccccgcctctgtgccctcctgcttccgtctccagctcctaggctcaggggccctgccaggctctgcctggagtcaagcctctgtgcctgggtagaaattgccctgggaagggagctgtggcatctgcagtgtgtccttccccctggatcacagccttcacccacccgcgcctgtagactggtgcctgtgc

SEQ ID NO: 28791 - DNA, 1027 bp, Homo sapiens
gttccctgtgggccccatgaggagtccattacttcctttcttccttcatattttacaggcagatgcttttcttataatctaattacatcttttcatttgttatatattacaaaccatcacacttagaaatacttccaggaaatgcttttttgaagtgtgaattaataagaaatggggtaaatagaaaagaaatttattgctgattggccaggtgcggtggttcgtgcctgtaatcccagctctttgggaggccaaggcaggtagatcacaaggtcaggaaattgagaccatcctggctaatacagtgaaaccccatgtctgctaaaattacaaaaaattagctgggcgtggtggtgcacgcctgtagtctcagctactcaggaggctgaggcaggagaatcgcttgaacccgggaggcagaggtagcagtgagctgaagtcccgccactgcactccagcctgggcaacagagcgagactcagtctcaaaaagaaaaaagaaatttattgctgatcacaaggacagacagttttttcccgaccatactcatcaaagatttacgtttgtatattagtaactagtgcattactagagcaggtgcaggtgaggtctttaaagtttcaatgaaagtttcttctggatctacagaaaaaatttttttttttcaatctaaaaactggaaattctagggtttttgtacattttggatgcactgggaatttattagcacaaaatcattctttgcaactcaaaattcagaagggactctaccatatcttagctcagagcacagaggagtgccttatccccacacttgactgggctgtggaggtgggcatgtgggcccctgggcccaggctggggacagagcccttgttttgtgacttaggattttgatgtggttcccatgttctctaacagggccagctgagcagcacaggccaggaggccacagtgtaagcaataacagatctgccacatgcagaagcaaatatcaggcctgtcgcacacgggcggcatttaaata

SEQ ID NO: 28792 - DNA, 3539 bp, Homo sapiens
ggaggaagttttacacatgggtgtgtgctcagaaggggttatgctaatctttgtcatagtgttatttgtaatggtgaaaattttgacttaacctgggtttttaacacaagaataaattaagttatatattgtattagtctgttgtcacgctgctaataaagacatattcaagtctgggtaatttataaaggaaagagatttaatggactcacagttccacatggctggggagacctcacaatcatggcagaaggcaaaggagaagcaaaggcacatcttagtggcggcaggcaagagagtgtgtgcaggggaactgccctttacggaaccatcagatctcgtgagacttgtacactatcacgagaacagcacgggaaagatgtgcctccatgattcagtacttcccactgggtccctcccatgacatgtgggaattatgggagctacaattcaagatgagatttgggtggggacacacccaaactatatcatatatgttagaatgtgatgtagattttttaaatgatctaaaagaagaatcaatgatacaaagtagtatttgtgttatattgactgggaaaagcagtagcactgttataatttcctcttgaaaaagaaattcacatgtaaatgtatatataactggaaaagtaagcacaaaaatgttaaaagtgattcttttttcagattgaaattttttttcctttttgtaaatctttttttgccctaaaattaatatatattaattttaaaaggaggaaaaaaataaggtcatttaagtgaattgtactgtagcttatttgaaaatgtgtccagtagtaggaattggaatttctgaacagctgtagtttttattttttccttttacattcttccttttacatctttgccataggggttttcaggactacccccccacccccggccacttcactggtggaaatgccgtctgccaatagacttgctgtcctaaccctcgtttaggacttctcatttactgcagatattggtacacataggtagtgggcggctgcctgagagagaccatttggtacttcttttcttatctcaaagctgcttcagtcttgtgtgcacaggggatgctcagaagcgtgccttctttcagggagactggccatgcgcctgagttagatgataacatggaggttcatcacacgctgtctacttgagtgtgtttttggaattctccataataaaaagttaaaaaatacaattgataggtaagagtaattgaagtagtttcaaattggttagctataaaatgcaactatgaagaggattgtaggtaattaaaatactaagattgtattgaggagaaatatattattcagaacaatacctgtgacatggcattagtgacaaatatgaccaataaactgattaccttatgtgactatgtactacaggtggtctgattattatttttaatgttctggtaattatttttaatgctcagataatataaatttttgccttactgtaattggattattttgattttttaaaaattatctttgagaactataggtctaccaatatcataaaaactagtcaataaatactttaaaaacaattcaacacacgtactgaaagttgctggtatacagtggtgagcaaataatagcagaccttcaggagcttatattccaaggacagggatggacattgataggagaatcacacaaacaaaatgcaaagtcacatcaggaagttctgggcagcaccttgcagaggtggtggttggatggaccatctgtagggagtgaagcaggagttacctgagtgattcggggaggaggggcccttcacatgtgcaaaggcccagcgcaggaagtgacgggagaggaaggccggggccaaactacctcaggccttttggtcaatactgaaggttttgatgttttctcctgggagtggcggaactccattgaaagactccaagggagtggcatgaccagaatgatctctgacggctcgctctgggtacagtgcaaaggacaggtgggaggaagccaggcaggccctcggctgtagtggtctagggtagagacaccggcaacttgggaactaaatgtgggcactaaagataaagagatgtgtgtggatccacgagaggtttaggacatggcactgctgggacttggtgaaggaggggctgtggcagggacacaggtgcttttgatgcttctgtggatgcagtgtcaccctatgggaccaactcctggagaaggcaacacagaagtgggaaacttcctgattttgtggatgtggatcttaggtggacagcctgatgtccagggcaagtatgcatctagtttcttccactctccttgaatgagaagttgtggttcagttcctggatagtagagcgttcaccactgaacgttcaccactgaaacaatggatgagtggaaacacataggaccaggtatgaaagacaagactgtttgaaggtaagtgatcgccattcacatttgtgaattttcatgaaattcagagcttattaactcaggtgagttaaataaatgtattttaaaattgctatttctattattataactttaatggctttataattttacagttgagtctatctagatggattactgcatatctgagtatatatggagccatctgagaattcctcccaattttatgtaaaagaggactgattaaatgctgtgaattgaaaatttatttctctttatcagaccttgtgtatctttttaatgatgatatttggtggaaagggatttgatttagacacattgacctacattccaggttgtactgatgataatttacttattattagagtaagctaccaagagaaatcctggtgcctttctttttgtagatatttacataattccagttgcctttatcatagccatgtgaacatatattttacacagaccggttcagggatttaatgatagaattagaaatagctaaggaactagctctgaaaagtattgtaaataatcctaatcacattagatattttgataaaatatttgccagataacctttcatttagtctttttgtatatattgcttgaaaaaaattcatatgaaagtggattagactacgacagctgattagaactggctgggtcagcctggagcctgtcagtgagtgagcaggccccaccgggattcctgcagacatgaagcgtgacactcagggccccaggctatgccccagctgtgcaaacagcttggttgctgtgtctgcagtctttgttctcattatctgtggagcctgcccaagcgcggcgatgcctcgggcaccattcctgggctcacttggctgcctctgacccttgcagtctaccctgatgggagagtctgcatttccatcctccacgcgccaggcgatgaccccatgggctacgagagcagcgcggagcggtggagtcctgtgcagagtgtggagaagatcctgctgtcggtggtgagcatgctggcaggtaaggcccgagcctcctggcaggagctgccgtggacacccaggc

SEQ ID NO: 28793 - DNA, 1050 bp, Homo sapiens
ttagggtatggctgtagatgccttttggacaggtttaactatgaaaataattatatggagcaaaagctatatttgcccctactatgatttcataaaatggaaatgttcccccttttcttccgagcagttcttagcattggttatctacctgagtatcgcctggggtgcttagaacaccacaaaacagaaaggaaacacaggggatctctgggtttaaaccagagccagggccctgctctgggggtgagggtcaaatatgtcatcctggtggagaccaagtgctggaggaaagtgcaggaaggcacttccccaaatcacggcttcttacagcctcgtcctcttgctacgagggtattgggatcagtttctatttaactcctcactgcctggcacagccacaagcacaacctggcatagcagagccagtgtcctagggcttttaaagtgcccagtgtgggggctgtgtgtgcagcccaccttggtcctgctgtcctgggcattagtggggtgggaacatcggcaagaagcttttgctgaactgcagagcagggactgaaggaaggagacgcacccaagctcagatgccgggagccctcatgcccttcctgctgggtgccctctgtcgattctgtagcgtaagggaggtgcttatccttcccccagagtggagggtgcccatgaagcagtttgcccttcccgtctccagctcagctggctccagcttttggagggccatcgtcccttagtcatccacttcaggttttaaatactgatggatgagtttgcattctctgtgattttaattctttatcacatgtgcgttggagacttcttgtctatgtgctgtgacaaacttgataaagagaacagcagcaaaagcagtcggctttcccaacacctgcgtgcagctgaagtggcgagcgcaccagttcctggaacaccgcttgccggcgaagctcagggcacccacttgccctgggtgctccataaggcactctgacctgcctgctgcttctcttatctagaaagtaaaaagtgttagaaaggcaa

SEQ ID NO: 28794 - DNA, 1048 bp, Homo sapiens
taagaaactatcagactatcttcctagagtagctcaccattttgcattcccagcagcagtgtatgagcattccagtttctccacttccacaccaacactgctgttgtctgataacagctgttcttgtgggtgtaaagtggggtctccttacagatttgacttggatttccttgacgactaatgatgttgagcatctcttaatgggcttattggccgttcatgtatcttctttggtgaacttcagaacttttccccatttttatattcggttgttttcttgttgatggaacgttaagagtttttaaaatatattttgatacaagtccttcattagacataggatttttaaatattttcttccaatctgcaactctccattttgttttcttaatagagtcttttgaaactaaaaagttgttaattttgatgaagtgtgattttgcattttttttcttatatagagcatgcttttggtgttgtatataacccaaggttgcaaagattttctcttatgtttgcttgtagaagttttgtgttttttcacttttacatttaggcctttgatctattttgattgacttagtgtcatgtatggagttaggtgggagtctgtttcattcttttgtatgtggttatccagttgtctcagcaccatttgttgaaaagacagttctttccccattgcataattttggcacctttgtcaaaaatcagttgactataaatgcaaggatttatttttggactctgaattgcattccattgatctatgcctatccttaggccattactacactgtcttgattactggagcttcatggtaagttttaaaattgggaaatttaagtccgccaactttgttctttttcaagattgtttactaggccattgcatttccattacattttagggtcagcttgtcaatttctacaaaatgcctggtgggattttgattgagactacattgaatctttagataagtttgagggatattgccatcatatcagtactgagtgctctaatccatgaacatggactgtctctccat

SEQ ID NO: 28795 - DNA, 1076 bp, Homo sapiens
ttgctgaaataaacccgagataataaaataggtgtttataatttgtattgtatgtaatctcaccatagcattttcttcaacaaaagtgtcacaaagatccctatatgaagaagttattgccacattcattgcagtaataataataaaaaaggaaacatcactgttccacataatttatggagcatctatatagagtaatgccatgtagctgtaaaacagttcaggtggaattttcatcctggcatggaaagatgtacacaatataaatggaaaaggcggattctagaataataggtctggaaccgtctgtccgtccttccttcctctcctctcctccctcctctctctcttcctttctcccctcctttcttccctcccctcccctcccctccctttcttatggagacatggtctagctctgtcacccaggctgaagttcagtggcctggtcacagctcactgcagcctcaaactcccaggctcaaacaatcctcccacctcagccccacaagtagctgggaccacaggtgcacaccaccacgcccagctagtttttaaaatgctttgtagagatggggtcttgctctgtttcccaggctggtctcgaactcctggcctcaagcaatccttctgcctcagcctcccaaagtgctgggattacaggcaggatccaaggcacccagcctaaacagctttattgagataatttacatactgtaagttttacttgcattaagtataaaagttagtggttttagtaaatttctagagttttgtagtcatcaccacagtccagttttagaacatttccaaaaagattcttatgtctatgtgcagacagttcccattccaacccccaggcaatccctgctctttcctctgactatagatttgccttttctgacttttcctatgtgtggaatcatacactgtctaatcatctgtgcctggcttcttgtacttggcagaatgtatttgcagttcatccatgttataccatgtatcagcagctccttccttttccattccccagttgatggacatttgggcttcctactttttggctcttttgagca

SEQ ID NO: 28796 - DNA, 1951 bp, Homo sapiens
attttctcctatgatttcttctagatgttttatagtttcagctcttgtatttaggtttgggatccatatcaaagttttccatatggtatgagataaaggccaaggtttatttgtaaattatttgtaaatggcagtgcagttgtttcagcactgtgtttgctagggctgctctaccacacaggctgggcacggcttaaacaacagaaatgtatttcctcatagtcctggaggctggaagtccaagatcaaggatagggcagggctggtttcttctgaggctctgtcctctatgcctgtgtcctcatctcttcttaaaaggatattagtcagattggattaaggtccaccctaatgaccacattaattttaattacctcttaaaggccctagtcacacacttttctccaccttcttttttttcatgtaatatgtcctgaagtttgttctgtactagcatgtagaggtatttatagctgcaaagtaccccactggtatatgtatcataatttgactggtcctctgttgatagacactcaagttctttttaatttctttttgtttttacaaatagtcctgaaatgaatagcctgtgtatacattttttatcttcaccaatgttatctgtgggatggattcctagaaatggaattgctgggtcaaaggttatatttcactttgtgtggtagctatttgttaagccactattttaagtggcaaggaatggcctctgaaaatttccctgataccaagattcgtctctttttttgaacttgtttcttatcagtaaacatgaaactgtatattattttgtgtacgcgtgtatatgctttggaagcaaaaaacaaaatggaaaaaataagtgccctgaaccattccctccagcctctgaactcatttgctgcacttctttattgaccagtagaggccactgttgaataacaaagctggcgggaaggccagcgcacacccgggcaggtctctgtgctgagcctgcattgccaggagcaggtctggagctgcagtttttagaccaccctttcccctccctaagggagggtgtcacgcaggggagtgccaaaggggaactccagatgaagaataaagccagctctctttggtacgagctcttcttcatggtcccacgaaggtgatttgtaaagcttttgtgtgttctgctgccaggcctctacttagttgcccactgacattgtgtttctcccgcaccccacctgcttagcagtttacagtctatctgccgtaatctgttatttttttcttataattaggcggtttggcttgagacacaagaatgggactagattttagatgactgggtgtaggaagcctagcaaattaggttctgtggttatttctcctgatctactccacatgaagagacacaaagggagaacatcagggtgtggcttgtgaaatccaaggtcttagtcggcttggtacttgacctcattcacattcagttcccacccacccctgaaatgtttaatgcacttggcccttggggccagcacttgcctttggcctgccttgctggcccctccttgccactctgccttctctcactgctgggtgtcagcacacccttgtgacagcacttaggtctcttcaggacctctgtttcctggatcagggcttctcagcaggtgttagtggtattttgagtgaaataatttttccttgggtaggccttgttctacccaaggttgtgggttcattaaacggttaatcggtacattagtccgttcttatactgccataaagatactacctgagactgggtaattataaaggaaagaggtttagttgactcacagttctgcataactgacgaggcctcaggaaacttatagtcatggcagaaagggaaacagacctcttctcaaggcggtaggagagagaagagcaagccaaggaagaacttgccacacactta

SEQ ID NO: 28797 - DNA, 2158 bp, Homo sapiens
taagagtcagtccctgtggcaaacttaattgttgtcttattttcagaaactaccacagccactcctgccttcagcaactaccaccctgatcagtcagcagtcatcaatatccgggcaagactgcaccggcaaaaagattatgacctgctgaaggctcatatgattgttagcattttttagcaataaaaattaagcatattttggcaaataataattatttatttatttattttttgagacagggtcttgctctgtcacccaggttggagtgcagtggcacaaccacagctcattgcaagccttgacctgggctcaagctatcctttcacttaatccacctgagtagctgagactacaggcatgtgcccctacacctggctgatttttctgtcttcatcttgacctccctctatgttgtcagggtttggcgaaagtgactccattttgattctgacaatgttcatactcgaacagagggttggatgtgggggactattacttctgtgtcctcatgggaaacctggctggtgggtcagatgtgtgaacacctaccatttcttggtatcctggtttgtgtttgtgtctctgttttagttttattttagccctatttctagggttaggctagactgtgagcaggtattttctctttttttttttttttttttttttttttgagacggagttttgctctgtcgcccaggctggagtgcagtggcgcaatcttgactcactgcaggctccgcctcccgggttcatgccattctcctgcctcagcctcccgtgtagctgggactacaggcgcgcgccaccatgcccggctaatttttgtattgttagtagagacggggtttcaccgtgttagccaggatggtctcgatctcctgacctcgtgatccgccagcctcggcctcccaaagtgctgggattacaggcgtgagccaccacgcccggccttctcatttttattgagaagaaaatcattaaacccctgcataggaaattaagttcaggctgctgcttcaggccagtctttgcattgttgaacttgcattttctaaggatatttgcattagcaaagatatgttctcccttttattgtcctgacagaagcttcatctgttatttcaattatattgtcaattagtttgcagtaataagacctaaataatggttgatttccgaaggtttgtcacggaagtgtgttgtgtgtttttacatgttaacatgaaattttggactatgtgtagaaggtagaactctaaacatacctcactaagattcccatgcccttgttattcaagcactttctagtacttcggtggagggactttggagatgcaagtcaggttagtaatcagcagacctaaagagtgggagattattctggattaccgtgaaggatccaataataacataaggctcaaaagcagtcagtgaaggcaggatgggggtggtcagagagattcaacatatgacaagatctctaccttctgtggctggctgtgaagatggaagaaggagccatgacctaaggaaggcgggcagcctcaagaagctgagaatgatcccagaccaacagacccgtggaagtgaattctgtcagcaacctcaatgaacttggagtggcagccctggtgagactctgagcagagaactagctggcccatgctgtgtccagacttctgacgcttggaaactctgagatcatcaatgagtattgttttaaatcactaaatttgtggtaatttgttacagcagtgacagaagatgaatacagtgtgttattgaggggactttgtttttcctgtatcttaataatgtgataaaatttagtgggttttttttgtgtatcatttactggttttttttgtgtgtgtatcttaacatctagtttgtcctcataacgtattttaaggtagcacattccagtgtaaaggtggacttgacagaatcaatctctacatagaaggggtttagataaatttggttagatgttcatgcacactttattgtatttgggagtagtcatataactgcagaaattcagaggtggtgggaccttggctatgattctgttcaagccccctaattttacagattttatggaattgagcaacagacaagatgattttgcctaggttcataaacaggaaaa

SEQ ID NO: 28798 - DNA, 1043 bp, Homo sapiens
ctcactccagtcacatagagaattggtgtttcccgcagtggggatgcagctgttggacaggtattgggggcaaggttggtagggaggacagactgtcacttgctgttacaggcacaggtgattaaaatgctaaatattgcaaatttaagctttgtcagtatatggaaaagttgaagggaaaatactggaatgcttcttcaaaggttaaaaaataaccgagtcttttggtaatttgaccccacgtgctctctggccctcaagcatgtaacctcggggtctgaggcccaggacccacccccctgccacccctcccaccccactccctgctcagtacctggcgttggtacacaggcaaggattggcacaaccaaaattggcctttttctccctcttaatattgaagaaattcccacatttctcatttggtaatggtgttgtggcctcagatttcttctagtatttgcttctgatgaatgattatggtctatacataaaaaagtaagactaagtattgctgaatttgcagttatgttgtcgtgtataagagctacttccaagtgtggttacaaatgaacccatggaatgatgacttcatgttcttctcgtgggtttgtgccgtgctgctttccaaataggtattgaatttatgcattagtctggtgatttcagttctgtgaaatattttgggatctataccaattaaacattttcatagttctgcctattgtccttccctgaggctccattgctgcttggtggccattctctgcctttttacagtcacctgaacaatgacccatcatctcttgcttgcttgaaatcttgctgaaatgttctcatttcctgtttgctgtatgggctcgggtgggatgtttgttggctctgttgtgtttattcaccaatttgtacattatttgttgtcctttactactgtaaacagtaaatatagtttggtattctgtctcttggcttctactaaacactgcatttgaaggttggggcatactggtacaattcagtgtttgaattgaccattccaggca

SEQ ID NO: 28799 - DNA, 1058 bp, Homo sapiens
gaggcggaggcgggtggatcaagaggtcaggagattgagaccatcctggctaacatggtgaagccccgtctctattaaaaatacaaaaattaggtgggcgtggtggcatgcacttgtaatcccagctacttgggaggctgagacaggagaattgcttgaacccgggaggcggagtttgcagtgagccgagatcgtgccactgcactccagcctggcgacagagcgagactgtctcaaaaaaaaaagaaaatagtattatgtgctcagttagcagaagttgctagaaaatgtgctgccagtagctctgtgactcccagggagaggttgggaagccaggggtgatctgctgaccgggaaagcagccctggggaacctggaggacctccttcaaggtggtcagccccagcactgagctctatctcaccacgttacagaaggtgtggggaaaagggtgagtttgaaggcaacgtgtttgacttctctgctcagtatgttttgttcatgtgtcacccctgaaactcacctgtgaattcccctagaatctccagttttcccagcttaagaatccctgcttgcgtagacagccctctttttttgtgtgcgtatctttgtatatttgattttggaggcgtttttaaattaaggaaatcagctcttgtgagattcaagttgttttctagtttgcctttatttatttatttatttatttttgagacgggctggagtgcaatggcactatcttggctcactgcaagctccgcctcccaggttcacgccattctcctgcctcagcctcctgagtagctgggactacaggtgcccgccaccacgtccggctaatttcttgtattttttagtagagacggggtttcactgtgttagccaggatggtctcgatctcctgacctcatgatctgcccacctcagcctcccaaagtgctgggattacaggcgtgagccactgcgcccagccccgtagtttgccttttaaatcagtttgtggtgtgttttgtaacctagaactcattattatgtagttgaatttattaatcttttag

SEQ ID NO: 28800 - DNA, 1339 bp, Homo sapiens
gagcagctgccagaccttctttgcaaatggttgagccatttacacttccaccaacactgtgtgagagttctgttgctgtacatccttgccaacatttggtattgtcattctctttaattttagccattctggtaggtgtgtagtcatctgtcatttggagttttaatttgcctttgtctggtgactggtgatgagcacagagctcttttcagcgtgcactgtgtttgtgtgtgtgtgtgtgtgtgtgtgttatgggattggagtaggcagtctgtgtgtgtgtgtgtgtgtgtgttacgggattgggggagtacgcagtctgtgtgtgtgtatgtgtgttatgggattgggggagtaggcagtctgtgtgtgtgttacgggattgggggagtaggcagtctgcgtgtgtgttacgggattgggggagtaggcagtctgcgtgtgtgtgtgtgtgtgtgttatgggattgggggagtaggcactctgtgtgtgtgtgtgtgtgtgtgttatgggattggagtaggcagtctctgtgtgtgtgtgtgtgtgtgtgtgttatgggattggagtaggcagtctgtgtgtgtgtgtgtgtgttatgggattgggggagtaggcagtctgtgtgtgtgttacgggattgggggagtaggcagtctgcgtgtgtgtgtgtgtgttatgggattgggggagtaggctgtgtgtgtgtgtgtgtgtgtgttacaggattgggggagtaggcagtcagcttggttgcatgttggaagttactcatgcagtcgctcttgcttctgactggcttgagttccagagctgttggctgcgtggagtttgaccccttccttagtagcagcgctttgagtagtgggcagagtctcagggtgttctgtgtggttggagcaggctggtgtgccgggcctctcccttggtacaggttggtacagggagcatagcccagtctggagtgaggctaccaggggactaagaccttgctttgtcacatgagatctgtaggtgagtccaaagacacaagtgtgctgcgtggcagtgtcgctggcgttgctgtggcctcggatggaggctcttgggttcccaaaagagtgcctgctgatgagcagaaggtcccagcaggtttgtggttagtgattacacagccacagggcacacttcctctcacagagagatctgaaacacagccttctgtgttggcactcttctctcccagaagagcccttgtggataggagccgcatgtttatactctttgtgccctgcctgcagcggggttcctgaacactcgttccacatgtcttgaagaaggcttgttatcagcaggggct

SEQ ID NO: 28801 - DNA, 1044 bp, Homo sapiens
cagggctcacttaagagcagcgtgagcagcgcttgggaccgccgtccgggacgcccgcagccctttaggatggaggccaccgtgacctccgccaccgaagcaccgcgctcccctagtcccctcagccggtcgccgttccccgccgcgcaggcgcaggagccgcggcgagcccctcggtcacgcctcgcccctcggtcacgcctcgcccctcggtcacgcctcgcccctcggtcacgcctcgcccctcggtcacgcctcgcccctcggtcacgcctcgcccatccgcgccgcgcaggcgcactgagcctcagccgctctcctcgctaccaggctcctttcctctatcgcgcaggcgcactgaacctcagccgcgccgggaggcgagcccgttggcgaggggcggggcagatggcgagggagcggggcgagctgctttttgaggctgcgcactcgcatggccccacctcgcaggtccacttccggcgccgcggctgttccgggcggagaccgcttgtgctggagtcggagttgtaacgctccactgactgatagagcgaccggccgaccatggcgcccggagtggcccgcgggccgacgccgtactggaggttgcgcctcggtggcgccgcgctgctcctgctgctcatcccggtggccgccgcgcaggagcctcccggagctggtgagggcgccggggcgggcggggccgcgaagggggcggggcggctggtgggtccaggtcggggtcggggtcggggtttcggccagggcgctgggctcggcgggcggcctgggcccacggtcgcaggcagcgccccgacggaggctcctcgagggtcacgcccgtttggcggccgcgggagctgccgtcgcggctggggcgcgggcaggggaagagccgtctttgtctttgtctttgttttgtccagtcgctgcggccgctcctcgcgcgtggcctcgggttggccctcgcccggcaggcgggacgcttggcacctgcggcctcccttagcctcactgcgaccccaaacagcactcctcggg

SEQ ID NO: 28802 - DNA, 1105 bp, Homo sapiens
aacacagcgaaaccccgtctccaccaaaaccagtcaggcgtggtggcgcgtgcctgcaatcgcaggcactcggcaggctgaggcaggagaaccaggcagggaggttgcagtgagccgagatggcagcagcacagtccagctttggctccgcatgagagggagaccgtggaaagagagggagaccgtggggagagggagagggagaaggagagggagagggagcacgtttctttcctttcttcttgatccctggttctgttctgggtagacctggaactacccagatccatgaagatctgcatgatcttcaactgtaattcctgggagggtaaagctgagttgtgtgtctgcacctttggagccagttcctaacgaattaaccagaagccaagtacgcatgtctgtctgctaaagagtcacgtatctgtccttactggaggatcccggttcaaagggtctctccttctactttgcagaatatgaagagctaaaaaagctgttacccgagatggtgaggtttgaacccacgtgggaggagctggagctctacaaggacggaggcgttgcgattattgaccagtggatctgcgcacacgccaggtgcctgcccacgtcactgtcggccgagagcgggtcgggtggctttcaaaggttcttctgtcccaagtactcggtgtcagagcagatggtcgcctgtgttcacagtggtcatttccatactgtttgcctcctcgtctgagtctcctgtagcatctggttcagtgtttccctgggctgaagttaattgttcatcttgcccctttagttctcatgcacagaattcctccatagcaggctgttggcatagctggcctcgtctcagaacctcttcttgtgtcgcattttcccatcattcccggtttctgcccctgtctgccccctgccctgagagttgcccgtgccctggacttgggcatgtccttgttgctgtgttgttgagcatccgtgagcgtccccgaggccgggagcgtgggccctcgtgtgatcattctcgtggggctgccatgagcgtccccaaggctgggagcatgggccctcgtgtgatcgttcttgtggggctgccgtg

SEQ ID NO: 28803 - DNA, 1028 bp, Homo sapiens
tcagatctgggagctttttggatgagtctttagggtttcctaggtatacaattatatcatcagtgaacagtgacagtttgacttcctctttactgatttggatgccgtttatttctttctcttgtctgattgccctgactaggacttctagtactatgttgaatagaagtggtgagagtgggcatccttgtcttgctccagttctcagggtgaatgctttcaacttttcccccgtcagtataatgttggctttggatttgtcatagatgacttttattatcttgaggtatgtcccttctatgccacctttgctgagggttttaatcttaaagcaatgccggattttgtcaaatgcctcttctgcatctattgaaatgatcatatgatttttgtttttagtgctgtttaggtggtgtgtcacatttgttgacttggatatgttaaaccatccctgcatccctggtatgatacccatttgatcatgttgtgttatctttttgatatgttgttggattcggttagctagtattttgttaaggatttttgcatctatgttcatcagggatattggtctgttgatttatggaggattccctctttctctgtcttttggaatagtttcagtagaattgataccacttcttctttcagtgtctgatttcagctgtgaattcattgggtcctggactttttttgttggcaatttttaaattactgtctcaatctcactacttgttattggtctgttcagagtttatatttcttcctggtctatatctagaagggttgtgtatttccaggaatttatcctcttgattttccagtttgtgcgcataaaagtgttcatagtagccttggatgattattttgtgtttctatggtatcgactgtaatatctcccgttttgtttctaattgaccttatttggatcttctctcttcttcattaatctcactaatggtctatcaatgttgtttatcttttcagagaaccagcttattgtttcatttaacttttgtatttttttg

SEQ ID NO: 28804 - DNA, 1050 bp, Homo sapiens
tgcggatgtggagctggggcctcaggggtcttgggcgggactcactgggctctgcccacggatgtcctgagggcactgcagcctcctgaaccctctgcacctccgggaatgatcaggtccctccctggtgtcccagggacatctccagtccctcctgcccctggcagctgcgagaatcaggagagatgtggccaacgctggtgctgctccttctggtcatcgtagcacagcttccgctgccgagatggagacgggctccatgtgcaggctgctgggggttgctctgggcgcgaagccctggggatcagctcctggtcacctgctgtggctctcctcaccctgctctgccaggcgggacgttctggccctcatgggcacccttccgctgtctcagcaccatgggggggcagcaagcaccaccaagcaggggactcgggagcagacaccgcaggccacgcagaagcaggccacctgccaggttccgaggggttcttgggaaatggtgggaaccccccttcaggcctgtgccaggtggtggaggtcgggggggctgtggtgagcactgtggcacctgctcctggggctggcctctgaccgctgtgcagtgttcagggtcagcctctgagctggaggagggtgagcctgggagcaggcgtcggggtgtagggtgccagtgtcccagccaggccctccccacccgcctcacccggcctctctttccagttccagttatactccgtgtacttcctgatcctgtccatcatctacttcttgggggccatgctggatggcctgcggcactgccagcggggccaccacccgcggcagcccccggcccagggcctgaggagtgccgcggaggagaaggcagcacaggcactgagcgtgcaggacaagggcctcggaggcctgcagccagcccagagcccgccgctttccccagaagacagcctgggggctgtggggccagcctccctggagcagagacagagcgacccatacctggcccaggccccggccccgcaggcagctgaattcctgagcccagtg

SEQ ID NO: 28805 - DNA, 1975 bp, Homo sapiens
atcgccacgtgagttccagaagggtgggaagccgggggcgggcaggcgccaggatcaagccccgcgcttcgctgggtgctcccaccttcctgctgcgccccagcggctgtgccactgctggccccgccagccacctggagctgaccagggtccccacttgcctctccctgggacctcgggcgtcccttcctgtgccgtcttgctgctcccccaggccctccacgctcctctctgaagcctgctgggctcacagccttgccctgctcccaaccccaccctctaggccccgggctgctgagaccccatccaggcaggagcgggagcttgcacctgtgtgagttcatcctcagcttacactcacaccaggcactcacaccacacacacaccacacgctcacacatggacacacacacactcatgaacacaccacatgcgcacagatggacactcaccacacactcatgaacacataccacacgtgcacacatggacaaacacaccacactcacacatggatatatcgcacatgaacacaccacacacacggacacacaccatgttcacacatggatatatcacacatggacacccactacacatggacgcaccacacacacacggacacacaatgcacactcacatgaacacaccacacgctcacagatggatacaccacacagacacaccacacacgaacacacaccacatgctcacagatggacacccactacactcacatgaatgcatcacatacttacacatggacacacaccacacacacggacacccaccacactcacatgaacacactacatgcttacccatggacacacactacacacggacacacacacactcacagggacacaccacatgttcacagacacccaccacactcacatgaatgcaccatatgcttacacatggacacacaccacacagacacaccacacactcacatggacacaccacacactcacagatggatacaccacactcacatgaacacaccacatgcttacacatggacacagcacacatggacatgctacacgctcagatggacacacaccacacggacacacaacacatgctcacacatggacacacaccacacgttcacacatggacacaccacacgtttacacatggacacgttcacacatggacacacgctcacacatggagacacccacacattgacacactcccaccacatactcagaccacacacactgacacactcagacactgaccctgtgtgctcacagggtcctgctccctggacctgccccctctttcctgcccgctgggaggactttggccccagctcagtaccccttcctgggcttcccctccagggtggcctccgagccctatctccctccctccgtgggtcatccccctgggccttatgctggtcacgagcctgtttgagctgagagcaccctcctgacccttgcattgggccctctgtgtcagtggcctcacccctgcagcatcctgcctggatgtgcccggccctgtacttccccatcctccccacatgcaggcagcagtctcccggcatgggcagcccggcccacccttctctcccgcccctgccatactcggggccccttctgctcctgtgtggccgccttctccaggctccccgaggcccacactgggctcttgccgtccctggctcgtgaaggcccagcgtgatcttgcttgggcccccccactgacctgccagcactgtggaaagggccagggcctctgccattgtgctgtcccattgctgcagccagggggacaacgcctgaaaggttttagttataaagtcattgatgcccatcgcaaaaaaatccaacacggtgccgcagcgtgcaaagcagaaaactgctgtttgctacggggaatcccagcattttctgcttgtctgtgttgggttgatgccagacacagatgcagatggtcactcacagatgc

SEQ ID NO: 28806 - DNA, 1209 bp, Homo sapiens
aacccccatctctactaaaaatacaaaaattagccagacatggtggtacgcacctgtaatctcagctactcgggaggctgaggcaggagaactgcttgaacctgggaggtggaggttgcaatgagctaagatcgtgccactgcactccagcctgggcgacagagcaagactctgtcccaagaaagagataaaaatagagaagcttagatgaacaggcttgttaataacgattccttctgtggccactgccagctttccgcaggcgaacgctcccaggctgccgggacggtcgggagccagaggtccctgttcagagaggacgatgcagtgggacatgggacaggggcgtgttggggagaggggtcccaccaggcagtgttggggcaggaagccgtcagcagccatcacctcgggcgggctgtgtctgccgcagcggcagcattgctaacacctggtggggcgcacgcccgcctgtccgcaggtcacgaacgagatcacgccggtgctgtcgtactcctacctggccgtgctggtgcccgtgttcctgctcaccgactacctgcgctacacgccggtgctgctgctgcaggggctcagcttcgtgtcggtgtggctgctgctgctgctgggccactcggtggcgcacatgcagctcatggagctcttctacagcgtcaccatggccgcgcgcatcgcctattcctcctacatcttctctctcgtgcggcccgcgcgctaccagcgtgtggccggctactcgcgcgctgcggtgctgctgggcgtgttcaccagctccgtgctgggccagctgctggtcactgtgggccgagtctccttctccacgctcaactacatctcgctggccttcctcaccttcagcgtggtcctcgccctcttcctgaagcgccccaagcgcagcctcttcttcaaccgcgacgaccgggggcggtgcgaaacctcggcttcggagctggagcgcatgaatcctggcccaggcgggaagctgggacacgccctgcgggtggcctgtggggactcagtgctggcgcggatgctgcgggagctgggggacagcctgcggcggccgcagctgcgcctgtggtccctctggtgggtcttcaactcggccggctactacctggtggtctactacgtgcacatcctgtggaacgaggtggaccccaccaccaacagtgcgcgggtctacaa

SEQ ID NO: 28807 - DNA, 1026 bp, Homo sapiens
tcctggggcgaatgctgcttcctctgcagcctgccacgggctgcccacgttcccctcaccagctcgggtgggctgctgagcgccggccgtctggccgctgtgaggagcgtggtttcctttgctcacatttgctctgccgccatttctcccgccgtgggccagtgtttcctggcagccctgtggttgctgtcctcctcggacctggttcccttttctgcctcctggggaccccgtgcccttgggattggactggttgtgtgttacatacggtgtttctctggagtcattttgaatttggccaaatttccctccagggtttctgctttgagtgtcagctgagagcgctttccccggccgagtccgtgaggtgctcctgggtgcactgaggttgcctgggcccccgctggaactgtgctgtgtggtgggagctgcagcccccgccctcctccagggagaccccccggcccaggaccctgtgcacagcagtccctcctgacctgcggcccatgccccgtccccagccagcccctgttgggtgcccttctgtggcatccagtcctgctgccccacgcctggccctgccctcgcgtcctgcctgccttcgggccttgcccaccttcccgcctccctgttcagagaagccgccctgaggccgtctggacgtagatttgggcgcagctgcctgcactctgcccattcagcctggaccccaaccaagacctgtggagagcagggccgacgctgggctcaggcagcaggaggctgtcctcgtgtcagagtcgtggccgcctgacagatgccacctccctgctgggaccgttgtgagggcccctcccccagcagccttgtaagtgggacgcaggtcacagctctgggcagagcctccctgctgtctgcctgccaaggctgaggaagagggagtaggggccgttgaggaggtgcagggagaggagcgggagggctctgggtggctgccaagggggagctctgcgctcagaccctcaactaagaccaggaggtgcctga

SEQ ID NO: 28808 - DNA, 1031 bp, Homo sapiens
ctgggctgatggtgccatgactgatgcgggatggactacttgctttcctatgctcttgcttaattagccctttccaggctgactcacccacaagccagccaagccaacagccagggctccagttcagggactagccctcagctgactggtgaagcctttgtgtttatttctctgtgttcttttaggaaaacattgctggggtcttcaacaagtcctgtgccatctcctacacgagctacaggaacatcttccccatctgggccctcggccgcttctcccagctgtaccctgagagagcccttgctggccacccctgagaacatgcctacctgctgggtgccgtctgtgcgttccagtgaggccaaggggtcctggccgggttggggagccctcccataaccctgtcttgggctccaacccctcaacctctatctcatagatgtgaatctgggggccaggctggaggcagggatggggacagggtgggtggcttagactcttgatttttactgtaggttcatttctgaaagtagcttgtcgggcttgggtgaggaagggggcacaggagccgtgacccctgaggaggcacagcgccttctgccacctctgggcacggcctcaaggtagtgaggctaggaggttttttctgaccaatagctgagttcttgggagaggagcagctgtgcctgtgtgattccttagtgtcgagtgggctctgggctggggtcggccctgggcaggcttctcctgcaccttttgtctgctgggctgagggacacgagggcaaccctgtgacaatggcaggtagtgtgcatccgtgaatagcccagtgcgggggttgctcatggagcatcctgaggccgtgcagcagggagccccatgcccctgggtcgtgagcttgcctgcgtatggggtggtgtcatggagcctcatgcccctgggtcgtgagctcgcctgagtatggggtggtgtcatggagccgcatacccctgggttgtgagctcgcctgcatatgcagggtctgtcatgga

SEQ ID NO: 28809 - DNA, 1031 bp, Homo sapiens
tgttttttttttttgagacagagtctctgtctcccaggctggagtccagtggcacaatctcagctcaccgcaagctctgcctcccggattcacgccattctcctgcctcagcctcccgagtagctgggactacaggcgcctgtcatcatgcccagctaattttttgtatttttagtagagacggggtttcaccatgttagccagggtggtctcaatctcctgacctcgtgatctgcccacctcgatctcccaaagtgctgggattacaaggcgtgagccactgcgcccggcagcagtttctcagttttaatttggagttttgcatctgtgttcatgagtgagcctgaaattttcacttttccatatcttatttctctgggttcctagaatgagctagagagtgttcctcctttctgttctctggaagagtttgtgtgagattagaatgagtgtgtctgataatttagttgcattcatttataaaattcctaggcctagagttttttttctgggaaaagtttacattttgactcatttttttagtagttttaggactgtttaggttctctatttcttgattgagccagttttgataagttaatctttctaatttgtagatattttctctaagtttgcaaatgtaatacataaaactttcttgtcatttctcaccatatctgtagttctatctttttattgctaatattactaatttgtactttgactatttgtatttgttacctgttgccgagtaacaatattagtacaaacctagtggcttagaacaacacacattgattacttcaccgtttctgtgtgtcagaagtccaggcgcggcctcgcaggtcgtcctctgcctcagggtctctccgggcttcagtcagggtgttagccaggaccggggtctcgcctgagcttccagtgaggaaggatctgcctctgagcacacagggtcctcggcacgatcccattcctcagctggaagctgccgactaccgtctgctgcggggcctctctagatggcatcttca

SEQ ID NO: 28810 - DNA, 1107 bp, Homo sapiens
gcagtgttcccataaagccgctaactcctcgcaccttccctcaagtttccccagtactaacatcttgcattcaagtggtgcgtttgcaacattcataaattattatcgtccagagtccattgtttacattcagcttcctcttcatgttgttcattctgtggtttcacagatgtgtgatgcacgtgcccaccactgcagtgtcacacaggatctcactgccccggagtcctctgcgctgtccccgcctccagaaccccttagtagcaaacactgatatttttactgtctccatagttttgccttttcagactgacctatttcacttagtaagaagcatttaagattcctgagtctctttctatggctcaatagcacatttctttttagtgctgaataatattccattgtctggatgtaccacagtttattcattcacctactaaggtgaatgtcttgcttgcttccaagttttggcaactatgaataaagttgctatcaatgttagcgtgcacataagttttcagctcatttgggtaaatgccaagaagcatgattgcgggatcctatggtaagagtgtgtttagttctgtaagaagctgccaaactgtatcttaagtggctgcaccatttgcgtttccaccagcaatgatgagcgttttgttgctccacatcctcaccagcatttgctgttgtgttttgggttttagcctttctaagaggtgtgtagtggtatctccttgtttcaatttgcaattccctaatgacattatgttaaaatcttgtcatatagttatttgccatctgtgtatctttttcagtgatgtgtcctttaaagtctttggctcatttttaaattaaattttcttattgttgagttttagttcttcatatattttggctgccagtcctttatcagatatgtctttcgcaaatattttctgcctgtgtcttgtcttttcattctattaacagtatcttttgcagagccagttttcatttcaaggaagtccagcttatcaatgttctctttcatgtatcatgtttttggtgttgtatctaaaaagttactgccaagcccaagggtacctagattttttcctgtgttat

SEQ ID NO: 28811 - DNA, 1047 bp, Homo sapiens
attattattccctagagccacatggcttggggtccacctgcctgggtcagcccccatccctgccccttctggctgtctgacctggcctggtgacttctcttctctgctcatctctctccctgcctgagtgggcaacagtacagcctcacagagtggtgggattgtgtgagatgccacagggaagcacatgtcagttgttgtcactgtgtagaacaatgagtcccggatgtggcccgcaggggagcaatggtgacttaatcgcgggcttcctctgcatttctttggtgacttccaagctagaacattctttttttgtttatttgtttgaagcagggtctcactctgttacctaggctggagtgcagtagcaaaatcatggctcaccacagtctcaaacttccgggctcaagcaatcctcccacctcagcctcctgagtagctgggactacaggtgcataccatcacctgtggctaattttttaaatgttttgtattttttaaatgttgctcaggctggtcttgaactgctgggctcaagcaatcctcccacctcggcctccccaaatgctgggattacagagtgagccaccacacccagccatttttaaaattttcaccaggaagttttttctttcatttttaagcacagtaagtatttgtgtattatgttacagatattttcccctcaatttctttgttctttttatctctttagggagtatgaacataagtttttaacttttaaatggttaaatatattagtgtgatttttatattaagattttattttatttattttttttttttttgagacggagtctcgctctgtcgcccaggctggagtgcagtggcgggatctcggctcactgcaagctccgcctcccgggttcacgccattctcctgcctcagcctcccaagtagctgggactacaggcgcccgccactacgcccggctaattttttgtatttttagtagagacggggtttcaccgttttagccaggatggtctcgatctcctgacctcgtgatccgcccgcctcggcct

SEQ ID NO: 28812 - DNA, 1015 bp, Homo sapiens
ggttagtcaggtggctcgggtaacagcagcgttctctccctcgggccttcggttgaacacagatgccgcgctatccagctgcctgttctcagcacctgggaggatttcagtctgggttattatgaagcatctactgtgaacactcttgtacttatcttttgggggcacctgggtacccatttctcatggtcacgtacctaggagtggcattgctgtgttagagggtacgttatagggtatgtgatttttgtaggttcttctttatcctatcacgattacatttttttacttttgttcaacctggtgtagactcaccttggtcacaatgcactgtcctttttatatattgctagattcaatttgaagaatattttgttaggattttagcaactctggttacaagagacgctggtctataatttttttttctttataatgtttttgtcaggttttcctgttaagatgatgctggacttagaaaagcagttggaaaatgcttttaaaatactctttggaagaatttatgtaatattcataatatttctgccttaaatgtttgggaaaaattaccggaaatgccagttgggcctggagatttctttgaggaaagtttttaaattagaagttcaatttctttctttctttctttctttcttttttttttgagatgggttctagctctctcactcaggctggagtgcggtgtaatttctttaatagtttataggactgagcagattttccatttttgtatcagtctggggagtcttcccatttccactcagctttacactgattcatgcaaagttgttcagtgtcctcttagatggctctgagcccaacgctgacatcctcctcttccttctgagaatcttatactgatcttttgaaaaaaaaaaaatcttagtctttgattctgtttttaaagagactttatttttggtttcatcaatttctattgtttgttattttctttctttcttaatttttttgagatggagtcttgctctgttgc

SEQ ID NO: 28813 - DNA, 1193 bp, Homo sapiens
tgtcctggctctgggggccctgtagaccgcagtcctgtccgactgggctgagcctgcgcccctctgtgcgtgtcagaagcccagacagtgttgccctgtgtcttgtggtctaaggagggttacgccctgcggtgcctgtcttctgtcccccacctgattcagtgtggaaatgtggagtctccagaggtgtcctgggtgtcacatttgggatggatacacgtgggcccagcactgcccgccccagggctacccttggtgccaggtgcccccagccacgagcttttacccagctggccttgagctccccagaggctccccggacactgtccgtgttttgtgaaaaggttttcaaaacacatgtaaagtggaggtgagtagcaagccctagagcaggccctggcctccctgcccctccctgtcccctccctgcccctccctgcccagcgctccctcagcaccgactcatcagtgcacctcaagctgatgagggcgtctgtgttttgacaaaattgctctgaggttgtcacacccaacaaacttatgacggttcctgagtgtagtcctcacgttgtggctggtgtttgtgaatcaggattcaggccaggcctgcacaggccttcagttgttggtctttgagctcctgttagtccagccgtctctcgtggtctcttttctcctcctggaaggtttgttcctgaagggcttcacattgcagatctgactggttgcttcttatgttccctgagtttttgtaaactggccaggccctgaggctcgatcccattgtgtttctttggcgagaatgcttttctggtggtccctgccttgtccctccagtgcacgatgtctggatgcctctgccacacaccaccccctgcccagtccccatgtctgtctggtcagtgcccagctctgtctcactagggtttggtcaccggccctttgaactgagaccaggctgtgtacctgtgagcccagctcggggtgagatttgaggtggagccttcccagccctgtgcagaattcccatcacctccaggtgtactcagaaatggggatcattggccaggtgcggtggctcacgcctgtaatccctacactttgggaggccaaggtgggcggatcacaaggtcaggagatagagaccatcctggctaacatggtgaaaccccgatgctactaaaaaatacaaa

SEQ ID NO: 28814 - DNA, 1033 bp, Homo sapiens
tttatatattttattatactggaacagctcgtgccctcggtctcttgccttggcaccaaggtggcttgccacccacagcctctcgagtagctgggattacagccatgtgccaccatgcctggctaatttttgtatttttggtagagacaggttttcaccttgttggtcaggctggtctcgaactcctgacctcgtgatcccccaccccccacccccagcctcccaaagtgctgggattacaggcgtgagccactgcacctggctgagttggagcttttcttccctctttttggactttggaaaatgctcttggtccatgatgctatgtagacagctcccattgactgtggcctgtgcggcattgggcagcactctggtgaacactgaatcgggtctgacctcctagccccaccatttactggctgagcctcagtttccttgcctgtaaaatcaggaagatgctggctctgctcctctctgcacatttccccgtcctaacaacattataactgttaggaaagagacgggcttgttttgggatggctcattttatgtgaccctgtgcgctgtctctgagttcatctgcccttcttccagggtgtagggaccagccccacagggtcggtgggtctctccctgtgtgcggcgatgagagagtgtagaaataaagacgcaagacaaagagataaaagacagctgggcccgggggaccactgccaccaatgcacggagaccagtagtggccccgaatgtctggctgtgctgttatttattggatacaaagcaaaaggggcagggtaaagagtgtgagtcatctccagtgataggtaaggtcacgtgggtcacgtgtccactggacagggggcccttccctgcctggcagccgaggcagagagaggagacacagagaaagacaacttatgccattatttctgcatatcagagacttttagtactttcactaattgactactgctatctagaaggcagagccaggtgtacaggatggaacatgaaggcggactaggagcgt

SEQ ID NO: 28815 - DNA, 1063 bp, Homo sapiens
cttaagtccaggagcttgagtccagcctgggcaacataaagagatctcatctctacagtacataattagccaggcatggtgctacatgcctgttgtcccagctactcaggaggctgagctggtaggatcacttgagcccaggagtttgaggctgcagtaagctccgatcataccactgcgttccagcctgggtgaaaaatgactgacactggaaattgttcatgatagaatacaaaggcaaacagtctatatacagataccagctgaatgtacgagctaaatgaggctggaaggatatacaaaggataatttttttccctctgtaaaaataaatgactactcagatgaggtttctaacatgatccagatctagtaccttcccagagataggtcgtggtttattgacatcccaaaactgttcagtttcttttttattcaaatagagtgacatgatgagggagcaactgcagctgtcagaggcgacaggaacgtgtctaggcgaacgactaaagcacctggaaaggctgatccggagttcaagggaagaggaagttgcctctgagctccatctctctgcgctgctagacatggtggacatttgagcagcctgacctgtggggagggggtctctcccgaagagtttctgtttttactcaaaataatgttattctcagatgcttgatgcactgttggaaatgtgattaatttaatcatgcagataaaccatttaaatgtcagtctcccagtttttcataatgaaaagttgtttcccctgtgtgacctcttcaatattctcctatattcatgacctcctcagattgtcacccaccagcatatgctctgaggcagtttagagcttacatttccatgtataaaaggcgattcattctctcagcaaacttgcagtccttgatgtgccagacatcagtgatgcagagataaagtaagacacagggcctctgcctgctaagcccacccagcttacatccaggagagtcaggtacttatgtacataattctcagagaatgtgcatgaggcgtgggcctgaattggtagcaagga

SEQ ID NO: 28816 - DNA, 1013 bp, Homo sapiens
aaaattttaaaaaagcaaaggcttaaaaagtttttaagtatatatagaagattaatgaacaatagttaacttcctaatgctcaaatatttttgaatttattacatattgtttcaggtttgaagatcagcttcagcaatggttgtctgaagactcaggagcatttacggatttaacttcccttcccctctatcttcctcagactctagtgtctctttctcacactattgaacctgtgatgaaaacatctgtaactactagcccacaggtgagaagaacgtatacatttggcatttacataagaattaaagattgagagaatggctggggaaaaaagtaatatcacgatttatcctatgatgttttgatgaccgacaaattattagctcaaattagaccttttcttaaactttatccatatcattgttaaagagacccaactgattttgagtttctgcctacgaaataaatgaagaatagaattgaaatattcttaagaactgaataagacctgtaactgtgtgctgatgtgtaattaagggcattaaggtgatgacagcagcttctgttggagcacatattgtctgagctttggcattacccagacctctcttctgggattaatttttcctgaggaaaactaatgaatgaggaaggtaagctcccagaagtcaagagcctcacccaagagtgttcaagtagtgagtggtcaggttgcttttcaaagccagatccaactggctccaaagcctaaggtctttttaccttaccattcttccttcagtggttaaagatgcaaaaacagagtttcaatcacagatatgtgccactgaacaggtaaaaactgtgctcctggactggctttaggaagtccttcaatagaggagaaaagcaaattaaaatgatgtactgtttccattcatcagtttggcaaatactttaaaaatattcataccctttgaattaccaattctaacctaaagaattctgacctaccagatattccccaaaaatt

SEQ ID NO: 28817 - DNA, 1035 bp, Homo sapiens
tgtaagcttgtctggactttgagtgatgcatggaccctgggagcctatttaacccaagtgtggaagtcacataattgtgtgactttaatcaaaggtcttgcacttaaatcagtgaatttaagcacatgccacctgtcgctgtttaaatattatttgtacctgtttttgtttttttgtgtgtgttttttttttttttgagacagggttggccaggctggcctctttatctgtttttgtattgttttctcagaggcgctgagtgaagatggtcagatatgtgtgtatttttttaaaaacgatttgaaaaaatatgatgttcctttgtcgtgggaacaagccaggttgcagacgcagaaggagctacagctgagagagggacggtgaggttcatgttcagtatgtttctgttgcttgctaaactgtatttttcttgcaaagtaaatagaaattaacatcctacatgccaaatccagtccactgtgggcagactgtgacaaatcctcaaggaacagatcattcccatgcagtagaaactattctagaacaaagttaaagcatctcacttcatttatcaggcatacctgaccctgaaatcatacctaaccaggagagtacagctgacatttcatctcacttccaaatttggttccaaagcacagtacctaaaaaagttcacaagtatgctttctcccaggataaacaataacagtgaaaatctattaatgtaatttgttgccataatagaaaaataagtggtaattttagcaggcgttgaaatacgtttcttaaaatttatacctgttcctgataaaatttctttattttgggtactttctttagcttgggttaaaaaaaaaaaaagtcctaacttgataaggctacctaacataaaactaccaaaatagaaaaaaaacatgcttcttggtagaatgttaggaacagtggaatcagaaccagcctgttgtcccgactattattcactattgtcctggaaatcctgaccagtacagggatgtgggatagacaggcacaaat

SEQ ID NO: 28818 - DNA, 1093 bp, Homo sapiens
gtatgcccagctgtgcccttggaggcctgtctggagtacagtcagtatttagtgcacggagagctttggctgcacttgctctggggcagatcagtcactgctgatgcgtcccatggtgcatctctcctgatgatcttgatgctgttgcaggtggcccatggcgccctcagtgatggtgccattgatgctgtggagacacagaaggacctcctgggagccagtgggctcatgctgctgcttccccccaaaatgaagagtgaggacatggcagaggaggacgtgtactggctgtcggccttgctgcagctcaagcagctcctgcaggctaagcccttccagcctgcgcttcctctggtggttcttgtgcctagcccaggaggggacgccgttgagaaggaagtagaagatggtttgtgaaggaagtctcgtttatgaagcagcattgtttaataaatgggtggaggccctgggtctgaggatggtccagtagtgttggggtcaggaatcactgagacagcaacccctgtggtgactgtccactgcaggactgggtggggtcagcacagtgagatatgttagcaggtgtgctgacagcagaatgcaagtgaccttcatctatgtctgtcttaaaggtctgatgctacaggacttggtttcagctaagctgatttcagattacactgttaccgagatccctgataccattaatgatctacaaggttcaactaaggtaaggtttcatcatttttaatggtctgtcaagatattttgttttttccccttttgctgtatcttgaattgagtgtatattagcgtttgcattgtctttttcttaagagacagggttttattgtcacccagtatagtggcatgatgatagctccctgcaacctcaaactacagggctcatgcaatcttcccacttcagtctcccaagtatatgggactactgtggtgtgccactgcgcctggcagcagttgtatgttttatacagataactttctaaaaacataagcagaaatcaaaataaaagataaaatttgcccacagtcctgctatctgcaaattaaattgttcatgtaaaatttttta

SEQ ID NO: 28819 - DNA, 1059 bp, Homo sapiens
tgagaacagtgagggggagttgtcacacacttaaccagatctcgtgagagctcactatcatgagaacagccagggggattccacccccatgatacaatcacttcccaccaggcccctcctccaacattggggattacagttcaacatgagatttgggtagggacacaaatccaaaccatattacttggcaacagtcttagaccaaaagcatttaagagttgattgttatttcaagctgtgttaaggtacattgatagacctgcttcattttagactcttcagtaagatagtttatagtctgtttactatagttccatttttttccccttaaagaaacttttggcattttaaaaaagaaaaaattgacatgatcttattttctgtaaccacatagcatacagaagtcatatttttaaagcaactacagtctctgtgtttttttgagacagggtcttgctttgttgtcacccaggctagagggcagtggtgtgataacagctcaccgcagccttgacctcctgggctcaactgatcttctcacctcagcctcctgagtagctggaactacaggcgtgtgccaccatgcctggttaatgttttttttttaaagatggggtttcactatgttgcccaagctggtcttgaactcctgggctcaagcaatctgcatgcttcagtctaccaaagttttgggattacaggcgtgagccaccacacccggcttacagtttatttttaaaatagctttattgaaatgttattcacataccataaacttcacccatttaaagtgtacatttcagtgatttttagatatattcacagggttttgcaaccatcactgttaataattccagaacaccttttcacttagaaagcctgtattcttttttttttttttagatggagtctcactctgtcgcccaggctggcgtgtggtacactttgttcactgcaacctccacctctcaggttcaagcaattttcctgcctcagcctcccaagtagctgggattacaggcgcacaccaccacgcccagcttagttttgtatatattt

SEQ ID NO: 28820 - DNA, 1037 bp, Homo sapiens
ccctcagcctgcattcctggccatgctgggcttggcctttatttagaacccatgtaggtgccacctcttgcctggcctcagggctccctggcctcccagtgggtggggactggggaggcagcctggagggcctagcaggcacaccgctggggcctcatgtcatgtcttgtcctcctcctggtcatcactggatgttccctctgaaaactgtcttgtgggtttcatttagccccatcaggttctgcgccggcagtggggtggcagtcccagcctgttggaggcatgctgtgaggccagggctgggcctggctcctctgacccatggctgccttcacatagtgacctggccttctcctggagtcatggcttcttgtgtcccccctccgtagctgcccttgtcagcctcagtctccttgtctgagccctccaccctgccccctcagcccagacctctgccctctgcccttctgcgcaccccctggtgatagccctgtcacccctgtctgtcactgacagcccccatcatgcatctccaactgaggcctcttccctgagttccagacttggtttccagttggcagttcaacctctaaacctgatttttccccaccctgccccttcctgctcataggatgccgtcctgtcctcctgcgcttagggcacaaacctgggcttgcatctctctcagacccagcaccgagggcatggcagttctctccacctcactggaatgttgctgcagcacctgtctgccagcttccaccctgggccccaatcgtgtcctcagcaccacaacagagggatcctccaacagctcagccaggtggcgttgcctctcggcggcgtccctagcgctccccgagtctctgcattgtggacccaacccctccctcgctgccctcactgctctccccaaacacaccaggtccagctatggcctggcatagccatgccctctgctgtttccagaagttgtcacgctggctccccctgtttccttcaggtctttgctcacatatcacctgaccaccctgagt

SEQ ID NO: 28821 - DNA, 1028 bp, Homo sapiens
aatatttcaaaattatattaaagtcagtgagtaatgtgaataacgcttttgtgctcattaccatccttatcaaaactcatctcatttcagtgcttgtagtttctcagctttagaggaccagaaaatcttgaaagatgaggggacgtgttcagaaatgaaaatgctctgaaggccttcctgggacgagggccctcagtgtggtgtttactttatagctctccagtgaagaagccaagtcttctaaaggcccaccaattcgagggagactcttttgactcagcctccgagggctccgagggcctcgggccatgtgtgctctccctcagtaccctgataggcactgtggctgagacatccaaggagaagtaccgcctgcttgaccagagagacaggatcatgcggcaaggtatggcacttggtggcagaggttctaggggcctggtgaggtcgtcatcttgggtgccatcagggcaggagcaactcctttccattgggctctattgctgttgagtctcagagcctgtgatatgctgtgtctgatcttcatagtctgcctgtcttcttggagtgagtgttgcgtgtatgtgtacataaatgtgcaaatatgtttgctaatgtatgtataaaatagtagtgggaggatgcaaaagaatgggctcctgtctgtagagggagcgggattccgaggggcagaggttatggtggagtgctccgtcttggacagggcattcttacactgttacaatgttgaactgtgtgaatgtattacctactaaaaagtaagtattccattaacactaaaaatatatgcagggaccaaaaataaaaggaaaaaacacaggtacttctcttagccaatttttttctcttaaatttcagccgggctgggcatggtggctcacacctgtaatcccagcactttgggaggctgaggcatgagggaccacctgaggtcaggagttaaagactagcctggccaacatggcaaaacccccatctctacaataaataaataaataataaataag

SEQ ID NO: 28822 - DNA, 1046 bp, Homo sapiens
gttttctgtggtaagtggcatcccatgtgtgttattctgcagctcccttttgtgcttaattgtgacttcgcaaactttctgtctctgtatgtgtgatcagctggtgagaatcatctcaccaaatgccaacaaggccaagtttgtgagttctatgaagcaaagttgttaattaaaaaaaaggggccgggcgcggtggctcacgcctgtaatcccagcactttgggaggccaaggtgggcggatcacctgaggtcaggagatcaagaccatcctggctaacacggtgaaaccccgtctctactacaaatacaaaaaattagccggatgtggtggcgggcgcctgtagtcccagctgctcaggaggctgaggcaggagaatgcatgaaccctgaaggtggagattgcagtaagctgagatctcaccaccgcactccagcctggctgacagagcgagactctgtctcaaaaaaaaaaagggggaaagagcaaatacatgcttgtgagacaggtaagggagatgaatactgctgctgccgcagccagagaccatgcagttagcagacgtgtgggtggagaaatcactgtcgtgcaaaggacaggagctcctggtgcctttgaatggtctgttgtgcttactgcatttgagttttcaatcccatttcctttggtttcctgatatactcacacatggcggttgtggactgttttccaggcatctgcagccctggctagaaagaaggggaaaagtttgcataaagacatggctatcttttggcacaggaagaaaataagtgagttttcaattattcttttcactttttaaaaaaattatttttatttattttatagagatgagatctcgctatgttgcccagtctgatcttgggattacaggcatgagccattgtgcatggccctcttttcagtttctcatgctcttggtccaaaccctttgagcgtgagccctttccccagccagtggaggaggctggctctcagtggatttgcatctcacagttatttccttgggctcttctctaacctcct

SEQ ID NO: 28823 - DNA, 1407 bp, Homo sapiens
aaggaaacagggcctgggtggtttttcttctggaaatttctgcatctgtgtagctctgaaagggcattcctggctcaggtctacagtctggctgtgaagcccccatccccatcgagtcccagcccagatgaggaatgggttgcacaatttggggcgggggaggagcctcctctgggaggatgcttagaccctgccatcctgcctatcacatgggatccagccccagttaggaacagggcgggagtggaggtggggagcagcctgggctgcgtcctaagcagcaggtgcgtctgtggcaggacccgccacatgtgcccccgagggtcccacgagctgccaggccaaggctgcctgccgtgcaccaccaccaccaccaccaccatgctgtgtggccacctggggctgccactgtcctccagcccgcccccagcctgtggacgcctggcccaccctgagtgtgagtcacagagaccctggccggggcaccctccacccccaggcttcctcagggctgtgggctgtggcgggactatggaagggagcagggagagaccctgccaccacccggagtggctacgcgagtgtggactgcaggctcctcctggggaagctgggcaggctcgctttctggtcacggggccattccagggggcatcccttgctccgggtcccctgcagtgaggggcctgtgaaccccaccagggcaacagcccctcccagggacccctcctttcctgtagggcggcgccggcccacctgggagcctcagatccccctcttccatcacggaggtaaagttgaggccgtggacgccaccagcctgatgaaataaagatttcatccagaaagagtttaagaaaatctcagctcaggagccagaacagaaaagatcaatagctttagccacatggaagtgtgaacatcctgatggggaaaataccacaaagtctaatttaataactagggacacctgtgtccacagctgtggcacagactcccactaaagaagtaggggtgcatggctcatgcctgtaatcccagcactttaagaggctgaggcaggaggatcacttgagctcaggaattcgagaccagcctgggtcacatagcaagaccccgtctctacaaaaaataaatttaaaaaactagccaggtgtggtgatatgcgcctgttatctcagcagctctgggggctgaggtgggaggattgcttgagcccaggagttagaagctgcagtgagctctgatggaaccactgcactatagcctggaccacagagcaggcccctgtctcaaaaataaaataaaaaagtgaaagaagcaagctgtgtatgacgtgatcccttttgagttaataaaaaaaaaaaagggagagtgctaatgctataaatgcagaaatctctacat

SEQ ID NO: 28824 - DNA, 1098 bp, Homo sapiens
tcatcactgtcgttgggtgtatcaataaatggttccttctaattgctgagtagtattgcattgtgtgaatatatcagtttgttatgcattcacctgttggtggatgtcttagtccattttctgttgctcagaatatctgaaactgagtaatttttttttttttttttgagacggagtcttgctcttttgcccaggcttgagtgaagtggcgcaatctcggctcacttcaacctctgcccaccgggttcaagcgattctcctgcctcagcctcccaagtagctgggattacaggcgcctgccaccatgcctggctaatttttgtggtttttagtagagacggggtttcaccatgttgaccaggctggtatcaaattcctgacctcagatgatctgcctgcctcggcctcctaaagtattgggattacaggcgtgagccaccaggcctggccttcggttaatttttgcatttttagtagagacgggatttcgccatgttggccagactggtctcgaactcctgacctcaggtgatccacccacctcagcctcccaaagtactaggattacaggcgtgagccactgcgcctggccaaatctgggtaatttatagagaaaagaaattcatttcttacagttatagagactggggagtgcaaggttcgggggcacatctggtgagagccttcttgctgttggggactctgcagagtctggaggcatcacgtggcaagggggctgagtgtgctgatggctagctcaggtcactcttcctcttattataaagccaccatttctcctcccatgataacacattaacccatgaaatcattaatccattatctcatgtatgcattaatccattcataaaggcagagccctcatgatccaagtaccccttacaggccccacctctcaatactgccacattgaggattaagttccaaccatagcaatgagaggccccacctctcaatactgccacattgaggattaagttccaaccacagtaatgaacatttgggttgcttcttgttttcgcttatggccaacaaagctgtcgtggacattcctgcctcagtctttctgtggatgtatgc

SEQ ID NO: 28825 - DNA, 1081 bp, Homo sapiens
gcagggccttccgacatgggtgcagtaccatccagtccgagtgcttgcagcgacagcctctacgcgttccttggtaagcaagcaggttcttccctccaggaaatgaggaccggccggacgatgccctgcagactgctctgaagagaaggagggaccttctgcagagactccgggtaggccctgcaccctctgagcgaacctggctgagctcactgtagcagagatagctgctcagccttaaggcaccaggtcggggagtattagggaagacctttccagactctcagggccaggccccagcaaggacactgttagcttagagacctgcctgggtgcaggtttccatcaggactggaaatgttgagtaagggcccaattccaggaggacctgaaattctgggatgcctggaggtttgctcccacggcactcaccaaagatgcatccgagtggcagagatgcaggggaggtggggccgcttttctagggggagacctagaaaaaagtaggcctggaactggcttgaaagagagaacagaccctggggctggaaaaagaaaacaactggaaactagctgacacgcttgggtcaatttcaggaggccaccctcatgcacataaccctggaagggtcttccagtcatggccatcctgcccggagaggcgcctgtacctggcccaggctggcctgagcctgatgctgggggtgcctctgtggcgttggggctccccgtccccgtgtgcagcagctctgcatcggccttgcaggaacaacacctcctggacgagctctctcgggcccaggcctggagcgggccaagcagaggagccctcgggtcagccctgcccccagagctgccccccacgggcatcctacccactgcctccccatccccgctggccccagacccgccaaggatcatcctgcctacggtaagagggcgaagtcgaggagcacatctgagagtgggaggcgggtgcggaattaagattttacagaaggcaggaggcgctgtgcctgcagcgaggttgcctcgtcacccccatcctcccaaggcccacccttgaagggggccagctgcc

SEQ ID NO: 28826 - DNA, 1031 bp, Homo sapiens
gcccctctgcctcagctgctgcccacttttttgccttcccatgaagcccagctggccacacctggggatgagtgtttaccggtagcctgaggacgcacagtggaaacctggcaacctggggcctccctgtgtctggcagcctggcaactgtcacgcggcgcccagcgctggcttctggggcactgcagtccagggagggtgtggctatcttcccacagggctcttctcttccctcaggctggtctccaggaggtaaggcccgccctgcaggcaacaccggtgcttgggctcctgctgagcagttctttcctgcgagtaacagaaccagggagggaggtgggctgtggcctcccctgcccctacagtcgtctcctgcagctcccaccatgctggactcatcagcagcagagcaagtgacccgactgacgctgaagctcttgggacaggtgaggcagagcccgggatgctcctgtttttaacaactcgcaggctgtggcgttggagggactcttcgagacagccctgcaggtgcagaatgcagggccccaagggctaggcctggggctggcagcccagcggacccatcctcagacttagtcttcacattctctgagggtctgggtggcccatgaccgacctgcctgtcctcgcaggccactgagcacagggtctggggagcctcggtgcctgggggcacctctgcaccccctgcctgcattgttccctctcctgctgcctgagggacctgctgcccacctttcgccagccctgcatcctggcccacaggccgccatgagagggactcacccctggacacacccagcaggtagctgctcagctcagggttcaggtggggggtgatctaggcatgcactggctgggaagcctggaggcctcaccagtgaggtgtctcccagggttgctcttcagaaatctgcctgaagggaccactcagagcatccgcccctagacttgtggatggaacacatgaatttgctagaggtcaggcttacagaggcagctcagggaga

SEQ ID NO: 28827 - DNA, 1658 bp, Homo sapiens
acatatgtagcacactaaggtaagatgttaataagaggggaagccacacatgtggtatgtgggatctccatgtactatcttctcaattactctaaatctaaaactgttcttaaaaaccctatttaaaaaaaaagtctgacaaatccatgccctctggagcatgttatgtatactactagagatcccgaggaggcaattcttagtgcttcccattcacttggcagtcacagctgtgggcacacaggctcaagtctctccttaagtcagtcagtattacaaaccatacataatagtatacttgaccactgcataaatgttataaacattccacatcaagagaaagaggagaggaaaaaaagttaaccagttcaacgaaaaggagaatctggcaaggaagcatctctgatgtgggcagagcctgcagcagcagatgtggagggcttctcacaagtgacagcaagactgtctgtaaaacggccactttgacctggtggtgttctgctcttttcatggccatagagtactctggtaaggactgatagtaagagtgtcttgtttatgtctttatctgggtgggtgcagtatctactgatgaggaaacatctggtccctgttggcctgataccctttttttttttttttttttttttttgaggtggagttacactcttgttgcccaggatggagtgcagtagtggtgccaccttggctcactgcaacttccgcctgcctggccctatcttataatttaaaaggcatcaggggccaggtgctatggctcacacctctaatcctagcactttgggaggccaagacggcagatcacttgaggtcaggagttcgagaccagtctggccaacatggtgaaaccccatctctaccaaaaatacaaagattaactgggcgtggtggcgtgcacctgtactcccagctactcgggaggctgaggcaggagaatcacttgaacccgggaggcggaggttgcagtgagctgagatggctccacctctgcactccagcctgggcaacgagcaaaactccatctcaaaaaaaaatacataagatggagtccttttctcagatgaggtcacttatatcaagggtgctctatacagttgcttaactaaattaacctggtttttgttctgtgcacactcagagctgtttaaatgtctcccaagactgtcactgttaatgactgtggacaagagccaggttcttttattatcttgtttatttatttttttattttttttattttttttccagacggaggttttgctcttgttgcccaggctggagtgctgtggcgcaatcttgggtcactgcaaactctgccttccgatttcaagcaattctcctgcctcagcctcccgagtagctgggattacaggcgcctaccacgacgcctggctaattttttgtatttttagtagagacggggtttcaccatgttggccaggttgtctcgacctcctgacctcgtgatctgcctgcctcagcctccctaagtgctgggattacaggcatgagccaccgcacctggcccttttttattattttttatagagatggggtcttgttgtgttgtgccggctggtctccaactcgtggactcaagtgatccttctgccttggcctcccaaagcactgagatt

SEQ ID NO: 28828 - DNA, 1097 bp, Homo sapiens
ttacgtgttacaatacatttacaactgtgggactgaggggatgtgcccaggtttgcctagactgtgttcctcagaaccccagagtcgtttctgtggacatcctagagaggttctgctaatgttggacttgggtcttatttcagttcttttttcttttcttttttataggcagggtctcagtctgtcacacaggctagagtgcagtggtgagaccaccgctcattgcagcctcaacttccccgggctcaggtgattctccatgtcagcctcctgagcagctggaattacaggcacaccaccatgcccagctaatttttgtatttttagtagacacagggtctcactgtgttgcccaggctggtcttgaactcctgggctcaagtgatccacctgccttggcctctcaaagtgctggagttacaggcatgagcaacctcgcccagcctcaattcattttaaactattaaaaagctgtcaaggccaggcaaccactgcactccaacctgggtgacagactgagaccctaactcaaaaaaaaaaaaaaaaaaaagctgcccagataaattttgtagatactcaccctcaaggagggaaacgtaactcccctctccttaagtgtagaccacacatagccacttcctcccaaagagtgcaataaagaaaaggagggaaagagccactttattgtggagaaaactggcagactccacctcagccaagtgacgcaggtcagcctcacagttatagtcgaggtgacagtgtgtgtccctgatgtgatggggtgacagtggcacttcacccctagatgcttcctttctgtaacctgcagtcccagtctaaccaggagataatagacacattttaattgagggacattcttcaaaatatctgcccagtactcttcgaaactgtcaaggtcatcaaaaacgaggaaagtctgagaaggagcctaaagacacataactcaatgtaatggggtgttctgatggataccacattagggacatgaggcaaacctaaggaaactgtcaaagtgtggacttcagttacttgtgtctcaatattggttcattaatcataacaaatgggccaggtgc

SEQ ID NO: 28829 - DNA, 1057 bp, Homo sapiens
gctttgtgtccaccaggacagcgggccgggctccctgcaggcgcgggcggcgccgaacggtgctcagcaaccacccggacagggccaggccgttttctcccgctcaggcattagtcgttggctgtgggccgccgcgggaagttgaggcctaccacggaggaggctgctgaggtggatctcaggggatccgcaagggctccctcacccttgccgggaccctgggaacccgaaacaaaatcctacgccaccagcccgccgaatgcgccccctcggccgggggtcctgggtcttcagagaagaactcggccgaatgcggtcagaaagcccgcgaaccgcctggacctgcaggccccgccgcttggagctcccgcctttcccgaccgagcccgtgtctgctcgtgtgtctcactgatgtcttaggtctcaaaaaaaaaagaaaagaaaaggtttttagtagacagaagagaaatggggccgtgggttcgtggtcccagggggaaactgacgtcgcatgaggtcgtcgtccctcagcttgagctcagcggaacataagcttgcagaggtggaaaccacggaaggtttgggtgtcttggagctctctggacaccgaagcccggacacagtcccggggtccgcaccgcctgtgacctgtggcgggaccgccggggtgggcgttttctcagctggcgcgcgcgtaggtggaacttgggaaactaactggagcgaagtggcaaaaaaccaagacagggccggtgacctcgcgcaggccgtccttaactgtggagtattccttcagctaacccctttatttcatgtgtccaagtctggtttctgggtttctttgtagtcctccgggcctgttcgtgcgccttcacttgcaaaaggttcgtcgtggagggccgtgtgcttgtttgcagcagtaacgatgcccttcccgagcgtgctggagtggctcctcgctgacgcaagctcaccttgcagcctcctcagcaactgcaacttaaacgcgccctcaggaagccctggaatctcgctcagaattttttttctttttttg

SEQ ID NO: 28830 - DNA, 1035 bp, Homo sapiens
ctgagccctggaagtcagggctgtagtgagctgtgactgcactccagcctgggcaacaggagtgagactctgtcttttaaaaaaaaaaaagaaagaaaagaaaagcccgtcatacatgggttggagatacctgggtagatgccttcaaaggttttgactccccaaactgccttaaacctttttttcgtagacagtgtctcactctgttgcccaggctggagtgcagttgctggatcatggcccactgtagcctcaacttcctgggctcaaacgatcctcccacctgagcctcctaagtaactgggactacaggtatgtgtcaccacacctggatacattttttattacttgtagaggcaaggtcttgctatgttgcccgggcttgtctcaaacttctaggctccagtgagccatcacacctggcctgccttgaacctgaagcctgccggggtggctcacctctcctattaacctgacactactcctcctccctccacttactgctcagtagatgtataattatggttgtttcttttgcattattcagctggaaacaatgagatagaaaagagaatatagctccctccccctcagaagaactgcgttattagtttgctggggcttcagtaacaaactgggcagacatttattgtctcccagttctggaggctagaagtctgagatcaaagttttcacagggttggttccttctggggctgggagggagaatctgtctcatgcctctctcccagcttctggtggtttgctggcagtctttggttccttggcttatagaggcattgtcccagtcctgcctttatattcacatggtgatcttgttgtgtgtgtctctccagacgaaggcataagtaacatcattgacaaaggtcattcgacatgggcctctttttagaaggacaccagtcatactgattagggcccactctaatgagcgcatcttaacttgtctacaaagacccatttccaaataatgtcacattcacattgaccaggggttagggcttcagcatcttt

SEQ ID NO: 28831 - DNA, 1047 bp, Homo sapiens
gcatgagccaccatgcccagccagtaatgagattgaaaaagtttatttttaaggagctcaatggttaaaagcttaattaaaagctaacatccaacatatgtgtgttgtgtgcctgtgtgtgtgtgtttgtatttaaaaggcttccagttttgttttttttgtttttttctctcctaggaccttgtctttttgagcaaaagtttttttcttcttagttgactggcttctgttttcttcatttacttttgtcgtgtcttctttctcttgcaccctctgcttcatgggaaacctaatatagtttgtaatacccagggttccttacagaaaacggagaaggtgccagattccccttggaggagaaacctctgtttccttatggaaccccaaatgtgtaaacagacaagttcatctcagctttttttttttttcatctcagctcttaaactgcttgcttttgtattgtgttacctaatttttttactaaaatagttactgcaacagaggctactctggagttcttaaggaatagtatagtttagacatgtagaaatgtctttgttgaaaaaagttttttaagtgcactgtaaaagcatgatgtagtctaacctcataataattttcgctttttggagacccaggattcagtgtagggtctgcccagagctcagagatccagttaaaatatagggagtctctgtctaaataaaactggtctccttatacaatcctatgatagattttcataattttatgtttgatttcacatccatttttaatctctctttagcaccaccagactttttcctctctgtaccttaaaatgtaaattttgctatctaatttttcatctaatagtttcctttaatatgcagatttagggctatttagccggcaactgccagggcaatgacacagatgatcaagagtttgcaagtctaagatagaaaaaaaaaaagaggtcttaggaatctataagatgtacttctatcggtatacctaatacatctatgtatttatgtgttgcgtacacaatgtttctctattaaa

SEQ ID NO: 28832 - DNA, 1047 bp, Homo sapiens
ttggagttgatctcgccaccattatccccccgggcgagcgcggaggacgggctggccattctggccaggccggaggtgttttccagcccggggctttgtgataactgggccgaaacccgagggtcctggagcgcggcgggtggcgggagcttgcggagcgcggcgcactcggcggccaggcatcggccagcccagcggcagccccctttctcctatttttatttttatttttggaaggagctgagaattagtcgattggttggcaggttgaattgccttctcttctatggcaatatgtgtcgtgacttttcaccttttgcctttggacaaaggtgaatggcaactgcgttggtcagtttttgttttctgttctgcggatgggttcgccgacgcagtaatcaaaattagagccactcttttggaagagcaaatcgttgttgttgcctccccagccccacggatcttactttgtgccattttcgggttgattttaactcgtttatttcagagctctttgcctcacctttatttttagatttagtcgtgtttgctgaaatatcagttgcttcttctgtgaatgaagtgtgggaacttgctctcgtcgcagttaatgaaatcaggaaaataaaaagatcaaaagggttggggatgggagaatgaagaggaatgtagacagatagtctagggccactcactggcttttggcgattcttagttccttaagctgattaaaacaatgtgaggaaatgtgggcttctccactttttaggaagaggtaataacgggcattttacgtggcgccacagcgtttgttttcaaagtttgaacgtgaatgtagcaagcataattttattaatgaaaatattctttagacaactgttaatattgacgaaagaagagaaacagagacacggaagctaaagagttgggaatcctaaaggtcaaaggatgtttctcagttactctgatgtcctgtgttttctttcagttggtacaaaatcgtgagtagtttaattatatcctgcagtcaaaatggtggctgtggtg

SEQ ID NO: 28833 - DNA, 1022 bp, Homo sapiens
agctagatcttctggataacttgctgcagcttctgtatccacacttgaggccttgtcttgcatgtttacgttacatttcctaaagcttcacgaaccaacctctgctagcctccaacttttcttctgcagtttcctcacctttctaagccttcgtagaattgaagcgtaagggccttgctctggattaggctttggcttcagggaatgttgtggctgctttgatctgttctccaggccactcagactttctccttatcagtaataaggctgttttgccttctcattactgtgttcactggagcagtgctttttatttccttcaataacttttcctttgcattcacaacttggctaactggctcaagaggcctagcttttggcctgtttcagctttcagcacgccttcttcatgaagcttaatcatttctagcttttgatttaaagtgagagacatggtgctcttccttacacttgaacacttaaaggccattgtaggattattaattggcctggtttaaatgtgcttctgggaatagggaagcccaaggagagggagacagggaactggccagtctgtggagcagacagaacacacgcatttatcaattgagtttgctgttttatgtgggcacaatccttggtgccccaaaacatttacagttgtaatatccaagatcactagtcacagatcaacataacagatttaataataatcatgaaaatgtttgaaatattgtgagaattaccaaaatgcaacacagagacatgaagtgagcacatactgttggaaaaatggccctgatagacttgctactcgcagggtcggcacgaaatcttcagtttgtaagaaatgcaatatctgcacgttcagtaaagggaaacacagtacaacgaggtgggcctgtattagagcggaaggggcatgaaccgctgatggtagtggtaacaggaaaggacatttctcactggtgctattgaagaaagagtaggtgggactggatgacccccagggtgggagcatg

SEQ ID NO: 28834 - DNA, 1119 bp, Homo sapiens
tttatgttctgtgttatgtttaataacaggttccccatgccagagggagttacagctcaacagaaagccttcttttgtctcatttctccactggttctacagaaattttcagaggttatctggcagctgtacctgcccctccttgcccttgtcaagcaaatctatatcttggccagtaatctataacacatctcgcaagaaaagatgaactgggccaatgaaatttccattcttgggagcgtaacctaggaaatacaaggattatcgagttagcgtggaaaagaagctgaaaggtcatggtgagcagccacgacacagccagaatcttacagatgaggaagcaagcctgggagagacccagccatagaggaattaacgagaaggccccggctccagcctgctggcgtgtgtccagcaggagccaccacacctgagggagtcttccatgccctgcccctcaaagagcctaacacttcctcacttttgtctgtgtgcacataacatgttaagtatcttgtaaacacaagatcgtacttttctatatgcttctgaatcctgttctattctgttgacagtgttatataacagaatgccctttcaatcacagcacgccatgatttccagtagctgcagaatactcatcgggtagagggactctcatttagccaaggggcgtttgggttatctgtagttgtttactatcatgacaaccaagaaccagaacaatttttttttctaagataggattagtgtttttaatcattagacttctgttagtattacattctatatttgaggttttaagttttgagttttttttttgtttgttttttgttttgtcccgagagggagtctgtctctgtcgcccaggctggagtgcagtggtgccatctgggctcgctgtaacctctgcctcccaggttcaagtaattctcctgcttcagcctcccaagtagctggaactacaggcacgctccaccatgcctggctgatgtttatatttttagtagagacgggtttcaccaagttggccaggctggtctcaaactcctgacctcaggtgatccgcccgcctcagcctcccaacgtgctgggattacaggcatgagccaccgcgcc

SEQ ID NO: 28835 - DNA, 1050 bp, Homo sapiens
ccagattcctttttacaagttggcgtgcagttttcatccataaagtttaagcgtttgattctaaaccaggtgtttttattttgttttgttttgttttgttttttgagacaggtcttggtctgttgccgaaagtggagtgcagtggcaccatcatagctcagcagcctcaacctcgccggtcccaaagtgcttgaatgacaggcgtgagccaccactcctgacccaaaaccatttgtttttaatatctgataaaaatataatttataaaaagactttgatttttttaactttgaaaattaatctaaaggagatgaacactgataaacaatgttcagaaagtgaaattactttttaaagcttcagctttttaaagcttttcctattttattttgagaattttcagatgttcggtgaagttcaaagataagtgaacccctgcgtaccctttactctagatgtaccaattgttaacacttttgccacattggctgaaccatttgaaagtaagtcgactgtgtcatgagagtctaccccttcatagtttcacatgtacatgtacttcctatgaataaggactttctcttgtatgaccacaatgttatactcacatttaggaaaattaacagtaattctgtaataacatccagtaaacagttcacactgaaatatcctcagttgtccccacagtgtcttttatagatgtaccacacctccatcctggtttacacactggttggttggtaggggaattgtttttaggcaggctgaagccaacccagttatcctagatgtagggaaaccgggaaacattggtaaaatgatttaaatttcaagctgcagggctactagtgaagtaattacaacagagagttgattggaatcactctggctccggtccaggctttgcccaaggtctggacctgtcacttagccctgttgagcctcagcttgttcatctgcatcttggttgtctcgtgttccatagggctgtggtgaggttcgaatgagccaagcatgtgagggcctggcccaaatagatctcagcaactg

SEQ ID NO: 28836 - DNA, 1089 bp, Homo sapiens
ctgtaaataccttgctgcttatccaggtaattgggatctcacttgcctgtgtatagtttgttggcaggatcccaggagagtcttttttgtttgttttgagacagggtctccctctgttgcaggctggagtgcagtggcataatctcttgctcactgcagcctcaacctcatgggctcaagcagtcctctggcctcagcctccttagtagctgggactacaggcgcatgccaccgtggctggctaattttttgacttttgttgttgttgttgtttggtagagatgagatctcactatgttgctcagactggtcttgaactcctgggctcaggagattctcctgccttggccttccaaagtgctgggattacaggtgtgagccaccgcgaccagtccccaggggagtcttattcttgcaggattttctaaagacttcttctagaacaagtgtgactacaattcagaatcttcatctcccctaaagaaagagtgttccagaggtgaggagggacgggtgacagaaactggtagctgaagaggtttgttgatggattagtctatttattcataatgcttgatatcagaagaccagaagaatatttttgcaacttattttaaaaaacagctttactgaggtataactgacataatctactgcaaatatttatgtgtacaatttggcaagttttgacatatatatacacactagtgaaaccattaccacgtcaagacgaacatgtccgccaacgccacgcgagggtgtgatatccttgtgtccctttgtaatctctttgcccccgtctcaccccaacctgtgtttctctcagggtgacccccccaatctgctttctgttactgtatgttagtttacatttcctagacttttacatgagatatacgctcttttgatgttgttcctgttcgttctactcagtgtaaatggagattcattcattctgtagcatgcgtcagtagttgattcctttttattgttgagtactatgccagttgagggatagatagtactatagtttgtttattgagtgcacctattggcaaaaatttgtgtaccattctttagacacatgcc

SEQ ID NO: 28837 - DNA, 1083 bp, Homo sapiens
ttgggaggccgaggcagaagaatctcttgaacccatgaggtggaggttgcagtgagccgagatcgtgccactgcactccggcctggatgacagtgcgagactctgtccccatccccccgacccccccgccaaaaaaaaaaaaaaaaagactatcctttattagttgcccaagtcagttttccatatacatgtgggttcatttctggaccctgttccttttttttttttttttttttttttttttttttttttgagacggagtctcgctctgtcgcccaggctggagtgcagtggcgggatctcggctcactgcaagctccgcctctcgggttcacgccattctcctgcctcagcctccccagtagctgggactacaggcgcccgccactacgcccggctaattttttgtatttttagtagagacggggtttcaccgttttagccgggatggtctcgatctcctgacctcgtgatccacccgcctcggcctcccaaagtgctgggattacaggcgtgagccaccgcgcccggccctggaccctgttctatgtcattgttcactctgttctgttttcaagacaatatcacagtatcttaattagtgcagcttttaataagtagtgaaatcaaataatgttagtcctctcactttgttcattttcaaagttgctttggctattttatattttttatatttccatatgaattttagaattagcttatcagtttctacaaaaaaagcctgctagcatttagattggagttgtattgaatatctaggtcaatttgtagaaaatgggcctcttaacactattgagtcttctgacccatgatgatggtacctctctctctctaggttttctttgatttctgacagaaaagttttatattcaaattctcaactctttaggtatctcccatcttttgtcagatttatcccaaagtatttcattctttttgatgctattatacatttttgaaagttttaggccaggcatggtgactcacacctgtaatcccagcactttgggaagctgaggcaggcggatcacctgaggtcaggagttcaagaccagcctggcc

SEQ ID NO: 28838 - DNA, 1022 bp, Homo sapiens
gtccatcagttcctgctgtccaatccagtgtgaaagatccatctgggcctcccttgagtgcaagaatgtgatgtaatgggcctgggatgtgcaagctgggtttcactgaaagtaattatcaggctgggtcggatagatttggcaatgttagatataagatacaagatgggaagaactcaagacttgggttaggcagatccttaatataggacctatcttcccatttatctggtaaaatccagacccttggcaccttggtccttgtttttgttttttattaaaatatcttacataaatctcagaatttaaaacagtacctttctctttcaaaaaaattattgtaaacattttaggaaattgagagaagcaaaaagaaaataattataattacttcgagcctatataggtctacctatgtatatatacagatacatgtaaaatgtatcatatgatatatatttttatggctttttaaaggtaatatataataaatgtttttcatgttaatatgtagatctgatgtcactgtaattcagatatggccatgctgtcacttatgccctgttgtcggacgtcaaggttttttccaatcttaaatggactaacagtgctaagatgacatctctgtgtaagtgtatacatgactctttccttaggatgtaactttatagtggagtgtgtaatctcaaagtcacgtactggtaaatttctaaaatattctaatggcgagtattctctaatatcatggctaatattctcaaaacttgccttatttcttctgcatgtcaaataaacaatgatccttagctgtggctgcagttctgtttactataactagaaaagactggggaagggtcatttctatttgttgagtctggttcgcaaaatacagtaatagaagttgtcaccattgataatgtgattcagtccagttggtaaagtcattctgctgcttacagttgcgcgtcattttcagtttctagctcttctttccttgttcattccccgccccacccccacac

SEQ ID NO: 28839 - DNA, 1078 bp, Homo sapiens
tgatcacaacagtgcctcgtctgtgagtgccctgtctctatagttcttgtgcatgctgcatggtcgagtgctcacaacttaaagggaatcttggtgaacctgacagtgttgatgtttgagtattgatcataaccctgttcatccatacacattttgctagcttctgaatgctgtatctgtttttgctaaagctggggtaaaaaagaaaactctgaaatttgagtgcccatttaatcaggcatttaatatatcttatttcatttagctcttacaactctgatgtatgtaggattgctgtttcttttacaggtcaagaaactgaaacttacagtaattaattgaactggtcttgaggatatttggttttgagctatttcaaatgaagacaatactactcacctcacaaggttgatgggaggattatagtgtctgtgcaaaacatgagtcatagtgcctgacacagaagttattgtacatacatgtttcctgttctcagtaaatttatggtctagaacactcttcaaaacatatattttgtttgaacttcatcggctctaaaagtgatccattccatctggagctatggcataaaattatttgcatgtagatcttgaataactaccagcagttccttgcttttatatactactgtttcacctgaattcaataaattaaaataggagcaaagaaaactatatttatattttgaatttatattttgaacagtatcattggagcatgacttaaaatggaaaaaaaaagactaaagtggtaattcttattgatgcgtgttgtaacatcaaacacgttttctagtatccctcgtattttttttttgggaggggcgcggcttattgagatattcacaaaccgtacaattaactcatttgaagtatacagttcagtggttttagtatatttagagtgcgcagccatgaccacagtcaattttagaacattttcaacaccccaaacctttcagcaggcacactccactcacgtttttccccatcctctggaaaccactgagctttgtgcctgtatggattttgcccactcttgacatttcctgtaagtg

SEQ ID NO: 28840 - DNA, 1020 bp, Homo sapiens
agagtttcatgtagtacatgtttatgtctctaatccttgttaatctcatttgctccctatctggtcaggttatttaattggaatttatatttactagtttgtttgtttgagacagaatttctcgctcttgttgcccaggctggagtgcagtggcactatctctgttcatcacaacctccgcccccgcgggttcaagcgattctcctgtctcaacctcctgagtagctggaattacagacatacgccaccacgcctggctaattttgtatttttactagagacggggtttctccacgttggtcaggctggtctggaactgctgacctcaggtgatccacccgcctcggcctcccaaagtactgggattacaggcgtgagccactgcgcctggcctatatttactagttttgtcttgctctctgtctaggcctttctgaactaatagggtcttggaatctagctcaattctattttcttgtgtgtgatatttttgcaattcattcataatacctttcgttaataaaattctatcattttgtaaaattttttgagctatagcctatttcttgtcaggaactcttcactgaggcataagctccccaagggcagggagctttctccattttgtccactgtatccccaacagctagacggttgccttgcacatgagtgctcagtaaacatttgttaagtataaacatccatttaccatatgacccagcggttacacttttggggcatttatgccaaaggaaaaacctgtagatgaatacacatagcgattttatttgctgtacctctcaagttgcaaaaacccagatgtccttcagttggtgaatgcttaacaaaagcatggtacagccattccatagactactcctcagcaataaaaagagatgaagtattgattcatgcaaaaactgggagacatttcaaggaaattgtgctgagtgaaagaaagctaatcttaaaagcttatatatgatattatttcatttacatataacatcattgaaataa

SEQ ID NO: 28841 - DNA, 1030 bp, Homo sapiens
cagcctgggctacaagagcaaaactccattaaaaaaaaaaaaaaaacgggtgtggtggctcacgcctgtaatcccagcacttcgggaggccgaggcgggtggatcatgaggtcaggaaatcgagaccatcctggctaacacagtgaaaccctgtctctactaaaaatacaaaaaattagctgggcgtggtggcaggcgcctgtagtcccagctactcgggaggctgaggcaggagaatggcgtgaacctgggaggcggagcttgcagtgagccaagatcgcaccactgcactccagcctgggtgacagagcaagactctgtctcaaaaaaaaaaaaaaaaaaaaaaaaggtatttacacctggatgtggtaagacgcacttatagtccagatgctctggagaccaaggtgggaggattgcttgagctcaggagtttgagtccagcctggacaatatagtgagaccccatatgggaaaaaatatatttaacacaattatagggtttccagactgtactgaagaaaaaatttaaattgccatctaggtgtcttaaatgttctctgcagaaaaactatcttcaaattttaatatacagacatgggaggattgcttgagccctggagttcaagaccagcctgggcaacatgctgagaccccatctctgaaaaatcaaagaaaggacgggcacggtggctcacgcctgtaatcccagcactttgtgaggacgaggcgggtggatcacgaggtcaggagatcgagaccatcctggttaacacagtgaaacccggtctctactaaaattacaaaaagaaattagccgggcatggtggtgggcgcctctagtcccagctactcgggaggctgaggcaggagaatggcatgaacccgggaggtggagcttgcagtgagctgacatcgagccactgcactccagcctgggtgacagagcgagactctgtctcaaaaaaaaaaagaaagaaagaaaaatcaaagaaaaaaaatttagaatgcagtgttcatgccttaaagt

SEQ ID NO: 28842 - DNA, 1126 bp, Homo sapiens
tcagaactagatcttttcactagtgccctgtttactggggacagtgtaatagacaccttaacgttggagtgaataaccagcttctcaaagagaggtctttttaatgtcagtgcttcatgacacaatggtttccttataggtttactacatactggtttcctacctagattttaattttgtaatccaaataacataaaaatgggaggcacataccagtttgcacagtgtagttgaggcagggtagactcagcaaagactcaaaatcaaaaccatttctgtcaatatatttaatcatttctagactgtgaatatctatcttgttaaattcacagtagttatatttgtattgcctttagacattacatttttttttagttgttaacaatgactttaacaggaaaaccagaagtatacattgtcaactttaaagtcaaaaagaggccattgtggcggctcatgcctgtaatcccagcactttgggaggtcgaggtggatggatcacttgaggtcgggagttcgagaccagcctggccaacattgtgaaaccccatctctactaaaaatacaaaaattacctgggcgtggtggcaggcacctgtaatcccaactactcgggaggctgaggcaggagaatcacttgaatccaggaggcggaggctgcagtgagctgagatggtgcccctgaactccggcctggacaacagagcaggactctgcctctaaataaataaataaataaataaataaataaaatttaaaagtaggccaggtgcagtggctcacacctgtaatcccagcactttgggagttcgaagcaggcagatcacttgagctcaggaattagagcccagcctggacaacatggcaaaaccctgtctctacgaaaaatacaaaagtttagctggatgtgctggtacacacctgtagtcccagctacttggggggtgctgagatgggaagatggcttgagcccaggaggtgtaggttacagtgagctgagatggcaccactgcactccagcctggacaatagagccagacgttgtctcaaaaaaaataaaattaagtaataggtctcttttttgagttccttattttattttttttatttttatttatttatttat

SEQ ID NO: 28843 - DNA, 1055 bp, Homo sapiens
cccggcttttttttttttttttttttttttaaggacaagctctctcactttgtcgcccagactggaatgcagtagtgtggtcacagctcactgtagcctcgatttgccaggctcatgtgatcctctcatctcaacctcccaagtagctggggacacaggctcgtgccaccacacccagctaattattttttattttttgtagagacgaggtcttgctctgctgcctaggcttgtcccaaactcctagcctcaatctatccttctgtcttggcttcccaaagtgctgggattataggcatgagccactgtgcccagcttttattgctttaagacagggtcttgctctatttcccaagctggagtacagtggtgcagtcatagctcactgcagcctcaatctcccaggccgaagtgatcctctcgagtagctgggcctgcaggcacatgccaccacgcctggctaatcttttaattttatctgtgcgtagggtttccctatgttgcctgggctggtcctgaactcctgggctgaagcactcttcctgtcttggcctcccaaagtgctgggattacaggtgtgagccaccacacctggccccctctctacttccttacccatttaaatactactctctcaaaagccttacttaaatgtcactacgtccatgaactgtccttgtttcccccagccttttgtcgcttaacatgtttctttatgcttattttatatctttgtgagttcaggcttcttcatctcaaggaccatgtcttatctttttaacagccacgacacttaatgtcatttcttttcatgtttttttgtttgtttgtttgtttgttttgagacagagactcgctctgtcactcagggtggagtgcagtggcacaatcttggccccccgcagcctccacctcctgggttcaagcgattctcatgcctcagcctcccaagtagctgggactataggcgtgcgccaccatgcctggctaatgtttttatatttttagtagagatggggtttcgctgtgttggccaggctggtcttgactcctgg

SEQ ID NO: 28844 - DNA, 1027 bp, Homo sapiens
gagccgagatcgccccaccgcactccagcctgggcgacagagcaagattccgtctcaaaaaaaaaaaaaaaggaaggattaaatgaaaacaggacagtctctgacacacatttaaagtcacaaatgatagttttctttgtttgagacaaagtctcgctctgcctcccatgatagttcttatggaaggaatttttgtaagccataagatacttacaataaccttttccagactttttagtagcttccaactacaaaaaaagagaaataatcaattatgtactaatcagacacttttaaaaattacaacagtttattcagagaaacaagctttgtgtgacattctaagcggattttattctgcaggtccttttaacataatgagtaatatttgtgttgggaatgactgagaagaaatttcataatgatgtgaagatctacctgtaaatagttcctctgtcgtatgctggtatttatattctagcatctcaacagtgctgatggtcactcatcttggagttccctgaattttttttttttttcaaaactcctgtaatgttacattacccatatttttgttgttgctgctgttgttgttgttttgagacggagtgtcgctctgtcgcccaggctggagtgcagtggtgccgcgcccggcacatgactgcatactttcaaggagaggactcagagcttttatttatttaaagaaacttgaaaggaggaaagtggattaagaaaaaaaaaataaggccaggcgcggtggctcacgcctgtaatcccagcactttgggaggctgaggcaggcagatcacgaggtcaggagattgacaccatcctggccaacatggtgaaaccccgtctctactaaaaatacaaaaaaaaaattagccgggcatggtggcgtgcacctgtagtcccaactactcgggaggctgagacaggagaattgcttgaattcgggaggcagaggctgcagtgagctgagatcatgccactgcattccagcctgggcaacagagcgagactc

SEQ ID NO: 28845 - DNA, 1050 bp, Homo sapiens
tgctccaccccttcacggcgacccactcgtgccatacttgagctggagccagtcacgggccctaaaaggacactccttagatgactgacacacagattgcaaaggtcctcggccagggatctcttgcacagctgatgtagacagtcaggcaaaactaatgaacgtggagttaatgatgacttttccaaatcctgagacacttttcagggaaaatcactttaaacttgggggagggggtatactcaagaatggagtggtgcttttaaactttgatgagcagctaaactcaggtatatatttggggaagggactactcttagtattaatggttttggagctgggtccagtttacagaattttcatgttgccttttaaaataatttttgttggtggtgaatgtattgtacataaagtgggaagggtgggtggggatgcggaagaaatgggggtcctaactggtgggcacacagcactggagtgatttttatctgtttacaatcatgtcacactgaatacttatgggagccggagatgagggtaggaaaggtttgatcttgtaatgtgtcactgtgtttccttagtggccagccagccttcagaatagctaaaggccttccttccttccagtcagcctgagagagaacacctgtcccctaagcacctggtgtctccattggaggcagactgctctcaggagactactagaagcttcagcccggaagacaggctgctctctcatgctggtggcccaaattgagaaagtggtgtcccttcctgattttgccaccagccctaccgaatagttgtaaaccagtatcaggaattgggatcgctagagtgtttcacgtattagaagatgaatcgtcctcatcacagacctccctgtcaggactgtgatctagaaggcatcacacacagctttctggcacgaatcacattttgtggaagtgactactcaggtttgtatattttagtatcaataaagaattgcacaggtttgaataggaaaaatgtattctatagatttacagtttgaatttaggaatattt

SEQ ID NO: 28846 - DNA, 1005 bp, Homo sapiens
gaaaggggaatgctatttatttttatattgtgtatattttgtcgtggtctgctgattccctgtttcactgagagcgacacttacctcaatagttagttcaatattgtgtgttggataattttttaaaagaactttttaaaaagctttttgatccttggaggtctgtagatttatttccatatgaactggttattttgtataaagtacatgcttaaaatagcaaggctcctctgtgtgtgtggtgtgtctgtccatgtgtcatttccatatcagggcaaacccagacttccatcaggacgaaggcgtgaactaggccacaaggccaccagctgaaatgccacccctcgtccattctcatgcatccagaatccacggaggcggggcacgggtcctgtgcatgagacagaggaatatggttccagagaacttcaaaacagtcatgtactgactggcagttctaaaccatgtcagggataaaacgctcctcacagccgatccttgcgaagctggcccggccgtcagcatctcactggtaaaggcgtccgctttcagaaggttactacacctgaggtgcacgacttctctccttgcaggctttagggtgcctgggatgggaaaggagtataacagtggggcagcggggcagctccagcctggagcccgctgtgcacacacatggccagaagtgggagctccagcctaagcaagcgggcaatcttatacctgccaaggtcatttatgttttatttccagttactgggagaacagtttgaaagtagcttcattcagccaggcgcggtggttcacgtctgtaatcccagcactttgggaggctgaggcgggcggatcacgaggtcaggagatcgagaccatcctggctaacacggtgaaaccccgtctctactaaaaatacaaaaaattagccgcgcgtggcggcacacacctgtagccccagctactcgggaggctgaggcgggagaatggcgtgaacccgggaggcggagc

SEQ ID NO: 28847 - DNA, 1027 bp, Homo sapiens
agaacctttgagcgcactgctgcagtttggcgtgacatacctggaggactattcggcagagtacatcattcagcaaggtggctgggtatgagctgttatatattaaaaatattttcttgaaaaaaaattaggtttgttgtttttcttaagagatgggttcttgctgtgttacccgggctggagtgcagtgtctaattgctggcactatcatggcaggcttcggtctcaaactcctgggctcaagtgatcctgcctcaggtcctgaatagccaagagcacaggctgggactataggtgcccaccactgtgccgtgctctatcccgtactttttgatatgtaattattattattattcagttggttcagttgtttataaattttccttatatgttctttgacccttgaattacttagaaatgtattttttaatttctaaatacttacaggtttaaaaattttgttttcaattactaatttaattctgtttcatcagaaagcacgaccatcgtggcattgaaacttgagttatagcctactatcatgatcaatttaaaaaatatatatatagggctgggtgcagtggtgcacatctgtaatcccagtgctttgggaggctgaggtgggtgaatcacctgaggtcaggagttcaagaccagcctggtcaacatgacaaaaccccatctgtacaaaaaaatacaaaaaattaactgggcttggtggcatgtgcctgtaatcccagctactcaggaggccaaggcaggagaatcacttgaacccgggaggcagaggttgcagtgagccaagatggcaccactgcattccagcctgggcaacagagcaacaacaacaacaacaacaaaatatatatatacacacacacacacacatatgtatatgtatatacacacatgtatatttttatgtatgtttcagaacatgtattctctaatggttggtgcagaagtctgtacgtgtccatttacatttaatcagtcttaataatacgtattttaaatctttcagtca

SEQ ID NO: 28848 - DNA, 1069 bp, Homo sapiens
ctgcgagcgggcctggcagagtctggccaaccacgccgtggcagaggaacccgcgggcacgtacgtgctgggctcggaaatgaaccgatttccgggcgctcttgtggtggggctcaaggtctcaggagttctgtccttcccagattgcccacaaggagctttacacctcgctttcatcagtggtttgtctccgagagggtggtcgctcatcgtgtgcccattctacagagaagggaagtcgtgtaacaaaaacttagtggggatcccacagccaattatttgctccttgttccaaggtacaatgacatgatgggaaggctgaatgtgtattaagtgctaagttctgtcagtaagcaggtggtaaaagtcctctcccaggtacctccgccctccccgccccgcccaaggttgtttattcctgaccttggctgatgatggggaatgggggtcatggcaggagcagcgttctggtccaattagaggactggattaaagaattaattcagggccgggagctggggcttacgcctgtaatcccagcactttgggaggccgaggcaggaggattgcttgagcccaggagttcgagaccagcctgggtaacataatgagccctcttctctaccaaaaagaagaaaaagaaaagaatccggagaaaaaaaccttgggcttgcattgctctttctaatgccaccagcctcgtctggcaggtgagggagtcatttctttgcattgtaaacttgggttaggccacgctagggaggtggtaggtagaatagctaaagttgaccacaaagaaggatgatctggagagccctggctgtgttttaggggactgggtgggagctcatttcagtgaatgcagaaggctttgcttctgggtgtctggaggaaccttactaggtggtgccttttagccagctatggagtctatacctccactcagccagaaaccttgctccaagcccatttgttcacagagcaaactcttagttccagctctcttttcagccacacaccggtgctgtgtgttatttccccctcaggattacccttcctcttcatttaa

SEQ ID NO: 28849 - DNA, 1024 bp, Homo sapiens
ctggatacaaagatgaacgttgagcaacagctgacttgcctcttgaaagagggttacaggaacttttagttcctgggggaaagggcagcccatgagaccaattgtgaagcccatctaaatactaacagggatgagagagatgatggctgctgagttgggagctggagaggaacagtcccaaggtggaggtgggaatggaaatggaggggaaccacttctaactgaaattggtttttctgctgacagctcattggaggtgaagtgctccctgtgtgttgtggggatccaggccctggcagaaatggatcggtggcaagaagtcctctcctgggtccttcagtattaccaggtccctgaaaagctaccccccaaagtcctggagctgtggtaagtcttctttgctgactcatcagatcggttcagaaacgagaggattttcatctcctctcctaaatacctactcttttccccttccctactattgccctccagatcggattctttcccttcacttttttttccccagacttccatacatagcaataaagaataagggggaggaatttaggagtagaatagatataaagaagggaggaaacagggaataggagcgacgtgggatgacagagtggacagagctgaaagagcagcttgctacgtcctaggaattcctaattcttaaaaaaaaattttgttttgttttgttttgttttgttttttgagacggagtctcgccctgtcgcccaggttggagtgcagtggcacagtctctgctcactgcaagctccacctcccgggttcacaccattctcctgcctcagcctcccgagtagctgggactacaggcgcctgccaccacgcccggctaatttttttgtgttttaagtagagacagggttttaccgtgttagccaggatggtctcaatctcctgacctcgtgatccacctgcctcggcatcccaaagtgctgggattacagatgtgagccatcgcccctggccaaaaaataacaaagtttttaaa

SEQ ID NO: 28850 - DNA, 1071 bp, Homo sapiens
tcctgaacatggactgagtcatagtcctccactttttctagggctgaactctgactagaacctcagaatttaaaaaaacttcctcttggccaggcacggtggctcacgcctgtaatcccagcactttgggaggccaaggcaggcagatcacaaggtcaggaaatcgagaccagcctggccaacatggtaaagccccatctctactaaagatacaaaaaaaattagccaggtgtagtggcacatgcctgtagtcccagctacttgggaggttgaggcaggagaatagcttgaacccgggaggcggaggttgcagtgagccaagatcgcactgctgcactccagcctgggcaatagagcgagactctgtctcaaaacaaaaaacaaaaaacaaaaaaacttccgctcatcagaatatctacaaaagtgttaattcaagtattaatgtctcatgaagtgttaattcaaagcaagttgtaaatgaaaaactcatacattttagaaaatgtggaaaataggccggacatggtggctcacacctgtaatcccagcactatgggaggccaaggagggtggatcacctgaggtcaggagttcgagaacagcctggccaatatggtgaaaccccgtctctactaaaaatacaaaaattagccaggtgtggtggtgcgtgcctgtaatcccagcaactggggagggtgaggcagggagcattgcttgaacccaggaggcggaggttgcagtgagccaagattgcactgttgccctctggcctgggctacaagagcgaaactctgtctcaaaaaagaaaaaaaaatgtggaaaatagagaaaagtataaagaagggcatagaaatctgctactctgctgtgctttcagtctttttctatggatatagagattgtaggcagttacatgtcacacatatgctttcaagcatggccttaaatcgctaactattccagttcacaggaatgcccctaagtaatttaacaacccctattattgaacatttgggtgattattctgttttctgcctcgctgtgaagaaggaatgagctccctaagtgata

SEQ ID NO: 28851 - DNA, 1045 bp, Homo sapiens
agcgacagagcgacacatccacaggcgcccctggggaaatgggaccagcctaatctcgcggagtgcactgtgtcttgctgcctgggtgccctctcctttgcaccctacttcggctggtcgcggtagatgatgtggaaacaaagcaggaccagcaggcacagcacctccagaacagtgccccggatgaccagaggccccttgaaaaggaggggtttggggacagggactgtgtccatgaaacattccatcttcttggtgaaggcaaggggttggttcttcaggtcaggatgttaatggagctggaagttcagaaaaagcctggtgaagtgacccttggcctttcacttcttgagaaacatacttctttgctgggcatggtgactcacgcctgtaatcccagcactttggaagggtgaggtgggtggatcacttgtggccaggagttcaaaacctgcctggccaacatggtgaaaccccatctctactaaaaatacaaaaattagctagatgtggtgcacgcctatagtcctagctacttgggaggctgaggcaggagaatcacttgagccagggaggcaaaagttgcagtgagctgagattgtgctaccgcactctctcaaaacaaacaaaaaaacatgccccacaggacagtaccttaattagctagagtagatctgagagggcctcttcttgcctgcactgtgctccccagagctgatctaattctgtatcaataggctgttcccatggtcttgccatgcgcttgaagctgcaggagccttctcactgttcaggctggggtgtggttttcagaaccaccgggttgactactgaaaaccaagtgagccttacagctcttatcgctgggtaaagtgatcttgcctggtgcctcttggtcttcagctcaattttccaggttgtcctggccaagtcttgctctgttacgctcagtgcctctgcccactctttccccgccagcccttccctcccgccctgcaaacttgtcccttggctgtttcaccaggttctgcctgtatccttgcct

SEQ ID NO: 28852 - DNA, 1083 bp, Homo sapiens
gctgcaggtttcagcactgttaaggtattgcaagaatgcccaaccctctggtgtctgattgtgtatctagcaacattgcagtatgaagaaaagagatgccccgggtacgaccccatttctattaaaaataaatgtaaacacccaaccctcttggcagcccatgcacttgagaacctgtagaaaatggcagtgtgcaaccagcatggctgcgagctcagcgtcttcactagagagagtggaggtggttaggaaagggcaggcgggaaggggccatgttggccggacaactgcaggtgaagatgggattgtgaagtacagtccaaggcccactcaccaagggctggatccaaatatgtggggttgggattctgtgacctacttccaattttaatattgacctgagctcatatttagctctacatgtttcccagctcgtattttccaacagcccctttaaaacttttagcatcctcttgtcacttttgtactatccaaggtgggacggacaggtgtcagataatagcagagacttggtgaagaaatgaaagcacttttgtagaagagtgtcatttcagaaaaaagccttttttttttgagatggagtctcgctctgtcacccaggctggaatgcagtggcgtgatctcagctcactgcaagctccgcctcctgggttcacaccattctcctgcctcagcctcccgagtggctgggactataggcgcccgccaccacgcctggctaattttttggtatttttagtagagactgggtttcaccgtgttagccaggatggtctcgatctcctgacctcgtgatccgcctcccacagtgctgggattacaggcgtgagccacggcacctggagagaaaaaagcttctttaatgacgacctcaacataatttacatggagaagtttcttaggtggaaaaccgatttgtatggtcctcagaatgtaacctacaggttcttgccctcagaaaaatgcatgcatacttttatgttacaggcttattttccaaatgcggtagagggccatcccttctttggcttcttgccttgtctctgaccccactgactgccc

SEQ ID NO: 28853 - DNA, 1113 bp, Homo sapiens
cgcccacatgagccacaggccttggctctgttagtccctgagctacccgggaattctcttagccttttgcagattcattacgaggtggtctggcttcaaacctccatggagttttataggtaggggagaacggaaggggtcctgcggtagtgtggtagggagggaggcttctcccctgggcagtaggacctaatggtcttcctctcttggaagatgaggttcgggcaggaacctaccgccagctcttccatccagagcagctgatcacaggaaaggaggatgcagccaacaactatgcccggggccactacacggtgggcaaggagagcattgacctggtgctggaccgcatacggaagctggtaagatcaggagggcaggggacgggtgggtcaggctggagtggacaggcttggccccatgcctctttgatcaggctagggagaggcatctgacccctggctataggatggagctcctaaggtttgggaatttctgcttaaattctgtaagaagcatgcacaggggtgatgccccttcctctgtgttggcatcatagactgtgttccaggctgaggccctactcatactcattgatactctctgttagtatctggggaaggttccgggtataaggcaggatgaggtctctgctggtcggaaacacaggttaacaaagcatttaacttggaagaggagaggaagagattgttgatacatttgggcacttacaagtgccattacagatgttaagcacattccttcatttaatccttaataattagacttaggaggtgtccttcctgtgctttacagatgaagaaattgagggccagggtggttcaatatcttagcctgggtcacacagctaaaaagtggcagagctggggtttgaactcagttggactacaaagctcttgagttgtaggttgtgtcactttatttatttaagcttccatttgcttatctgtataatggaaaagcttggacctgatcacatgttctttccctgggaggtaagggtgccaaacttttgcatatattcactttttctgtttagaggagggcttgtcagggtcattggcctcaaagctgtctgtggtccccaaaagt

SEQ ID NO: 28854 - DNA, 1064 bp, Homo sapiens
gctcatgcctgtaatcccagcactttgggaggctgaggcaggcggatcacttgaggtcaggagttcgacaccagcctggccgacatggtgaaaccccgtctctatcaaaaagataaaaaattagctgggcgtggtggcatatacctgtaatcccagctactcgggaggctgaggcagcagaatgacttgaaccctggaggcagaggttgcagtgagctgagatcgcgccactgcactccagcctgggcgacagagcaagattccatatcaaaaaaaaaaaaaaaaaaaaaggtagccttcatcttataaacatataaccagtccagataggatatagtggaagagaaaaagagaaaacctctattaacaataacaatgaaatagttagatacttaacaataacaatttaggaaatgttagaagcctttatgagaaaaattttaaactcaaagacaaagtagatgagcaaatttaatgacattcctaggaaatttttttttttttttgtcaaggtctcactctctcgcccagcctggagtgcagtggcacaatcagatcactgaagccttgagctcctggcctcaagcaatcctcctgcctcattttcctaagtagctggggctacaggtgtctgccaccacacctggctaaattaaaaaaaaaaattggccaggtgcggtggctcacccctgtaatcccagcactttgggaggccgaggcgggcagatcacgaggtcaggagatcgagacaatccgggctaacacggtgaaaccccgtctctactaaaaaatacaaaaaattagccgggcgtggtggcgggcgcctgtagtcccagctactcgggaggctgaggcaggagaatggcgtgaacccgggaggcggagcttgcagtgagcggagatcgcgccactgcactctagcctgggcgacagagcgagacttgtctcaaaaaacaaaaacaaaaacaaaaacaaaacaaaacaaaaaaaaagagtcacacgaacacatgttctgatccacctgaggcaaaaggcgcccctgtggagcccagcacgtctgtgtg

SEQ ID NO: 28855 - DNA, 1041 bp, Homo sapiens
gcctggttacctgctggggcaagtgggtgagttgagtccgatgaagcacttagaacggtgcctggtatgtggcagtgtacagagcatggggcaatcactgcagccgacctagctggtggctccagtgggccttagtgccccaggcatctgaggagcccactcttcagcactgcccccgagtggctgcagcacacactcccccaggactcattcagccctcccaaggagtgggaagcctccggaacctggtgctgtccgaggcacgacacgcaggaagcagggcaggtgtcctccctggcccctcacccttcctagccaggctgcagctgatccgaggtggttccttgatcctggagtctgaagggacattgaggggctacctgtgctccaaacagaccagcccgcttctcatctgcttcacacacaggggttctgggtaagatttcacttcatttctttgaaacaccactctgctgggccagccaagtcctgtagaccccatcacttgtaccccttgacctcagcaacaggaccaagacctgtagaccccaccacttgcaccccttgacctgaaaaacaggaccacaacctacacccagccgtcctcacctggactatgaggatggtactgctcactggctccggacagctgtgtgactccaggggagccagctgtggttgagatctcgggggtcttggtaaatctggtaaactccttgtgcagttctagcgagcccagtgtgaggactgcctgttggctgggaaccgtaaatctgcttgggtttcatgagaatcttgccctgagtgacctccagctggggaactcaccctccatctgcgccagggagagcttggtcattgtctgcagggacccaactaatcaggacgggcttccacgaggagacagatttgaaagtatgctctcttcgggaagcagtagctttaaactggactagctcttatataatgggcactgtgtccctaacgaaaccaaaatatggtccaataatggcttctttgagggaagcacagggcagttgg

SEQ ID NO: 28856 - DNA, 1049 bp, Homo sapiens
aagagccagaatccatctcaaaaaaaaaaacctagaaataataaaagctgtatacgacaaagccatagctaacctactacagaatggggaaaagtgaaaagcgtttcctctgtaaacaggaacaagacgaggatgcccgttctcaccacttttattagacatcacacaaatatgcaagagaaaaaaataaaagccacccacactggaaaagaggacatcaaattatccttgtctgatgaagatgtgatcttggatttacaaacatgtaaagcctccaccagaaaactctagacttgataaataaattaatacagtcatttgcaggatacaaaatcaacatacaaaaatcagcagcattttatacaccaataatggtctaggaaagaaattaaggaggcaatcccatttacaatagcaacaaaatgaaaaatgatatgccacagaggaaattttaccaaggaggtgaacgatttctacaaggaaaactacaaaacactgatgacaaagtttaagaggacggaaagaaatggacagtcatttcatgctcatggaaggaattcatagcattaaaatgaccacactgcccagagcagtctagagattcaatacaacccctaccaaaataccagtgtcatctctcacagaactggaaaatcgtaaaactcatatgaaaccaaaaaagagctcaaagagccaaagtcatcctcagcaaaaacaacaaaactagaagcaccccatttcactgcaaattagaatgacaaaatttttgacaagtgcatggtaaccaaaacagcatggtcctagcataaaactagacacatagatcaatgggacggatgacagagcccagaaagacagccacatagtcttggggcttgtgtctctcctgctgtgcatccatgctgggtgctttacatacaacaggcagacaagaagtccctgttgcaagtgaggacaaagtgtgggaaggccgtgagggtctgcagtcccagatggccttggcctcaccccgcagtgcgcttttgcaccagagtgccaccttcttctcc

SEQ ID NO: 28857 - DNA, 1053 bp, Homo sapiens
gccccgagccagtcccgttccctccctccggaagaccccggtggttcccggctccgacccagcacactcacctgccagccgctgccgtccgccatgtctgggcgaccggcgcgccaagcccgcccctcagtccgccagccaatgaaaaatgaagaaaacggcacctcgtgatcgactgacagaagaactaatgagcaccgacacattcaatcacgtcttcgcccccttcttcgagaagcgccgacaaacaggacgagcaaccaatagcaaccgagggcggctgcggcgcgcgcggagggccggggtcgcagggtaaatccggggcgagacctggcgcgaagcctacgcgaccaccgcgacgacagcgccattcaccccgggccaggcgggcatcctgggccgcgcagctaccttacgtcagccgcctctcaaatcacacggctctggccagttcttttcagcagctttatgagattttctcaaatctcaacaatccggtatattttcaaaagtacatactgagcatcaaggtggtgcagcgaacctcccagatctgcagctccagcagtcttgcttgagcgtccactcaggatggaggtgaactcgcaaagtaactgagattggttgggcatgacatatggtggatctagggttgaatgacctccccagggaacgcaggcttgaagtggaggctgagaatgcaatccgagtacagccataggccggtcaaaggtatggaggcggtgtgtagcaggggtgagcggggtaggagtggcttggatgtctgtagttctattctaagggtgcgggagacatgtaacatttaccttattcatttttcgagacagggtcttgctgtgtcacccaggcttagtgcagtggcgtggcgtgttcatggcttactgcaacctcaaactcctggactccgaacagctgggaccaaaagcatgcacagcctcaccaggctaatttttaattttttttttttttttttgtaaagatggggtcttgctaagttacccaggctagtttggcctcaagcgaccctctcac

SEQ ID NO: 28858 - DNA, 1255 bp, Homo sapiens
atagttttgaagacgtttctatttttattttaccaataattttaaagccagcttatttactaaagatcatttaagtcacatgaagttgaaaaatatttgaacttatttactttgtttatgagcactcatttatttataagccaatttggtagcatgtaggcacaacacataacacaacatgtacatacatctaaatttattttaacccacatacacacacatacaaaggtacagcttttactgcagaactctagccatgagacagcagtacaaactcaccagtttataaaagagggctggatccaaattatttctgacaaaattggaaccattcacataaataaactttgtttatcccagtaggtaattcagtgaaggctgtgaactaaaattttgaataaagcagtttctatagcagtttgattttaaaaacttaccctttctttttttctccagtttcaagttttcaatgattacattttagctacaactggctgagctgtataagcaaaacaaaatctccaagtagctctgaataataccatagacagtgagtcttttctcaataccagtagcttaataataccagattcaaagcagacagaaaagagacaggggtgatggctcatgcctgtaatcccagcactttgtcgggggtgggaggattgcaggaatccaacctaggtaacatagaacccctctctataaaaataaaaaaaaaatcagctgggcatggtggtgcatgcctgtggtcccagctacttgggaggctgaagtgggaagattacttgaacccgggaggtcaaagcttcagtgagctatgattgtaccactgtcctccagcctgggcaacagagtgagaccctgttttaaaaaaagaaagcaggcagaaactttctcatagtttttccacaggaatttcttcttttagtgggtaggttacccactgcactatcctgatgaagatgtacgtctcttgtcttcccagtttcacaagatgcagcccagtgcccagcttggagtaaccaaatcaatatttctcattccagctgagacgatatacacacaacaaaaatgcagacactgatcattccactctgcgcccagatttgacgtggcgaggctcatacttgcccctgtcagcccccagcacctttgatctactcaaagttgggaggaattacctccaaccaggagttcagcgggtggtctctgggcaagatgaaaaagtatatggtcaacctgagttaggcct

SEQ ID NO: 28859 - DNA, 1028 bp, Homo sapiens
gggccacagggccaggttcaggtgaactctgcccgaccaagtccatgggcactcctggaggcccctggcttctcccaccccagccagctggcatgctaaggtgtgagagaggaccccacacaccccctaagccagccataaagctgttgacaagaaggcacccggccactctgggctgcagggctggtatgtctggacgttctgacctgcctcatcctctgagcagcatggctgtgctggaagcattgacttgggcctgtgagggacattagcacatctgttggcctgcctggcagtgagagcttgcccacaatttgagggtgacagctgtgtttgctcccatgacaggatgaaggacatgcgcgtgcagactttcagcattcattttgggttcaagcacaagtttctggccagcgacgtggtctttgccaccatgtctttgatggagagccccgagaaggatggctcagggacagatcacttcatccaggctctggacagcctctccaggtagcaggagggctgtgggtttgcctcatggggccaccactggttctcacactgcccagggaggtcagttacggggaccccagggctgtgggagtgactgtgtcctgcagaaactgcttgggtgaactggaatcacagtgccagtgtggtgtgcacctgacacattacctgcccctcttcagtatttgtcactttctcttgaatcttttttggcttttttttctttttgatttttaaaattttctctttttttaccttttgtatctcttaacaaaaggcattatttgttatgtatattcgttcttgtgtttaatcttatagttgtcatttctcaattttttaattttccaattctttcttatctcacttcctgagatgtcctatatttttccatgtcttttcgcttgttttgaaatggaatgtgacaatttggatcttttttttagcatgtctgtctagtgtcagactaaagacatcagagaaaaatatctccaaatacactgaatttatttgggaat

SEQ ID NO: 28860 - DNA, 1051 bp, Homo sapiens
gtttcatttactccctcattaaattagagcacagttcttaagtaacattcaaagaaagggcgcatgtgagataaactttctgagttcttatatatctgacaatatctttattttactatttctttactattccccccacagaaaacatccgtgttttttattcttgcttttcaggcttcctggaatgacgatgctctgtcttatttttttgccttacattttccatagctttgtcttgttatctatgttgaggaagtttttcttgactccagacttggagtggatgttttatcttttgcaactgttttaatttccatcaacatttcctagtttttaactcttcctttttcatagcatcctgttcttggtttaggaatgtaagagttgcacacatctctctgaagatactaattagagttcagtttaactttctttagttctccaaattatctgtttcttcagggttatttttttaggccataggcatttctcaaatggtctgatgtctttcatattcaagaacgggattgtggacccttggctgggccatgggtatctgggcacagctcactggtcataagacatcgtttcaccttagcaggcaggagccaactgtgacactttgggactccccactgtagggcccagaggctttgcttgaggattctacttattcacagatggtacatttcatatactcagaggggagcctccctttttgtggggaagagtaaaaatctatctgttgggtttgaggggatcccttgtccaacctccagcccttgcccaagcctcccctgtgtcagagtcctcctgggccttcaggatcttccctttgttggcttttagtttcctgtcttctgatacttgcacccgctccacctctcatttgcattactgtgggtttatacattttaaaaaattctttcctttcatgtgaaagacaactcaggagggaaagaagataaattcttacccccaaacctcttcctgaaccaggaaccaagcaaactatttgtgactttggtattttaccaagagttcctgacaa

SEQ ID NO: 28861 - DNA, 1376 bp, Homo sapiens
tctgaccatctgtctcgcctccgcagggcactccagatgtcatgctgttctctaggccggcatccctaagcctgctcagcaaacacctgctcaagtcctttgtgtgttcggtgaggggccaggcgggtgctgtgggtacaggagggcaggtgcttggagagctccctggatggggagttagatgctggccttggggtgcctgtggctgttgaccagctgcaaggtctaggcacatccattactttttctgagctgtctttttctcagctgacccctaggaaccttccagttctctcaagctctgattcatcactggctgtctaagtcactcagacaagtagggaggggcccttgcagagtgaacagggctggggcttgtgtcctattgttgcaggtcagggaaagcgggatggttgtagcaccgactggcttcccagcaacagcttgtccactaagctgatttcctgtgcctggctttgtcttctgtgtggcctaaccccctctttgcgttggcgtggaacacactcctaacttggctggctttagggcaggggtcctcacctagccgacatggggctcctcccagatgtgacatgtcaataattgaagtcctcctctgcttcgaggatgagagtttatgccgggggctatttcaaacaaaatgtgctaacaggaagttgaacttttcttttgccgctgaactaaccagtaaaatgatgacagatgacatgtgttctatcaaccaggtaatgtcaaagataaactagggacagagcatgggccttgacgtcctctaggctgtgttcaaagatgagcctcctcatttgccagttgtgtgacgtgaggtagatgatctgacctgatcctcagtttcctcatccgtgaaatgggtgaacacatacccactttacaggatccattcatttaccagacatgtattgaacatccaccacctgcccggccctgttgtggagtgactgcccatcctggtgcacatcctgggacacccctcagtcctagacacaccaggaatactggtcacctgggctgtagggtgtgggtgcagcaggcacagcagagaaggaaaccctaaacctttatcctgaaggagcgtgccggcgggggggacgaggagtggcagctgcggttaagatgaggggatgtgctgccaggggatggagcaggatgaggcggggtgggctggggcctcctggagaaggtggcagctgctgcaggacctgaaggaggtgagggagaggatagcagggcaggctccttgcaacaaacagccaaggggcagtggggctaggctggtagacaaggaggctcggggacacagcatcacagccacagtaccatgctgtgggtacgggagg

SEQ ID NO: 28862 - DNA, 1088 bp, Homo sapiens
ctgccttccttgagccagacccagccatggctgtggcactgtgtggcattggttcaccccgcacagcagcccctgctaactcttttgtgcctgtgatgtgggagaggtggatggacacccactggcctgcagaatatctggccttcagtatacagggaggactcgggctgggaactgcttggtttccctgagggtggagagccaggggtgagggtgcagagtgggccatgtctagtgcccacctgcgtgggctgggtctggggctctcggggctgtggctggcagcatagatggctcccagggccaggccagccccatcctggggcctggttttgctttgtggtgagggtctgggtgctcagctgagcctgagggccctgtgagatatgggcagtttgcaccatgtccccttgtgcggaagagaacactgaagccgaggaattggccagagtgcggccaaaagtgacctgccccacccaaggacttccacaacccactctggggacgggggttcatgccagctggggtgggcaggcccgtgtttgtccaggtctgtagggcccttccctgtgtcacctctattgtcttcccgggggggagttctccctgcaggccccaaccctgacctctctagcagtgcagacagcagttgtgaagatgaagtacagtgagacagacacaaccactgagtgcagaataccacaggccgggaggagccgcgcactttggaatgcagtggagggcaggcagcggaggggagttctgtgccctgtcttgtgttcccactcctcccttctcacggctgtttttctttcattacttcagtaattgagctgaaagctgaggatcggagcaagtttctggacgcacttatttccctcctgtcctagggtgagttacaggggttctgcaggggtggctgcagcagccccctcagagcccgaccctgatgccctgctctgtcctccctcaacggaggcttctacttgggtttcagaccgaagcagggttcttgagattggagccaacacatttttcccaagcacatctgtccttaggctgccagcagggccacaatggggcatttt

SEQ ID NO: 28863 - DNA, 1032 bp, Homo sapiens
ggcggaggcagaggtggggctctctggcagtggagtgggtgctagaggcaaacccctcccctgcagcctgcttggtggtgatgttatgctgctgtgtgtccttccactgaggcaggggcacaggtggcctgggctaggagggctgagcagcagagtgccgagggatggagggagagcccccatgggagggtgccagggggctggctgagcagctgggcggggtccgtgaggtaagaaggtgcccgggccagggggcaggagctctgatgtaggacagctcagcccagtcaaggggtgctatgaggacagcaggggcctccgagtctggggtggcctcacccccacaagcagtcctggctactcagcagcactacccagaggggacgcctgggcagtttcttcaattcggtggcacatcaacatcgtttgaaacttgttttttcttgttttgttttctagaatttgattcttccagaatgaccttcttatttatgtaactggctttcatttagattgtaagttatggacatgatttgagatgtagaagccattttttattaaataaaatgcttattttaggctccgtccccattgtggctctggtctcgaggccagtgcttgagtgtgctctgagccttctgtgggtcttgggccccaggagccctcagtgcctggcaggaaatcagcatggggattggccccaaggacaagatctccttactctgtcctccaggccctccgggtggcagtggacagaggtcaggacccctcggcatccccgcctcctcatagcacctgcaccggccactgcctggtggtgccagccagcacctggctctgtccacctaccacttcctctggtccacctggcctcagccacatagcaagtccaccctctcagccatccctccacctgtgggtctcaccatccagcactcttttccaggtctttgaaggcaggagtgatttgggtaggttttaagtcagtggggaaaagctcagaaagagtggcctggaaaagagcacacaggt

SEQ ID NO: 28864 - DNA, 1023 bp, Homo sapiens
agcagtttgagcagtacttccgtgatgagagcggcctcaaccgaaagaacatccaagacaaccgagtgcactgctgcctatacttcatctcccccttcgggcatgggtgtgtggctgtcctggggccaggctcgggagtgcagcccctacaatatggccccctggctgtgcctatgcccacccttggctgctctcggcaggctgcggccagtggatgtgggtttcatgaaggcattgcatgagaaggtcaacatcgtgcctctcatcgccaaagctgactgtcttgtccccagtgagatccggaagctgaaggagcgggtgagcctgccgtcgcacaggggcctggccagggccctggggctgagagtaccagggggacttgtctggcctcaaatctgatggtccttgccccaccacagatccgggaggagattgacaagtttgggatccatgtataccagttccctgagtgtgactcggacgaggatgaggacttcaagcagcaggaccgggaactgaaggtgaacatgcagactggtggggcaggggggatggagctggtgaggggcagaaccagagggctttgtctccttcacattgagcctgctggaggagggccaggtcagcccagttgggtgcaagagtcatttgttctaggagtagaggacctgtacccccttcatccagggctagaaggtaaaggtcaccatgtctttgcctggctggggtgggtcatgtgggccccgtgtggtgcttggcaggtatggagcacttgcccagatccagaggtgcagcagtgggccaggcccccaaccccaaccctcttcccatgggtcaccagaggaaggggctgccccagtggcacaccctggctcccagatttctgagctccagggttggtggctttgggtgccccggcagctagagtgatgatggagaccatgccaggggcaggtggccaccagggcaggggcatcagcatggggagacataggctcagccctggggagggaaggggcagct

SEQ ID NO: 28865 - DNA, 1058 bp, Homo sapiens
aacgccaggatctctttgaggagagatagttgatggtgatgctggaggggtgccccgggagttacatgcccgtttcccatcagtaaccgtgcaattacgctcaccgggtgtgagcctttctccctccttcccccaggagagcgcgcccttcgccgttataggcagcaacacggtggtggaggccaaggggcagcgggtccggggccgactgtacccctgggggatcgtggagggtgagtagagtcttggggtaccaggtctggtgggggaaggctgtcctgggccggcgccagcccactacccacccccaccccgcagtggagaaccaggcgcattgcgacttcgtgaagctgcgcaacatgctcatccgcacgcatatgcacgacctcaaggacgtgacgtgcgacgtgcactacgagaactaccgcgcgcactgcatccagcagatgaccaggtgcgcgccccagccgcgagccagacctcgcccctctggccccgcccacgtctccataactgagggccggtcctgtcagcccacccagacttgaactttgcaccattccctaagccccccccctcccccagagcctggtctccctagaaccaagtccagggctgtgagggctccggagggcagggcctcagcagtggcggggatgggccaggcatcgccagcccacgctgagcctcccggtggcgccgccccgcccatcctcccccccgccccgcgcagcaaactgacccaggacagccgcatggagagccccatcccgatcctgccgctgcccaccccggacgccgagactgagaagcttatcaggatgaaggatgaggaagtatgtggggcggcgggggcggcggaggcgggcgtcagggatgctcctccgcggtgctgctcacccgccgggttgtctccgcccgcagctgaggcgcatgcaggagatgctgcagaggatgaagcagcagatgcaggaccagtgacgctcgccgcggacacaccgtccgtctccgggacgccctcgcacccctggacaccagaccggactgttcccgacccg

SEQ ID NO: 28866 - DNA, 1031 bp, Homo sapiens
tgcgcggccgcctgctgccctatctggccgaggacgagctgcgcgccgcttgcgctcccggcccgctctgctggggggcgctggcggcgcagcttgcgctgctgggccttgggctgctgcacgcgttgctgctggtgctgctgctgtgccgcctgcggaggctgcgggcccgggcccgcgctcgcgccgcagcccggctgtcgctgaccgacccgctggtggccgagcgagccggaaccgacgagtcctgaggagagaaccggtgcgtcctgaggagagaaccggcgctgggcaacacgggcctgcaaactcgacaggaccctgcccgaggggccctcgcgccaacctggaccggtccccgcctcctccgctgcccaatctctcagacccaccccacctgcaggcccagaccacgtgggacagaactcctgcccaccctaccccgagggaggcgaacccgcacttccaggcttgggaggaccatggggcacaatgcggtccagaccctgctgcgtctcccttccaaactctggtgctgaataaacccttctgatctggtcttctctgcacgactgacctggaaattcccctcgccaaactcaggaaaaggccccaggaggcggttcaaggggacacaaacacatcctcacatgcccaccctaacctcaggggcagacaggagtcagtgggtgacctctccccttccagacacactcccaaaaggccacatgggaaggcatgagagagatgctaagtgataacgtgggggccagtgaggacgttgtggggacactgaggaccctgtgggggcagtgaggatgctgtggggatgctgtggggacagtaaggacactgggggcagtgaggacgctgtggacactgcggacgctgtggggacaatgacgctgtggacagtgaggacgctgtgggggcggtgaggacactgtggagtgaggacactgggggcagtgaggacgctgtggacagtgagggcgctgtgggggcggtgaggacgctgtaggggcggtgag

SEQ ID NO: 28867 - DNA, 1022 bp, Homo sapiens
aactcaacaccagggatggggcgagaggaactctttgatccctcccttcctgagcgcaagcaggaagggctgacagccggtcagcgccaaggctgctgacttggacacaagatgaacgggaagtgcacgtggccgaggctctgtcccccacctcccgtgcctgtcccagtgtgtttgtggcaactgctgccttctaggccactcggctcatcaccccacgtggtagcggcagcctgagtgccacctctccgagggcacagccaggagtttccagatgtccaccctcgcggacctgtttttcgtatacatgtttgctctggcggcgtgaagtgagtggggtcttagtaattgaatggcaggaaccattcccagaggccagtctagggtgggagggggtctccaggggccatccaaagcctcaaagggcatctagcaccagagagtgaggacctctgcagcatctgcccaggctccgtgagcacggctttggagatgcatttggggggacggctgtggatgcccattcccaagtcctgatccccacctgcgtgaacttggggcagccattacccatgtgccccacggtgggtggggctttgcactgcagagggcctccctctcttgctgtcagaaggcagccattccgtactccacatccaggatgtgcggaggggctgccattcgagacctccgccttggttttgttcagagctaaagggaggaaaagccctcccctgaacaaagagcaaacacagtgtttgtaaatgagggtgggacacacagcaatgtgcaaggaccctgagtgtgcagcaaactggcctgttaccgtgcccctcctgttgggatggccatgcaagatggagcacccagccgtccagcagggccgccgctggccatccggggctgttcgcattctttttttttttttttttttttttttgagactgagtcgcgctctgtcgcccaggccggaatgccgtggtgcgatctcggctcactgcaacctccgcctcctgggttca

SEQ ID NO: 28868 - DNA, 1081 bp, Homo sapiens
atgggtccttgaaaaattatacagttgttagggagagtgaagcaggaggactgcttgaagccaggagttcaagacccgcctgggcgggcctaggcacctgtagtcccagctactcaggaggctgaggcaggaggatcgcttgagcccaggagttccaggctgcagtgagctacgatcacaccactccacgccagcctgagtgacagagcaatatcttgtctctaaaatcaattaaaattctacatagaaccgtatgttccaggaattccacttctgggaaaatacccaagagaattgaaagcagagtctcaaagagatatttctccacccatgttcatagcagcattactcaaatagcaaaaggtggaggcgagccgagcgtccaccgataagtgaacggatcaacaaaatgtggtgtgtgtgtaccgtggagtattatccagccttaaagaggaagggaattctgttacatgctacaacagggatgaaccctgaggtccttatgctccgtgaattgagccggtcacaaaggacacattttgtactgtacaattccacttgcatgaggcacctcaagtagtcagattcaagaaacagacaggagaatggggattgttagggactgggggagaggaatggggagttggcgtctagtggggacagaggttccattttgcgttcatctggaggtggacgcacagcatcgggaatacacaatgccactgaattgtgtacttcaacatggtcacaatggcacattctttattttttgtagagacagggtgtcactgtgttgcccaggctagcctcgaactcgggttcaggctctccttccacctcggcctcccaaagtgctgggattataggtgtgagccaccacacctggccaaatttgtgggttttttggtttttatgtttttgaaacagagtttctcccttgtcacctaggctggagtacagtggcgcgatcttggctcactgcaacctttacctcctgggttcaagcgattctcctgcctcagcctcccaagtagctgggattacaggcacctgccaacacacccagctaattttttctatt

SEQ ID NO: 28869 - DNA, 1020 bp, Homo sapiens
gggggccttcagacctagggtggaacactgggatagggtgtggggaattcggaccgctgtgaagtgatctgacgttgggtgggagtctccggacttggggtggggaatctggatgggaactggggaattcggaccttgggtggggatctttggaccggggtggggtccccagactccttgtggaaagctgaggttgaagatctgtgctgtgatgaggggctccagatagcggtgagagatcccgcttcaagactgggttgggggtccagaccaggaggataagcctctccctggagtagggcttgacctggtgagggtgtggtagagtcacaggggagggtcccacttggtccttgggctgggatcagactctcagagctggagagttgcaggaggcctgggggagggtctgtggagccccagactcagagggccttggtgacttctccaacaggctccctgttggaggccttggggtaccccagggcctttccctgcaagagagaggctgctccaccaggaaggggcccaggactccccagggtcggggggatgtgtggtgtgcaggaccacgtgggaatgttagagaaaggggaagtcactccgggcctgccctgctaacagacctgctttttggatttttccagccagggatttttgtgtcctgttgctttttattgtttaaagtgaccctccaagcctgagggaccgtaggagctgccctgcagagcccagtgagacactagttaatgcagaaaaaacagattttacttggtaactactgacaacatgagaaaaagctggctccatgctgatttgtctagatgtgcctggagtttaaagggagagtgagggagtgggaaggggtggggactcagtagagttagggaaacagaaaatcaccaaaactgggaagggagggttggcccctgtgaaaccaactgatctgggtttgccactggggcttaccgaagtcaggcccccaacctcccacagagactgggagacaggggccccatc

SEQ ID NO: 28870 - DNA, 1024 bp, Homo sapiens
atccattcacagttgcttttgttttgagacagaatctcagtctgtcacccaggatggagtgcagtggtgagatctcagcttactgcagccttgacctcctgggctcaagcgatcctcctgcctcaccctcccaagtagctgggactacaggcatgtaccaccatgccaggctaataatttttgagtttttttatagaaacagggtttcatcatgtttcccaggcttgtctcgaattcctgggccattcaggctttgtcccatatttttcctctttttgtaattttacttcaggacaaaattacatccctttctttaacaaaaacactctacattctttgcatacttttcatataaaaacacatcctatcttcctcccatactttgtataggaaattgtttccctcattcttattgtttctaggagttttgttttcatatattgattataatttttaaccattagtaaccggtattttttttttaaagagacagcgtcttgctcttttgcccaggctggagtgcagtggcacaatcaggactcactgcacccttgaactcccgggctcaagtaattctccaacctcagccccctaaagcactgagattacaggcatgagtcaccacgcccggccataacttgtattttacaagtaaaactgggaagaagacaattggaaattgtctgtcatttaccagtttgttggcaaattttatgaatataccatcttataatctctagaggtatatcctttttatagtacaatgtttttaagtgccaagtacatgtttattaacagaccagaatacctttagccagtctgtaccatataaaaataagaagccaaaaagtacaaaaagttacgcttaataatgaatgtttcagcactttcttctcttcaggtattatttagatattcaatgaatgtctattatttaacttcacttagtatgactctgaggttgaaagttactgaaaacatcttgtaagcttttttaggccaatatattatcaaacgcaattaa

SEQ ID NO: 28871 - DNA, 1041 bp, Homo sapiens
agctagtttggggagatctcaagtatcccaaaggagccactgatgttccaaattatccttggtaaagtcacatcaacaaggaaggaagcagacagaggcgcacttgttccttgcagttttgttttgatgtgctgattaaagtagcgcagagggcatgatcagcagggctccagtaagacgctcccacgggaggagcaagaacacagaacagagggggcaagacagctccaccaggagtcaggagtgaatcccctctgggaacgaggcactaggaagaagaacttccagcccaggaggtaggtagcgttcagaagaagcctggggcgggcgcggtggcgcacgcctgtaatcccagcactttgggaggccgaggcgggcgaatcacgaggtcaggagatcaagaccatcctggctaacacggtgaaaccccatctctactaaaaatacaaaaaattagccgggcgttgtggtgggcacctatagtcccagctacttgggaggctgaggcaggagaatggcatgaacccgggggacggagcttgcaatgagccgagattatgccactgcactccagcctgggcgacagagcaagactctgtcccaaaaaaaaaaaaaaaaaaagcctgggactcttagcgcctcagagccttactcagaatcataaaatcattagaagcaatgtctgtcctcactgctgcatccgatattcttccggaccactggatcacaaatcaaaccatgtgactcccgcatgagcaggcagagtggagataacacggatcgctgtgtacactgtgtgctccggttgttgcatccgagggttgatcggatggtggttcccatccagatccaagtcctggcccctgatcacagagaaacacagctggacattaaagtggtgaggacggaaattataatatttggtgaccagtgacaggaggggagagagccgagctccgctccgagttgtgcaaagaagtggggagtggggaggaagaacagtggggactcagtggagtgaggaaagtggaaaattaccaa

SEQ ID NO: 28872 - DNA, 1050 bp, Homo sapiens
aggctgggcggggtggctcacgcctataatcccagcattttgggaggctgaggcggggggatcatgaggtcaggagttcaagaccagcctgaccaacatggtgaaaacctgtctttactaaaaatacaaaaattagccaggcatggtggcacgcacctgtaatgacagttacttgggaggctgaggcaggagaattgcttgaacccagcaggtggaggttgtagtgagctgagatcgcgccgttgaactccagcctgggcgacatagcgagacttcgtctcaaaaaaaaaaaaaaagagcttcaccactgtgcaaccatacaaggtagataagaaaaaggagttctcattttgggacagggagggcctttagcaggacgggacatgactgctgtacagtaatgatgggaaaatcccatgtaatataaggctatttctactagacagcatcacaggcagagctgaaaggcaggggatggctagggagaaaacagttgcaggcctgggacaggcacatggttgcccacatcacaccagctgcactacgggtcagtgagacaaaggcctagcagtcagtacccatgttggtgaattgttggcaagaacatacaggaggtcacaagttgcccagccagtgggggatgcccataaaaccctggcgggaacatttcccacactgcatacaccctggaggcaggtgagtggcaacaggttctggtgctagacgttagcggggacttggccaagtctgtttatctgaaagcgtcacccatggatggagcaattccacctcttgcgtctatcctaggaatgtcctcagctgctctcccactgttgtaaagaaatacctgggactgggtcatttattaaaaaaagaggtttaattggctctcggttctgcaaggtgcacaggaagcatgatcctggcatttgctcagcttctggggaggcctcaggaaacttacaatcatggcagaaggaaaagcaggagccagcacttcacacggctggagcaggaggaagagagagatgggggaggtgccacacactt

SEQ ID NO: 28873 - DNA, 1062 bp, Homo sapiens
gctgactcttgcggcagtcatgacaggccagggctccagtgggacccctcatcttcctgcatcctccccagggggccccatatcagtgttcctgggagaagagcacatgcctgcagctgtggacacagcatctgtcccctgcctacaggtgaacttgtcacccactttctgaccactgacgtggacagcttgtcctacctgaagaaggtctctatggagggccatctgtacaatggcttcaacctcatagcagccgacctgaggtgggtctgccagagggggatggcggctctgcccagcactgcctcgggggcaggcctcaggctcatcaggaagtggggttccactgggggctgtggcagcctctccagggacgttgctcctcgtgacttggcaaacattctgaggactgagcctgtcacagatgtaccaactcgggtatttgggggtgaagcccaaggcttcctgtgatggcatgagggctgccggatccctggagaaagctgaggctgtgaagaacagtcacatagagtggctctggccgggtgtcctccctcccacgggcaggctgtgcagagcagccctccgcagccctggcttggagtgactgggatgctgtgctcccagggaagctcctgttggagatgaggccgcaggaactgcggaggttttggtgttttgcccttccgtgaagtgagcattcctccctcctgccctcctccccctccaaagccccagaacttggccaatgctgttagtccggggccttctgccaggacaggcaaacgggaagtggtcggcacattgtggcgggccctgaagctgcctccttccacaagggcaggtccatgggcctctctcctggctcccgagctccaggcctgctgttcgttgagcatcccttgtgtgtggcatgcccagccctgccccacatgggtctgcacacttgctatggaggctgggagagttgcagtgtcccctaggtggaaggccgagggctggtgcggggcacttgctgtccggagccgttcttcctgcccatgccttcgtgactccaggtgg

SEQ ID NO: 28874 - DNA, 1072 bp, Homo sapiens
cagactagactcccagctgtgggagtggcccaaaccctgctgcaggccttcactcacaaaagggagtgaatggccagcccggggtacccagtgttgcctctaagtgcgggatatgaggcctgttggaggatgacaaaaggaacggatgaggtcatactgccgctgggttgggcgggaggctgcagcgggagagacttgaccaaaaggcagcctccatggcgctggcactggtgctggcccgtcacagccagtgcctctgttagccaacacagcaagtgggctaggaggaagggtgctgtccaagtgtacgggttttctccccgtgccaagggtccaggggagcttgccgtgagcccgttcctgtccgatagtcctgttggcaaggcagggtttgcatgcggtgtttggtcagctggagcagtggggaggcctacgggcagagagctcccctttgagccctttgcggccaggcgctgtgtggagcacttcccaggggttgttttgtagtctcaccgtgaccttggggtaggaaatgtgcttctggctggcttgcccagtcttagactctcttgttgtagccctctcctttgtgatgtcacccagcctcctgactttaatgccagctttccttgacatcttcacagctccagccctggcctctcttctgatttccagcctggtgtttctggccacctcttccatatctccatgtgttactttggcgccaagtagccatatccaaaccaaactcaaatcttcacccatgccaaaacattccttggcctatctaaagtccctttgattcctctctttcttacaccttcatgcagtcctaaggaggccccgtcagctcacctatttctaagcacagaccatttctcaccaccttcaagttaacatcctggcccagcctacctggtgagcctctaattctctttactgtcaccttaggtcctcactccccatccaccatctatagtttttctggacacagagtgattcttctttctttctttttttttttttttgtttttttgagacagaatctcgctctgtcgcccagactggagtg

SEQ ID NO: 28875 - DNA, 1093 bp, Homo sapiens
aacccaagtgagccttttggtgcctcggtgaccattgatggtgtgacttacggatctggaactgcaagcagcaaaaaacttgcgaagaataaagctggtaacgtgcttgcttgggtgtcaaagatacgtgctgcctgctgtgtctgcctcgctgcttggttagggaggggctgagcagtggtgacaagtgggggatgtgggtggggcatgtttattttatttatgtaatcatctactttgatttttaaaattacatgctcattggaaaagactcaaatagagcaaaatgtgagacttaaaagtagaaggcctcggccgggcgtggtgtctcatgcctgtaatcccagcactttgggaggctgaagtgggcagatcacgaggtcaggagatcgagaccatcctggctaacacggtgaaaccctctctctactaaaaatacaaaaaattagccgggtgtggtggcgggcacctgtagtctcagctactcgggaggctgaggcaggagaatggcgtgaacaagcgaggcagagcttgcagtgagctgagatcgtgccactgcactccagcctgggcgacagtgcaagactctgtctaaaaaaaaaaaagtagaaggcctctctactgagtgacagctgggccagtatgtccctccctagtcctggccctgcacatattcaggggtgtgcctagagccaactgggctgtgctgggcacatgctgtagtgcttgtttgtttttaaactgagcagcatgtgggcatgccaggagggaggagaagcgggccagcatgctgttggcatcctcccccagtggtgctggctcttaccggcactatttcctgagtcctcccactccatgtttgggcctagccacacagaacacctggcacagcgcagctctgggaaggctgtgtgtcctggcgaagacccactgcccttttggaccatgcccttgccgtttgcattcatgccctgcattcgtggtagttgacattctttcacaaaaagccatttgcctcagcgtccagggttagttggcttcttgtagggtggtgttgggtgtaccccaggccctcgcacccacaggttgattc

SEQ ID NO: 28876 - DNA, 1061 bp, Homo sapiens
agaatggtgagagaataaacctcttgttctaagccactgactttgtggtatgttgtcacaggagctccaccagggaggttgtccatgctccagagtgggctggatagcatcttcctttcacccaggaggcactctcagcttcagccaaagtcctagtctgggaaggcacagtgggcaatgtctctgcacctcagcctgctgcagcttccctatgcctcactgtgtggaatctccccatcacctcttgtttccctgtctgcctctcttgtccttcctgtgtgttcttgggttggctgcagagccagggtgatgacactgttggaagccttgctgggctgggcctctgctggccacctggggctgggctctgtgtagctgtgtggggctttggcctttggggagctgggccttttaaggccagcttttgggtctggctgactttccctctcctgtagtctcagttgtggcaatagtaaagcctctctgcaaaggtgctttatctttatagagttctgagaagggtgccttatggatcagaatcagatccaaataaggtgggcctggccagccagccatgtacctggggccctcttaggataccagactccatcccacagtgctcagggtggaagggtgctgtgggctctggagatgggcaactggacggtgaggtacggagcatgtcttgtacccggtgggttccttgcagagttgaggtatgaagtgctaggcgagctcacaagaacagacattaagcatctggggaaagccaaccgcaggcccagccatgaagaggccggtgggcctggtggggactcacaagcctctgctttgtgttgtagtattttaaccacatcagcatcgaggactcgcgggtctacgagctgaccagcaaggctgggctgttgtctccatatcagatcctccacgagtgccttaaaaggtagggtaggggggtgcctccccccatgagtcaggtcgggggagctcctctctggcgtctcatattcttgtggctgtttgtcccaaggcagaggcatggccaggtttccctgggtaca

SEQ ID NO: 28877 - DNA, 1052 bp, Homo sapiens
tgtggctggcccgtgatgccaggtggcccatgtgcccagggcgcctgcagggctgctacagggacctggtcaggaggtgcacatggtgccctgccctcacccaccctctgtgtttccccttctttgaaaaggtagaagagaaaggaatattttaaacctttttggcttaaacagaattttagcatcagaactagctttctgggattggaggcaaaccatcaaggtggtccctctccagtctggacacgatgccagcaaggatgacgtcctgccacctcctggagttaccctggcctcctagggtccctttttctgatgaagtcttaattccctaaaagcgcctctttggacactgaggccctctctgcctttcctggcctccggcaacagttttttacaaagattttttgcagtcgagtccatatgtccacccattgatttttaaagcttttgtgatattttagcattttgaaagactttcacagtgagagtagaaggtagatttggaatcatgcattttagcaagtggacttgttgaaacaggaagcaagggccttcagtgtagcccattcttgatccagagctgttgcctgtgacagcggtttctctggatgtcaaaggcagctgcctggtgcccagcttgcttctcgactggtggcccctatgggtgggtgtgcgatggaaatgtgttcctgccggagtctgaggcaccagggtgtgctcaaaggctggccctggtggtggactggcacctgtgcagagtgccgtgtgcttgtggtgcgccatctgaagcaagagtccagcgttctgccgtgtctgtcccccaccatgccccctacaggcggtactgatggcgcttttttttttttttctgtcaggaaaacaatgttggcctgtgggccgcccacaacatatccttccctcactacctgtgtgaccaaggttggcttctgttgacctttaaaaaagaaaccctcaactcaaattgctataattagacacttgcttctgtcttgcctcctgtctgcagctgtgaatagtcatttgactgt

SEQ ID NO: 28878 - DNA, 1033 bp, Homo sapiens
ttcattcattcggttcttacgtctggaaccgccactggcctctgtggcagaagctcgcgttccagcgtggggcacaggtcctagatgcgccgacccaggcggcggctttgttggctgcggtgtctggttgagtgcgggccgctgcagagccgcagtgctgtggggaacagtgaagagcagcgaaaagcttatgttttcttttccagtttgagtctagtggtgaagtcttgggtctcttacggacttctgggtgaccaaggcatgtgttctggaagactcgaacctaaaatatgattattggtgctctcttatcctctaaattgggccaggatttcatgactttcaccggtacaatttatctagttattaacttagttttctgaactgtgaaaaaattgctggcagagctgtgaatccagtgtaaatactagcagtcctgtagcgacttttttcgttttactaagcaagagcacaactatttcctaattagtcaaaactgaaagagttacattttgctttaaagtaatatttcaaaatctatttcgacccatcattgtgtcctttgatcttcacacagcaggtatcatctgcattttatggatgaggaagaaactgatgctcaaagagatgaggcagtttctgccaggccactctctgcaagtgttggcggcttgtagggtcccccatcagtctgtgcacagatctgattgatgtctgtgaatctgggggaggggccccaagttctggtgtctcactctgtgctcacatggagctgggcataaacgcagagctttcctagtgtggaagagtgggcctaatttcttgctttggggttgggcccatccttgtatctgaagtcccttcattgtcggagggctgaccactgcaggcactggttgggctctggttgtgagccagatccataggccagcagtgtaacctctttgtatctccacaggacactcatgaggaccatgatacttccactgagaatacagacgagtccaaccatgaccctcagtttgagccaata

SEQ ID NO: 28879 - DNA, 1025 bp, Homo sapiens
atgaagggcatcccatcttgctgctctgtccactggcatggcggccccactgcccttttttgccactggcttctgaggatccagggagtcccttggttgagcagggggttttaagtttttgcagcatagacttctttggcatcgtgaagcttataaatcccccacccggtgtctgttgttgttgttgttttgagatggagtctcgctctgtcgcccaggctggagtgcagtggtgcgatcttggctcattgcaagctccgcctcccaggttcacgccattctcctgcctcagctggaactacaggcacccgccaccacgcccagctaattttttgtatttttagtagagacggagtttcaccgtattagccaggatggtctcgatctcctgacctcatgatctgcccaccccagcctcccaaagtgctgggattacaggcgtcagctaccgcgcccggcccacccttaatatacaacatgatgcttgcgataacacatgaaaataggtgatggtttagttattaaaaccacttaaaaaaattctgtacatgtgcttcttgacgctttcagttaagagctggctacagtggtgggtaccagccttgtgtcttgtgacagtgtcacagcaccacagagactgtggcctgtcgcctacactcaggattgcaacaaacatcatgtttagttacacacctcagtgaaaatgaggttgtagtttttccctgttcaagttcatggaatccccccatccttgaagttgctttaagagtccaggttaaggttttgttgctctggggtgggagagggaagcagagagagtcattcctactgtgagtttcctatccaaggaagggggccaggagggatacctgggaaaggagagctgtgtgtcaccctttggtcacagagggtgatggacatctccctgaaaccactgggtggccatggctccactctgctgatgcattgccgtagcccctgtttgggagtagctctttgctgtggtgaagtgcttgcctctgttc

SEQ ID NO: 28880 - DNA, 1510 bp, Homo sapiens
gcctggcgcctggtagctggccgtttggtgccaagtgaccttgtccttgctgtgggcgtggctgccccagcagcctttccaacacggttgggagccgagcctgtggcaaagaggcccatgccccttggttgcctgagggtccgtgctctaccgctctgcccaaatgggtgcagtcagatgaaggagacagaaggccagggccgatgtcaggtggaccagtcctttcttaggtcagcaattaccatgaaatgggtcttctgtgaatcctgactcttcagacccggcagggcatgtctcttccactgctcacagctcttaggaagtcttcgctctcccttccacagatgcacagaaattcaaaacaaagtttgaagaatgcaggaaagagatcgaagagagagaaaagaaaggtgacgtggtgccatgggttggggggcttctttgcagactcactctgcatctgactatacttccaggcgggtgctttttctgtctgccagataaacattccagggtgctgtggccgcctcacgtatccagagtgatgcagctccctggggacacaggtgcttcctggggagccctgagcacttgtcagtgttgctggcctcagtccaattgggcaggcattggagtccgggcactgcctggagctcaccagaaggtgctttatgatggtcctcggtttgtctctcagagggcttggtcacctctgccatgaggctggactgcagctgtggtggcaagtgaccagatgtcactgagcagcctgaccatggtctaggcagtgcttgagtgcatccacctggcttcctttcgtcactgaatttcaagaagacagactccaggaggcggcttggccaggcaggagtctgtcccgagggcgggcaagccgctgtgggtgggtgacggcacttgggaccagcctggcgagggccatgtgcttgaatgcaccgtgcttctgttttctcactgtgctgcttgtgtttttagcaggatcaggcaaaaatgatcatgccgaaaaagtggcggaaaagctagaagctctctcggtgaaggaggagaccaaggaggatgctgaggagaagcaataaatcgtcttattttattttcttttcctctctttcctttcctttttttaaaaaattttaccctgcccctctttttcggtttgtttttattctttcatttttacaagggacgttatataaagaactgaactcaacattcaggttgttttttttttttgtttctaagtttttgccctattgaagatgacttcagaaaatccattccccagtcatgaaaatgtactgtgctaactttcttttccatagtggaaacacttatttatagtcatcaaaaatagtgaataaaaaacacatttggaacctgggccagatggcaggactgtgtgtgtacaggcccctgcgctgtgagcgccgctcgcctaagcctcccgggtgtatgtccaggcctgtccgcagcacaggtgggtgctgcacctcac

SEQ ID NO: 28881 - DNA, 1025 bp, Homo sapiens
ttggaatcttagggatgatttcgtatggggaggggccttctccccagcctgctgtcttatttttgtgccgattccccgcagcccgagctcctgcccccagcacctgcctttccagcctgtgtcctgtcttccaccagcggactccagcctggctcccactgccacgtggctgcctggcgcatgctccaccccgtgtcctcccagggtcccagtgagggcccagccccgcagtgcgcagtctccgcagccatcgagtaggcggccagctgagcagaggtgctggccggctgccagcccagcacccgtcctgctgaagttgctcctggcacgcttccggccccaggcttccctgggtggtggggcagactttgtgttgctggtgtgcaggaagggcccacgacccccacccaacatgtgagaggggcatttggcagccatgggcaggacaccaccttcgaccatcagctaggggtatgtgcaaagggcctgagtgagaaacaaaagacaaaatggaccaaatgtgcttgtgtggccgggtgtgtgaattgtgtgcaggtgagtgtggaaagatgtgtgagcacaagcctgtcagcatacacgtgtgggcgtgggcatgtgggtgagcatgcaagtgtgtatacataagtgagtgagcacgtgtgtgtggacgtgcatgttatgtggatgtgcatgtgtgcatatgagtgtgtgagtgcatgtttgatgagcatgtatgtgtgggcacacgtgtgtgtgtcagcgtgtgctgactgccatggacgtgcacctggctgagtgtggaaatgtgtgtgtgagtgtactggcagtccaggttttacacccacacggctttgcctccccaggaatccgttttaatagcagagtgggctggaagggctggccaggccctgaggcagttttcaggccagcagtccctggctcctcatatgcggtgacagcccaggaggccggggccctcagagtgcagtctttggacatgcctggttgatggatccgtcattacc

SEQ ID NO: 28882 - DNA, 1050 bp, Homo sapiens
ttaaaagattgtatattcaagacgttcactcagtatgtgatcctgcatagtaaacctcgggtgaaacaaagacaactatttttatatatttttaaaaatttagtggcatatagacttctaatattttggggggggggatattctttttttctttaattatggtaaaatatccataatataaaactgaccactcgaatcatttctaagtgagcagttcagtggcatttggcatacttacattgttgtgcagccatcacccccatccatccacagaactttttcatcttcccaaactgaaactctgtatccattaaataacaaatccccacccttccccgcccctggcaaccactgtctactttctgtctccatggatttgactacagtgtgtctaagtgggatcattcagcatttgtccttttgtgactggcctatttcacccctctgttttatacctttctgctgcgtggcgctttggctttctatgttctgcggcggtgggtggtaaagtggatgtcctgcttttaattctgagggctcgcttctcagttttcaaaaacacactttaatctctgattctccaattatcaagcatttgccatgaaatgatacttgctgctccccagcactgcagactgtgtaagagacatctcagccagcatttggattaagtcaaaccccaggaatccgcacctcctccacctcatcacccaataaaaaaggtaacgctgaggtattagaacattcacattagttccatgagcatgccctcttatgggcctgagagcacccaggctctggtgcaagccccccacagcccagggaagtgtttcaggactggagccctgctcagtgctgtgggctgcacaaggggtcaactgaggacccctaagcccaggagtggcagaggctggggaccatcccatgggctcccaggatggccttggggccacagggattatggccaggcttgtacttccaaagcccttccagggaggaaggcgctccacttcctgctttggcttaaaaaagtccagggaagcacctgat

SEQ ID NO: 28883 - DNA, 1408 bp, Homo sapiens
atttttttcgatattgctgtttgtgtgtttttctgttgccgctctaacaaattaccacaagtttagcatcttaaaacaacacacctttagccaggtgtggtggctcacgcctgtaatcccagcactttgggagactgaggcaggcggatcacgaggtcaagagactgagacccatcctggccaacacggtgaaaccctatctctactaaaaatccaaaaattagctgggtgtgatggcgcacacctgtagtcccagctactcaagagtctgaggcaggagaattgcttgaacccgggaggcggaggttgcagtgagccgagatcgcaccactgctatcccgcctagtgacagagcgagactccatctcaaaaacaaacaaacaaaaaacacacatttatcatttggtagtttctgtaggtcagaggtccaagtaggttccactaggtctcctgctatcaaggcctatcaaggctgaaatcaagacgttggcagggtgcatttcttactgaatgccttggggtggaacttgcttgcaagcccatttatgctgttggccatattcagttccttgagcttgtaggactgaggtgccctctttccttactggctgttagccaggagtcagtctttgttcccagaagctgcccgaattccttctcatgctttttatgtgtctccctccagcgagggccagttcttctgccacatctctctgatttcagctagagaaaatatcctgcttttcagggctcagattagatttagtgcacacagagaagccaggataatctctttattttaaagtttgtaattttaattacatctgcagaattccttttgacatgtaatgtagcatattcacaagttctagggattaggcacgagatgggcattctcctaccacagccgggaagagcagtttcagaggttgccttccctaggtgatgtgggtgttctcagttctcaaatttgtctgttttctctctagggttcactttctctctagggttcacgttgaaagtcgtgattcttggtgccttgatttattgtgctcatagggttaaaaaaagatttgcattagaattctagacatacctttaactcttaacttcctcccatgtttttacactgttgtttaaatttggccattttgggaaatgctttatacccaagtaatttatagttgatgaagggatagagaaagtgtcttgcttgtggcaccgtgactcacacctgtaatcccagcaccctgggaggctgagatctgggactacttgagtccaggagtttgagaccagcctaggtaacataaacaaatacaacaatcagctgggtgtggtggcgtgcactcgtagtcccagctactctggaggctgaggtggggggatcgcttgagcctgggaggtc

SEQ ID NO: 28884 - DNA, 1078 bp, Homo sapiens
cggagagaactctggagggaggaggctgaccagctgtgccctgacctctccagccttcgtcttcctgcagactgtgaagtcgcatgatcctccccatcccgtttcacacaaatgctgcctttgcccagcaaaaagataaacactcacaaagctattaagacattatccaaaagtgttgagctctctggtagagaattattatgctgttttcagtgtaataatatgtagtagcatttctgagaaaatgctgtgaattcacttttttaagttacaaagtttctttgtaaatttagaaatctggctgggtgctgtggctcatgcctgtaatcccaacactgtgggaggctgaggcaggcagatcagttgaggtcaggagttcaagaccagcctggccaacatggtaaaaccccatctctactaaaaatacaaaaatagccgggtgtggtggcatgcgttgtagtcccaactactcaggaggctgaggcatgagaatcgcttgaacctgggaggctgaggttgcagtgagttgagatcgtgccactgcactccaacctggatgactgagtgagactccatctcaaaaaaaaagtttagaaatccatatttttaaatttcagcgtttatcacatgaggggaattctgtcaattcagccttggtctctgctgactaagctgcaagggaaggggtttaacagatccaggctggccaactgcattctgccattgggaagggagtgcactgacctcacaggctgcacgccactgtctgccctgccctagacagtagagctgtacatgccagctgtctctgcccatgtgggtctcacctctcagccaggacagggattcttggccaactggggctgagcggcagcaagggcatgtggccagaacatctgggccccttggcattggagcatggggtcctgggtaccacccagttgtgtggcatggcggtcctgccaggacatacctgtctgtgggtagctgtttgctgtgaagtccacactgttgtgacaatggcatccttgtccttggttgtggcattgctcactgagctgctgacctggtgggcttg

SEQ ID NO: 28885 - DNA, 2062 bp, Homo sapiens
gagaagctgaggtgggaggatcacttgagcccaggagttcaagaccaacctcggcaaaataggagacccccatctctacataaaatttaaaaattacctgtaggtacacttgagatgctgaggtaagaggatcacttgagcccaggaggtcaaggctgcagtgagccatgattgcactattgcattccagcctgggctgcagtgagacccaatctcaatcaatcagtcaataaaattagctgagtgtggtggtacacacctgtagtcccatctacttgtgaggctgaggtgagaggatcgcttgcttgagcctggaacgctgagtctgcaatgagccacgatggagacactgcattccagcctgggtgacagagcaaaatcccgtctcaaaaaagaaacaaacaaaaaaaaggatgaagaaagatgtattgggcaattacttcaattacatctctttgttattgataaacagaccaaaaaattcatttacagaaaatttgaacaatgtaatgaacaacttaatttaagcatatgatggaacaatatgtttataaaaataaatcataaagcaagcttcaacaatttcagaaaatttaaaagtattgtcatactttttgttgttgttgttttgagacagagtctcactctgtcacccaggctggagtgcagtggcgcgatctcggctcactgcaacctctgcctcccgggttcaagcaattctcctgcctcagcctcctgagtagctgggattacaggcacgtgccaccatgcccgctaatttttgtatttttagtagagatgggtttttgccatgttggccaagctggtctcaaactcgacctcaagtgatcctcctgcctgagcctcccgaagtgctgggattagaggtgagaaccaccgcgacccgccggtcatacatgttttatgaatgtcaaataaagttagaaatctgtcacaaaataaattaaaaattttttacacttggccaggcacagtgacccacgcctataatctcaacactttgtgaggtcgaggcaggaggatcacttgaacccaggagtttgagatcagcctgggcaacaaagtgagactgtctctataaaaattttacaaattagttgggtgtggtggcatgcacctgtagttccagctactcgggaggctgaggcaggagggtcacttaagcccaggaggtcaagggtgcagtgagccacgatggtaccacttcagtccagactgggcaacagagtgagaccccacctcaaaaaaaaaaaatcttacacccatcagaattgctaaaatgaatagtgacagcctcaagtgttggtgacagagaaactgaatcactcatatattgctggtgagaatgtaaagtggttttaccttctttcaaaatgaaatatgcaactcagcagttacactcttgggtatttttcctagagaaatgaaaacctcgcataaaaacccatgcacgaattttaacagcagctttatttgtggtagcccaaatctacagttacccaaatgtccttcatgtagacggttaaacacactgtgaggtgcttgtaccatggaataccctggcagtactgttgctagaactacaacctgtatgctgaatgtaaaaagccgatcccaaaaaggttcatactgtatggttccatttttgaaatattatgtataattttgaaatgacaaaattttagaaatggaggatgctgcagtggttgccagagtttgcgggtcagggttgctgagagaggtggcaacacgagggatccttgtggtgtggggactgtgtagtgtattgactggtggtgactgaacccacccaggtggttaaattgtccagaacttagtacacacacccacacaagtgagcacacatcgtggttgtgataccttgtaagtttgtagaatgttaccattggaggaaactgggcaaagtatacaaaggatctctctatatttctttaatacagctttattgagacataattctcattagcatacaattcacccatctgaagtgctccactcggtaggttttagtgtaatccac

SEQ ID NO: 28886 - DNA, 1042 bp, Homo sapiens
tgtggctgattgcagcagttctgtgggccctttcagggtgtgagcacttcgactgatgagcaccacatgaaaggatgtgccagctccgtcagtgtctggtggtttgccaactactcagagttaatgttctaagcaaatatctttttttttcctttacactctgccaagtctcaggagaacaaagttcattactatatttttgagaggagtattaatataaaatactgttattcctagtttcattttgtatctctgcacaaagccagtctactcagtgacaggcacagaggacagagtatgatcaccaggatgaaggtagctgcatcaaggggccatttggacaactctttggctcccttggtttttgtggccttttctgtttgtgattcatgagtggaatggggcctgaggcaagtgtgggggtgaacaagaggcctcataggcagactggaagtctaggagagttgtgaggagcagatatgctcactcatctgtcacctgggagtcgacacactgcctgaccccggggactgtgcagactgaaacccttgtgtgctgcatggtggaatgtgccctggcagggtttgccctagtggcttggagatgtctaaggaagagcccgctgcatgttggaatgtgccctggcagggtttgccctggtgacttggagatgtctaaggaagagccccctgcatggtggcgcgggcctgtctcgtccttctggaggcccctccatgcagtggctccacagttgccccttttgcccaagtttgccccccacccccacttttttcttttgaagacagggtctctgttttccaggctggagtgcactgatgtgatcagacctccctgctcaagcgattctcccacctcagcctcccaagtagctggggctgcaggtgtgcatccccacacctagccaaatttttgtatattttgtagatatggggtttggccgtgttgcccaggctagtcttgatctcctgggcttaagcgatccactggccttggcctcccagaatgctgagaatacagacag

SEQ ID NO: 28887 - DNA, 1081 bp, Homo sapiens
ttactggcacctgtcgctgcctgcaccgaaggctggcagcacctcctggagcttgggacccagagcacagcctcccaccatgagatgtgttgtttttctgtggatcagtcctcctttctttctgagcctggcgtgttttgttctagtttgttaccgtcctaagtgcctgtaggccctgctctccagggacgagactcgggctctacccccaactcagaacccagagcaagagtggtcgggcccgggcccacaacagtgctcagctgtcctgctgcctttgtagttcaagaagtgtccattgatgaggggaatggtcctggctcatgctggagttcctgactcgcatccctgtggagatgaacttcctcgtcagggcggaggcctgccaagcagtccccccaggcttctcttgctcacctttgcccatttttattacgaaagaaaaccagttccttgatagataccaggaccatcagcctcaggcctggaggaggagaggaggatgatttgggttcgggctgtaagaggtgtgccactgagaaggagggatgctgtgagcaggcttaactgagctcatggttcagtgggagttgagtgttctcatcacaggctttggtggaatgtactcttgacatctgtccccaggagcctggtctccagaaacaccagctcaggccctcaaggtctggctctgatggttctgtgggctataggattctgatctgttagcgaggtgtgttcagaagtgtgttgaggacaccagtgcaggagagcaaccagtagaacagaaaggtctggaagcagcattcttggcaaatcttctagattcccaatgcccagacagacctggaggtgctgtgggcttgaacatgtgggtggcctcccctcccaggctgccccgagctgcccaagctttccttgccctggtgctccttcttgcagaggctacacgtgccctctccacctgcccaggcactgagtttctttgttgcgatcaccttgtctgttgtccctctgtcctcaaagatgatcacggaagccttggcccaaggtgggatgcacataagagcccggttcccgc

SEQ ID NO: 28888 - DNA, 1020 bp, Homo sapiens
tcacagcccaactccaacgtcaggtaggcctggcctggggtgcccctccccacctggccctcgaggctggccctgcctggaccccggctcacatgtttctctcacttggctgcagctctggccctgccccatctcccagtagcttcctgcccagcccctcaccgcagccctcccagagcccagtgacggcgcggaccccacagaacttcagtgtcccctcacctggacctttaaacacacctggtaagttgggcctgaggtgctaaggtcactcctcacctttatgaggcctcagctcatactgggtgtgcgagctctggggccctcagagctcaagttccccacccgagggtcgagggctgtggcctcacccgcctgtgtcctgcagtgaaccccagctctgtcatgagcccagctggctccagccaggctgaggagcagcagtacctggacaagctgaagcagctgtcgaagtacatcgagcccctgcgccgcatgatcaacaagatcgacaagaacgaaggtaggctgcagccagggcaggggcctgcaccctggggacaccaccaggcttgtgtcttagtgtgtaccctcttctgtcccagacagaaaaaaggacctgagtaagatgaagagccttctggacattctgacagacccctcgaagcggtgagctttgcccacagcccacggagggtccacaagggcacagatagcccagccatggatgggcacttggtgatgatgtgggtttaacaaaggcaccaggcagctctttggaccctggccagaggcctccaaggctccactctggtgtgtgctggggcttcaagcccaggcttcatcttggcccatgcccagcctttgccctattcctggctgctgctgtggccctcatgctgggccatcacagccagacctcatccagtcagcagccaggggcccagcttgcagtggcctgaccatcagctggcccagatgggcctgagcctgacctggagttctgcccctgacttgctg

SEQ ID NO: 28889 - DNA, 1093 bp, Homo sapiens
tgctgccttcaagaaaacgatacaccatggaagctctggaacccaccatggttgtggttgatgcagctgaggagagcccagatggaggaagagcggggagcaggagagactaacatcatcagcacagttcattctggaaaggcaagtggaggaagtgagtgtaaattgaaaggcaagggctgggaaaaccggcctcatcacaccctggagaaggggcacaggacactgcacccaagacacaattttaaggaattaaagagagtttttatttgtgcagtatatattaacttaaaagactgaagaaaaaatcgacacagtttgcagaatggtttcagttggttggtgctggaggaaatgtgctaagtctagaaagtgaagtttccctgaaagagataaaccgggatgacagggcttttccgtgtgcgtttagaaactgaagttcattcaagccaagaaagataattttaaaaaagaagaaactaaaagttcaaggaagatttcttgtggcaaatgtgcattatttaacatttcttttttttttttttgcgtatttgtttcaagtgcaaagatagtgtagaaataaatttcagaaagaaacgaaattacccataattccatttatgtaacgtaacaatttgtatttttatactttgtccacagactgtgtagttttgcattattgcagttccacttctgtattgtcacttgtgtgactctgtctttcctgagcttgtgcaccaggagttaggtgacccttaatttgagggtgtttgatctcccaagtactgagggaaagtgagaaccctctcctaccccgtggaagcgtctcttcttctggcccatgagcctgcgctgtgctcctccctcatccctctggatagcctcagaaccaaccccttcgttccttccacccattttccagatgaaattgttttgggtgtgtgaagcagcatttgaaggaatgtcaattaaccgctctcctggtgtttccttctaaacttagaccctgtccccagaggggctggttctgccatgagtactgatgcttacccaaagaacccacaccttcgagcctatcaccagaagatcgaca

SEQ ID NO: 28890 - DNA, 1030 bp, Homo sapiens
ggggatgcagacagaaattgaggagcaagatgacattcttgaccggctgacaaccaaagtggacaagttagatgtcaacataaaaagcacagaaagaaaagttcgacaactctgaagacagacggatttccactctattgtgatgaaaagatttgaaagatctttttttgaacttccaagaaatttcatttactattttagtatgtaaattaatgtgtgtttgcaaatgttataatagagtaggtcttaagacatttttgctgttataaggaagtgtttgtcccacattttcctagggttaacacctcaccaagttcttccagcaaaatgcttattagagtttttgtctgagcacagtagcctggccctgcatatcttgggcgtttgattaccatgctggaataagaagagttgcatttctcattttaatgagcatatggaaagatgggaacagaatttcagtcttgcagccatgagcctctatttctcattcctaagccttaccatgagtcagagtgttaagggggcctgtgaaccagtcgtttggtggaggagggtccttcccacacctttgtttaggagtcatcattcacacacacacacacacacacacacacacacacacacacacacactctctgagcacattatctgtgattctttcatcctcccagaaaggatcagtgttagaatgggaaatagagtgtgccatcttgctcttttgttggcagatgtccccgcttccctccagccccccatccttggcatgtatattagtaggagggcttcacaccagcactgctcactgcgactcctggaaatgtgtggggaattgggtgagcccctcttccccacgtgctcccatctgtaactctccatctgtgatttgcaacaggtcttccactggctcgaggctgcgaggctgaccgacaggggcgcccaatagagtttgtgggaatggagtattgcacagatgcagctgcacaatggtcttcctccacccctctgggaatcaccattaggcaggcct

SEQ ID NO: 28891 - DNA, 1053 bp, Homo sapiens
tcgaactgctgacttcaggtgatctgcccacctcggcctcccaaagtgctgggattacaggcgtgagctaccatgcctggccctcaagtttttctttggaccagtagtagtatctgaatgaactgcacctgaaggtttgtttcaatgtttgattttttgcctccctttcatgttggctataaggaaaaggagcatttgaggctgtggtgggggtcagggactgagaggctccaggtctcaggaggctgcctccacagataggagtgctggctgagcaggccttccagctttctttccttttttttttttcgagatggagtctcatttgttgcccaagctggagtgcagttgatagaatctcagctcactgcaacctctgcctcctgggctcaagcgattcttctgcttcagcctctcaagtagctgggattacaggtgcccgccaccatacccaactgtttttagtagagaccgggtttcactatgttggccaggctggtcttgaactcctagcctctgatcatctgcccgcctcagcctcccaaagtgctcggattacaggcgtgagccgctgcacctggccaggccttccagctttctcacccacacacagacctgcctaggcacaggtgcatgcctctggcctggtctatgcctcagcaccttggtgctctgggctgttaataccctgtagcatgcattgtgttttcagccttttgaggcattttcacgtccatcatagcataggattggggagctaggagtcagagtgggtgtgactcgtgtgtgtttggcagctgctcgttgagaaccttgaaagtcgaggctcccagtcagaattttaggtacctgcctgttgacctctggctctaggatgtgtgttttagaaacctgtatctagtgtgcgtgcgtgtgtgctcactggagcgagtactaggaggttgtagggaggaataccaggtattacagaagggatcacttagagcttggtgagtgggtggataagtaggtgcctgagagaggtcaggagtaggaggaaggaagcctggttaa

SEQ ID NO: 28892 - DNA, 1003 bp, Homo sapiens
ggctcatgctgcttccagatgctccacttcccattctaaattctcacaaaccatctgttagctaatcgcatccagaattttgtctgggtttcatttcaagctcactgttttacattttatggaatttgccatcttttgacaaaaaacaagagacttgacccttcctaagtcttccagtgtcctgtgatgtaatttctctatgacaggagactagtcttggactcttactgctgtttgccagtgtgtttggtcagctcttaagaacaccctttcctcatctttggtgctccttttttttttttttttttttggcattttttttcttagtgatactcagcgttctttgaggtcaccagcatcctcaacattcttgctcttcattcccataattgctctgtgtcatctgtgattgcgtttttataatttcttcttggattgtctttgccccatttcaaaacctgtagtaatttggattacatctggtctctgtgtcttttgaattggccttcccaagggcccatggtacaacttcctttactgactgacctggaattatcagattcccactttaccaattggttttgcttcattgcttagaattaaatttgtattagcattttcttcattgctgcatctgcttgctgaggtgaagtaatctgcaaagtaagtttaggtttcattaatactgattggactttgtattggactcatgatgaatccctaagagatcatcatgagttcctcctgctgggtggcctgcagtgctcttggggctgtatgtgttcatcatgaagcatctgactcagccctgggggtccatgtggcaagcttacaggctcccagtgtaatggggcttctgtccctcacctcacgtcacattctagcaacgtgaagccttcttaccaaggcttcccagaaaggcccacaagttagcattcaccttaagcaagaatctcaggtgtgtccttcccatgccgtggtggtgtgtggatgtctggtgccc

SEQ ID NO: 28893 - DNA, 1028 bp, Homo sapiens
tgctctgttgcccaggctggagtgcagtggcaccatctcggctcactgcaacctccatctcctgggttcaagcgatttctcctgcctcagcctcctgagtagctgggattataggcacgtgccaccacacctggctaatttttgtattttttagtagagacagggttttgccatgttagccaggctttgaactcctgacctcaactgatcgctcacctcagcctcccaaagtgctgggattataggcatgagcctcctatgtttagctttttgaggaactgtcaaactattttccatagcagctgtaccatattccattccaaccagcagtatataagggctcccttcttcaccgccaaaaaaaaattcttccacatcctcatcaacacttgttattttccatattttttattatagccatcctagtaggtgtgaagtggtatgtcattgtggttttgatttgcatgttcctagtgactgatgttgagcatcttttcatattggcttttggcaaatctttggataaatattttcaagttctttgcccattttttaattgggttatttgagcgtttttgttttttattttgttttatattttttgagacagagtctcactctgtcgccctggctggagtacaatggcactcacgatctcgactcactgcaacttctgccttccagattcaagcaattctcctgcctcagcctcccaaatagccaggattacaggcactcaccaccataccccgctaattttttgtatttttagtagagatggggttttaccatgttggccaggctcttctggactcctaaagtgaggtgatccacctgccttggcctcccaaagtgccaggattacaggcgtgcgccaccatgcctgaccttagttattgtatttaggctgttgatccattttaaatgactttttgtgtatagtgtgaggtaaggtttcagagtctttcttttgcatgtggaaattggtgcagttgtcccagcaaggttattctttccctgttgaatag

SEQ ID NO: 28894 - DNA, 1032 bp, Homo sapiens
gtggaggtggaaggatcacttgagcccaggcgttagaggttacattgagcagggatctcaccactacactccagcatggctaacagagtgagaccctgtgtctaaataataatgtatgggccctttggataaggtagtgtttgtgatttaatgtaaactgtctttttcttgttgcagagaaatgctaactttgtcttcttcatccatacaggttggtgacatcgtgaaagtcacaaggatgaatataaatggccagtgggaaggcgaagtgaacgggcgcaaagggcttttcccctttacgcacgtcaaaatctttgaccctcaaaacccagatgaaaacgagtgattgctgttgccctgtttcctgctgctttgttgttctgcctgtcctagtctcctttgaagtgggaaagcattttctctcataggcaagtcacactgcattgccgaagtccagctttctgcagactggcagtcgcacacacatttggaatgcacacagcggctgcctcctgatgtttgtatcatagtcgtattgtcaaagagtagccgattttagagttcttttggatcataaactggaaatactgatggaagcacacaagtggagagaagttgacatggaaagggtcttccttctcattgctgcccgtttgtacatgggactgattctgttgtgttcaccagagaaagcttgaggccatggcgagatactgcatgtttgctgttccacaaagcagtggcttagctgccatcttgcttttctttggacaacaggaagtgaaccttaaggaagagagaattctgttctaaaactccaaaatctggcttttttttttcttttgttttggtttggttttggaaaactaattaattagacttgtgtgggggtttttttttgttttgttttgtttgttttgttttgtttttttgagacggtgtctcgctgcatcacccaggctggagtgcagtggcgcaatctcgccttcctgcagtctccgcctcctgagttcaagcgattctcctgcctca

SEQ ID NO: 28895 - DNA, 1027 bp, Homo sapiens
ggtttttcacctgggaaggaaacaaattacgtactagagggcattgactggttaaaaacttgtgtatcccgggaaggacctgcggtacaggagtcagccatgtctgtgctgtgtggaaccacctgatgacatggttaacgaggaagacgatgtgttgaccggctgccgtttgaggactttggtcacccagactagacaccttctgtgctcatgtttggaaagctgaaagggaaggacagctgtgccctcctgggagctcatgtgtccctggcgctgtgctagctttcctttacagctgtttacagacaaggcaggcctgaggcagatggccactgctcttgtgatgtttgctcagaggaatatgaacattttatttttgaaaagggatgatgtggttttttgccaggtgtttataattaatcctttaatattatggttattaacctcttaaacatgaatgaattcttgattgttttaacacagtacctaagactaatgctttctgtggacaccactgagctctgcctcaactccaccctctgcgaccggaggactatgcccctagtaactgctgtcggtgtggacgctgtgctggttctgttttctaaaggagcagaaggacaggtctctgagacaggatcgttgtccctacaggaggaacagtggccttgcttcttagacggtcttcactgtgtgttttaaaacaacaacaacaacaacaacaacaacataaaactcttttgacctgtaacttaaagatcataaacttcaggcaataatattttctgtgtaagcttttaaaattatttttggggatcatagcttgttttattttgtgctataaaattaacagtattaaatgacttatattcttagaatacatcgagtgtcttttcttaacagattagtgcctttttatttttgtattccgttttacgttactggtcccagcatcaaaacccttgtttccatggcctgtttgtatattgtctcaataaaacttgcatcagccggtggtggcggcagc

SEQ ID NO: 28896 - DNA, 1044 bp, Homo sapiens
cagcttagcaagataaggcctggcgaggaggcccctggctaggcctccctctgaacgtgaaggacgtccccttcctcgtgaatagcttggtcagtgccaccagtaacagacgtggcctgcatagatctcaaataatggcagaagaccagaggggcctgcaggtcctgagaggtctggcccatgctgcccctggctgctggccagcccttgatccctgcaatggggctgcaggagagggcacaaggagtgtgagctgcaggtacagggggtttgggaagggacttgggagcttccctggaggccacgggtgcgtgggaggaagggcagggagccccaggatgagggaaattgtcaagggcctggggctcagcatggagccagatggcatagccctgccaggccaggatctgttctgaagtcttcagctaacttagcaaaagagaggacttgctgggaggtactgggaagcctgggaggtggaaggtgctggggcagcatcaggatgtggggtacaggcagctcccaggatggggactcagctgtggggatgctctgactgggcagcgtgaacacagtgacctgcaatggtctctgcacaactttactccccagagagcaggactgcctgggcgggtcagatgccaccctcctgcccatcactgctgcctgctccatggggagaggggggagctctggcaggaccctgcggtgggccacatggagccaggcagggctggtgcccgtgctggatggggtgagaggtgctcagcgcaggtgtctaggccctccctctggaccctgggctagtcaccgtaagggatgcagggggacctcccagtgaaggcctgctgtggggaggccccgagggtgagcaggagcccctgtcccagcattgattcactgttgtgtacccccaggtggacacgcatcccaactgaacacctgctccggggctccccaccacccccgcagcggcgctacgggcataccatggtggcctttgaccgccacctctatgtgtttgggggtgcggccgacaacacg

SEQ ID NO: 28897 - DNA, 1044 bp, Homo sapiens
tgcagcagcaggggcaagaccctgggtccagtggaggctccgggtggcccctctggcccccactgcccacacccagagctttaatggacagtccgtaccaagcagagccgagaggagggaagccaggggtcccagcccgtctacctccccatcccacccaggcccccagctccccgcgggggccaccgcagggcctgtgggctgggtcacgtgggtctcgctgggacctggtccctttgttgcaggcggcttggagaaagggcagtgggacgctggccacggccagggtggtgtcgggagcaggcctcaccccgctggccgtgtctgtgtgtgtgcacgtgtgcttgtgtctgtgcgggcgcgtgcagccctggttctgcagggaacaggtgctgggggtgcagatccctccctccttgagccagggtggcactgttcactggcgctgggacagtcagggtgaccccaccgcctacctctctacatctaaagagccctctgggcctgtgttgctgttattcctactgatctgttcctctgtttttctttttgatttttgttttttaaaccaaaacagacaatagcttattttctttccgccccctccggggctgagcctgggtctgaagactgaatgtaacaggggccgctggcactcctgcgcgtcccccggctctggcgctgcaggggtgtcggcgcgccacctctccaggccccagaagcccttcttgcccaaaggcttccctggtccctgagccctgcctcggctgcctcaggggagagtgcttttcctgtagtttccaaggaatattctttgtttagaggtacttgttttttattaagagaaaaaccagtgtaacgtttatgtgactgtttgaactggaaggtctggggttccggggggtggggggaggctagactcaatgccggggccgtcggtactcttgttttcatttgtgtgtgcgtgcgtgtgtgtgtgtgtatgtgcgtatgtgtgtgtctatgtgtggtgtgtgccgtatgcatgggcagatgtttcgcttt

SEQ ID NO: 28898 - DNA, 1048 bp, Homo sapiens
cgcagctctgtcgactctggtgggtccccactcctggggccccctaaccccaccccaggcagcggaaggggctgactgggtctggtccttaccaacatagacggtgcaaacactcttaacagtgttgtttttgtatcaatatgtttgtgcagtgatgaatgtatttatttctcagacttggggcgagtgagcgggtggcaggccgggctccgccactgcatgctcccgccggaccgagccccagcaagggctcctccaggattgcaaaaaaaaaaggaagagaaaagatgaacctttaagcaaataagaatctcagagactcgcagcatagccatacacctcagcctgtgaaatgaacgatccggaccctcaccaactttccccacctcaggcagccctgtgtgtttaccgttcatcaccactcgggggcaccgggccgcccacccactcccaaaatccgtcagtattcactggacctcaggccctgtgcaggagtgcgatccgggctgggccgctgggcaggctgaccccctgccctcctgcggccatcctgagttggggtgaggcctgggcagccggagggcagggctcagggagcaggaggctgcatccgtccacccccaggcgtgggggacaaaagccaaaggtgccaggccttagagcagacaagggctctcagccctggcatgccccctaaagggaccaaggtcctcctatttcccagaaccccgttggggcagatgttactgaacctgtgaatcagacgccaggagtgagggctggggagggacctaactggagcctcagtctgacattccacgccggggtgggggtgggcatgagcggtgggaactgaggctgcccaggacccccttcctaggatgccccggcttcagtcaccccactttaactttctaccaggaccccctccccctacctcaccttgctatttattgctgtaatttattgacctcaaaaatgctgcataacagacctcactggggcagggaggatccccagggctcccaccctccacttggcgggcccc

SEQ ID NO: 28899 - DNA, 1127 bp, Homo sapiens
aaactctccttctgacctgcagagttttcatctgcagaatgtcccctcctggtgcacagcattcatgtcccttgtcctcatccctggtgggtgctctcgccgcctcctttctgatcccatcctcctccttgtcctaccaaccgtctgtactcaccctgtgtatttagtttatataaatgttaatgcctggccagccgtggtggctcacgcctgtaatcccagcactctgggaggctgaggcgggcggatcacctgaggtcagaagttcgagaccagcctggccaacatggtgaaaccccgtttctactaaaaatacaaaaaattagctgggcatggtggcgagtgcctgtaatcccaactactcgggagactgaggcaggagaattgcttgaaccctggaggcggaggttgcggtgagctgagatcataccattgcactccagcttgggccacaagagtgaaactctgtctcaaaaataaaaaaattaaaaataaatgttaacacctgtagtcccagtgctttgggaggtcaaggcaggaggatcactttagcacaggaggtcgaggctgcagtgagctgggatggcgctactgctccccagcccgggcaacagagtgagactcgatctcaaaaaaaaaaaaaaaaaaaaagaccagcgggggtggttcatgcctgtaatcccagcattttgggaggccaaggtgagtggatcacttgagcccaggagtttgagaccagcctggtcaacatagtgagacttcatttctacaaaaaaataatcagccatgctgtagtcccagctactgggggtgctgaggtgggaggattccttgagcccaggatttcaagaccgcagtgagctaggatcaagccactgaagttcagcctgggtgacagagcaagatcctttctctctaacaaaaaattaaaattaaaaaatattggccaggtgtggtggctcacgcctgtaatcccagtaactttgggaggctgaggcaggtggatcattcgaggtcaggagttcgagaccagcctgaccaacataatgaaaccctatctctactgaaaatacaaggattagccagacgtggtggtgggcgtctgtagtccagctacttgagaggct

SEQ ID NO: 28900 - DNA, 1051 bp, Homo sapiens
tcctgtactgggttctgagatcccgaagggcagggatcttgacctaattcatcctggtagccccctagcctatcccagttgacccagtttggaatctccaggctctcaggggtctaagaggggacttattatggttttaaaattattactctgtttctaaaaaaaaacagaccttggaaaaaaattgtaacattaactgagtatttattaagtattaggttatttacgtaagtcatcttttcaacactcaaagttagtgtattgtcatttgtattttttataaatgaggacattgtgaggttaagtaggttaagggagttacctaaggtagaattgtggaacgtggtggggagagagaagacgctgactcttcctggctccaggatccaaattccatgcctcttgtcaggctgtctttcttactcaaaggctgcatggagcggtgtgttgtttcttaagttgaggatggaaaggctttcagttcactaggggaacaccagttatgtaatgctgatcattggctgtgagaatcaatgtttaagactgttttttttttcttttaaaggaagaaaaattattgatacaagttgataaacagtcttttcagtacatagggtggtaataaagtgattttcgttggtgaaaagttggggcttagtgcatggaacagtgccttaggcatagcaatctagcaaatgttgaatgatcaaattaattacatcttaaagaactttagatttctgttaaaaatgttttctaggacattccacagcaaagatttctttgtaacaatggactgtctgcagatagtgtaaaacacattattaaaagtagagtgatttacatatactacactgagaagttattttaggcaaagtgagtatgataaagtcttttatttcaaaagcacttgccaggaggcttaacctcttttagaagcctttttaggaattacagtgttaataaaacattaagtacattttaatttgcaagcagctaatttagcattgttggctacaaccagattgtaaccattgcttcaatcaggatg

SEQ ID NO: 28901 - DNA, 1048 bp, Homo sapiens
cctccacactccagcctggagagcgagactccgtctcaaaacaaacaaacaaaaaacaacaaaatgtggaattactggcataagccacttcgtccaaccagcaggtgaactttttaacgtttgaagacagatgtatgtcatcttcacatttctttaggccataggttcctggaccttttgattgttcctggtaggacatggtccttgctgttcttgtcctgagcagcccttatttgatgtggtcttctaaagtatggtgtccagaactggacacagcatttggctctgaatagttcagggtggcctggacgctaaacatggcacaaacgattggtcagctaaaccagtcagtttttcatgctgctgctaaggttcatgccttgtgcttggtgaaaaattaagtgtttggaaccaagtccaggtctttactggatctctaaaatatttcattctgtgacttggggtgtggttttgctatccaggatccttagaggtttggtctttaagcctgtattcgttccttccctgatatgtggtacctaactacatctctctcagcccacttcccaccagggtgacttcaggccaccagttctaaagccattcgattctcctcagctcttcttgatccagcctctgtttatccattttgtacagaaacattgtagtggctgttgagagaaaggagcatcccttttagccagggcttggggagctccttagaggaacaggcatttgagagaggctttcaatgatgagcatgttggggatgtggggctggtgataggcaggacagttagggacatccttccagaagacatcctggggaaagacatagaggggggaagtcaccaggctgacttggtaggattctgcacactgctcatttgggttgcaccaagagctttagttggaattactgggttgcaccaaagagttttagctggaaatattggatgggaggattcctacatattttgttgggggaagggtcgtctagtgctgttggatttcttttctagtttttctttttttgagacagggtctt

SEQ ID NO: 28902 - DNA, 1035 bp, Homo sapiens
gatgattaggagtcctacaagccacaaaggggaaagagagacttcccaggccagcagaagagattgtgccaatgcatggaggtcattggaattcaggggattggaatggaacagtgggtgcccttggggagctggtggaagaaaatgtttgagatagatagacagcttgactgttagcctgaggggctgaattttaggctgaaggtaggtcagaggggttaggactgggaaaatgtggaggaggaggccttagctccgtggggaccagtggtctctgcacagacagatgcaatggtgtgtgcatgtgtctgaagagcccatgctggggagggagtgctagaggttgcgggggcgggtcatggtgtcaccttttgcagctgtgggagctgaggctccaggaagggtagggaagaacccgaggctcggtgtactaggtgcgaatgccgccttctgtggtgaccactgtcttctcatcctttgcacctataggaggtgagtgcctttggggaagacggcgagggcgacgacctggacctatggacagtgcgctgctctggacagcactgggagcgtgaggctgctgtgcgcttccagcatgtgggcacctctgtgttcctgtcagtcacgggtgagcagtatggaagccccatccgtgggcagcatgaggtccacggcatgcccagtgccaacacgcacaatacgtggaaggccatggaaggcatcttcatcaagcctagtgtggagccctctgcaggtcacgatgaactctgagtgtgtggatggatgggtggatggagggtggcaggtggggcgtctgcagggccactcttggcagagactttgggtttgtaggggtcctcaagtgcctttgtgattaaagaatgttggtctatgattgcgtttcactgtgagcctgaggatgaccaggaggtgccagcccaggcccagttgatcatttcttcctcagtgcaaaacctgtctccagcccagcctgactgctgaatctgtccaaaccctttattatttttttttcgg

SEQ ID NO: 28903 - DNA, 1032 bp, Homo sapiens
ctctgtcacccaggctggaatgcagtggcacagtctcagctcactgcaacctctgcctcctgggctcaagagatcctcccacctcagcctcccaagtagctgggactacaggcaccaccactgcacccagctagtttttgtgttttttgtagagacggggtttcaccatgttggccaggctggtctcgaactcctgggctcaagtgatccacctgcctcagcctcccaaagtgctgggattacaggcgtgagccactgcgccccacctgtttctttgttaattggaattccccgtgcgtgaaagtggagtgaggaggtgtgatacgcctcccctgtgcccatcatcaactccagcccctgctgtctcccatctgtgcagttctgtctttgctcccaccagtacccccttgcatgatgctgaagccccaatttaaaaaacagttttcacatcagaaggatttttgtttgtttgtttgtttttgagacatggtcttgccctgttgcccaggctggagtgtagtggcatgatcagagcgcactgttgcttcgaccttccaggaccaagtgctccttccacctcagtctcccaagtagatgggaccacaggcatgtactaccatgcccagccaattttttttttttttttttttgagatggagtttcgctcttgttccccaggctggagtgcaatggcgtgatctcggctcactgcaacctccgcctcttgggttcaagcgattctcctggctcagcctcccgagtggctgggattacaggcatgtgccaccacacctggctaattttgtatttttagtagagacggggtttctccatgttggtcaggctggtctcaaactcccgacctcaggtgatcctcccgcctctgcctccgaaagtgctgggattacaggtgtgagccaccgcgcccagccccagctacttttttaatttttatttttgtagagatgaggtttccctatgtcacccaggctggtcttgaagtcctgggctcaagtgatcctcccgcgtcag

SEQ ID NO: 28904 - DNA, 1074 bp, Homo sapiens
cggggacaagaagtgtgcatgcggattggttcctcgcggctgggggcggggccgcgcgggccggcggaagcggcgggcttcgggaggggcactgcgacggcgttgactgagggggcgccactaggcgcggtcacgtgcattcgcggtgcattcgcgggggcgtcggtgcgggtcgcgtctcttaagacacccagggagacagacgtggggcagaactcatgggctgaagtgagagatggctggggcccaggcgagcgaccgagcagggtccgaacagagccagcgagggaccccgggctgtgcttgaggcccgacgacgcgccatatcccggcagcgccgcagctcaggcctctgcgaatctgtggtccacacgctgataaacttagaggcctctgcactggggcagaaaccgaaaggcatgacccagaccgagaaagatatttgcatactgagaaagtgtgaaacacaattgtcgagactaaaaggagacactgagaggatacgccaatcaggttagttcagatgtttgttgagcacactccatgttcctggggatccacccttatagaagttaccttttagagagaggagacagacaaatacgtgtaatgctcaagttgtgataagtacgatgaagaagtacaaagcagaagggagggcgcggtgtctcacgcctatcatcccagcactttgggaggccgaggcgggcggatcacttgaggtcaggagtttgagaccaggtctctactaaaaatacaaaaattaagtccgggcgaggtggctcacgcctgtaatcctagcactttgggaggccgaggcgggcggatcacgaggtcaggagttcaagaccagcctggccaacatggcgaaaccctgtctctactaaaaatacaaaaattagccgggcgcagtggtgggcgcctgtcatcccagctacttgggaggctgaggcaggaggacaaagcagagagtaagggattagggggtggtgggtcgaaacacatgagagatacatttgcgttcagagacagaccgagattggtacagataggcagaaatgctgacagagcagg

SEQ ID NO: 28905 - DNA, 1065 bp, Homo sapiens
gtctcaaaataagtaaattaattaattaattacaaaaattgacaaccagttggtctctatcttcaaaaaattctgctgggattctaattggaattgtgttacagttgtaggttaatctggggataactgacatatttgagtatttcaatccatgaaaacaatatgtctatccatctatttaggtcttctttattaatttatttcaccaagattttatagtttttttttttttttttttttgagacagcatctaactctacagcccaggctggggtgcagtggtgcgatctcggctcactgcagctttgacctcccaggctcaagtgatcctcccacctcagccctttaagtggctgggactacaggcacgaaccaccatccagggctaatttttgtaattttcgtagagacagggtttctttctttctttctttcttttttttttttttgagacggagtcttgctctgttgcccaggctggagtgcagtggcgcaatctcagctgactgcaacctctgcctcccaggttcaagggattctcctgactcagcctcccaagtacctgtgactacaggcatgactacaggcattcctggctattttttgtattttttgtagacatggggtttcaccatgttggccaggcctgttcatattttgttagatttatatgatatgtttcatgtgttttggagttattgtaaatggtatttaaaacatcttttgtttccaattttcagtatatagaaacactgtgaattttcctatatcagccctgtattctgcaaccttggtaaactcattggttagtttttttgtttgttttttagagatggggtctctctatgttgctctagcctgtgcaacagggaaatctcagctctaaaattcacaggcacaatcatagtgcactgcagtgttgatctcctgggctcaagtgatcctcctggctccacctcacatgccatggcacctggctagctcacagagttttggagtttttagcaatcatgtcatctgcaaatagagagaaatttatttcttcctgtccaatctgtatttctt

SEQ ID NO: 28906 - DNA, 1031 bp, Homo sapiens
ccagcctgaggatgaggctgactattactgtggtacatggcacagcaactctaagactcacacagtgctccagacccatgaggaagtaagacaaaaccctcccctctactctcctggtctagtgaaatcacccctgctggtggctctgaccaaatctagctcagggggtgacatctgttgtctcatcgacagcactggagctcccacggagaagtaggtctaacaaagtcctaccttgctcgcatttcacaggcagacatcccttgctcaggggtaaaatctctcagtgttgacattgaagaaggcaagagggctgggttggggttcatctcagctcagagtctagaagtgactcagagatgctgctggtctgagagttttaatatgagccttgggatacaatacagggatgcagatgggaattgtattctctatgtcagtaacgaaccatcagtaattgaaaagtcaatacattgagaatagcataaagcatgaaatactttaggataagtatgacaaaaattgttgttttacacactagaagtcctaaaacattgtttagacgcaggtcttaaagaagacctgagtaaatgcacagataatccttttttttttttttttttttttgaggcagagtttcactcttgttgcccaggctggagtgcaatggcatgatcttggatctcggctcaccacaacctccacctcctgggttcaagcgattctcctgcctcagcctcccgagtagctgggattacaggcatgtgccaccacgcctggctaatttttgtatttttagtagagatggggtttctccatgttggtcaggctggtctcgaacacctgatctccggtgatctgcccgcctcggcctcctgaagtgctgggattactggcgtgagccaatgcgcccagcccagataacccttttttttttttttttttttgagcaggagtctcgctctgtcgcccaggatgcagtgcagtggcgcgatcttggctcactgcaacctctgcctcccggttgaagt

SEQ ID NO: 28907 - DNA, 1050 bp, Homo sapiens
ctgagcaggggagagacagcaggtgcaaaggcgctgagcagacactccctggcccctggaggccccaccagagtggctggaacctggtgcaggagtgtgggtggggtgtcagggccaggtcctgcaggactcagtgggccccaatgaggcaggaagaccttggcagggttggagcagagaagagactggagctgccctcccaggaggagctaatctacactttgaaaagatctctctgctgaggtgggaaaataggctagggtggggtaaggctgggggccatgaggggctactgcaacatcccaggcagagaggctgctgacccaggggtgggagctctggaggccctgagaaatgcaggtgggagatttgtttttttaaagctgcagcttttaaaggacagctgcagttttggtctgaaccagtagaaagatggagctggtattggctgagaagcaagatacagaaaaacccattctggagaggtggggaattaggaggtgggtctgagacctggagagccattgatgggcacatgtggccagagggagagcaaggctggaggtggcaacctggagcccctggcactgaggtgtgtggcaggccggggaccacgtgaggtcacttagggatcaagggtaggtaggatcagaagaggctgagctgggctcctgggcctccactgtggggaggatgagttgagaagcatcgagaaagagagattgaggattgacgggcaagtgaggtggaagcacagtcacagtggcgcctcgggaggctggagaagagcgggtcccagagagcaggtcccctgtgtcaagcaggcagggcatgcccagggactgagcaatgcaggcacagctggccacatgattttgggggcccccatttgaaaattattaagggcctgacatgatggcgcacacctgtaatcctatactatgggagactgaggtaggaggatcacttgaagtcaggagtttgagaccagcctgagcaacatgtaagagcctgtctctacaaaagtaaaactaaaattatgcattccag

SEQ ID NO: 28908 - DNA, 1069 bp, Homo sapiens
tgcccaggcaaggtggcaaagccgaactgctgcggaaggcagggagcagcacgctcagctgtttctggcaggttcagagcaagggcttttcaggccattagggcctgagctagggctttagcggcagcctgttatcttgtttaaacagcccttgctgtttgaggtgccaggcttagctggtgctgttactatgagcactacagttgtcaccaggcatagttgcaggggggagggggccaccggcaagcagaggctctgacttctggactcggctggaacacacccctgccctggcccccatcccagaggagccccatctgtcgctggcctgggacctacaggcctgagtactctgtaaaatgggcccctcccaagctgcctgtgccctcctgagctgcctacatgggcagctgagcagccctgtgcgggtgggcaggagcggtggcctttcttatccccagggaaaagtcgagggcctcatgaaaacccagggcctgagagtgtctgaggacaggagttgtggccaccccaggttgtcaatcctcctgtgccactcgagagtctccacttcagccaggcaagtcctgtgaactgggggcctctgtctgcaggtggcagcagctggggtgtagggagcagaagctggggcgggagcaggggtcccaagcacagtgttccagcaagaagcaccggaacccaccaagggagcgcagcagtggagtcgggtcctgggcctctgcacacagaaccccagggggttggccgcagggtgtgaaaatcaaacccacattttcattcaccagaatacgggatcagatagttcctgatcgttttaaagccggaagagcacctgcttatcaaatgcctcttcagtctgttctgccagattgacccattgaccgacgaagccacagtgaggaaggacacagaccagctgtcactggagggccagcccagggcaaggcctgctgcgggggaggaaggcccagcccgagtcccttcaaagcctcctataggtgcccatcacccaccccagccacaccctaggcatccacagaagtggcgggtc

SEQ ID NO: 28909 - DNA, 1037 bp, Homo sapiens
tgtgtatcccacatcagccctcagccccctcacgagggaagtatgcttacatattctgtgtgtgtgtggttatttttttggaggggggacaggttcagaacagctggcagagcaggaggttgggcctgcattggccactccgcagctgccacaccggctccagcattccctcctgcctgtcctcacccaccttgttgagagcaaggctgtctgcttgcctccatccctcacacaagagcacctggagagcctctgcccagggaggtgaggaaagggagagggcagtggggactgccatgaaggcatctcagaagctggcagggctgggggttccaggtcatctgtgtcccagggatgatgctggttccaggaagagctgaaaccttaatgtcacgtgcattttatgtgaggtttgaggcccctagttgggccagctggccttgctctgtgctgtggccacagcaaactgcatggggtcctgtggagtaagggacctagtggagagtgagtggacagggagaccagatgggtcagtacagagccttccccagccatgtggccatatcacactggcatcacccacctattccccaatacaacacagtccgggggcccctcacctggctgaggtatgtgacaaggctctgagctgatggtgtacgttcagcctgagtaggtgtttgcatgtggttgcccccaaaccagtgtgatttggggctgcatggatccagagtagggaggtgacggtcccaccatctctggggtgtgtgcaagggtcagggtttgggaaggggttggacaagaccagtgtccctgaggactgcctacctgctgggagctgacatgggaatctgggagtgcgtctggcctcctggagggggtctcgggttgcccagaggggagcgaggaggaggcccagaacataccccttcctagaacaggaaggtggggtgaccctgcagggtggcctcccacacctcagtgatgcctcggtgacccctaaggcagaagatgcgtgaagcaggcatgaggccctg

SEQ ID NO: 28910 - DNA, 1141 bp, Homo sapiens
accactatactgggctaatttttaattttttttttttgtaaatacagggtcttgctgtgttgcccaggctggtatcaaactcctgggctcaagcattcctctagcttcagcctcctgagtagctggggttacagggatgagacacctcaccaggcctcttagacgtttttagtaactaaggtcacttaaacatttttaaaagggattattttccctcagacagtttttcttttttaagacttaatttttttagagctattaggttcacagcaaaattgatcgggaaatatagcaatttcccacatactccctacccctacacccccacagcctccccagttaacatctcccaccagaggggcatgtttgttacagtccatgaacctacctgcattggtgcctcattattacccaaagtccagagtttacatttgggttcactcttggtgttgtacagtctatgagtttggatcctgttatgttttaaaactcctgcttcttttagccctgggcaccttgacactctgcctagcagtttcccctgacgtgggtccatgtatggcaggcatggaaagaggaatcctcactggctcagccatctgtctctgcctgtttactgatgttctttagagggctgtggagcctgctggtctgaaaaggaacaatgaggaaaatcactcatgggggtgggtggggggaggaagtcaccctaatgctccgcagtggcagatgtggtgacccagatctaataacctcggaatcagtctgtttggatgaatggaccgtcccatttccaagttgagggcccctcaagggagggggctgaagccatccctgggcacggtgacaaagtgcttcccatagggcccctcatgggctcatctgtcgccctggggtggggctgcccatttacaggtaaagacacaactgggaagcggcaaggctgggattctgggtctctgtgtgaatgcagagctgttccgtttggcacgtggtggccctgcggtgttcttcccactaccccacactgctacctgcaaagcacaactggggaggttcagggcgtccttccagtctttgcaccctgggcccgcctgtgggggtaatgatagacggctgtgagccctgctgtaaaactatg

SEQ ID NO: 28911 - DNA, 1032 bp, Homo sapiens
ggggaaggtattggtaggactggggtgccctgtctcctttgtccccatgagtgcaggggatagatctgaaaggagaggggaaaatggatgttttcttctttgtctctcctttctccctgctttcaagtctgtgaattaattggagtcattcccaagggaggagggtcactttattgaattttaagacaaggcggggccaggcgcgatggctcacgcctgtaatcccagcactttgggaggccaaggcgggcagatcatgaggtcaagagaccatcctggctaacacagtgaaaccccgtctctactaaaaatacaaaaaaaaaattagccgggcgtggtggcgggcgcctgtagtcccagccactcaggaggctgaggcatgagaatggcatgaactcgggaggcagagcttgcagtgagccaagatccaccactgcactccagcctgggtgacagagcaagactgcgtctcaaaaaaaaaaaaaaagcaagacaaggcatatgacagggcatgatactgacgagaccttggacatcaaaggctggagcaggacttcctcctagggaacatcctcagatatgtagatgtcaccgtgtgggctcagacatccagggtggaccagagccggtggcttaggtctggtggtctgtccctgactgcacttttttcagagctgttttggtttgaagctcaaagcgggctttttatttatttatttagagacagggtcttactccgctgcccaggctggtgcagtggcacactcacaactcactgcagcctcaacctcctgggctcaaacagtcccctcatctcagcatctcaagtagctgggactacaggcatgcaccaccatccccccaggtaatttttaaattttttgtagagacaaggtttcactatgttgcccaggctacaagaggactttaacttttttttaattaaaaaaaaattttttttgaaacaaggtctcactctgtcgcccaggctggagtgcagtggtgcgatcatggctcaccgcagccttgacc

SEQ ID NO: 28912 - DNA, 1045 bp, Homo sapiens
aaggagctggtggttgctgctcgccaaggggatactcagacagccaaagcctaggcaggatcagaagctcaggcagcagagccaagatttgaaccaataatttttttttttttttttttactttactctacagtattgggattggctgaactttccttaaatgaccagatagtaactaattttatgtttgtggctgagaggcaaaatcgatgctactttgtggatacttacataaccatttggaatgtgagcatgtgaaactataaagagcattcttaaggcctaggtcacatgaaaacaggtggcagtgggctggatttggcctgtgggctgcagtttgccaacctgtgtttcacagcgagctgcctccaaatgcctggtggtgatgcaatcgatgacagagccaggtgtgggcgtctcacatctgtgctcaggagctcacaggagcttctctcctatagaacctgtgaggcaggtagggtagtcttccaaaccccatgaggattctttcctcagagaagttgccggaggaggaaaagctggatgagagatggtcacttggtttctaacttccctttctcttccctgtttcctgctgcttcccagggctgaatgaatattccctgaaacaaggctggccatgagctaataatcgttgaagccaaatgatggggtaatgggcattcatgatgctgtgctcttacttttgtatttgtttgaaattttccaggataaaaagctaagaaaataggctgggggcggtggctcacgcctgtaatcccagcactttgggaggccaaggtgggcggatcacgaggtcaggagatcgggaccatcctggcttacacggtgaaaccatgtctctactaaaaatacaaaaaaaaagtagccgggcgtggtggcgggcacctgtaatcccagctactcgggaggctgaggcaggagaatggcatgaacccaggaggcggagcttgcagtgagccgagattgtgccactgcactccagcctgggcaacatagcgagactccgtctcaaaaaaaaaaa

SEQ ID NO: 28913 - DNA, 1067 bp, Homo sapiens
cctccgccttcaaatggcctcctgtatgcctgtgtcttctgtctctttaaagatatttgtcattggatttagggtccatcagtgtgatattgtgatataagaaacctgtatgtggtcttccttctggtttctggcacaagctcctaaaatcattgtaattttctgaacgatggggtgataggagcatcttttgttattcatacaagcccttttctgtgggacctgaggttatgctaatgaggtgatgcttgaggggcccctagatagctgtgggacggggctggttgccagaggaaccagccacgtgattagagggttggaactttagctccacccctgaactctggggatggggagaggggtggagattgaattgatcacccgtgtctacagccatgccagcctgatctcggctgaactgatcatcagtggccaatgatttagtcttgcctacctagtggaacctccatgaaaacactacacagtgaggttcagagagctttcacgttggtgaacacatgaaggtgctgggagggcagtgccccaagaggccatggaagctcccccacaatacacaccctgttacccagccctcttccgtttggctttcgtgagtggtatcctttacaataaactggtaaatgtgagtaaaaggttttcccgaattctgtgagctgttctagcaattttttttttttttttttaagatggagcctcgctctgttgcccaggctggagtgcagtggcgagatctcggctcactgcaacctcccgggttcaaatgattctcttgccttagcctcccgagtagctgggactataggcgcctgccaccacgcccagctaatttttgtgtttttagtagagacgcgatttcatcatattggccagactggtcttgaactcctgaccttgtgatccgcctgcctcagcctcccaaagttgctgggattacaggcatgagccaccgtgcccggctctagcaaattattgaacctgaggagggggttgtgggaacaccccatctccactcccagctttagagtcagtaggtcagaagtacaggt

SEQ ID NO: 28914 - DNA, 1052 bp, Homo sapiens
aaacaggagctgcaggaaggccctggaggagggaagtaccaccagtgcaggcttgaggctgagagatggtgaggctcgggcagaggagaaccaaggtctttcagttgatgattaaagagttggagaacaggctgggcatggtggctcacacctgtaatcccagcactttgggaggccgaggcgggtggatcacttgaggttaggactttgagaccagcctggccaacatggtgaaaccccgtctccactaaaaatgcaaaaattagccaggcatggtggcaggtgcctataatcccagctactccggaggcggaggcaggagaattgcttgaacctgggaggcggaggtggccatgagctgagatcacgccattgcactctgcactccagcctgggcaacagagtgaaattccgtctcaaaaaaaaagagttggaaaacagttggagaagccagaccctgttggcaaagtttgcaaggggtgctacggagagggaggtgcccaccccaggggtgaagacaggatgggtggggttctcagctccactggacaccaaacagaagctgtaagtgcaaggctagtgcccatgtcgagggctgggcctttctgggcccttcataaacattggcaaacaaagcttgggttctcggcttgtctgggccaagttctaattccttccaggagcgtgggcacgttgcttacctcttagctgtttcttctccaggaagtggtggagctggagcctgctgcatgggagggttctgtggagtgagatgagatgttttacgtcatgctcttttcacaccttcttggcacccagaaagagctcagcaaacattagctgctaccagccaccctgactgtggctgtcagccagcattgttcttcccaggccctgccctaccctcctcctggcatagtgtctctcagggcataggaaactttctcggccagattggccatgggaggctttcttggggaccagagagtctgcagggagggcaagtcaagagcaggtgagagggagggaagggcgagcaggacccttgacct

SEQ ID NO: 28915 - DNA, 1074 bp, Homo sapiens
aatcctcagaacataccaccagactggtctttctcaccccatcatgtttaaggaaacagaggctccaagaaatggaggagcatagccagcatcatcgtcacagagaaggagaagggtgggctcgggacagtgaagatgcaggctgtcctggccacccttgctttctgcgggctcctgtggggatgatgattttagttattcaagaagacaggtggcgtttcttccaactggtgtttcccacctgggatgtgggggggctccccaaagggagtgttgtcctgccaactggggcctgctgtcccactgccctgccccgctctgaagcacacacagggacccatgcccacacggggttacttgcaccaggacacacacaggcctgacacgcacaggacatgcccttgcatgggaacacacacacagaaacatggagatgcacacagtgagacacacgggcacacacctacccaggccacaggcctgtgtggggttccacgcacgagggcacgctcaggcactcacactcacacaagaatgaacacacctggaaacatggagacacacagggacacacagacgcagagcacataggatcttcccctgtgcccttttcatacacagactcccatggccccggggagccaaagtgtggtaccgtccctgtcccggggccactgaggccctggccctctctgtcccacagctccagctgggactgtttgccctagttgagatgctgagccttggggacagtggtttccagccacgtggccttatgccggctttgggatgcagtcaggattgtgaccccggcccacccttgccgtgtgccctggaggacgactcgggtgggctatgcaggaagcctgtgctgatctcaaggccaactgtcctgtactccaggccggggaccaggctgctgagcgcttccgagagggacatctcctgggcagggagtgacataggccacgccatgtgggcctcccagccatgtgctggtgctgtgtgggctgggagggcaggcaggggccgagtgacggggactgcagagcggggcctgagatgctgtgacat

SEQ ID NO: 28916 - DNA, 1041 bp, Homo sapiens
aaacagtgtccacgggggagaaagaggccaggctggtgtcgcagagcgccaatggcatagtcaccaccactcctccgacttacttcctcctgggatcccacaaacaagccccccagctgggagcctggacctccagggaccagggcagccgccacctacttggcgtgagtcatgaatgcccttcacacagcaatcagattccttcctgtctagccatggttcccacccatcactcccactgacacagggaccaggggctggagccagatagtgcctgctccatcgcctcctcacaaacgacagataaggatgagaacagcagcaaacgctgaccccccacccgtgagagcataagtcactcaaccgtcaaggctgcatggccccccccaccccaatttaattcacctgtgagagggcaagtgcctggctcagcaatttctagtgcatgtaacagtacttgctttgtgccaatatgtattttactatatatatataaactctagatccattaaacaatgtattattacataacttatagaggtatgttttatgtctctgtctgggtactggagataccacagagaatgaactggacaaagccctgtcctccacgtttactttccagcagcagagacaaacataagccaaaataaagatcacgtcacaggggacgtgatgggagtcggaggaggtatggtcaggtaaggcggataccgtcatgaaggcaccaagaatcctcatttgtatttcaaggattatctgagggccacgtaggtcttgtccacacagccattcacccattcaggggggtctctgatgtgcctggggggcattccgagatgaatgagacatgcatggtccatgtggcagaggcaccaataggagagaaacttatgtatgtagcctcttaaacagacttggagaggggcaggccccagggggtctcttgcagcaggaacacaaaatgagtgatgtttgttttgaaccaatatttggggaagatatgaagatgtaaacatcatgaaaatgtaagatcacatg

SEQ ID NO: 28917 - DNA, 1084 bp, Homo sapiens
agaattggcccatgggctggagtttgatgaccccagctctatgtcagtctattttcaaataatcttacactagttaacatagagcattttaaaagtatttttccattttttctttttatgtaatttttgcacaaaattttttttgtgaaattatgttttcactttagagagtacattatcttctaaattaaaatgattcaaaaatgcttgttgaagtgtattcacgtatttaaatacatgaactgtattcacgtatttactgcttctggcagtagtgttccttcctttgtgttgatccagatttccatctggcttttttttttcttttgcaggaagcacttccttaacatttcttatattgttgtcctgccactaacaaattttctcggcttttctttgtctcaaaatgtctttatttcatcttcatctttaaaggatattttcactggatatagaattctgtgtcgacagtcattttttttaagcatcttaagaacgtttgttttgttgttttctggcttgcatgggttctgacaagaagtctgctagtagtcttatctttgtactttgtatataatatacaccccacccccagctgattttctttgtatttatcctgcttatggttcattgagctccttggatttatggatttatagttagtcagatttgggaaattttggccattgtttctttaagtattttttctgttcccctcccctttttccagtactccagttttacatattttaagtcactaatattatcctaattactgaagctttgtactttttgttttttggttctcaatcttttttctgtgctttaatttggatagtttctgttcctgtctttaagttcactgaccttttatcctggagtatctaacctgcccttgatttcattcagtggagttttaaaatttcatttgtttttcatgcctaaaaggtctatttggttatttttttcatatctttggtttctccttcatttttgtagtctgttgctacgtaacaactttctccagaagttagcacctaaaacagcaggcatttgttgtctcgtgaagtttttgaaattcagg

SEQ ID NO: 28918 - DNA, 1158 bp, Homo sapiens
tgagatggagttttcactcttgttgcccaggctggagtacggtggcatgatgtcggctcactgcaacctccgcctcctgggttcaagcgattctcttgcctcagcctctggagtagctgggattactggaatgcaccactatgcctggctaatttttttgtatttttattagagacggggtttcaccattgtgcccaggctggtctcgaactcctgacctcaggtaatcctcccgcctcggcctcccaaagtggtgggattacaggtgtgagccactgtgcccagccgggagtgccctttctgtaaagcatcctgacatcaaacttttttgttctctggcccattaataccgcccctgggaatttgtcccaaagaaacattttcaaagaacaaaatgaatcagtaaacccactatatgtacagagattctctgtagcattgtgaataatactggagaatatggagtcgcttaagtatccagcctttaaggaaaggctaggttagtgacgggtcagccacttgaatggacaaaggtgtgacccatacatggtataattaagtagattctgcagtgacccgagacgggtcctgtgggtgagacgtgcagaatacaagattgtacccatctaccttgtgcattcagctctcaacaaagtatgcatttctctgcacaaagcccaaggagcattaagaaaaaggattattgttcagagtgatgtggttatggaaaatcttttttatgattcccctgaaaggtggcacgcctccaggctggccagtgttacagacgtgtgctttgcagattctttttcccccaagggatgtggtaagaacataaggatggcttggccttcccagggaagttgcagaaggaaattgtgtacatatggagggcactttaattctgcacatgtcagctgggaatcttttatggggcgataaaacagtttcttggtgatcatgtcgtgaggaacagctgcaggagtggaatcccgttgccctggaggtcaagtctttaggggtgggggctggcagaggtttgagggaagtggctttggctggctccacactactcagtcagcccaataaggggacttatggcaccctccccatcctgtcatcggacaatttgagcagaggctgggtgccctctctcag

SEQ ID NO: 28919 - DNA, 1060 bp, Homo sapiens
acaacttccgcctcccaggttcaagtgattctcctgcctcagcctcccgagtagctgggattacaggcatgcgccaccatgcctggctaattttgtatttttagtggagacgggatttcaccatattggtcaagctggtctcaaactcctgacctcaggtgatccgcccgccttggcctcccaaagtgctgggattacaggcgtgagccaccgcgcccggctgctgtttctcttaacatagaatctagcccagcataggaacttagtgttccaattggatcagtccatgctctgtctcgttacctttctttgggcaacacatagaaagttctggtttgtttatacccccgccctgttccagaaaggatgcaaggaagcttaccataagtacactgggcccaaatgactaaagcaaatgaaaacggagtggttaggaaaaactggataaagaggaaatgttcaagttgaagagggagctcgtactcagcttttatttggtgaacattgctgggagttgggcgtggctctgggcctttttagaaccaggcagaatgagacgtgaaaatcatttgcatactcagtgtggtcaaggttagcagcagcctgtggctctgaagaagtagaatcacacgtggtcctggaatctgagatttcctacagccctcaggaagagggcacagtatagtaaggaagaccaggatcgtccatgaactccacagtgagtttcactgggctgttcctcctaggagttctaatgtaaaatatgatgcccactgaaagtaatttagaacaaagtcttaaccagtggagaaccaaaatagtgttgttctgcgaactcttcctcagctctgggtggtatttggcatttgtaagagctgtgattcttaattggtggttagatgccatgccaaaattgttactgatttgctttgaaatttcagatcatcttaaaggtgggcatgagagtctttatcacagagggattaaatatgtgaagtagcagtacttgagtagcacgaatgaagtgtatgttcagcccaccttcagaatcaggattggc

SEQ ID NO: 28920 - DNA, 1051 bp, Homo sapiens
gctacttgggaggctgaggcaggagtatcacttgaacccgggaggcagaggttgcagtgagcagagattgcgccattgcactccagcctgggtgacagagcgagactccaactcaaaaaaaaaaaagaaaaagtaaactatcccctgcagaccttccctaaaagagtggctaaaagaaaggaaatgattgccggcatggtggctcccacctgtaatcccagcactttgggaggccaaggcaggcggatcacaaggtcaggagtttgagaccagcctgaccaatatggtgaaaccccatctctactaaaaatacaaaaacaattagccaggcatggtggcgcacgcctgtagtcccagctactcaggaggctgaggcagaagagtcacttgaacctgggaggcggaggttgcagtgagccgagatcacgccactgcactccagcctgggcaacagagcaagactctgtctcaaaaaaaaaaaaaaaaaaaagaaagaaaggaaaagattaaagaagaaacattgagacatcaggaaggaacaaaagaaagcatgataagaaaaaatgtagataaataaaatagactttcctctcctcttgggtttaacaaattatgtttgacagttgaagcaaaaattgtaacagtatctgatacggttctaaaggtatgtagaaagatttaaggctttaaggctgggcatggtggcttatgcctgtaatcgcggcattttgggaggccgaggcaggcggatcacctgaggtcaggagttcaagaccagcctggctaacatggcaaaaccctgtctctactaaaaatacaaaaattagctgggtgtggtggcgggcgcctgtaatcccagctactcgggaacgggaagctgtggcagggataattgcttgaacccgggaggtggaggttgtgttgagctgagatgacaccattgcactccagcctgggcgacagagcaagactgtgtctcaaaaaaaaaaaaaaaaaagatggataaagataaaacgttaatcaaaggaaagcaggagtgacaatgttagta

SEQ ID NO: 28921 - DNA, 1056 bp, Homo sapiens
tagccaggaatgtctcgaactcctgaccatgtgatccacccgcctcggcctcccaaagtgctgggattacaggcgtgagccacagagcctggccttctgttgctagcatttaatagtgaaaggttgcatgctttctgccagagaccaggaacaagccaaatatgtctgctgtcactattcttattcaacatagtgttggaagttctagctaatccagtaagctgagaaaaggaaataaaagacgtgtagattggaaaggaagaaataaaatcctatttgcagatgacatgattgtccgtgtagaaaatcccaagggatctacagaaaacttggagaactaataactgaattccccagggtcacaagatacaagggatacaaggtaaacatgcagaaatccattttatttctatatgccattaatgagtacctagacacaaattaaaaatacattaccatttatcatcactcaataaaaaaaggaatacttaggtataaatccaacaaaacatttacaggacttatataccaaaaactataaaacactgacgaaagtaatgaaggaagacctaaataagtagacatatcatattcatggattaaaagactcaagatgatgtcagttttccccaaattgatatacagatttaatgcaatttctgtgaaaatcccagcaagattttttttgtagataagatggttctaagatttatatggaaaggcaaagaaactaaaatagctaaagcaatttatttattattattattatttttttttgagatggagttttgctcttttgcccaggctggagtgcagtggcatgatctctgctcactgtaacctccaccttccggtttcaagcgtttctcctgccttagtctcccgagtaggtgggattacaggtgcccgccaccatgcctggctaatttttgtatttttagtagagacagggtattaccatgttggccaggttggtctcaaactcctgagctcaggcagtccgcctgtctcagcctcccaaagtgctgggattacaggcatgagccaccacacccg

SEQ ID NO: 28922 - DNA, 1062 bp, Homo sapiens
aagcacgtaccaccatgcctggctaatttttaaattttctgtaggaaatggagtctcggctgggcaccgtggctcatgcctgtaatcctaagactttggagagctgaggtgggcagattgcctgagctcaggagttcgagacaagcctgggcaacatggtgaaaccctgtctctactaaaaatataaaaaattagctgggcgtggtggcacgttcctgtaatcccagctactctggaggctgaggcatgagaattgcttgaacctgggaggcggaggttgcagtgagccaagattgcgccactacactccagcctgggcaacaggctcttcccatctcactgactctgtctcaaaaaaaaaaaaaagaaaaaagagaaaatggagtctcactttgttgtccaggctggtctcgaactcctgggctcaagcaactcttccaccttggcctcccaaactgctgggattacagacatgaaccactgtgcctggccagagctgggtgtttctgtaaggacgtcctttgtcttgatcctggaacatgactgaaggaaaacaagaatctttggagccatggcacatgaggaccatctctctcctcagaaagagtgccttaggttagagcagcatcttccagatattcttggcaatgctgggaccaaagcccaggcctggctgcccttgccagggcacctggcccaagtcggctttgcccagttccagcaggggttggggggcaggggaggaagctggggacatggtgctgctgcagtttgagccatcagaccctgtggcactgtccaggccccgtccagagagtgcatggggtgagatgtgagtcagggctggggaggtgggcaggggcctggccctgctgtgcacctgcttgggagtcctggccccgtcttagctctgtgagtccacctggagtccagcactcctcactaccccaccaaggccactgccagatggctcccttcctccctccccgccttccagtagaggtctcagcatggcagctcagcccatgtctcttgtctgcccaaaataccgcagaagcttcc

SEQ ID NO: 28923 - DNA, 1027 bp, Homo sapiens
gggcacagacaggggccaaagctttctgaggattctccatctatagctggaaaagtcattcctctcactgcctcccctcctcgtagcgagaaccctctgcccacagtggagattgccatccggaacacgggcgatgcggaccagtggtgcccactgctggagactctgacagacgctgagatggagaagaagatccgcgaccaggacaggaacacgaggtacccctggccctgtggtcctgggctctgcccacaggcacctggctttccaggcagaggcagggccattgcctttcccagtctcccatggtctctgagacagagtacctctagtgctgctagaggcaggcaggcttctgggtgataaggccccatccaaacgccagggtatgtttccctgcatggaacaaacataattcctcaggctgagggtctgaccacagcccagatccaggttttggggtccctggagtgatgagcagggcctgagtggcagacaggcgaggctgagagaaggctgggtctgaccctgctgggggcccacatcctgcctctgttcccacccctacacttggctgccctgtagagccttgggaagggcagcgcccaggctgggagctggccccgactcattgccctccccactcctcttccaggcggatgaggcgtcttgccaacacggccccggcctggtaaccagcccatcagcacacggctcccacggagcatctcagaagattgggccgcctctcctccatcttctggcaaggacagaggcgaggggacagcccagcgccatcctgaggatcgggtgggggtggagtgggggcttccaggtggcccttcccggcacacattccatttgttgagccccagtcctgccccccaccccaccctccctacccctccccagtctctggggtcaggaagaaaccttattttaggttgtgttttgtttttgtataggagccccaggcagggctagtaacagtttttaaataaaaggcaacaggtcatgttcaatttct

SEQ ID NO: 28924 - DNA, 1051 bp, Homo sapiens
aattggggtcttctgcaggggcatccaggagcagctttctgtggggaggggcccgtgttgagcacaggccagcacaggtccccatcggtggggatccttctgagggtggggagagggagggagggctctcaacactcacaggaagccaggggtctgcaggagcctcttgcctccaggctggttggggaagacgtcctccaggaagtagtagatatggcccaccgcaatccctgtgagacagccacggactgtggggtcaccctccacagcccagagtcctagaccagcagagcctgccccaggcccccatccacagcctggtggccctgcaggccccacagcatgagtgccccaaagccttgcacagagtgccagccccgggttggccgtgaaggacaagcttaaaaggcccagaagcaggcaggacccagggaggggagggcctgagaatagtggaggagtgggagccatggggcaggaaccctgaccctcccatcctcactcccatcaggaccgtgcaagcatcagtagatccgtcctgacgatgcaaattatgtgggccggctggcttgaggggctgtaagagcacagcagctgggagggcaggaagatggggatggagccaggtgtgaggagaactccagcaaggatgggagaggggccccagggcataagcagcgtgtcctgaggggagtggccagcctggggcggactagatgtaccgggaggctcacccagcaggtccacgaggatggagttgcccagcagcagcgagaagcccatgagcgcccaaggcaggaacggtgcctggaaagtgagcaggccgaagaagttgaccctcacccgagggctgcggcggctccacacgtacaccagcatggccatgagggcctggcccaggaagaacaggctgcccaggagtcccagcagctgggccagagtcaaggtgctccggtgcaggcctcagcccaagcccagggcccctctgacttcccaagaccctggaattcttcccctcatctcccctatgtgctattccctcatcaagatg

SEQ ID NO: 28925 - DNA, 1011 bp, Homo sapiens
tgcaaaatcacacagcaagcagtgtgggtgcagggaggggtgaagaattgggtttgataatgtgctgcaatagtcatgtcctgtctgatatgtccgcagaaccctgcgtttctttctaaagccttttttcatccatggtggcaacaccgcaacagccctgagaaatgtcagggcaaggaagatcatctccatctgaccagggaggcaaacagagacagagagattgagagagacagaggcagagagagagaaacacacacacacacagacagacacagagacagagagattgagagagacagaggcagagagagagagaaacacacacacacacagacacagagacagagagattgagagagacagaggcagagagagagaaacacacacacacacagacacagagacagagagattgagagagacagaggcagagagagagagaaacacacacacacacacacacacagagacagagagattgagagagacagaggcagagagagagagaaacacacacacagacacagagacagagagattgagaggcagagagagaaacacacacacacacagagacacacacagagacagagagattgagaaagacaggcagagagagagagaaacacacacacacagacacagagacagagagattgagagagacagaggcagagagagagagaaacacacacacacacacagacacagagacagagagattgagaggcagagagagaaacacacacacacacagagacacacacagagacagagagattgagagagacagaggcagagagagagacacacacacacacagacagactcagagacagagagtgagccaagaaggaaaggaatggtgggatggaggggggcgtccctgtagggggaccaaagaggggcttggggacggggagctcagtaccctcctccctggctcagcactacggcggctccggggctccggggacttggcaggggagctggaggagctggaggagg

SEQ ID NO: 28926 - DNA, 1034 bp, Homo sapiens
cagcaggatcctcatgtcacctggcaggaggagggacagggaagggtccctagaagtgaccttgagttgcacttagtgctcttggcagagggaagggcttgggctagtgctggaggcatgaagatggggtgtgttcagggctctccagcagtccaggcatgggaaggggacgctgagggccaaaggcggaggtgacactgggaagggaactagcaaggtgaggactggcttttggccatgtgactgaattgcctgtgtggtgcgtgtgtatgtgtgcgaatgtcagtgaactgtgtgtgagtgaattgtgtgtttatgtgtgggtgtatatgtgtgtgatgtgagtgaactgtgtacatgggtgtatacgtgaattttagtgaattgtgtgtaaatgtgagcagtgtgaatttgagtatgtgggtggataagtgaattgtgattttgttggtgtgaattgtgtgcctgtgtgtgacggggagtatgtgtgtgtgtgagtgaactgtgtgatgactatgaatgtcagtgaatgctgtgattgtgtgtgtgtgtgtacgtgtgtggggatttggtctatatgtgtgaatttgagttgtgtgactttgttggatgtgagtgaattatgtgactgggtgtatatgtgtgtgtacacgagttaactgtgtgtaaatggtatgattgtatatgtgtgtgaatgtgatgaatcgtgactagatgcgggtggatgtgtgtatgtgcatggtgtgtccatgagtgtgtaagtgtgcaggtggcacagttgcaacaggagagaagacacaggaagccttacctgccattcatccccccagctgtcctcccagcctggggacccctgggctggaaaggttatgaaaagtggtgctactgccaggaaggggtgatggggcagctgggaggacggtttgagtcttgccaaagggagggagtcgaagcttgcaaccctggggaggaggaggggcagactggggaccctgcttctggaaaaccagcgaccaacccccaaagggacacag

SEQ ID NO: 28927 - DNA, 1050 bp, Homo sapiens
ttgtttttgttttggagacagagcctcactctgttgccccaggctggagtgcagtggctctgcctcccaggttcaagcgattctcctgcctcagcttcccaagtagctgggattataggcacatgccaccatgcccagctattttttgtatttttagtagagatggggtttcaccatgttggccaggctggtctcgaatccccgacctcaggtgatctacccaccttggcctcccaaagtgctgggattacaggtgtgagccaccgtgcccggccagcatattcttgactgtcatatcatcagtgtgaattgtgcctttgttacatttaatacttttgggcttgaattctactttgatgtctatccctgtgctattttttttaacaaattgtatttccttttattagaatttttttatacttattatgtttaattaaattatttgaccttttttggagttatagttctgtgacttttgacacatgtgtagacttgttaccaccaccatcattaccactatcaggataaggaacagtccattgcttatggcacccctttacagacaccttcctttaccccgggctgcccctgatgtgttctccatcactatagttttgtcatttcaagaatgtcatgtaaatagaaatataatagtgtacaaccttttgagactggcttttctcacttagcataatgcctttgaaattcacctcagttgtttcatatatcaattgtttgttccttcacattagtagtagtattccactgtatgatatatcacagtttatctactcacctaatgaaggatatttgagttgtttccagtttttggtgatttgagtggagctgtaaacatttttatacaagttttgtgtgaacatttctctaggataaataactaggagtgagattgatgtatcatatgctagtgtatgttgagttttataagaaactgttttctagcatggttgaaccattttccattcctatcagcagtgtatgattcttccagttgctctgtgttggcattatcagtttttaaaaaaatac

SEQ ID NO: 28928 - DNA, 1051 bp, Homo sapiens
tacatacgttagttttctagatggtatcccccatatgtccgtatgtctctattcatttttctttattctttttatttttctcacactggataatttcaattgcctttccttcacattcgctgaccatttatttcgcctgctcacatttgtttttgaattttcagttgtatttttagtcttcagaatttttgtttgatttctttttagaatttctgtctctttagtgataatctcatcttgttcttacattattttccttatttcctttattattttgttcatctatcctgatttcctttagttgattcagtgtatttaggacagttaatatttttgactagtaatttcagtgtctggtcaggaatattttctatcaaattcagtttctcagggatggtttctatcaaattcctttttcctgtgaatgtgccacattttcttttttctttgtattctttgtaatttttttgtttagaattgtacattctaagtattatagtatggataatgttggaagtcagatttctgactttttcttgttgagggctgcagccatcaatttttgactttttcaaactatttttgcaaaatgtattccttgttgtttgtgggcactgtagattctgttccattatttctttggtcagccagtgacctgacaacgatttccttaaatgtctgattcaaaaggggggaaaaggtgttccatctctttaaatcttctgatagaagccacctgtgaaaacatcgatagcctgagaaggccaaaaccaaggcaagtatataccagttctacagggatctgccagaccaaccaaagtgcacaaacccacatttttgtaggtttggaaccagccagccactttaggaacatgagctgctatccctatagccgtgagtggtggggccgaggaatgggggatggtagctgagtcaagttattcttttaccaaatatcagcagcctctgctcatcaaacgctctgctggttgttttaagtgttcagtcaggttgcaaagttttgttttgttttgttttgctttgtttgaga

SEQ ID NO: 28929 - DNA, 1046 bp, Homo sapiens
cagatattcagattgacaaaatatatcaagacaatggggaaactgaggcaggaggatcacttgaggctaggagtttgagacaagcctggataacatactaagaccgtgtctctacaaaaaaattgaaaattagctaggtgtggtgatgtgcctctgtagcctcagctactcatggagctgaggtgagaggattgcttgagcccagaagtttgaggatgcagtgagctatgatcacaccactgcactcttgcctgggcagtagagtgagacccagtctcaaaaaagaaaaattttttaaaaaaattctaagttaaataacttggtccctgtaactttttatatgccattatcactctagatcttggaaacgtgcgactccaggaaagatgagctggcattacttgtcagttataagatagtcatggcacttttgccatttccctgggaagttcaagtggctgtgccagtgccgtgctcctcccgtccccggggtgcatattcaaggagagatctgactgtgtgtgtgtgtgtgtgtgtgtgtgtgtgtgtgtgtgtgtgtgtgtgtgtgtgtgtgtgtgtgtgtgtgtgtttgccctctgcttgtgtcgcttccaggcagtgatgctggactccacagatgtcaacctctggtataagattggacatgtggccctgaggctcatccggatccccctggctcgccatgcttttgaggaagggctgcggtgcaatcctgaccactggccctgtttggataacctaatcactgtcctgtacaccctcagtgattacacaagtgagtcatgctttgatgctttcttccatgtgccagtggtttttggaacagcagaggaaaggcagtttgggtaaactgaaagccaaagttaacactgaaggggtttgccagactgtcagggagaatggcaatgttcttagatttctgctttattctgcatctctttcttgatttgttaaatgccttgtagtaataaagtagcatgttttctgaatgattttactttttttttttttttttttttttgctt

SEQ ID NO: 28930 - DNA, 1050 bp, Homo sapiens
gtctccaactcctgggctcaagcaatctgcccaactcggcctctagagtgttgggattataggcgtgagccctgtgcctggctatttccagattttttgaaggctgttttccaattagccaatagataatcactgtgagccctgttggatttttgcagtagtttctagaggtgggattcccaggtcatcgaggatctgtgtgtaattgcctatggtcctccaaaaagatcctacggtctgtcctctgccagaatctttgggtctgctcaccttgcagtgcccagtctactctgggtcttattactaacctgactgaattagttaaagtggtatctcattattttttaccaggcatttctttgattctaggagcaggattttcctgatgttaactggcaaggccagagcttctgagtgcggtctcagaagtcataaactgtctctttccccgccagcatgtctgtacttcatctgcaaagctttggagaaggattgccggtacagcaaagggctggtcctcaaggagaagatttttgaggagcagccttgtctccggaaggactctctcagaatgttcctcaaatggtaagtcctgcctcttcccatgccatgtgtgcacgcttactgtgtggctggtgaaggtcaggagcacaccacattctcccctcaggtcccatggatggagcccctgtgctctggggcttcatgccctgccgcagcccctgatctagtgaactgaccttggactgccttgttgatcacccacctctacctaatcttggcaaggcctcctcaggctgcctgctgcccgcctctcctgctgtcctgccagctttcagtgttcgctagctgtcctctggatgcttggggcagcctgctgcccagcttgcctcctgcctttccccttcccagggttttgttctcagtgctgcccgagttcagtgtcccaaacatgcctctgatcatgtgccacccctgccttgcctccaggacatagcccatgctcagttgcattaccaaagaggttctttgcagcctgaccccatagtt

SEQ ID NO: 28931 - DNA, 1026 bp, Homo sapiens
caaatctatatcctcacccctccagcctttgtttctccctctgtcttcatctttctgctgtagtccaggccactgctactcttgcttgagctgtggcagcacacttgccacagtctcctctgcccgctccagccgctttccagccacagaggcacctttccaaaacagatatgaatgtgcttctccctcacttaaaacccttcatgttccctccaggttgtgtgtcacttaaggtacactgagctccaggcctgtctctccccctggtcttgtgcttccttggctgcagccttcctgggctaccccctggggtccctgcctgcatgcctgtcctctgcccccactccttgccctccctgggtgttggacacaccacagccactcacttggaaactttcttaataaggctctcacctgtctgccccacccctcctctgtgagccattgtggctgcatctgttctcattgcagcagccatactgactctttgcacttgtgtagcttgtccatggctctcttctctctgggctctcagctcccccatgccctgttcacaggacacagcacatagtaggtactgagggtatcagtaactgcatgtggcatgaaggagagtagtgtgactatcattggaccctatgggtctctgtccgatgacatgctgaggatctgctaggttacagtgcccacatctgagagtgggggtgggcaggcagcacataccagctccccaagaggcctcctgcctcccttcagtctgccctgaaggcttaccctgctgtgacacttctgctgtctcccaccccgcactgtcaggtcattgactgcagcatggctgtgcaggaggaggccaaggagccccacgtctcttcagtgctaccctggatcattctacaccggatcatctggcaggaggaagacaccttccattctctgtgccaccagcagcagctccaaaacccagcggaggaaggtgcacaggcagtgggtgcagtggggatgagctctgactcccatgtccttgcc

SEQ ID NO: 28932 - DNA, 1045 bp, Homo sapiens
gcaagccttaagtcaggcaggagacctggggcatggggattggatatgggaagaggggccagattgcaaaaggcttttattttctgttttgtaaagctgttgctccattttgctccattgttttcatcatgctgatgagaggtgcatgcactattgaaccatccccgctgctgaacccttagtttggctgcactatttcattcttacgggtcatgccgtgatgaacacctcattcatgcctttttgcttgtacccaatttttttttaggataaatttctaggaatgaatatctttagagctcttgataattattacctctggtaccacattgttctccaaaaggattttagtggtgaaaaaaaacctaaagtttataactataaaagtttgttatttttcttagaaaaataacacgaaaagacttctggactgaaattctccttttcctcaaaattaattatgcaaacaaaaattagttttcaaaaaactgccagcaagtaaatgcggatagaggaatagtcaaataccttaaactttgaaaagtacatcaaagaaagagagagagattggaaaggaaaaagaaagaaaagaaagaaaaaagaaagattctggtggagtggcagtagatgtggctctgtctctgcatgtccctcagcaggagaactgatggaagatagcaagttgaccaaatcctgggaaatattattaatattctcatttgtggagagtggcatgaggggaaacctcctccatcccacccttggccttggcagaggcaggaagagccacaggatcctgccatcttccagtgtgcagactgagctgagggaaggggccctgggataaaacacactatggttgggtggtgaggggcctggtgaggatattatcacccaggaaaaataataacagttatcacatactgaattctctggaagcagatactaagacagggtttataaggaaggcggaggaagcagaattgggcttttgagctgacaaacagaatgaaacaaaaaggaaaatcgtagaactgaggaaaac

SEQ ID NO: 28933 - DNA, 1099 bp, Homo sapiens
ctttccagactgtaaaaaaaagtactttttatacataaatatgtactcctagaaaaaaacaccaatctaaatgctatcacactgtgtatggtactcagcttcctttttcactcagcaccacactgttgagttctatccatgataattcctgtggatctagtacattccttttaactgctgtaaccctattttattgtaactgttctgcactaaagtcccttgcgggattctgtttgtgttgcagtggccccagagttgggcaggctggggactgaagctgctgccctaggatgcagagcctgactccccaagaggccttccttgtaacagcaggagcaccattatcctctgctggggctcagtgggctgagctgatcatggttcttgggattttctccctaatctcccaccaatgatggcaaatgagatttggcagagtgggagttttccaggaaataaatagggtgagaagtcagagttccctttctgccattggcacttgtttgtagagctttgtttgtagaggttcccccaggaagggagcagggaagtcagggagtgggtaaggagactgagctcaagtttccacatactttttccctttgctttgttctttcctctacttaggctcataacctttgggactgaactcagtgttgatcttatggaagccattggcccaggaagctcaggtcctgaaactgggttcccaagccatcttgttggagtgttagggtggcaggagagagatggaaatccaccaggaatgcagatgtcccgacagggagggagggaaggtagggggaggtgtttcatagttgccgagggtgaaaactaccttgcagagctgccttgtgcctcctgggttttttccacctctggagagacagcttccaaccctgaaatgtgtcacgaggacacagtcccctgattgctacttttctgtctggatttattgtgtctggaggatgggctgcaggacacatgttggcagctgttcgagctgctgtgtgcttcagcttttgcccagaaactcctcagaggtggtggtgtaggagaacaaatgctttccccatgatgtcagttctcaggcaagggg

SEQ ID NO: 28934 - DNA, 1033 bp, Homo sapiens
gacgggcaggggacaggggaggctgtcagcgaagagccactcacctcttttgttctcttctttcattcttagctttttgaaaacctttaggagttagctggtcacggcatttattgaacatctgttgtgtgccaggcatggaaaagggtgccatggggaaagtcaagatgatggtgccttgattcctgctcccaggttggatctgatgtcccatggtatcatgggacagtagttggtgccaaggaggagtgccatgagctggcagacgggagcaagttctggggtttggtgggttgggaagaattcctggagaaggtgagtctctagagaggcctgcaggcccatttagacatggagcttggagagtcctacagcttttggatactgaggtgactggggtggatgaaaaagagactttgaggggagagagcttgggaaagcagctgggctctgagggttgggctctttcctgtgggcagtagggagagtgatgtggtcacaggatctctctctctctgggctctaaggaaggcacaattttccccccatcatcctttgaagagccttcctgggaagctcactagatggctgggggatgccagcctcacaccttacagaactgcttcgcttcttctggcatttgtatcaagaggggctgttcacctgcctttggtcaggaaaatgtttaaagcctcccgaggcctccctggtcagtgcctttcctggctcagagggcaggatgagagatgcatgatgaggcctccgagcatcaggccccttcagggcagcaccatggtgtctacacatatcaggcttctgatatgtctgccaggcttcgaggtgcctggcagtgctcagttggccctcacctgtgagcactggcaaagaatggacaagtggtgcagcctggccctcacacaatgccgtcatgcccacctgctgcctgctgtgtatcttcctctctctcaggggcccccaggtttctggtaccacttttctttggcatccatccagtcttctcagcctgacaatg

SEQ ID NO: 28935 - DNA, 1031 bp, Homo sapiens
aatgaatgtgactatgtttcaataacattttttttttttttttttttgagacagtgtcactctgttgctcaggctggagggcagcagtatgaccacagcttattacagccctgacttcccaggctcaagtgatcctcccacctcagccttccaggtagctgggactataggcatttgccaccgccccccattagtttttgtatttttttgtagaggcggcgtttcaccatgttggccaggctggtcttgaactcctgaacttctgggctcacgctctccaccctactcggccaccgaaagtgttgggattacaggcatgagccagtgtccagcccaaaatagtcttttgattttttttcccccaaccatttaaaaatgcaaaacattcttagtttttgggctgaaaaaagacaagtgatgggtcagatttggccccggattgtggtttgtttacccctgttacagaggaacaggaagcagagaggactggttatagggcctgggaagccaagccagggagttagacttaaggtagtatgtaagaggaaaccatttttgtaatgtaatgaaaattttaaaggaaggatgttttgtatttatatgtgttcctggaagcatctgagtttttattcaaaacatgttttcactatggaaaatttcaaacatttacaaagtagagagaaaaatgtagtgaaataccaagtgatgtatttatcacctaccttcaacaattatcagtcctaggtcctttgcatttctgtgttttagaatcaacttgtcacattctacaaaaaagctcctggaatttctgttgggattgttttgattctgtagataatttcaggggaagaattgacttcttaataaaattgaatctcctaacccatgaccatggtatacttctcaatttatttagtttttctttaatttttctcaacaatattttgtagttttcagtgtacaaatctttccagttttttgaagggatgtggtcagatttacttctatttcatatattttgatactgtgaa

SEQ ID NO: 28936 - DNA, 1030 bp, Homo sapiens
tgagttgagaaatattcttctcagttttctggaagagtttgtaaagaatttgttttatttcttctttagtggaattcctgagtgaatgcatctacgcctggggttttctttgtaggaaagtttttaactacaaatccaatttcttcaataactatagagctattcaagttatttatcactgtttgagcttcgatagtttgtctttcaagaaattcatttattttatgatagtttgtctttcaagaaattcatttattttatctaggttcttgaatttactggcataaagtggtttctaacagtctcttattttcctctgatagctgtagaatctgtagtgttgttaccctttccattcttaatgctggtaatttgtgtcctctcttttttatgagtgtggctagaggtttatcagttttcttgatcctctcaacccattttttgtttcattgatctctgttttacgttttctatttcattgatttttgcttagatgtttattcttttcttctccatactttgtgtttcattgctcttctttttcatgtttcttaaagtaggagctgatttgagtcttttcttcttttccaacataggtgtttagtgttataaatttccctttactgctttaagtttttaaaggtaatttaaggatagcccacaaattttgatatgttatgttttcattttaagttcaaaacacattctgatttcccttttggtttcttctttagttcatagacgtagaagtatgtgagttcccaagtatttcagaattttccagagatattccattattttgtaatttaattaatagagaatcttttattttattttattttattttattttgagacagagtcttgctctgtcgcccaggctggagtgcagtggcgtgatctcggctcactgcaagctctgcctcccgggttcatgccattctcctgcctcagcctcccgagtagctgggactacaggcacccactaccacatccggctaatttttttgtatttttagtagagacgggat

SEQ ID NO: 28937 - DNA, 2328 bp, Homo sapiens
aagggagagctatatgtctactagtactgtgacaagatagaagaaagtaagtttaggataaagggaaatttgtccttctggttgtagtgggaaggaaaggagatggatgcttactgtaattctgtgggctgagcattttccttgttagtttccacacatcgtttgatgtggttcttatagcatcctatgtgttagctgtttctacttaaagatgaaagaccgaaatttggagatgagtaatatgcccagagccagataactaataagtagtggagttgttagcatttgaacgcatattctacccaaccagtctgagttctttccacttggtatgtaaattcatgaatacaagccagcaaatgtcccaggctgctcctattcaaagagctgccttctgtgtatcacgtggtctatgttaagtgttatgatctaaaacaatactgctgtttttttttttgttgttttgttttgttttttttgagacggagtcttgctctgtcgcccaggctggagtgcagtgtcgcggtctcagctcactgcgacctccgcttcctgggttcaagtgattctcctgcctcagccttgagtagctgggattacaggcacccaccaccaagcccggctaatttttgtatttttggtagagacggggtttcactatgttggccaggctaatcttgaactcctgacctcatgatccgcccgcctcagcctcccaaagttctgggattacaggcgtgagctaccgcgcctggcgcgctgttcttttttgaaaagaaaatcttgattttgtgttttgaagtccttaaaagcgattgtttatttaagctaaaataatcaagttactcatttattcagtaaatcagattcgacaggcaacattctcagaggcatgtatatgtgtgtagggctttggtgattttttggtgatgtttgtaacctagaatatagtttcgaaggcttagatttaagacttccatctgataaagtgggggtaagctgcagtgaaatctgcatggtagtctattcttgacacttgctgttagtagtaaccttttactgaaagtcaaagtttgcttatgtcttacagtactgttctgaaagtttactttttaaaaatgagaatgaaatattgggaagaaacatcatagttattttacatattctgtttttttagtacctgattggttatgttatattgacattctcgcatgtaattacactttattgcttgaacttgcaatacattgctcctgagataaagacataggtgaagcttatcctaagttggtaacagcaaaattattgtattaataattgagtcatatggtgtgtttcggcattttaacaaggaagtatggaccatgacattttgaatttgaaaggaagtactttttactgctttcctctttttctgtcttatatctttgtcctaccactaagaagtgagtaaagttctagactcagttataggatatcttaataacaggccgtgaactgtgtcactgattaactgacctatctagtaagagttaggatttacttctgacattcatgtactttttgcagtaattcaggctattcacatcatagctttgcttttgtctgtttttcaagtaagaggctgaggcagaagaatcatttgaaccctgcaggcagaggttacagtgagctgagatcgcgccactgcactccagcctgggctacaaagcgagaccctgtctccaaaaaaatgaaaattaaaaataagtaaatgtgaatttcagataaatagtgatgacttttttggtctaagtataccctaaatgttgtctggataaaagacacttaggtgagtgctgtggccagaaaggtaagagggatggggggccaaccaactagagacaagggaaggtatcactaaggacacggcagtggagctgagtcctgaagtgatgcacgagcagttatttctcagggaggaaagtggtaaggggttttcaggggtaggaacagtaggagccaaagtgtgggtatgtgagagtgtgtgactatgtgtgcacgtaaaatggaaatgagatggagggatgggttggagcctggatttgaagaagcaggtatcggcgctggggtatttggcctgggacagtgaggcattattttacaggagagtggcctggtgggatgtgtgctttagagtgtggacacacagctgtggcacagaaggattgctggcaggggagggcgacaggaggctgccagagttgtccagctggacttcttccctgacacagacaggctggcataggattggtgtggtagtggggatgggaaggagggaatgccgcg

SEQ ID NO: 28938 - DNA, 1049 bp, Homo sapiens
ccccccattttgaaaacaaaacaaccaaaatacaagactccttcataggtggtggtgtgtccacccatcaggaaacacatagtttttgattgtccctctttaaatgatgttagaagcctctgatgatcagtgcctagatccattcattctaattctgccatctttcttcattcagtaacaggtatttgtttttagatttgatggagttgataaattatcctacagtccaaggagtaatgctctcatattttacttcttacgtttatagaaaaagaactttaaaacttctagtaaacataagatcaagtgtttgtaataaagcttatgaaggcaaattgtaaaaattacatcagatccttttctgtcatcgtaatttaggctcttagcccctcttgtgtgtattagactctcctagcccaggattacctactgtcttcatttttgctttggctttatgcagattcttccttccatttcagattgggcctccctgttaatgataataggtgcgattaacaggaaggaatattgaagtccttgctttctgatttacaggcatgatttcattttatcctcacctgtagtcctgtgagaactagtatcctcattttagagatgagaaagcttaagtgtcttggccaaggccatgcattcatttgctcagtaaatatttattggggatctgttttgacaaggccacaaggctggtggtgaggcaaggtcttttactcccaagcctggggtcatcaccacatttaacattgtagcttatgtggtaggaaggaaattaaatactcttgccatttgcatgtcttcctgtttcctgcctttagaattgtactgggagagattccatgtgtttgtatacttagtttcttactgactgatgctacctgacctcaggattcagttatcacctctctggattagctgccccagtatggctttgtacgtttattttattttgctggggatgtcataacaaaataccacagactggatggcttaagccacagaaatttattttctcaaatctggaagccagaagt

SEQ ID NO: 28939 - DNA, 1067 bp, Homo sapiens
tttatttatttgttattttagtgcaatgattttaaaataaattttcatatatctttggctaaaatttgagtaatttagattttagggtgtttttagtgatcacttttaaagttacagtttaggagatttgtattagttcttggcacatacatgttgagaggctactgtgaactaatacttttgtaaaaacactatttgagaattgttttccctttttcagtttgatactggaaccgtcacaaatatgacatcatttttgttaggacaacatgttaatcattaaacaaacgtacatgctttcagtccaaagttaggagaaacgaaaatttccaaagtttccttgtaaataatcaggttaagttcaatgatacatcaatataatttcagtcagtgttacagcaacagtttaagtgtattagataaaatcttaccatggagtgctttttcatactttttaacagttattacacaggttgttttagtttatccatagtgcctcatacttagctccccttggaaactgtgtgtacctcaattctggaacgtaccttagaacaactcttaacttttctaaatctgcatcgtcaattttacgtaggtagaggatgaataccgagccttccaagaagaagctaagaaacaaattgaagatttgaatatgacgttagaaaaattaagatcagacctggatgaaaaagaaacagaaaggagtgacatgaaagaaaccatctttgaacttgaagatgaagtagaacaacatcgtgctgtgaaacttcatgacaacctcattatttctgatctagagagtaagtgataagaacttttcattcttttttgtcctactcttttaaacatgcggggataatttgcatttagtaataaaatagggctgggcacggtggctcatgcctgtaattccagcactttgggagttcaaaaccgaaccaggctgggcacagtggctcacacctgtaatcccagcaccttgggaggccaaggcaggcagatcacttgagttgaggagtttgagaccagcctggccaacatggtaaaaccccgtatctact

SEQ ID NO: 28940 - DNA, 1045 bp, Homo sapiens
ttactacttgaatttcattgctttatggagcactttaactacataacataattaaataacaaaaacgaaatgactgccataacaagggttagaaataagcatgactactctacagatgcaaataattcacctgatgggaggaaaagcacctgtgtgctaagacatggctacaagtgttcagcagaggctagacatcagccaagacagtgtccagcggggtttgagagcattgggtaatcaggcgagtccttaagtggagaccagttaagcttccactgtacagtgacattatttccctttttgtttgttgtttttgtagtaccaaaccctgctgcagctgcaattcctcgaacgcccctgagcccaagtcctatgaaaacccctcctgcagcagctgtgtcccctatgcaggtgagtgcctggaaccacaggaggctcttagagcctcagaatctgaaagttgaggccttttcttcacagtcatttacacctgtattagttgggtaaatgactacctcagcagggatgtatctagaatttgtttcctaaaatactataaatatctttaatagagataaattatataagtgtaaattgtgttattctgatagactctaataatgatggctaacaacagttgaacacttgctatgtgttctacactgttctgaatactttataatgttaactcatttaatccttacaactcttgggtattaggtactgttcttatctgtatttttcacatgtggttactgaggcccagaaaggttaagtaacttgccgaggttcatgcaattaagtggtagagtaggggttcagagttaggctgtctggattcagtgactttagtcactacactaagacacaaaggtgtctcttgagtagaatatgtggttgccatgtctcagcctttactgcatagcaaatcacttcagaacttagtggcttgaaagaacagttttgttagttttcacatttctctgagttgactaggcaattctttgctggctttcctgggctcattcctgcagttgaattcaca

SEQ ID NO: 28941 - DNA, 1048 bp, Homo sapiens
tcctcttccctgtggttcttgataaaaatcagaacttatttttatcaatctcagctcttattttctccccaacatattataatgaaaattttcaaacatacagaaaagttgcaagaagttgtgccgtgaattatccacttacttacagcctagattctgtggcattcttttatatttgctttatcacaaagtaagttataatcactacccttcagcatgcatatcagtatttatggtgttctgtctctctgtgtgtttccttttgaaataagtttagacttaacaaaaatattagagttcccttcccccagcttcccttataggaacatcctacataactatagaacagttacaaaaagtaagaaattaatagcagtaaaatattattaactaacctacagaatttatttgaattttaccagtttttccactaatgtccttttttaattctagaatcaaattgaggctcctactttccatttagttgtcttatctctttagtccccaccagtctgcagctgcttctcactcttcccctgtctcacatgacctcaacacttttgaagaatacttgtcagttattttgcagaatgtctctcagatgggcttgtctgatattttcttctgatttaagttgagtttatggagtttttttcgttttttgtttgtttgttttgttttttgagttttttgagataaggtctcactctgcaacctccgcctcctgggttcaactctcatgctttagcctcccgagtagctgggattacaggcgcataccaccacactcagctaatttttttgtattttttggtagagatggagtttcaccatattggccaggctggtcttgaactcctgacctcaggtgatccgcccacctcgacctcccacagtgctagcataacaggcatgagccaccatgcccagcctgagtttatgttttaatggaagggatactgcagaggtgatgtgtccttttcaagttattttatcaggggtacatgagattgatgtgtcttgttacttctgatgttaaattaacttt

SEQ ID NO: 28942 - DNA, 1174 bp, Homo sapiens
agctggaaaccatcattctcagcaaactatcgcaaggacaaaaaaaaacaaacactgcatgttctcactcataggtgggaattgaacaatgagaacacatggacacaggaaggggaacataacacacaggggcctgttgtggggtggggggaggggggagggatagcattaggagatatacctaatgttaaatgacgagttgatgggtgcagcacaccaacatggcacatgtatacatatgtaactaacctgcaccttgtgcacatgtaccctaaaacttaaagtataatttaaaaaaaaaggaagtagaaaaaagataagctaaacccaaaataagcagaaggaaggaaataaagattagagccaaaataaataaaatagaaaatagaaaaacaatagagaagatcaatgaaaaaaaaatgggttctttgaaaagataaacaaattgacaaacctctaagtagatagataaaaagaaaacgaagactaaagttaccaaaatcaggaataaagggacgttactaatgaccttaagaaataaaaaggattaaaatggaatactgtgaacaatgaatgccaaaaattggataacttagatgatatggacaaattcctagaaacattaactatcaaaatggactcaagaagcaagaacatctggagagacaaataacaactaatgagattgagttagtaatcaaaatacttccagcaaagagaagcccaggaccagattactttactggttaattcttccaaattttaaaagaggaattaatagcaatacttctcaaactcttccaaaaatcaaagaaaatattacttcctaactcattctgtgaggccatcattactctcataccaaaaacggaaaaagatattacaaaaaaagaaaactgtaaaagcccttgacaaaataatgacaatatccagcagtatattaaagaggattatacaccctgaccaagtgttctttatcccagcaatgcaaggttggttcaacatatgaaaatgaattaatactgtaataccatattattagaataaaggggaaaaaaccgcatgatcatctcactagacactgtaaaagcatttggtaaaatccagcagccatttatgattttaaaaactaggaataaaaggtaattttctcaatctaataaagggtacctat

SEQ ID NO: 28943 - DNA, 1027 bp, Homo sapiens
tccagagacaaccacttttaatttttttagccgttgtctttagggtttgatggtacaaggttgataatacaagaataaccaactggaatagggaaagtatttatactttcagtaaacttttctttggttttagattttatatctaagagcttgtgttgcatcactgttttcttgccctggaaaaccctaactgaatgtaatcaggatgcccccaaaggttgatttgagagctttattttgaatgaaaaatctcaatgttttctgataaaatgctagacctagaaatggattggttaaatctaaagaataatgaaatcacttaatctagtacaaaatagtttaaataaatgaacaaaatattttagtgctgcctgaggtaatttaatctcagattaacattgagaatacagttttattgggggatgtacttcattaatatgtgggccactgaagaaaagattggatattccttactggagataagtggaattaaaagaattaatgggttggactggtttagcaggcgtatatttatgtgttatgctttacttgaattctaaggtttttttcctaatataaaagctaataattgccggggcgtggtggctcatgcctgtaatcccagcactttgggaggccgagggaggcggatcacgagatcaggagatcgagaccatcctggctaatatggtgaaacgccagctctactaaaaatacaaaaaattagccaggcgtggtggcaggcgcctgtagtcccagctactcgggaggctaaggcaggagaatggcgtgaaaccgggaggcagaggttgcagtgagccaagatcgcaccactgcactccagtctgggcgacagagcgagactctgtctcaaaacaaaacaaaacaaaaagctaataatttatcaaatagtaagttctgtgtcaggtagtgtgctgagtgtttaaatagaagttaggaaataaaaatagtttctattctcaggaagtttatagactagtcagtaaaaaaaaatcagtaattaaaa

SEQ ID NO: 28944 - DNA, 1028 bp, Homo sapiens
ctcagctcactgcaagctccacctcccaggttcacaccattctcctgcctcagcctcccaagtagctgggactacaggcgcccgccaccacacccggctaattttttttgtattgttagtagagactgggtttactgtgttagccaggatggtcttaatctcctgaccttgtgatcagcccacctcggcctcctaaagtgctgggattacaggcgtgagccactgcacctggccctcaggatctaatttttattagcatttaaaaaataaattatagccaggctttgctatgtctgcagcagattagacacagaaagcctgatttaaaaagctgataacaccaagtgttggcaaggaagcagagaaacaagaacacttgcaccctgctgacagggctctaaactgttctagccagtttggaaaatgttggcagtatctgctgaagttgaatagtctccataagaatcaaaagctggaaacaacccaaataatcattaagacgtaaatggataaatgaattgtgatatataaggtactacaaaacaagcaaaaaaaagaataaactgttgcaacatgcagcagcatggatgaatctcacacatgtaatattgagcagaagcagccagatgcacaggagtctaaactatgattccatttaaatgaagccaaaacagtggtgagattaatctattatgatgtcagaatagtggttatctttaggggaactgagggatcctttctgggattctgattcattctgtatcttgatttgggggaggcgactacatggtatattcactttgtgaaaattcttttagctgtacttatcatttgggtacttcatgtatattgagcaaaaattaaggaaaaaatttttttggtattttcaggaatgttgtcgccccaattatctgtggttttgaggtttttatgtcacatgtttctgatattttacacttcttcatttattccagatgatttattaagattcattagattcattttcttttctatataaaacaaataat

SEQ ID NO: 28945 - DNA, 1049 bp, Homo sapiens
tggtgcgatcttggcttactgcaacctctgcctcctgggttcaagcgattctcctgcttcagcctcccaagtagctgggattacaggtgcatgccaccatggccggctaatgtttgtatttttagtagggacagggtttcaccatgttggccaggctggtctcaaacttgacctcaggtgatccacccacctcaaccccccaaagtgctgattacagatgtgagccactgtgtctggccaataatacttcttagtttgttgtttgcctttggttgatttgccctaaaatggtaatttgtgacacttttgtccaggtttatatttgtgtttgtgggggctttcgggttttttttttttttagggaaaggatctatctacctctttgctctactgcagccagaagtttcctagcatgcgtcattttgggattcttttttattttccctaccctctttcctaagcaaggaaaagaagtacttacctttattctcccagaattgtgtgtccccatagattgaagaatcaatagagtgagaactagtgaacagataaaaatagctcagtccttcacagcttcctttgtaataatagaaataggagacaaataggagaaaaaggaagtgctctttataaattgtatgaagtattaagtatggtacttgctacctgcacaacccaggcatgagattagcacttggtgttagtcacacccccttaggccactactcattgccaccatttcaaagcctgtgggttgagtagattcttatataaaggtgactttcctaacctaaagagattgggcccaaaagcacaagtttcttctgattcttcctagacactacatactggaaaagacaagggaatagagacgcttccttttcacatgtcatccctctttcccttatgtgtccagccttgaaggggaatgttatttctactcatcccctaccccaacccttaaaaaaaaaaaaaaaagaggactttagtttcctctctggaaaacattccagaatgccgctcttcccctgatccttccttttctcacc

SEQ ID NO: 28946 - DNA, 1109 bp, Homo sapiens
ttctagtgattcacctaagatttagcttataccctggaacacacaagatgactttctgccagttagcgtccacccaggatatcttccatcagacatcagcttttgaccagggtcccttggactgtgcctggactgtatccagttctgccatggtttatacctgtactacattcagttaaaaagctctaaaacagagagagcctgtgtggtacctaaatgtgtttgtggccttgggcttccttttttttaatagttgcattgaggtatagttgacataataaattgcgtataaagtttacaacttgataacttttgacatacatatacatatatgtcacatatatacacctgtgaaagctatcaccacatgatagacaaaccatcaccatgaacatttcctcgtgcccctttgtactgccgtcatcctgcttctcccccacatttcccatccccacacagccactgatctgctgttgctgtatattgtttgtatttgttatagttttatataaatagaatcatagtgtgtacaattttaggggagttctggctcctttcacttagcacattgagattcattcatgtcattgtgtgtaaccgtagctcatttcctttttttccctgagtgttagtccattttttgggtttaccacaattattaagccattcagctgctgatggacatttgggttgtttccagttattgcttattgtaagcaaaactcctatgaacgttcacgtgcaggtgttcatatggtgtcttagtcagtttggactactgtaacaaagtaccatagcctgggtggcttataaacaacagaaatttatttctcacaggcctagaggctggaagtctgagatcaggatgccagcatggtgggattcttgtgagggcatcttccaggttgcagactgccatcttgtgtcttcacatggtagacataaagagaatgagagagctgtctggggtcccttttaaaagcacactaatcccgttcatggggactccaccctcatgaccgcattacttcccaaagaaccccacctccctatattatcacattggggattaggatttcaacataagaatttggggaaacaggaatatt

SEQ ID NO: 28947 - DNA, 1032 bp, Homo sapiens
actaaagtcatgagaatggtaaaacaaccctcctgtacatagccctagcgacaagatatcagcatagggcactgtccccacgcccacctggaggattcggaagcaaacaccagccacttaatgtcaccacacacttagagctcactcctcccattgtgtcataatcagtttgcttgaattaagatccaaatagggttctcacattgtgtttggaagtatgtctcttttaggtctctttcagttcataaatctttttttctttcagtttctttttgaaggaacgggattgattgtgcatcctacagagtgacccacagttcagattctgttggttccttccccatcctgttgtccgtggtgtaaactggtaggcagagctggagggtggatctgattccagttcatgtttttggcagaaacatctcagctgtggagttctgtccattcgcagcaggactggctgcctctttctgtgatgtcactgcctctgataacgaggtcagtcattctgggtaattctgtcactccttccttcattaggcttcctctttacagagaaacccctttgtcagctgttcagctgccttgactatggtttggtctggaaagttctatcaggtgcttgttcctctcccttgattttccagcactcaggttcacgagtggtttccaagccaggctgggtgtgcctttgtagatatcaccataaactcaccgatgtcacattttagatgtaccaccccattgtacttaacacctaacttcagtttttcaaatggtgagccttcctgttggctgtggattcagatcacctgggtacctttaaagaacattatgccctgactcgttcacaccacgtgaatgaatgtctctggggtggggcaagcgtaggaaaacccgaaaaatctttgcagtgattctagcgcacagtgaggattgagggtccgtattagatcaagagcaaagacatgcagggcttatctccagaggctgccagctccacctcggccgcctgccctacctcggccgcct

SEQ ID NO: 28948 - DNA, 1088 bp, Homo sapiens
caggaccccactggtccccagaggttctagaatgcaaggattcccaaaagcctttggccaccaatgccccggctgtctgacatagcctgtcctgtcgtgaacagttgggattagtccacatccctccagatgcaagggtagaaggcgggtccccttggacagcttggagggctggacatgaagttgttcccagttggaagtctccagaaaataggcgagtggggcggggggatggggggggaattcccagcctcaggctctaaaattcccagttagtctgtggtgcagacaggactccctgcctccttgttcagggaagtaggggaggatcaaggccacactgggcaccaggagctggaagaacaagagggtctctggcccagagtctgggatggggagaggcagagggggcattggaaattggggacacatctttgaactgagataacagctgttgccaagaccagcacctgggccaggctaaggaagggcagggctaaaggtgggggagctaagggtcaggcagggccttgaacgccgtgttcaggaggctggcctttatccctcaggacctggggagccatggaaagatctgaggagcaggcattgggcacagctggacactggggaacgggtgacacaggggcatggatccagcccaactctgataaggaacagcagagttccacaggaccatagtggcagaggcagcagtgaggacttcttttttatttatttgtttgtttgagacagagtctagctctgtcccccaggctgcagtgcagtggcgtgatctcagctcactgcaacctccgcctcccgggttcaagcgattctcctgcctcagcctcccgagtagctgggactacaggcgcatgccaccacgcccggctaaattttgtacttttttagtagagacagggttttaccttgttagccaggatggtctcaatctcctgacctcgtggtccgcccacctccgcctcccaaagtgctgggattacaggcgtgagccaccgcgcccggccggcaatgggggcttcttaaaaaagagggaggctgggcccggtggttcacgcctgtaatcc

SEQ ID NO: 28949 - DNA, 1050 bp, Homo sapiens
aacactttgagaggctgaggcaggaggatcacttgagcccaggggttcaagaccaacctgggcaacatgacaagactttgtctgtaaaaaaaataaaatagacggatgtggtggcacatgcctgtagtcccagccattcaggtggaggctgagttgggacgattacttgagcccaggaagtcaaggctgcagtgagctatggagtgccactgcactccagcctgggcgacggagtgagacctagtctcacacacacacaaaagcacaccacaacgattcggaaaagataaatagaggatctcactctgttgcccaggctagtcttgcactcctggacttaagcgatcctcccaccttggcctcccaaagtattggaattacaggcctaagccacacctgccctgttttggggttttagtatttactttttattctatcctctttcagaaatagttagaccctgtctcttctgaaaagcaaaaaagtttaaaaattatctggatgtggggctgggcactgtggctcacgcctgtaatcccagcactttgggaggctgaggcgggcagatcacgaggtcaggagattgagaccagcctggctaacacggtgaaaccctgtctctactaaaaaaaatacaaaaaattagccaggtgtggtggcgggcgcctgtagtcccagctactcgggaggctgaggcaggagaatggcgtgaacccaggaggcagagcttgcaatgagccaagatcgcgccactgcactccagcctgggcgacagagcaagactccatctccaaaaataaaaaatatattatctggatgtgatggcttatgcctgtagtcccagctactccataggctgaggcaaaaaggatcacttgagcccacccagcagttcaggctgcattaagctctggtcgcaccactgcactccagcctgggtgacagagcaagaccctatctctaaaattaaaaaaattctatggcaggataaaagtagatgcatagatcatggtgcaggtaagctggggtagaatgtaaaatgaagccaag

SEQ ID NO: 28950 - DNA, 1039 bp, Homo sapiens
cagagcaagagcctgtcacaaatgaatgaacgaatgaatgaatgggttctaggcctgaagtcaggcctcctgagttttagtccagcttctgtgctgtgtgttcttgagtataccccctcccctctctggaccttttttttacaggaggacaaggaactggataggtagattctagagcctcttatttctgccatacattctgggaagaattaaaaccagccttttaaaagacagggcctagaaaaatcacaatttgctgacagggcctactgtgtgccaagtcccttgttagggaggtactgttaggtgccttcttgtcaaatcctcggaatgactcaggcagttggtattaccaaccccctttacagttgaggaaacggaggctcagaaagataaagccctcctcaatgtcataagcttggggtaagaggctgcagagcctgtatttgaactcaggtcttcctcctgcaaagctctgactccatcagaaataccttctctcccatcggaagttccagtgctgtgtgtcctttcttctcttgggatagttgatcattttcatctttgttatttgttgagcatctactgtttaccaaggcctgcactgggccttgggcctcagagctgcctggggcctggcctccgccctcaaggaggacagagaagaggaggcagagagcagcaggcctagggctctgatcccagcctcggccccattgtcccccagccttgaagcaaaaccgtttcccttgacacacttaagacttggatgagggccgggcgcggtggctcacacctgtaatcccagcactctgggaggccaaggtgggcggatcatgaggtcaggagatcgagaccatcctggctaacacggtgaaaccctgtctctactaaaaaatacaaaaatttagccgggcgtggtggcgggtgcctgtagtcccagctactcgggaggctgaggcaggagaatggcgtgaacccaggaggcggagcttgcagtgaaccgagatcatgccactgcactccagcctgggcgaca

SEQ ID NO: 28951 - DNA, 1020 bp, Homo sapiens
ccatgttggtcaggctggtcttgaactcctgacctcaggtgatccacctgccttggcctcccaaagtgctgggattacaggtgtgagccaccacgcctagccagctgctgtcattgatactactatctagctgtctgattccacatgggaagtgatcaatgaaggacagccatagtggttattcctatttttgctggtactacccagagctgtccatgtgagacatagctcccttgccaaccgaatatccacaaatttgggcatctaccccttgtgtagaagtgagtcttctcctggggctgttcttgagaaaagctccttgtttttcttgttcatgacacctcaatgccatgccaggttgcctttagtttatgatgctctgagccctgtttctctgttttagtttccctgaaggatggctgctaaatcttggggttatcccctggggtcccccagtgtgaatgttgtacccacaacatggtacattcccagtgtctctcaaatttgggggtgatccatctggctgctgtgggatgtggtactgaatttgcacccagaaattggtatttttttgggggggtcgtggatcatgaaggaaagagtttggcttgtaggtagagggttggggggttacctgggcttcccctgggctgtggcctgagtgcttcctcaaacaggctggaattcttaacgtgccacagtttccagagaggtttctttagcagtgcttccaaagggagcatgaacttgggggtttcatgttccagggtgtgtctagtgggaggggactgagggagggtaggtgcctggaacaggctagggtcccagctggtgactcagtttcccttctacctggtcagggctttgaagtccaagatcatgctagagagagatgggaatctttaaacataactttctgtggtgtttattcctaaaaccatataggatcattgcagaacatgaaggaaaaatgggtaggtaggcaggcagaccaacattatgcaaaatgttatcacccag

SEQ ID NO: 28952 - DNA, 1079 bp, Homo sapiens
ctttccctgcctgctccccacatgctggggcccacccctagctgagcccatgggggacctacctctggctgggcctgagactgcaggagtctcgtgcaagagacgcactgccaggttggggtgcttgggctgggaaatgcaagggtggaaactctggcttcccggggacctgccagtcatgagtgggacctgccagtcaggattcggaccatgttattgggtcggggaggatagagcaaagcaggtaggctcccctgtcctgtaagcctgggtttgagtcctctgcttcaccacttgctgcctgtgaaacgcaggggaagttcaatcctcagtttccctgtctgtgcaatgggaacgatattaatagtagaaccatctcagagagctgtcatgaggattgaccgagaggctgcctgtgaagttctgagcccagtgccgggcatgttgtcggcagctgttattatgattactgtcaatgtgctaattatactcacgtttccacgatcagcatcaaacatatccctgtgtgtttactggtgaccttgcaacctcggaattgtgtttctttgaaaaaagggaaactgacagcgcaatggaggcaggagatggataatgtgaccctttaaaggccctttgtgtccaggacttttggataaaatgtttggcccatgcctgttaccatgcgctgttgtctgctcccccagagccttgataaaccgggctggaggcctgggtgaggctcagcagggatggtaggaggcttcttaccccacagctgcctcctggtagcagctgccaggtctggcctcatagagcctgtgagtccaaacagaaaggcctgaatgtgtctgagaccctctaactctgattagctcaggaatccacctcccccagcccaccctggggctccaaagggccccacgggtctgatgtgctgacacgccaggatcttggactggcttctcgcccttagattcccagggttgggggttgaggggcagggcctgctgaagcctagagagggcagggccttggcctacgtcaccctgcaagtggagacagaggttttttggctctgg

SEQ ID NO: 28953 - DNA, 1026 bp, Homo sapiens
ttaacgttttaagaaacaaccatatcatcttccacagtggctacactattttatattcataccaacagtgcacaagtgttccaatttattcacatccttgccaacacttgttgttattattatttttttttttttgagatggagtcttgctcttgtcacccaggctgaagtgcagtggcatgatctcagctcactgcaacctccacctccggagttcaagtgattctcctgcctcagcctcctgagtagctgggattacaggcatgcgccatcatgcctggatgatttttgtatttttagtagagacgggctttcaccatgttggccaggctggtctcaaactcctgacctcaggtgatctgcctgccttggcctcccaaagtgctgagattacaggcatgagccaccatgcccggccaacacttgttattttctgtgtgtgtgtgtgtgtgtgtgtgtgtttttactgtatctattcttatgggtgtggctggcacattatttaatttgtgggggatttgtaggctctgtatttgttgggcctctgtgtctatgtgagctgaggtgccgggcaggggctggttcctgttagaatgtcggtcacatcctgctgtgttttctggaaatactttgttctccctcactggactgtgaactttctgaggatgtaccctggtgcccccaaggagagctggcctgggtgagatgctgaagaaatacttaagaacccacttctcactgacccggggcacaccctggtgtgtgtctttggtgggagaaaggctggagccccgcatcgcattcttccagggtgctctatacttcctagggaagaagaagcccctgagtgcctgagacatgactcttagccctggatgctcaggagaaactccctggggagcttcagaaaaatacagatgctggggccaccatctagagactcaggctcagctggtctgaagcaggacccttggggatctgtattcaaaaggaaaactcggccaggtgcctggctcatgcctgtaa

SEQ ID NO: 28954 - DNA, 1045 bp, Homo sapiens
tcactgcagcctcaaattcatgggctcaagcaattcacctcagcctcccaaagtgctggaactacaagcatacaccaccatacccagtaagttattttatctttctttcataacgaatcttgctatgttgaccaggctggtttctaactcctggcctcaagctatcctcctgccttagcctcccaaagcattgggatcacaggtgtgagccaccacacctggctggatttacgattattaaaaacacttttgtttgtgtgtattgaatttttctgtcgttatcatgtggaacgcctaaagaagtctagtggaggggtgaggctcagccagaatactgtaagagctttgggtatttgaaagaggacatcacacccttgggggaagtccagtctctcaggaggctaagatctcctcaatctaaagcaggggtcagcaaattttgtctgtaaagagctatagtatgtattttaggttttctgggcgatatggcctctgtaacaactactcaactctgtcactaaggcagagtcatggataaaggctcttgaaggaagccatagatagtctgggcaacatggcgaaagcccttttctacaaaaaatttaaaaaattagcaggtcatggtggtgcatgcctgtagtcccaactagttaggaggctgaggtgggaagactgcttgagcccaggagattgagactgcagtgagctgagatcatgcctgggacacacagcaagaccttgtcccttaaaaaaaaaaaaaaaaaaaaaggcagcagcagcagcaaccatagataatatgtaaataaatggctgtgggtgtgttccaataaaactttatttgcaaaaccaggcagtgggctagtttggcctgtggactctagtttgccaattttggatccagagaaaaacacggggggaaacagcagcttaattaatggtttcagtgagtggtcagccagtccaaaaatagcataaattgtaggaaggaacaagccaatgaaagttgaaaaggcggaggttaagcagaggggtaaagataagttgt

SEQ ID NO: 28955 - DNA, 1025 bp, Homo sapiens
ggttcttatgaaaggcagggtgccgtgcggtccagtctctgcacagactcacattccagcatctgggagcaaaaaacaataaaaattacaaatgctatgcatctctaaaagaacatcaagaggccgggcactgtggctcacgcctgtaatcccagcactttgggaggctgaagagggtggatcacaaggtcaggagatcaagaccatcctggctaacatggtgaaaccccatgtctactaaaaatataaaaaattagccaggcatggtggcgggcacctgtagtgccagctactcgggaggctgaggcaggagaatgacgtgaacccaggaggtggagcttgcagtgagctgaggtcgcgccactgcactccagcctgggcaacagtgtgaggccacatctcaaaaaaaacaaaaacaaaacaaaaatcaagaaacatgtaaatgatgataagctgtaggaatactgatgactgctaagcccccctagattcatccccttatgcccaatctcgcacaacctcatctttgctccttttcatggttctgtttcctgatcctttttgacttagcatgacctcaccgttctggttagccttcggctttctcctcccttgtttctgctcctgttcttctgtagccaagataaaaaatttctttgaaggtgcagcacccaatggaggaagcctaggttttctgctgggcctgacagcaatagcactgtccctgggatcagacggagagggaggatttggagctgcagagccagatgtgttccctgcctgccgcagatggtagttggggagctaagctgggagttcttcctgtcctctctgtgatgagtcggggagaaaaagcctagagctcctgaggaattctgttgtgtgtccccggccttgtcagatgaggagagaccatctgcagggtacacggcgaacctgacactcgacacaccaactctagcatctcagaactccaaaaagtgcttgtggctgtttggcacagcccacacagggccttgaggctc

SEQ ID NO: 28956 - DNA, 1028 bp, Homo sapiens
ctgggtttcaattgtgtacttggtgtccgaacaataaatatttacagagccctgactctgggccaggtaccatgtcagacctgggaaaacctggggtgggagcagctctggtgcatgcctggtgacatccttgctgtgtgaccttgggcaagtgaatctatgtctctgaatctgcatttccttgtctgtaaaagtagtggggttggggggacatggatccctgctagaaggagaaacctcctttaacaggtgtgcctgacctccaggatccagctgctgcccacccccttctaacaacccctgacatgtttgggatctccaggcagaggacagaaaacctgcatgggtcagatgagcggggcctggccgaggacagtgggtgttagggtctagtcgtacccccaacccctagtactccagccctgtaagggttaaaacccagggagctcacgtgacctagtgtaaaccatgaatcattcccattgctcccagtgctgagcctgctgcccaggacagggcagatgctgtgccccgggttgccatggcaactccgcctgtactgaaatacagccctccccagtccttcctgggggacctcagaggctgtctcacctggatcagtgttgccttccagagagggagggagagacagctgaaaaggagagagagaggagagacgcttagagacaagcaagtggaagttgagacacagggagagggaggagagcgaggctgagaaatcaacagagaaacagaccacgagagggagacagactgacagccgaccagaggtcccaagacgctgcctgtaaccttagaggcagaagccgtttcccagcagtgctaaccttcccggggctgccagatcgccgacatacacgcacacacacacagagtgcacacacatgcacacacgtgcagccgcatttcctggtgcgcttgctgtgagggcacaggggtgggtaggctggcaggcacgtgaagttgccatcagccccgagggaccgtgagcgagttgggacttgggg

SEQ ID NO: 28957 - DNA, 1031 bp, Homo sapiens
agggttaagcctcttcttcaaatggtgccattttctctccagagtgacccccagcctcgagtgttttagttgttagaagggagtgaggtggacacatgggcctggcatagagccagcagccccatcctcttcttcccggcctcttttgcatccacttggcttccctgccccccttgcaagattcttcccatcccatcctgccccaccccacccctaagttgctacttgatgatcaaagcatatttgtgtgtcattaacagccacggctaattaggaaggaagggttaagtaggaggcattcctatacacgcctgggagctgaacagttagagatttttcatatgctatgttggattttcttttcctcttctcatgcataaatacaagtccttttgtgggggagatgaaaaaagaatggaggtcattagagatctgcttagtgagtttcctaatcttttcatgggatgcggagccccgtggattttcaacaacttagtgccattggttgaaaaatggtttctgagctgaattgtggtgaagcggctgctgtggttcagtggtgtctgattgctgggatgggggtggaggaggagacaacaggggtacagatgggcctgagttcaaatcctggcaccacacttctgacatctaggaccttggccaagggcctcaacctctttgagttgtgatatccttgcatttacagagggctaaagatatgaagattgaactcaaacttgggtgggcatcagatatatcttgggtcctggtgccacgaggagagtaccaggcaggtgccttgggggtctgaggaaggacccagaatctgctttgtgtggcaagagctctaggtgagccccaggtagagatggttacgtggacaccgccctttaaggaccaatcccttaatgtttcttcatgttcataaaaataagtaaataaatacatatctgatggatgaatacatgaatgcatggaccagtgcatgaacggatgccaagctcctagctggcttcacaccaggtgttggg

SEQ ID NO: 28958 - DNA, 1026 bp, Homo sapiens
caattccatggtcaccaggatttcttggcaccatccccctgcactggttccagctgccatcttcgccagagggtctggtttgaaatgcttttttgggtccacaggggctgaggtgagtgggatgttgtccatgtgtgcttcttttaaaccagatggatggaccgggcatggtggctcacgcctggaaacccagcactttgggaggccgaggcgggtgggtcacctgaggtcaggagttcgagaccagcctgactgatatggtgaaaccccgtctctaataaaaatagaaaaattagccaggtgtggtggcagacttctgtagtcgctacttgggaggctgagacaggagaattacttgaacccgggaggtagaggttgcagtgagccaatctcatgccactgcctgggcaacagagcaagactccatctcaaaaaaataaataaataataaaataaaccaggtgaatgaatccaaggtgctcctgtgccttacctgggaagtaagtggggactggcccttcagaggcaggccccagctgcgcttccgttctcaaactcagagctctccagtgtgaggactccttggtagggacacctgggcttctaaacaaaggctgatgaggggctgtgatcttttcacaagccttcacccttttcccacgtctatttactcaggtatttttcaggctctccccgtcctgggcaccggccaaggtgccaaggagacagtggtgagtgacattcaccttcccttcagggagttgccagtcagccaggggaagaaggccttgaaacaagaaaaccagcagacacacaagaactcccaaagggttaggaaggaaacagatggaatgtgtgggcctccactctcaggggtctgaggaggagtctacgccagcacagggttgggcaggctgagcacatggcagatgtgtcagaaagcaactgccttttgttctgaaatggtgtttgtcattatttgaggatgttaacatgtccaaatgtccattttgaaatgaattcgta

SEQ ID NO: 28959 - DNA, 1821 bp, Homo sapiens
atcccgtggtttgtgaggcagacgggcattgttttcctctgctgttctcatcactgcatgatgatgttgcagaggaggccacctgatgggagcagccacagttggcctaagagggtggctgctttctgcctggcagcagaacccctggattctagggatggacccccattttacagagggggaaactgaggtcctgagaaagtgacttacctgaggccatacagccagggacgcaggctctgtcggccctctgagccctttccctgtgctaagccatggcagtgggtggcagtccagggcagtggaattttcaggaaggtgctgcctgcactctttcgggctgcccctgcctcccccgacaccccaacacccttctctaaggcctaatctgcctgctcctcacctggactctacctctcgctcttccctggcatggtctcataaaataccaagactcgggaaatagaactcgggcgtagctggatgccaggcagagtgagccggtctgtaaccaacacaatgccagctctcatggcggtggggagaatatgcaaattgggggctgaacagcaccccgctcctcaagtccgtgggtgggaaaatcataatgtgtgcgtaactgtgttggtttatgactgtgttctgggtcctttgcttttttttttttttgagatggagtctcactccatcgcccaggctggagtgccgtggcgcaatctcggcttactgcaagctccgcctcccgggttcacaccattctcctgcctcagcctcccaagtagctgggactacaggcacccgcctccacgcccggctaattttttttgtatttttagtagagacggggtttcaccgtgttagccaggatggtctctatcttctgacctcatgatccgcctgcctcggcctcccaaagtgctgggattacaggcgtgagccactgcgcccggcccctttgcttattttaaaagaattactcaagcaaaccatgcccattgtagaaaaataagtttatagagagaaacaagaacaaggttatttagcatcccatcccctggaaatgatccttatgacatatctgtatcctttaagaattttttgcatttatatatgcaacatatatacatatatgcatatataataaatatataaataaatatatatgtatacatatatttttgtttatatacacatatgtatatatagacagatcaacaaagtccagttatacaacatcaacatgaactcttttttttttttttttttttgagacggaatctcactctgtcacccaggctggtggagtgcagtggtgcaatctaaggtcactgcaacttctgcctgggttcaagcgattctcatgccgcagcctctccagtagctgggactacaggtgtagtccaccacacctggctaatttttgtatttttagtagaaataggtttcaccatgttggccaggctactctccaactcctggtttcaagggatcttcccgccttggcctccccggcctcccaaagtgctgggattacaggtgtgagccaccgcacatggccaactctttttttctttttgagacaggtcttgctctgttgcccgggcaggagtgtggtggtgctatcttgactcactacagcctctgcctttcaggttcaagcagttctggtgcttcagcctcccgagaagctgggactacaggtgtgagccaccacgcccggctagtttttgtatttttattagagactgggttttgttatgttggccaggccgctcctgaactcctggccttaagtgatccgcccgcctaagcctcccaatg

SEQ ID NO: 28960 - DNA, 1032 bp, Homo sapiens
atcacctgaggtcaggagtttgagaccagcttggccaacatggtgaaaccctatctctactaaaaatacaaaaaattggctgggcatggtggcaggcccctgtaatcccagctactcaggaggctgaggcaggagaattgcttgaacccaggaggtggatgttgcagtgagctgagattgcaccactgcactccagcctagggaacaagagtgaaactccatctcaaaaaaaaaaaaaaaagtacttgatgtaaaatctggtgcatagtatgtgtacaataaatctcagctttgcttgcttgcttggttgattgattttgtctgtactgtactaaacttagtttggggactaaatatacaaatacaaatcatacatatatagcccttgtttttaggagcctatgtcttctgggaaaagcaggtgtgtttggtaattagaagtgtttgataatacccagggaggtatttataagcactgtgggtgtctagtgtgctgggcctaaatcagcctgaaaaataagaggtatcgtctgtggattttcaagtcctttgtcccatttaaccccctagagaactccgagaggttgggaaatattgctccatttcaacagaaggcccagaaaaatcaaggcaccgtggccagcgttctctgctgcacctggaaggtactagacaccctgaggcatccttgctaggcctaagctgtggccactacagaggtccagatacttccaggaaggtctgattgtcagtgaggcagtctctgtgtgcagccaggaatctccgagtgcaaaggacagaggaatagaaatctagcagaacaggcttggctctaagcccacatctcagggccagagagcagaagagattctgagtggagtgagatgaccatctctggtctcttacttaggcccagtacatgggcttatgtctggggccccagaggagtgagggcagcaaagaacagacaatgggctccacgcagacctctgcaacacactggagcctgagcccactgctgcaggacccatc

SEQ ID NO: 28961 - DNA, 1044 bp, Homo sapiens
aggtattatttctctgtggtgagaacactcaaaattgttcccttctagcttttttgaaaaatacagtattgtaaccagagtcactcagctgtggaacaggaatgtattcctcccagctaactgtaactttgtttctataaccaatccctcctatctgccctccttcccccagcctcaggaaaccactcctgtactttctgcttcttgaaggttaagtttttggattcatcataagtgaggtcatgcagtgtttgtctttgtctttctgtgcttggcttatttaacagaatgttttctaggttcattggtgttgccctaaatgaaaattgcattattttttatgaccggagagtatatcattgtatatgtgtactacattttctttatcccttcatctgtgggtgaacaggtagtctgattccatcatcctagctattgtgactagtgatgcaatagacatggaaaggcagatgtctcttcaaaatactgatttgctttgactgtatagctagtagtgggatgaatagatcatatggcattggactttgagttttttgaggaatctgcaactgctttccgcagtgtatatagtaattgaccctcccataaacacttcttttttcctggaaattcacaccagcatttgtgtttgtatttttatttgtcatattcatttcaaataagagatgctttctgtgtatggttttgatttccattttttgcaggagtagtaatgttaaccacatttttgtaaagataaagtcagtgttatgtcttctttgccaaaaagtctattcaggctctttgcccaattttggttcggttactagtttctcttttgtttagtttttttgctagttactagtgttagtagcttgtgccttttggaaaacaaggtcttatcagctgtatgtttccctaaactttcttctcatctttgcgatgctgtttgttcgtttcttctctgccccctcctctccccacgacagagtcttgctctgtcactcaggctggagtgcagtagcatgatctcagctcactgca

SEQ ID NO: 28962 - DNA, 1026 bp, Homo sapiens
atccttgcaggccaggcctgtgtgacattttctggagagaagaccagcactttcattaagtagcccctggaacctctttgatcagaaggcccctggaacctcccccaactcttctttgactttgcagccaggcttggaggtgggataagactggagggagatggttcaaaggcctggcttattctaagcttcagtgagcttaagatatcacccccttgctctgaccccagtacagtatagtacaggccttcagtcaaaatttgcttcaggaggcagtgagctccccgtcaagagaaggaagaaagcagaggctcaatgctggaagggtggggtggaaagggtgtcctgcttacccttgggaagtggcaatggttgggaggcttcacccttcctagtggcttatggatgctctatctctctcccctcacctctctctctgtctgcttctcttcctgtccccctggttcaccctcccctcccctctggccctgcaggtgggttggctactagtaccctggctaccgtgggctgcagtacctgctggagaagggagactacaaggacagcagcgactttggggcccgtcaccctcaggtacagtccgtgcgctgcatccacgacatgcaggggcaccaatgtggtgccttccacccctccaactagtgcccaccccaccatgcctccttcccaggacccaggtctgctgcccaggaaccctccagacctcccagagagtgaatgaagtgtgacttgcaacttgtctgctgtgggtctttgatctcccctggcagctggtgtgtgtgtgtgtgtgtgtgtgtgtgcgtgcgtgtgtgtgatagaaatgagaattggcaagtatctgggctatgagtagggcaacagaacccttactgagtcttacggttctgcagcttcttagctcttaactgtgtgaccttggacacagtgcccaacctctctgagcctttgtttcttcacctgacttgcaattcccttgcctctgagtgtctggctggtctcgaaccc

SEQ ID NO: 28963 - DNA, 1122 bp, Homo sapiens
aagtggttaaaatgattatcataaaggtagaaaccagtaagtgctccatatacaccatggaatactatgcagccataaaaaaatgagttcatgtcctttgcagggacatggatgaagctggaaaccatcattctcagcaaactaacacagaagcagaaaaccaaacaccacatgttctcactcataagtgggagttgaacagtgagaacacatggacacaaggaggggaacatcacacaccgaggcctgtcagggagtgggggacaagagggagagagagcattgggacaaataccaaatgcatgcacggcttaaaacctagatgacaggttgatgggtgcagcaaaccaccatggcacatgtatacctgtgtaacaaacctgcacgttctgcacatgtatcccagaacttataataaaaaagaaaccagtaagtgctcaataaatgttactaacatctatttcttcattcattcttcaaccattacccactgagtgcctatttggatacttggcttagtacctgggtgatgaaataatctacagcaaacccccatggcatgagtttataacaaacctgcacatgtatccccgaacttaaaagttaaaaaaacagaatctgcacaagtctaagctacttccttgaggaaaagactcgagctgagatctcaaagaagagtagaagttgcaggggtaaagaggccaaagaagagtgtctcagatgagagcggcacgtgcaaaggccctgtggtgggaggagcctggtagctctgagaaactccacaaaggcacggtggtggctggaatgcagagatgtgggggcacattgaaaaccttgttaaagtgcttaaaatgattatcataaaggtagaaactaataagtgctaaataaatgttattctcgtccgtttctccattgattcttcaatcaatacctattgagtgcctgtttcactcctggaactgggcagagtaggaatacaaagtaagacagattccctgcccctagaagctctcactgtggggggattgtaatagtttgagagtagagcaatggtgattattatgggttgaatgagaaccccccaaattcatatgctgaaatcctaatcctcaatacctt

SEQ ID NO: 28964 - DNA, 1050 bp, Homo sapiens
aaatgaaaatgaaaaatacaacaatcatccccaatttaaaatttttatattaacagttaaaacagactgtcaaattattaaaagtcttttttttttttaagagacggggcgggagcgggggggggtctcactgtgttgcccaggctggtcttgaacccctggcctcaagagatcttcctgcctcagcctcccaaagtgctgggattacaggggtgagtccaccatgcccagccaaaagtttctaaagtcttagtctctctttagtctctctctcattttttttgagacagagttttgctcttgttgcccaggctggagtgcaatggcacgatctcggctcaccacaacctccgccttccaggttcaagcgattttcctgactcagcatgtaatcccagctaattttgtattttcagtggagatggggtttcttcatattggtcaggctggtcttgaactcccgacctcaggtgatccacccacctcggcctcccaaagtgcagggattacaggcgtgagccaccgtgcctggcctctaaagtcttactctcaatttctgtgtttatctcatcgcagattggtaacaaacaattaccaccgaccagactttgagtaggtgttggcgaactttttctgtaaagaactgggtagtaaatatttcacattttggggggcagtatggtctctggcaactactcaaccctgctggcatcacgtagaagcagcagtaggtaaatgaatgggtgtggctgtacctctgtaaaactttatgaacgctgaaatttgaatttcattgtcatgtattacacagattttttattactttttacattttaaaatatattgatattttggggtagatgtgatattttgatacacgtatacaatatataatgatcaagtcagggtaatcaggatacccatcccctcaaacatttatcttttatcttttctttgtgttggggacattgcccaacacaattttcctcttctggatattttgaaatctgtaagacgttattgttaactataatttccctgctgtactat

SEQ ID NO: 28965 - DNA, 1056 bp, Homo sapiens
gtatgtaaagcagataatagtgttggaagtgacaacctggaattctgtccatggggactcttctccttgtactcccacacacagaaacccttcagcttatgcttccaacgtcagtgtccaaagaaactttagacaaatccagccccttcattcacagatggagacattattgttagttgtagtaaatgttagctaactaccagtacttacactttaaacgtgcctggcataggagaatgattttatatgtctgatagtatcaaatccccacaactacctgataaactaagtattataatgaccctcattttgcaggtgagtaaacagaagtctagagaggtacaatcacttccgaaagtcacccagctggtaagtggtgaaggcagaattcagagcccagtgtggctgactcaatagcctgtgccatccacccctacatgagttgcccagggaggttagagactgtcccacagtctcataggagctgagcagggacaacgaggtggcctggtgtggagggaaggtcacgggtgtgtggggctggagctctgggtccaagatgttcatcagctgcctgtcctggctggtaagagactgagggtgagtggtcagtgagcatgacagggggaagggagccttgggagaccacactggagaacctggaactagggagctatagcaggtgtctgagctagagaattaatcctactgttggctgcacatcaatattgggacaataggcccagatgtgtcattcctaataatcacaatggggcaggatggtgctcaaagcactttactggcatgatcttaatcatcacaaagcctctatgagagaggtgatgtcatgatacccattttacagatgaggtcgctgggggctcagggaagtgaagtgctttgtccagggtcacgtggctgaagagtgggggagctgacacttgaagccaagactggctgactttcaagcccacatgcctctgtcagttaagtgtggtgatggtaatgctgtgtaacaaacaatcccccaaatctctgtgctgtaggacagtaagt

SEQ ID NO: 28966 - DNA, 1066 bp, Homo sapiens
tgagaatgaaagaggcactatgaagaattacacaaggacaatagacattaaaacagtccagggaaaccaggacatagggtcgccttaagagtacaagggtctgggaaggaagggatggggaaagtgggttctcagactgaaaagaggtccaggagtgtggctgctgcccagaaagtgccaggttcataagtggagggctggacagccaggagggaagcacctgggtacccagagataattttatattgcctgcccagtaggtggacaaccttcaggcatggcttgatccaggggctcaaatgtcaacaggatcctgtttctctttctctctgtactcatggaactttgatccatctgcaacaaaggccaatggcagcccacagcctacacagagggagacccaggcccttctactcatcttctcagacttccactctccaatgtttgaaaccataggagacctctatacactggcaggtcatggagagaaactccccagatacttagagtgggaaagtgggactgaaggtgagcatccccatcccatcctggatcagtgtgggcacacctccctgtgacatgcaaagctcttcatatcacatctgtacactcagaactccatacatgctgtgagtcttccctgacctccaccacttcctccaggtctctgctttctagtgaccacacctctccttgactcttcactttgtcttcctgactgactcctagccctgacccttatctcaaagcctagcaatgctgagacaacgttttccactccccaggtaggccccagaatgctctcacccccgggggatcatgggcccctccctatgatagacatatgtggctcttctcatccagcttattacctctcccttttatgtggcaacaatgccccagtattgctagagtgggaaaccccctcactcacattcattctctatgctttcaaggaagccatctccaccctggatatgagtaatggaacataggacctaaactaagccagccagcacattctgtctctctggccactaactagtctaagtatgggtcaatcaga

SEQ ID NO: 28967 - DNA, 1804 bp, Homo sapiens
ggaagggtgggtggatgggtagatggatgcgtaagtggatacaaggatgggtggatgatagatggatgcatgaatggatgcatggatgagtggatggatggatggatggatgggtagatgtgtgggtggatggaagtgtggatggatgggtggatggatggatggatggacggatggatggatggatggacggatggaaaggtggatagaaggatgggtgtgtgggtggatgggctggtggatggatggatggaaaggtgagtggaagggtgggtggatgaatggatgggcgggtggatggatggatggaaggatggatggaaaggtgggtggaagggtgggtggatgggcagatagatgcatgagtggatacaaggatgggtggatgatagatgaatgcatgaatgaaggtatggatgaatggatggatgggtgaataggtggagatgtggaaaggtgggtgggatgggctgggtggatggatttgtaggaaaaaaaatgtaagctttgatttctgaaaacctagatctccagccttggccttatgctcgtgtctctaattctcctccctctctcatcttggtgtgcatagcccaggtagctgtgagtgcaaagaacaataggataaacattcagcactctcctgtgggtattatttttagtttccatgctgcagaggtcagagtgtcaaataacaaagagagatcttttcttttctctctcaaggaaagaatcggtcatatctgcgtgggcagcagtggaggtgggtgttagtttgtttggtttaacagctatttgactcagacctcctgccagcaggagtgggtgacctttccttggagctctgggcaccaagccaagcctaggagggcagttccctttgctcatgagctctgttaatgtagctgtgtcctgctgagattcaattcccacggacttcactgttgccaccaaatgtgtgcatatgagggctctgcagaagtaagagtcacaggggcctggaatgagagcagaggaggaggtgcagaaattgaaatgccagtcatacacactctgttacattaactctttgtggtagactaacataataataaccccacaaagagtctgtctctctgagtccacactcttttgcaatgtactttgttgcttttcccctcttgaatttatgacttgctttggccaacagaatgtggcatgagtgatgctgggtattttccaaggcttggtcttaaaggctgctgcagtttcttttgctgttttgcaactttggttccaccaggctgtgtagaagcccagtttcacctgtgtggatgagaggccacatgaagaaaactggagatggcccagtagacagccagcaccaaatgccagacactggcagttggcctcttcagctcaaccaatcctttaaccaaatgcagccttgtgaatgaactcaggcaaaactgggggaggaactgcaaaagcaacccaaagcatcaggagccacaaggcaatgttgtcttaaggcacatcgtggggtggtttgcaacccagcaaaggctaatgaaatgcttctgtaacaaacatccccaaaactcgtggctcaaatgataaaaattttcttcttgtttccatcccagtctggtgtggatgaagacttctgctccatgtagtcattgaggagcccacatttcttctatactctagcttttatcatattacaaagttcctctactgaatccttaggcaatgaggaaagaaagtgcatggaagatgtcccaggaggctcaggggtgaggcatggaagtgacccatgtca

SEQ ID NO: 28968 - DNA, 1050 bp, Homo sapiens
gcttttgtgtccatgtcattgcacttttgatttacattgagttttctttgaacaaaaaaacccatgtattcgtttaactcattgaagcgtttgcaaaattcatcttgtacttgtgtcatttttaagacctaagtataaagctttatatttatctcttctaaatgtcatcttctaagatttacctcctaacttctgtttagatcttgattctgaaatccctcatatttccagtctcttacagaactctgcctacatcatgcagtttagcatatgacctttgtagtggctatgtgatattcttcccacccagaaactcttccagtaacagcaccacgactttcctctgttagattcccttcctcactccctacagaactgtaggtggaattgactccacttcccttctgggatgtgcatgtaaccaagttttgaccaatcagagtgtggtgcaccccccatctctggttggttgacagatagtcacatgataaacagcagtgagagggaaaccttcagtttagtcaggagagactgggaaagtggccagaaatgcctcattttcctcgaggcttggtgcagtaaggatgaaaacctggagctgctgacagctgtctgactggtggtcacatgcaggggcctatctgagggcagtggcagcacagagggaggcttggaagagagaagaaagtagggagagagtcaggaccttgtggcactctttaaccagtgaatgctagttgaaggcaatacaaccctctaggaggagtttggaaagttgtcaaggttttcaattgtctggaggatgtggttccgactggaactctttggaaaacagttggcattttctgttaaagccaaacacatacacctacccaatgtccagcaattccattccattcttaggtatatatccaacagagatgctatgaatagatgtgttcacaaaagagttgcaaaagaatgttcatagcagcctttttctctaataacaaaaaaaaaaaaaaaaaaaaaggaagaagaagaaagaaatcatagtcctttagggcagaa

SEQ ID NO: 28969 - DNA, 1045 bp, Homo sapiens
gctcaagtgatcctcccacctcggcctcccaaagtgctaggattataggcgcaagccatggcacccagccagaaaactttctgtagccattcttttagggtgggtcttccagaaacaaaatttcctagtttgcctttgtctaagaatgtcttttttttttttttcattcctaaaggatatttttgctgaatataggattctagtttaacagttcttttctttcagtacctgaaaattatcttgccatttttttctggcatcgatggtttctgaataaaaatctgctatcatttgaatttttttccccctatggctaagatgccgtttttctctggctgctttcaaaatttttctttgtcctttgttttcggaagctttattatgatgtatctttggtttgctcagcttcttaagtttcttcttgacatatttgggtagttttcagccattatttctttgagtagttttctagcctctcattttttcttctcacctccaggactctgtggacacaaatgttagctattttttataatttcattggtccatgagcgtgttagtccattctcacattgctataaagaacttctcaagactgggtaattataaagaaaagaggtttaattgactcagttctacatggctggggaggcctcaggaaacatacactcatggcagaaggcacctcttcacagggtgacaggagagagaatgaacacaggaggacaggccaaacactgataaaaccatcagatctcatgagaactcactcactatcacaagaacagcatgagggaaaccacccccatgatccatttgcctccacctggtctctcccttgacatgtggggattatggggattacaattcaacatgagatttgggtggtgacacaaagcctaaccataggctttatgagtctctgtttattttttttcactctattttctctccgttgttcagcttaagtcgtttctattgcgctaccctccagttcacagattctttcctctgttccctcttttctgctgtgagctggtccact

SEQ ID NO: 28970 - DNA, 1034 bp, Homo sapiens
acacatacatacatcctctcatctaccaatctatcctccatccatccatccatccatcctccatccttttattcatccattcatccatccatccacccctccatatatgtatatatacatgcatacatcctctcatctaccaatctatcatccatccatccatccacccatccatatacatatatatacatacatacatcctctcatctgccaatctatctatcctccatcccttcacccatccatatacatatatatttacatggatacatacatacaccatctcatcatttatccatccatccatccatccatccatcccgtccattcatccatccatccctccttccattaattcattcatctatcaatctacccatccactcacccatcctttccttcattccacagatatttgttgaacactcaacaatgtgctaaatcctaagccagaataaaaacagaatcttgcaatgctctcctccaagctggacgagatggtctcctcactgtccatgtctccatacctctgttcacttcactcagtacctgggtcatcctacctaccccctctgcttatctcctggccccaccccctagaaaggtctgacctgaggctgttgagctaaacccacccgaacatagtctcactggctcgctgaaggtgagccaggaggaggatgaacagatgtagtccatgcgcatcccataagtgtagcacagggaggtgagtgtaacaagagccaaatgctgcaggaagagaagagggtccagattcgggctccataatctttacttgaaggagtcagaggagtgtttacagaggggaacgacatgagggatggggcaggtagggccagttgacactccctaaacagacaggatgggggcagtcactctaggccaaaggaactgcatgtgtgaaggcacgtaagcatgaagcactgtcttctgggttggtgcatgtgcccagaaccagagttttaaaggaacagctcagagatcattcgatccaaccttccattttatagatg

SEQ ID NO: 28971 - DNA, 1023 bp, Homo sapiens
tgatatcagcctcatctcctagttgctgggcgacaatgggcacattagtgaatctctttgagcctcacagaatttgtcatgaggttttgagggttagaagaaatggtgtacattgctggctgggcacggtggctcacgcctgtaatcctagcactttgggaggctgaggctggcaaatcatgaggtcaggagttcaagaccagcctggccatcataatgaaaccccgcctctactaaaattacaaaaaattagctgggcgtggtggtggcgcctgtaatctcagctacttgggaggctgaggaaggagaattgcttgaacctgggaagcagaggttgcaatgaaccaagatcatgccattgcactccagcccaggcaacaatgtgaaactccatctcaaaataaataaataaataaaagaaaaaagaagagatggtatacattaggtacctgacatttactaggtgttcaataaattttggccccttccagtggtgtgctagcaaatgttgaataactgactctcaaaaaaaaggctctgatttagcattagctaatttctgtggtgtaaatactaccatcatggccaatttcaagctattgacatgatgtcatagcatttggagttgggataataagtagatgggggtgaaactgagtccctgggttcagagtcacacagccgattagtggcagagctgggactatgttgtgtgcctcctcactcccagtccagatcacttttcacattttggtgctcttggaacttgccagggtgctgtccttcctggcaaaatggccacatagagagaattttgggtgattgcagaagttaaatccttctagccaggctctaataggtcagccttgctttcgattatacaattgatccttgaccaatacacgggttgaaaatctaagttgactctatgcatttgaaaatctaggtatacatttttaatccccaaaatcttttttaaaaattatttattttatctgtattttttagagacagagtcttgct

SEQ ID NO: 28972 - DNA, 1054 bp, Homo sapiens
ttctataccgagaaaaccctaaagactctgccaaagactccaggaattgataaacgacttcaggaagtttcaggatacaaaatcaatgtacagaaatcagtagcatttctatacaccaataacgttcaagctgagagccaaattaaaatgcagtcccatttacagtagctgcacacccacaaaatacttaggaatacatcaaattactttttgtgtgtagtattagacaaccagccacattctttgagctaaaaataaaaacatgcaagatattaaaaatacaaatagggactgaatagtacagtgaagaaaattacaagtagaacataagggaatagtcaagaattgtaggaaaaaataaaaatataagtacagactagatttctcatgtttaggaaattagactttttaaataaataaaaaattgccaggcatggtggcttgcaccaataattccagccacttgggaggctgaggtgggaggatctcttgaggccaagaatttaagaccagtctgggcaacatagtgagactctgtctccaaaaaaaaaaataataattactgggtgtggtggtgtgcacttacagtttctgctactcaggaggctgaggtgggaggatggcttgagctcaggagtttgaggccgcagtgagctatgatcacaccactgtactccagcctggatgacagagcgagacccgctttgtatgtatgtgtgtatatgtaatacacatgtatacgtgtatatatatgtataaaatgttctacttcaaggaagatgattacatgaaggtatataagaaccaccaccaccaaccaccctctacaagaagggaagagtaaaaatcatatcatggtaggaattgtatggaaaaactggaaagtcagaatggaataggtagtacattgctaaatttgttgattgttttagaatgcttctggaacacttcttcaagagtattcatggggaaaaatgagagtcgtgggtaggtaggtgaaaaaccagttgtcattcatgaaatgttggatgaatcaaataaatgagggctttta

SEQ ID NO: 28973 - DNA, 1037 bp, Homo sapiens
ttagaccatatttgtgtttacacaaaagcgaaaacttttaaacttgtgaaagaaaatatagcttacagtcttcatgaccttgaggcatgaaagacttcttaggacagactgtccatcaaagaaatgtcaataaattggaactcatcaactaagcacctctgctctaagaaggactccctgaagaaaatgaagagctgaggtgctcactgggagaaaatcttagcatcacataaatctgacataggacttatttctggactaaataaagaagttgtacaactgaataatacaactcaattaaaaggtagaaaaaacatttgtctacacacctctaaaaagaagagaggaggattccaataatcatgtacaaacatgctcaacgtcattattcattagggaaatgcaaattaaaatacaaagtacaataaaatactactacacacccaacagagtggccaaaatttaaaaagacttacaacccaagtgttgacaaggatgtggaacaactggaactatcatacattgttggtgggattgtaaaatggtagaaccagtttgtaatatagttcatcagtttttaataatgttaaatatgattttccatatgaccaacaatttcacttcctggtgtttacctgtgaaaaatgaaaacgcatgcccataaaaagacttatacatagatatttaaagcacctttatttatagaaacaacccaaatgtctgtcaacagatggctgggtaaacaaattgtggaatattcatacaatggcatgctgtttggcattagaaaggaacgaaatacttatgcacatagcaatatggatgaagctgtctcatgtcaaacaaaagaagccagacacaacagacaacatagtgtgtaattttattttatataaaattctagaactggagcatgaatctatgttattagaaagcaggtcaatagttgcctggattctagaatatggggagattgattttaaaggggtgctttttggggcaatggaaatatcctgtatcttaagatagtagttaca

SEQ ID NO: 28974 - DNA, 1047 bp, Homo sapiens
cctcccgagtagctaggactacaggcacaggcatgcgccaacatgcctggctaatttttgtattttttgtagagataaggatttgccatgttgcccaggctgatcttggactcctgggctcaagagatccacccacctcagcctcccaaagtgtcgggattataggtgtgagccactgtgctcggccatctattatctgctaaatttttactgcttaattttcccagagctcttctgagtgtgtgattggaatactattagtccataattggatttactattagtttaagacagtgatgctacctgtgtactagacacttcagtgagtattttatgtgctggtaaaatatgatcaagcttgcacaactcccaggtggcagagccagagttggaagtcatgtgctttttctgcctataaccagcaaaatttagtgtggaaattagcatgcatatgaagttctttaaaaaaatgacatatcaactgtataatttttatttcctatataataatactaaaatccaggatttggcagctgtgcacaaagatctctctgtagctggtctactttatgtgctttgctgaaggggacattcaatcaaatatatttgagtccttcactgggaatgtctctttaaacaaaaaggcacatggagaagactaagacagaaggctcccatccctaaccagctcaccctgcaaaagatggacagcaaaatgtgtgtggaagtgcacagacctctgacattccagtactgaacagttgttaagtgtgtttactatcgccaagcagcccctgagattcccagaagagcctactggtcattttcctgaggcacgaatttaaatcctaaagcaaacgtggggaagttattctcttagccaagaggtaagccttgctgatcagccagcctctgcagctaaactcaactttgtagctctctctctgccagtgtccacgtattttcggaaaaaaaaattatatgctctgtcaatattagcaaatgtgggatcttaatttatgttgctagagaatgccaaggacctat

SEQ ID NO: 28975 - DNA, 1048 bp, Homo sapiens
catctatgaagtggttggtttcttcctgaggtagctacttgttgccaggagaaagcattatgattcatttctcacagaaagtggttccctctcccccttctctcttcctttactctctcctgctcctcacattccttcctttactcttcctttcctttgtcttttttgtgtgtgtgtgtgtgtgtgtgtgtgtgtgtgtgtgtgtgtgtgtgtgtgtggttttaaggagtggagagtttaataggcaagaaggaagggagaaggaagaagctcccctgtacagagacagagggaggggcgcttcaaagccaagagagggaaccccaaatggggcggaaaccagccaggtgtatatatagagaggctggagaaggcagtgtctgttttgcacagggctcgggattggtttgaccaggcctgtctttcacatagcccgcgaaaaagctggccctcccaccctagccttttaatatgcaaatgcagggcaccatgatgttctgcacacgtggggatatgtgagggccattaggttgccaggaacatgttgggcaagggcaagaagtcccgcagggattgtggggattgtcgtgttgggtggacctagtttctaattgcctgcatttgcatatcaaaggttgccagcccggctctaagagcaggggctttacaagaagcttttcccaagaggctttaaaaaatgaaaacttcccaaaacttttcctccttgtctgcctaaaatactttcttaataactcctacaacattcctcccagtggagacgccccactagctgctgttaggaggttttgggcgacaactctttctggctacttcctgcagaaaaggggtgttgaatggggaacagcagctaggcctcctcctggagtccatctaagggtcctcagaagaatggcgtgtccttgtgtggttcagttgacagcaccgtttggagtttgattgctgctaggcaagaagaaacaatttgagttgtagtattgagtatacagagtccaaatatcaatacaagacatatcagtaagagggggct

SEQ ID NO: 28976 - DNA, 1035 bp, Homo sapiens
aaaagcccaaagttaaagaacacacttttggtatggcagtgggtttcaaaatgggcactcctatccattgctggtggtagtaaaaatagatactactccagcagaggctagtgtggccatgtctattgaaataacaaagtgtccatatgacgtttaacttacaagtttttctctgaggaaggtatcctgcaagtgtactgaatacatgataaaaagtggatgtagagggttatttattgcagcagttttgtaaaagcaaaatatttggcacaacccaaatattcattggagagcaagttatgtaaattatgagatggaatgccatgcggttataaaagagaatcaagtagctcctcctgactggtataggaagatctccaaggcatagtgttttggaaaaaaggctgatgttgacagtgtgtatagagtacagtggaaaattagagttcatgtttgcacttgcttttatattgtattcgaaggtaatacaaacacttgtaacaaggaaaccccagaatgtcagggactgtacacagggaatgttctttctcatttggtaacagtgcttgtcacaggttgtcacaagcctgtaacatttgtaacaggttgttacagatcagcatgaggcttttctccatgcacttccatcttgtggcactggtgtcccttaggacttgggagtcccttgcagagagctgtcacatcgatttcttaacagccgtggcccagaggtgacataccccacttccctgaaaagatggaagaaactaataacagcaggtgccttgggggtggtgatggtggtacgtgactgggcaggaagatgaagggcaggaaagaggggaaaacttttaaaatatattttagcaattttgaactatattattcatttataaaataaaaacaaatcattgtaataaagccagatcatgctctgaaaatggtaagaacccagtgctgtgggggcatagaaggggcagctctgccttgcctcggggagcggacttccaagtgtgctgctttctgtggtgctcg

SEQ ID NO: 28977 - DNA, 1038 bp, Homo sapiens
tttattaggagtctaataaataggatttgctggttttgatttcaaagctgtgaaagccgtactataaggtaaaaggtaacctttatttctatttagtttgtgaaaggaagtcatatgtactaatcagtcattatagtgaagatctttgtgacagtttccctccgagcttcatatttcatgtatgttttcattctcttcttgtcttttggattaaaagtatttctgtaaataaattgggaacaattctgaggtccaggaccttctgttatcaggttagagcattgggagccatttccacataaggcaaatatttctaaagcacagtttcattatttagtcatttttaacaccaaccaggttacctttgctgaatacagcaaaatacacgatttgaagtcaccagtcacctgtctgttaatacttttatagtgcagctgaggttccaacctgaaaagccaatgctttcatctgtgggttaattcctttctataatacttatttgctttagttgatttttgaaaaatctctttgcaggaattctggcagtatatttttttcctccttgtagttttggaacactgcagttgagtgagaacattccctatcctaactcctagaactgaattacagccaaattgaaatgatttgtgctttgaagaggagaattggcaaggatgcatggtctatggctcgtgtattgtaagataattgtaaccatggcagtgtgtgtttcctaatattatgtttctacatttaagtgatgagagtcatcatagggaaaaaatccacttgtatgtttctagttgaatttaaattattccaacttcattattacaacattagaagtagctgtttcctgtggaatagccggttcagtaatttgctttatctcatgtgcaagtggtttctgcctgggccagtaatatattttaataaggcaagtttccaggaagatacaacctaacaatgataactttaaaaaacctagataaaggaatatgaaaaacttgataatgaggaagaccgcctttgcagaag

SEQ ID NO: 28978 - DNA, 1071 bp, Homo sapiens
cagctacttggaaggctgagacaggagaatggtgtgaacccggaaggtggagcttgaagtgagctggatcgtgccactgcactccagcctgggcaacagagtgagactctgtctcaaaaaaaaacaaaaaacaaaaaacaaacaattgaccattgctgaattcacaattcctagctgctaaatatatacatatgcccttattagtcataataaaattatttatgtccatctactttatcatttatttaactgggacttctatccatttaatgatacaaatatcttttaagtattgcttgattttgttttcacaatacatgcaaaataaaaatacttcttgcatggcgcttgggtattactctgcttcttttaaacatggcctaaatgttcagaaacttgccccagagtgacatatattgtttaaattagtctagatatatttacggcatagatttttcaataaatttatgtttctaggtatgcaatgaaatgcttagataagaagaggatcaaaatgaaacaaggagaaacattagccttaaatgaaagaatcatgttgtctcttgtcagcacaggagtaagtattcaatttccagcatttcttttaaaaatgttttgtttgtttcatagcaggatgatttattatttttccttctagctgattgcaaggccagtgagttcttgggtgggttagaatctgatagtatctctttatttgattttgcaagttagaagaacaccagccacctccattatgcacacccatggcttctccgtttagtgcctatttatttgtccttgacttccttctttgcagaatatggtagtagagatggcagaaaataatgatagccagaaaaatcactggaatatagtcaagacctgactaaacgactggcaagaaggactaacctagaggggaaaagtaagagaaaagtggcttctgtccttcagaagcgaatcgagagaagcgacttggattactcacatccgaattgtccttttgagattgtccctagtcagcgtttcactggaaggtgatcttacctgcctctcactacctgctactct

SEQ ID NO: 28979 - DNA, 1064 bp, Homo sapiens
taattatagtaaagttatttggaattgtttttgctaatcaggggatactttctatagtttttaataaaacttagttgaaaataccctcattaagtgaagcttttgatcagactgtatcggcaggctttcccgtattgtggacatgtaactgaaatgcattcactcaccacagttttctttttactggaaggtttttttttttttttaatctcaacttgagtattcctacccatctccccaaaagacagtaggaagtactgttcccggttttcttctgtaattctcagatggcaaaaaaggaaatatgcatgttggagaaccagcataagcgtgtccacagctgtgaagagcagtcagcaattcatccagtcagtcatttaagttcctcagaagcgtgactcatttattccctgaaccacagttgaggatttaggttgaaccaggcactctgcggcaagctgggactgtggtcccagttcttagttctcatacagctgcatggaaagggaaaagatgtattattcaaatgatgacggaaatgtatggacaactgggacctgtggcaagagctatggaagacaggcacacagtgctcggaaggcctttcgcagggtggagatggggtcagcgaatgcctttctgaagttgggggttacctggagaggagccagtgcacgtggctcctctgagcccaggcacgtgaggttgggggaatcagatgaggggccagggtctgcggtggtggggggagtcgtgcaagacaaagctggagagagacatgaaggccaggccagaccgtgaagggcatcgccggccgatcttgaggagcctaaatgatctgactgcagttagaaaccaagtgttttaactagagagagaccataatcagccttgcagttcacaaagattgctccggctgcagtgtggaggattttcttcaacaacgacttcatggtcctgttttatcacagtttttttatggcgagttcctgcaaaatgtaagctattttgttgacttttagtaggaaatcaaagtagacagttccttgctcaagagttttact

SEQ ID NO: 28980 - DNA, 1023 bp, Homo sapiens
tacactgttaaggaatcaaaaatgttgttcattacaaggcttttacttagcctggtaataaaccttaagttagtcatatatatacatatatagtatgatctctctctctctctctcaaaaaagaatatgatagttgtggactttgtttttccatgatgtttctttcgggaaggactcagcctgcagctgcaatgaaaaagaggtgctctatttctgctgattggcatcatctcacccaacacttccctttccagtcttctggactgaatctgccattcacttgattccctgcctcctgctatatttaggctagatatagaattctaaggaagtaataattttcccccagagctttgaaactcttactttattgtgtacaagcaagcagtcaatgcaggtcatggagctaggttaccactcgcgatggcagacaggtagcatcccttgtgctcggagactcgtgttcttcagcttggagaccaccctttatttatttgacatttatcctcctctgtttctcatagaactcttattagctggatgctgggattcctttctagatttgggcctctgcacttctgatcttgtatattacctgcatctttgctttaattctttgttttacttgccgatagcacaaattttcaaccctttcgttgatttctttctaaaaatctttagcaggtttaatttcttaaaagtagaacctttcaggggttttaccccatgttaaacaccttgctgcaggtgttctggagttgggtgtcagggaagaagtacggcgggtatgggtgtgcatttgtgtgcaagtgtgcagctcaatgcccaggcctgtgtctcatcccccagccacacacactgtggtgagctggagctcagcatgctggctccgtccccagggcagtagctctgccctgctttgctgtcagtcactgcccctgtgtcagcaccccctcttgtctgctgatggccctctctctctcgtggtggatttatttttttaatatttatttttacttttta

SEQ ID NO: 28981 - DNA, 1940 bp, Homo sapiens
ttttatatcagcatgatttcctttccttattttaagcttcattatatttgcgttgatacaggaaacaccccaaattcaatttttagaaaaatgttgattatcagctttaaacttgctttgcgtgaactcaagctgcagagaaatgacgattttctgtagtaaagaaagactgatctgtcagtcctactgaattagagtccgacctctgggtcagttaacacataccttggagcgtttgcagatgtgccctgctccctccaggccccattgtctgttgtggctccggcaacccaaaggtggtgttgcgtcctctcagagaatgtgctttcttaagctgagctggacggatatgcagtcctgagattttgttatatttgaaaattattgaaggctttggacatgaatcctatttttctttaatttgtctaaaatatagggccttcctttggggctattgagtgcagtggcttttctacaaaatatgaaatgtgatttgttacaagtttgaatgacatgctgcgcagtggagcatgcggatatctcgcactgtgctgtctttgtagaatgttaggttgggacagggccatacgatcatctgaaaactgtaccatgcttgtttggatcttccagtacccaccacccttgattcctccccggggagaagtcaatgctgctgatgcctttgatattggctcatttgatgaagaggataccaaagggattaaggtacacatgtgatcatttatttctttatttttatttttggatgggatgatttctgttggaaatcaaacttagtggttgttttaatattgggctgtttatagtatttaacttacaaatgagtatcaacatatttgaagaatgtgtaagttaaggatctaaattaaaggctttgaaagctttcttcagactaataattttatttttgaggaactacatggtaaaatattattgatttggaatatttgtgattgaaataaaacttgaattatacctgaagcaggaaaaacagctgtgtgatatcaaacatacttccctagtgcaaaagagccagctgtctcaattcttctaagtttttagatctccccgtgttaggatgaaagagcaaacagcatgaatcattttgcatttgtcaatcaaaggtgaaataatcactgttttttttaatacaatcctctgcatttttcgaacttttgttcatatcgttattcccccaagtagagacaagacataattagagatggtgagtcatgagagaagatcattctgtttaagatgctgggtcaaagtgtatcactacatcaagctctcacctacccccatgctggcagcttgccccaggctctaccccctgcccccgggccttccctgtttcttctcagctgcccccatttacacccttctgacacaaacccgcgttgccttccccaccaagtagcttccttctccagaaggctgcagcactattaaaacacacacctgtgaggtgtaaataaaagagtgacaagtaaaatgcaagggcctagcaggagctataactggagacacgtaggactgggaccagctagactgtgggacagaaaagccagtaaatggctggaggaagatgggaggattgtggggaaggagagcagcatgtacacgccaagtgcacctggggaacccagtggcagctggtcagagctaggggccccaggagatgaggggctgggccatgatggtgattggggtgttcatgggaccagcttttctggtgttggaggttaggtgaaggcaaagtgcagagggcccaggtcacagggctgtgaggattgctgaccaactgagggacacccttctgtggtctggagcagtggctggggtcagcattgagaccgatgcctagacctgtgcacaaccaggcatcgtctgtagccggaaccattgatacctgtcag

SEQ ID NO: 28982 - DNA, 1757 bp, Homo sapiens
tcgtaaggtattttgcagtcgagaagaaagcaatgccataaatcgctttagtttgctctggcttggaagagctcagtctaatatttcaaagtcttcaggcagcacacaaataagtctatggagacaggtggccgggtttctttagtatgcccttttatcttggagtgcttggggactggtttggacgttttttccttccagattgagtatgacagtgtctggagtggggttggtgtcattggtgtgtgccctgtgcggtcatctgggcacctgactcagtttagtcctctgttgtcatcaccttgagactcttagtcatttttgaacaaggggcctgccttttcattttgcactggggcccgagaagtatgtagctggtcctggcgaggaacttagcacgacatgtcacttgtcaagagaggtaaatgtctcccattcaagtactaaccaggcccaaccctgcttagcttccaagatcagatgacatcgggtgtgttaagggttgtatggccatagacaaaagagttaaatatataaagacatttatattacaaacagcattttaaaaattgccaaatcaggccaggtgcagtggctcatgtctgtaatcccagcacctcgggaggccgaggcaggaggatcacttgagtccagaagtccaagaccagcctgggcaacatggtgaaaccccatctctacaaaaaataagaattagccaggtgtggtggcatgcacctgtagtcccagggactggggggccgagacaggaagatcacttgagaccaggaggtcgtctgcagtgagctgagattgtgccactgcactctagcctgggtgacacagcgagaagctgtctcaaaaaaaaaaaaattgccaaactgtatttttatgtaaataattcaatgccctactaaacataacatcaagtaggaaacataagttttaaataaatcagtcattctcatttcactgaatatggttactcttgatttttctaagatttcatgaattgtggataattaaatttattgtagtcgatgattatgttaagatgtaatttcatcttccctctgagcaaagacccttgcaaggttaaccttatgtaacaagaatggccagaaactctttcactctattaataggttactttggtagcagcatcttggtataggattccttggtcttatctgatgattttcctgtggcatttaaagtgtcttcaattctggatgacttactctttatataaacgttgccagaatacaccaagggaatcctgcattcttttaactctgtttacctcaattctgcagggacacatagcctttatttgtaagctcttctttttttttctagatggagtctcacactgtcacccaggttggagtgcagtggcgcgatctcggctcactgcaacctccgcctcccaggttcaagtgattctcctgcctcagcctcccaagcagctgggattacaggcgcccaccaccacgcctggctatttttttttgtatttttagtagagatgggatttcactatgttggccaggctggtcttgaactcctgacctcatgatccgcctgccttggcctcccaaagtgctgggattacaggcgtgagccactgcgcccggccataagctcttctttagagaaccggtccattgtgatcacactggggtgtgtttgccacagcagattttacacaggaaattgaatcaatgtcgacttgctcaagggggggtcatggtgtcact

SEQ ID NO: 28983 - DNA, 1028 bp, Homo sapiens
atccaggtcacattttaacaaagtttattatgaaacaaatgaaatttgaactctaaaatggtactccttggcttcctcaagtcacaatgaactttatattttctttgtccttaaggactaagatagttgttttatttcagccgaatcacagagataaccactcctgcaggcccccacagctggcccaaaggggctgtctttctgacctggctgtgttagcactgattgagaaacgcaggctcccaaattttaaattgcctttattaaaaacacaaactacagaaaatgggttaagagtatacgcatttcatcaaacacatataggggaaaaaatccttcaatttagagttaaataactcagctttgtatagtagagttagcgctccagtatctaacaatctcagaatcatctctgaaaactggtaactatgcttccatttttaattttgtcctaaatatcagatgtctttgatgtaagggtagggaatggagaaatattttcaattgtgtatttgtattacaaagaacttgaaatttactttcttagttgattatattaaatgatgtatatattatatgtggtttataagctcaacactggccatttttttagttttattgttaaatggtatttttctatgtttaattataatagatctggctttttctggatagcataaagatcactgaactatatatatataagaaacaagagttctattttagcacaaaggcattttatattatttattgaatccataagtttgttttcgtcaaaaacattccatattatttctgctcctttttatttgtatagtttgttatttaaagaaatggcagtccttcctgttcttaatacaataaaattgaaataatgcacctagtaatgtggccgacatctcttctcaccaccatggactgttttcaacaacagttgatcttctggtctgtgctgagaggcgcatgcatgtctttcgtcacgtcgggcagcacacctgctgtgaaatactgctttcatctacctcttc

SEQ ID NO: 28984 - DNA, 1014 bp, Homo sapiens
accaaaagtctaaccagcttcttgcttcatggtggccgggaaacactaggttggaaatggcaaatacttggcacaggttccatccctagccattcctatacccgtgccagacattgctagtcaatcacagcatgctgtcttgttcagcccaggcacagctcagaatgtttctcaatacaacactctgggcagcccccaactacagatcagttggtgctggcaggtgaaagaaacattattggccatcctggcactcagccacgaggcccatctgtgaggtccagcatctcatcagcctgtaggagtggcctgatgactcaccgggtggccaggagtgtgtggccagcctaggtcagtggagcaaccatgatacagagaggggagagccaatgggctggaggagctgagattttttttttctaatttctcatagaaacacccactgcatgatttagcaatggaggctggcagggtggggtgaggctactggctggtcagccactgatatgcaaagcatttgaagattttaatctgcctgggactgaatctgagtcaaccggggacatagctgctgccaaggacatggtaataacgtcagaaatggctcacaggcctacggagcatctagtactcaaaccgctccgtgaagtgggtgagaaaaactgcatccccatttgacagacagaggagttggtgacctgagaggtttgacaacaggcatagtgaggcccactcttagatctaagacttccagggctgctgtggacccatggaaatgcaggaagcctgctgtgtgtaccctcatcaaccctttgcagagtgaaatgtccacttctgcggcagaaggcaggttagagaagtcccaggagactgagcattgttctgaagaaactaggagccatgtcccctgagaaaaggctgaaggtgacagatgagaaaactgggggcggattccatcatttcagttggaaaaggggttaacctcgttgtctgttgttccagagagtggaactg

SEQ ID NO: 28985 - DNA, 1488 bp, Homo sapiens
ccattctcctgcctcagcctcctgagtagctgggactacaggcacccaccaccacgcccggctaattttttgtatttttagtagagacggggtttcaccgtgttagccaggatggtctcgatctcctgacctcgtgatctgcccgcctcggcctcccaaagtgctgggtttacaggcttgagccaccgcgcatggcctgccagggatcttatacttcactggggagtcaaagagttccttggtgacagagaaaaagatagagtttagtgtgtgatcgtgaaggactggcaaatataagccacacacatcgccactcttcccttcagcatccttgacagacattgcaagttgattgcctatctctctttgggaacttgggtgcattttcaggctctttctcagaacagtgttctgggtagccaagttttaaaagaactttggagtcagtcttaggattgagactactgataatcctcagtttgaatcccagctttgccacacacctgctgttagatcttggggatgattgcccttccctgagcctccatcggctctgtagaatggggagaccactcccacctcatagggccattgtgaaggttcccaagcgttcttgcagagctaagacagcgcttgatgccctgcaagtgttccctgaaacctcattctgtgttagcaccagatgatgagattgggggccagaggtgctctgttggaaagaaggtcaggaggaggtggggtgagggtgggggcagtaagggatggctttctgggagaatcaaaacttgaggggaaccttgaaggatggggaatagtcaataaatcaggagaaaatagtgatggtgcagggcatttcaggatggcttctccaagattcattggactggttcggtaggagatgaggatattgataggatattggggtgggggcagggtggacacttcagaggaggttacagattgagctaagaagtggaggctggtctgtgcagcagtgttcaaggcgtggtaagaagagttgggaatctcccacggctggcagaacttgtgagcccccctgccctcaaaggactacaagacccctaatgagaagagagcttcctcccagtcctcctttctcttcctcctctccctccctctattcacccagcagctgtttactgagtccttcttttatagtgggcactgccctagcctctgggatgccaggttgctggcctttctgttaccagtgcacctatttgctctcgcctgggtacctacttttgcactggcttttcccgtcacttagaatgtatgtccctctggttttcacgtggctgacttcttgttggcgctcagctgaacatcacttgttcagagaagcctcccctgaccaccctgtccacagtactctatcactgcagttctcaaacattttggcttcaggctctttacactcttgccatatgacgcacagtgctagctgattgcctgcctatctttggg

SEQ ID NO: 28986 - DNA, 1091 bp, Homo sapiens
taatgggtcatatgacaaatttgtttaactttttaataaactgctaaaaattttccaaaatggttgtaccattttgtacttccactcactatagatgagcattccagttcctcctcatccctgccaacgttcggtggtgtcagttccttccactttagccattcagctgtgtgtataatggtgagtgggagtttgatggatggggaaataagatgcctggagtgtcagacaaatccattgagtgtaatacccaaacaacattacagttactaaatatgggtaatttatttgacagtttcaaggaaccacaaatcccccctgtggagggccaactctaaactcatttcccactccatgctggcagtagacaacatgtccctcatgctcatgctctcaggggtaagcaggttcttttttgttttgtattattttggctttaaacattttttctttctgcttctattggaccaggggagtcagattatttacaaagtgcaggtaattttatgagaagtcaaactccttctgtgctgagccatgacatgcatgcagaatgaaaagtcagctccaacagtgaccaatcctgcattctgatctttctgcgtgactgagcctgctttgtgaaagctcattctctggcttgaagccatctattgactcttgtcaccagaagaataaaatgcatgctccacaaagccttgagtgccgaccatcatggacctctccacctcatctccacatgcttcctctctatgttccacttctgctgactttgttaggtgtctcaaatgctcaagagctaactcctgtctcaggcctttgctgtttttcgttttttgtttctgggacagggtgtgattctgtcacccaggctggagtgcacttgctgtttcttgtgtctgtaatgttctttttcctgctctctctctttttaattttatttttgctatttacttatttattagagacagggtctcactctgtcacgtaggttggaatgcagtggcgagatcacagttcactgcagcctcaacctcctgggttcaaatgatcctcccaccttagcctcctgagtagctgggaccacagga

SEQ ID NO: 28987 - DNA, 1046 bp, Homo sapiens
aaaatactgtaggtcgaatattgtaagtgcatttttgattttgcactattgtaaactcagacaaattctaagtccaaccattgctaagttggggaccatttgtaatggtttttaaataatagaagaatgtttcctcagctgtctgtaccattcacaatataatggccacagacacataatacctttaagtttaacctgtcttattaacactctgtacatcactttcttaaatccagacaatcaacaaaatgatcaaaccctgatttgcagcactggccattatccctggtgtaaatattcccattgtggcttatttcaagctaccagtgtgacgtcattgaatgtggagttggggagagatgcatagataccattatatgtgtttcaaccatataggtacaattcatgctaataactagtgtactccatacaattgtaagcttatataatttaattttatgattgcatttcacaagctgctcataaaattcctgaaaatttaatgattagctcttgtgggctggtatgagctgcacccagcacactgctataaatcactgtggccatgtacttcctgctcagtgggtaataaatggcaaagaccccatgccatagttcagatggccttttgtcttcttcctgggaagttctttttacactggaggctccttctaagggcatccttcctgtccggataaagcaggactttacctttcttctcttccaaaagcctctcttttttcccttcatagcacatagtcacagttggcagcaacgtctccttttgggtgtggatttatttgttccccaatgcaactgtgagcaccatgagtgcaggaaagtgcctgtttctgatcatggtatttcctgggtgtgacttcatgtacagtcaagaggagaaactctgagtgggagcactagggaatagttgaagcttaatcttcattttggagaagagggagtgttattatccacgttcattattcacagtagcaaatttcacagtagcaaaaaggtgacagacactcaattgtccatcgacagat

SEQ ID NO: 28988 - DNA, 1018 bp, Homo sapiens
ctctccgtcatcttagcacagagggaagcacaaagtaggggctgtgctcagtgccctgtcagtgtctagcaaaggcctaagcactcagtaggtgctatgctcagtgtcacccaaggtgctttgcagtgtcaggcacaatagtggatgttattctctgtaccatcggcaatgcccatcccagtaccaagcacatagtgtgctctttctttgctgtttcctttccctgagtgtttctagcagtgtgtctccaggaagttatgccccaagacacttcctccaggtcctcagcctcttgcacgttgggacttggaatgtgccacctggagctgctatcagggtgcagtcggctgaaataggtggggtgaggcaagcagtccttgaaaagatggtccagggctgtccttccctgtgggggtcatctggggtcagtgagcagcgacttggcttatgcatttcctcccagggccccagacaaagagagagtccttggcaatgcggttaccttgacaactctttgtgttggagagtgagagagagagggggaggaaggcagctcagggaagcggggtggctgctgggggagggggaaggagcagggaggagctggaggagaaatccacctttaaaagggaagagagaaatgactccacttctgggcagagggaaggaagtgtctttatggtgcaggatggaggctggtctgggtgggacatcctgcctctccttctcaccccatctagaaattctgccagcagtcttaacatccagagaactaggtctgagtcccagcccttcttctaactttctatgtgactttgtgcaagttactttccctccctgaatctgaatttcctcttgtataaaatagggataataatccacaaggtgactgtgagcattagctgagcatttcaggtaaatgaatagtagtgggcccctagtgagtgttaactccctgggggccattattcatttggtattttcttagtggtaacctgggcttagtcaagtgactccc

SEQ ID NO: 28989 - DNA, 1047 bp, Homo sapiens
tgtcaacacttgctactatctgcctttttgattctagccaccctagggggtaggaagtgtatctcatcgtggttttgagttgcacttccctgatgaccaaggatgtcagacatcttttcatttgcttactggccattcgtatatcttctttggagagaaatacttattcatatcctttgctcattttttaaaaaatgggttgattggccaggtgcggtggctcacacctgtaatcccagcactttgggaggccaaggtgggcggatcacctgaggtcaggagttcaagaccagcctaggcaacacggtgaaaccccatctctactaaaaatacaaaaattagctgggaacggtgggacatgcctgtaatcctagctactcgggaggctgaggcaggagaatcacgtgagccctggaggtggaggttgcagtaagccaggattgcgccattgcactccagcctgggcgacagagtgagattccgtctgaagaaaaaaaagttgggttgtcttttgattgttgaattgtaagcattctttatatattctggatacaaatcagttatctgatataagaatcgggaatattttctcccgttctatggagggtctttttactatatggttttgtttgcagcacaaaagttttaagttttggtggaagtccaacacacccgtgtttctcttttggtgcttgtgtttctggtattgtctttcagaactaagctctgtgggactctaaaattggtcctctttttactccactgaagtgacaggtatttgctcccccatagggattgtggaaggagctggtcaggacttggtggttgtctcaggctggtcgggcatggagctgtggggaagaacaatgaccctggaataaacaatctgggttccaatcctggttgggctattgctttccttggttcactgccactgagactcagttttttcatctgtacaatggagataatcgcacgtacccttgaggtggctgtgagattaaacgagggggtccgaacacatggaagatgcttgataaacacagc

SEQ ID NO: 28990 - DNA, 1027 bp, Homo sapiens
catacctgatgctgttcccttatacgttttttttctttttgctcttctgcagacagtgactgaacccttagactttttctgctatttcagcctataagctccttttattggcttaaggtggtttttttgaattggacttatatcaagagttgccaagagtccttactattacactcattaggcatgtaatttctcctccctggacctttcttatctgtaaaatgggaatgacaaaaacatagatctattatgtagcttaaataaaataacacaaataaagcacttatcagtgtttggctagaatacatgctcaattcagctgcgattaatccacactcatccttcaagtttcaaaaagttctttctccttcacttgttctcgtataaacggttcctgtgaagtttaaatgaggtatcatgagggcaaaatgcctgccatgtagtctggcacatttataatgtagctgttaaatggttttctgattagaaagttatggaagcccaggtaagggaggactgcagggccaagaatggaaggcagggagaggtggtttgagtagtatgactgtccactctgtggaatggtggtgaggctatctcaactggcagctcagcacttagcacagtgctggagccactggcatgagtgaatgtgtgtccacatgagagaaccaatgaatagttcaaccacagccaggactttgacttgatctcgtagggagctgtgcaagttcccaaactgggcgctgacaaaaaagcatcctttacaaaggacccctctgtagcctacaggggctggagaggaggtggggaatctggagctgagtgtgcaagagttgcctggggttggggttgagatggaaacatcaggggcatggatgaaaacgagagatctgatgtagagagctctgaccacacttgacacaagaccatgtgcatgtgagtgtgtgtgtgtggggtcttgctggtgagcttatgtgtgtggagtgtgcaagtgtgtttgagtgtgtcgagtgggtggagatag

SEQ ID NO: 28991 - DNA, 1025 bp, Homo sapiens
ccaaaggcctttgcttggcaaagaagggtccatatgacctggttttggctcttttttcggctccatcatagatccctttgttcttgctccaacctcaaggcctcttttcatgtcttcagatacagcatcctcatggagcatcctcatggtcatctttgggcctccccagtgctcatccttctgcctgggcatcacgtgctcaacctctcatcattcaggtcttgatctgaagcgcacctcttcccagaagcctcccctgcatcccctagctgggtcagttcccacccccatacgtgactcttcctcattgcctgttcattccagcatcacacatgacaccagtggcactaatagatttattcttctgcctctttgatgaatgtctcctactttcaacagtatgaaagcccccatgtctattcttcttcccaattggaccctcagtacccggtaggtattcagtaactatgttttgaatggttgaactgtaaatgggtgagtttgggtgtggaatgtgtgagggctgagaaacgactgtggctcccatgggactgacttatgtatcaggtgtgtgactctgagaggacaaattgctcatcttgagatgaccagaaccatagcctaaaacaaacaattgaagaaactgtaagagtttaacctggaaaggacaagacttggggaatgtggcaagtaccagtgtgccactgaagacaaggactgttcctgtttaccatcctgtccccagaatctagcccagtgtctgacacacacaatatagactttaggaaatatgtccccagtgaattttgaaagagagaagaacacctaagataggtgaagctctcaaggttcaggaacacagatcttgcctcaatcaaagaaaaccattctcatgtttagagttgtccagagctagcacaagtttagggtgggtagggggtgacctacactgggggttcttcaagttccttcgtgctctgagacttttttttttttttgcaatggagtttggctctttttgccca

SEQ ID NO: 28992 - DNA, 1101 bp, Homo sapiens
aagatcaacctaatttaggcctattaaaatggaaagcatattatctctcattcaaaggaatttgtatttgatgcaaatagaacaagttcctaaactttagaaatgttcttggatttttcatctccgtagttaaccaacgaagaatgggtcccccatttaaaaacaggggaacataaggaacaataattagttatgtaaataatgtggcattcttgtttataattagttcaagaataaaataaaattcacgcatgtcacaggactaattttcgtatgcaaatgaacaatcaaaattataaatggtaataatgcagtttgggagatgtgacattctcaatttattagcaggggtgccagttacagctgatgatggctgacgttgggagatttcaaaggtgcctgggtctggaaaattctcacccatcaagaggagaaaatctaactaaaatattttcacccattttatgtcactgatggctgcaaagtgaacccagggcgcctctgtggctggagagacaggtgctgcaccagggagacaggagtccaagtgaatttttgaaaagaacgctctgaaatttggctggtgaaaaaagcaaagaccaggcattgcaacctgggctctgacctcaacaacgtgtgtcaccttgggcaggccccctttgctgcctcctaatttccccatctagggtggaagttttattaaagaggaggagggagttttgaaatcaaactgacttggaatcttggttctaccacttgctaactgcagggctttccttaacctttctaccttacctatctggactcatgtagcctcatctggtaagtgacagcgatattctatatctttaggcagtgccaaattaccttaaagaagggctaagcacatgtttggggcactagaaaagtagagtaccaggggaagaaaaagtgtgagataatcaggaggtctagaatcaaaagctgcttaaattttggcattatgagagcgtcgtgtcattctgaaaaataatttaaaagtacttaatatatttaattgaaaattatatatggaatgtatgggtgtgcattatatatagaatatgctttgctccttggaat

SEQ ID NO: 28993 - DNA, 1028 bp, Homo sapiens
cctcctgagctcaagtgatcctcccaccacaacctcccaagtagctgggactacaggcgcacatcaccatgcctagctagtttttatatatatatatttttgtagatatatgattttgtcatatttcccaggctggtcttgaactcctgggctccagcaatttacccacctgggcctcccagagtgctggtattacaggcatgagccatcgtgcccggctactcctaagtattttagcttttctttttgggactattgtgagtgcgttagatttcttaatttctttttcagatagttgattgttggtgtaaagaaatgctgctgatttttgtgtattgattttgcacactgcaaatttactgagtttgtttgtcagctctaacaatttttttcatggagtctttggagttttctgcatataagatcatgtcattagcaaacagactatttcccttcttcctttcctatttgattgcctcctatttctttttcttgtctaattgctctggctagaacatccagtgttgtgttgactagaagtgttgagagtgggcattcttgtcttgttcctgatcttagaggaaaagttttcaacttttcaccattgtgtattatgttattggtgggtttttcatctatgggctttgttgtgttgcagtacattcctcctattcctaaaaaaggatgctgaattttgtcaaatgtatttctgcatccatgaagatgacaacatgatttttatcctcctcttaatatgccatatcacatttatggatttgcatatgttgagccaaggatcaatatattatgagcatttactatgggatcagtgtctgtgttgaaggttttctgtttgtgacatcacttgaccttcatgaccattctctgagccaatgaatactccattctgcaaatgatgagactgaatctcagagaagttaatcatcctgacagtagtgggaagcctgtgtttgtccacttttctgcagtgccaaaaagggagagtgatgtctttctcttctctgtgt

SEQ ID NO: 28994 - DNA, 1042 bp, Homo sapiens
ctttttatatagttatgtttaaagtatgtctcttataagcagcgtatacttttctttttaattgagcctaacaatctttgccttctatttgaaatatttcctttacatttaaataattactctgttaaattacatgaaactataaatgtttaaaacaaattacataattttataagtttcataaagttttacttttatagtttatatattaatgttatatgattttagagtgtaagttttacatagatatattacatttattcttaaatattttacatatttatgtaatattgtaaataaaatttcatttttaaaatttatgttctagttgttcagtgatagtgtgtaaaaatactattgatttttgctaaattcacttattacaaggacagcaaataaaaacagcttttcttctccctttccagtttgtatgccttttatttctttttcttgtcttatttcagtggctgtgatagctcagacaatgttaaattacaaagtggtaagagtggacattcttgtcttttttctaatcttagagaaaatgataactattccggcattacttttgttagttgtggatttttttacatgctctttgtaaatttgagaaagcttttttctatctacagtttgttggaagtttttatcacaagtggctgctaaatttgaaaataattttctgtatcagttgagacaatcatatgaagttttttcctttattctcataaaatcatgaattgcgttgtttaattttcagacattaagtcactttgcattcctgggttaaacctcacttggttatgatgtattatcttctcgtacattgctgcattcacttttataatattttgttcagaatcattgcaccaatgtccataatgaataatggcatgcattattctctttctgtatttttttcatctacttttgatatcagggtaatactggcctcataaaatgatgttctatttgtttcttctaaccttcattttctgaaagagtttatgtagaactggtattatttctttcttaaatgtat

SEQ ID NO: 28995 - DNA, 1035 bp, Homo sapiens
gtgggggcacagagggagggaggagagggaagaagctggttccagtctcgtagaagtctagaaagagaagactccagcttttgccatcagtgcctgcaggtgtgatgtgggtaggactttagctgggtgtggacctagaaggagaagcaggttgaaagaggactgtttaagattggccgtagggtgggtggcgctgcttctgctgctgctccagcctttggcgtctacacttttcaaaataaaacacgaaccccagacgtgggcatgcaaggcttgctgtgaagttctgacaagaaaatggacatccttgaaaaacaatggccacacacacaaaaaaacagggagcatgaagtccaacaactcgggatcagatcttgcagacatcatggaagctctggatctccatttgctcatctggatgctggaatgataaccactgattccaatcatccgactataaatcagcaagcagaggaccctttggtttaaccaacactcctatgaaatagagcctggtattggggaagaaagtcccaaaatggggtctatggggacattagttctaactcagattggctcctgatttcatgtgtgatatttgggaagccattttccctcagagtgaaatccaaagccctggcctggtctctagcagccctatgacctcattttcgagccctgttgctctcactcaggaagcacgatgcccagttcccttctgtttctttcttaagtttgttcccagttcgcagccttttcacttgcagtctccccttcttggagggctcttcctcagatcttcagatggttcactcctttgtttctttcaggccctgctcaaatgtcactaagtcaccatccccggcccctctactaaagaggcacatgtggccttcctaggttttctgacatgtttgttcactttacctctgtttccccacaaagataagtatgtcatctgcctccttcaacagccatatccctgaggcctagaagagttgatacttgattaaccatatggtgaattaatgaatg

SEQ ID NO: 28996 - DNA, 1027 bp, Homo sapiens
aaccttagccagtcatcatttatgttattttttttttccattggtcagctgtgatgttaggataggtttgctcaatagttcaggaaattaaaatgatgaagctgagacagatttatgaatagtactgattttaatttcaaataatagatgaatggcttattagctggcttaaaatgaagatggcctatgtaagatatatcactaattttatttgagaagtcttcttaaagcacttatttttgagtagataagacaatcacatttcataattcaaattgtataaaggaatgtatacagtgatacccctcttccattcctatctcgacacctccagaaaccaatattaccagtttttttgtcctggagattttgcatatataagcaaatatatttattttctttgtccctctttaaaaaaaaaaagaacatgaattgcagtatacacgctattctgcatcctgcagtttttcttgatcttgaggaatgtatgagacaaggttcagtcagagaagtggagctactatgtgtgttaagacatatggcattcatcaaatgaattggcctttactcagttggagttgctgaagaaatgaaggtccagaagggaaaggtggagaatgagaggagtcactaaccaggctttctgaaggattagtgtggtgaacaagtcagagcttgttagggaaatctgggaaacagtcacatccagctgctgaggtgagattgcagaaaggatagtatgctttcaggaagagcgggatgtgaaatggaggagagtggggacaacctaaagctttccacatacctttgtgagtgtccatcactatcctaatcctgaaatcttcattgagtcacgtctgttgcattgttcctgccttctaaaatcttgtgcaaattcctcttggccaaatcttactcagagccatacaaggaaggggattctggaaaacagttccaagcttaactttactaacccagcacagttcagcaccaagagcatgctgtattgatatgtaaaggcagcttt

SEQ ID NO: 28997 - DNA, 1082 bp, Homo sapiens
tgtggccgtcaggcgccgcctcaatgcctcctgggagttgtagtttagaagggagagcggaacttagaacccgggttcccctcgggtgatcccgccccctcgactccccagccaatcagcaacattagtctggttagacgctctctttgcttttccccacgagtgaccacggctagataggccgccggccagatgtggcgggggagagccggggctttgctccgggtgtgggggttttggccgacaggggttcccagaaggagaccgctaagctgcgatgctgcgtcgcaggcgggaagcaattatccccgctgttggaactgcggcggcccatggggccccgggcgggaggacaggttcttctgcccacagtgccgagcgctgcaggcacctgaccccactcgagactacttcagccttatggactggtacgagcgacggtttcgggaaacgggcccgggcgagagacacgtcgaggtctggcctgcgagaggggaggacggatctggctggcggaagagaaggcgggactgatgggggggcggaggtctagagagcaggcgtgagagaagtgtcttgatttctcaggaggaaattgagaggcggggactgagggaagcaacgttgaggtgtggagaagggagacgaacgggactggaggggcgggcgctgaagttagaggaaataggggggccgaggctagaggggagggagatttgaggggcggtacctacgggaaagggaaggagaagtcgaggggcggaacttgaggaaagggtacttgaggggcagggcctgggagactggaagacttgaatgaatagggtgagtaaggtttaaagttgggttgatgtatttaagaaaggactgcagaagtgtgatccgagattagggagtaaagcatgaaaagcttaatattgtgggcgaggcctgagggaaaagtgagaattggagggagagggtccaataaatggtttttccccctgagactgaggttcttggagagacggggcagtgtggatagagctgaactggtaaggaaataggacagactctgggagtagaatgtgaaaggggctgaa

SEQ ID NO: 28998 - DNA, 1030 bp, Homo sapiens
ttcaattttagtttttcgttccatttctaaagtttgtactatgagcgtgcatttttttaaatttagttttattttattttttaaatagaaacgaggtctcactgtgttgcccaggctgatctcgaacttctgagctcaagtgaacctcccgcttcggcctctattatttttattttatttttttttcttattttttgagacggagtcaggctctgtcaccaggctggagtgcagtggcgagatctcagctcactgcaaccttcgcctccgggttcaagcaattctcctgcctcagcctcccgagtagctgggactacaggcgcccgccaccacacccggctaattttttgtagtttagtagaggcggggtttcaccgtgttggccaggatggtctccatctcctgacctcgtgatcgcccgcctcggcctcccaaagtgctgggattacaggcgtaagccactgcgcccagcctcttgttattttaaatgaggggacaggaaaacgtcacatgtagagactgagaccccggggttgaccctgagccccctctccgaggggaggtcgaggttcctgcctggccattgtggcgtgagggtggccaggtgtttgtgaaagaggggcccccagagagcagcacgggagcgatttatacacacgaatattaacatggagaagtccgagaaacccccgtaaatatgcctgtccactttttttaaagcaaattacaaaatgtgaaattccccagaaatgcacagcaataccttctctaacaagtaattattgcttcctcctctgcgggcagcactattccaggttctaggggtgcaaacagtagtaagactgctacctggtatttggaggatatgcaaaaagtgaaatgttaagatagcaggttcctaagtaattctttagtgttattaagtcggattagctggtcaattttattttggtagggagggaacaggatgggaaaaagaactaaaagcaagtccatctcttgatatctaagccctctaaagggacatagt

SEQ ID NO: 28999 - DNA, 1058 bp, Homo sapiens
acaagtttgaaaccagcctgggcaacatagtgaaaccccgtctctataaaaatacaaaaattaggttgggtgtggtggctcacccctgtaatcccagcactttgggaggctgaggtgggcgaatcacaaggtgaggaattcgagaccagcctgaccaacatggtgaaaccccgtctctacaaaaaatacaaaaactagctgggcatgctggcatgcacctgtaatttcagctacttgggaggctgaggcaggagaattacttgaacccggaggcagaggttgcagtgagctgagacagcgccattgcactccagcctgggcgacagagcaagactccatctccataacaacaacaaaaaaaattagctgccatggtggtgcacacccacagtcccagctatttgggaggctgatgtgggaagatggcttgaggccaggaggtggaggttgcagtgaactaaggttgcagtgagcctgggaggcagagtttgcagcactgcacgccagctcggacgacggagccagaccttgtctcaaaaaaaataccccatctctagaaaaaaatttaaaaaattagccaggtgtgttggcgcatgcccatagtcctagctacttgggaggctgaggtgggaggattgctttggccccagaaatttgaggctgaagtaaacagtgatcatgtcactgaattatagcttaggcaacagaataagactgtctcaaaaaaaaaaagagagagaaagagaaaggaaggaagggagggagggagggagggaaggaaggaaggaaggaaggaaaagaaaagaaaaacatccccaaactgcagaaaacccctgtgtgctcttcaatcacttatttttcccctcccccaagtaaatactattctaagcttgatgtttattattctcatgtaattctttataattttattacatccatacgtatggcctaacaagaagtggtattgttttgcatgtttgtacagcttatttatttatttatttatttgagacagagtgagactctcgcccaggctggaggcagtggctctatcttgg

SEQ ID NO: 29000 - DNA, 1032 bp, Homo sapiens
ggctgggaccacaggcacacaccaccacgcctggctaattttttgtatttttcgtagagagggggttttgctgtgttacccaggctgctcttggactcctaagctcgggtgatctatgcacctcggcctcccaaagtgctgggattacaggcgtgagccactgtgcccagccaagacttgtttttttgagggagaattttctgtgattgtcgcaactatttgcaagcagctttcagacatggtgtgtcctgattattccaaatagttgggatagtccagactctcaaaataatttcaccttgcctgtgcttcctggaggtctggagaaaggagacagtaggaggtgacaccctctggctccttccagtctggcgtgtgcctgccctgggaacattgttcagaacatgctggagaagagaatatcacagcctgactgtagacttttggggatgtgttttatttaaatatgtaaaatataatattttggtgtcacttaaaacaccgggacttttggaggcgtagtagaagttctatgtagcttcagaatgacccatcagaaacaaatgtatatgagtctttacttacatttgtgccatattgcttccccctatatttttttccctttggaagctctggcatgggccttgatcctgtgtttaagcgctgtgtgggaagcagaatttaaaaggactgtagtagtatttctaaagagacttaacaggctacatgtgagagaattttagatttcaatttagcaaacgtttgattttctagtctttatggggctgactgtaagcatttgggaaattattgaattattgcttagttctgtataagttgacatgctgaggttttttttttttttttttttttttaactgtttttgtgggacagtggtgattacatgggcattgggactttcaggaatattccagaatctatgatatgttgtatttcacttgtgctagagggttttcaggctgccttttcatggcatgttcactccagaaatgctctaatgcccatcaataa

SEQ ID NO: 29001 - DNA, 1052 bp, Homo sapiens
ggagccaactccccattagattgtaacctccttccgggcagggttggtgtttcaatctatttaacatttttcagctgggtgcggtggcttacacctataataccagctttaggaggctgaggtgggatgatcgcttgaggccaggagtttaagaccagcttgggcgacatagcgagactgttcctacaacaaattttttttaaaaaaattagccaggtatggtggtgcacatctgtagtcttagccacttgggaggctgaggtgataggatcacttgagccctggaggttgaggctgcagtgagctgtggtagtgccactgcattccagcctgggtgacacagcgagacctgtctctacaaaaataaataaataaataaataatttttttttaaatgcagaaaacatttcccagttcaactcaaagagcctctttgtttgaatttggaagagctgtcccttcctgaagatacctgaattctattttctgctcatcggtcataatgtgaatctaggatgagcacagatgtgaacggcacctcctagagttgtgcggtgcataaggccaacgcccagaaggcactcttccatctccctgttggctgacgtggcacctgagttgttcccccttctctaatgcttctccttcagcaattgtgatttgctgcttctgatttctgtagtcctaggaaaccagggaaccatgtttgttagaattatgtgtaaagttaggggacagagacatcaagggggtgtgtaagtagtttagtatgtggctgctttggctgcttttctgctttttgctggctcctctttagagatcagctgactggcgcatggagtcctcaaattttgggggcatgtaataaatgatggatggacctttttttttttttttttttttgagacagagtcttgctctctcactcagactagagtgtgtagtggcacgatctcggctcactgcaacctctgcctcctgggttcaagcgattctcctgcttcagtctcctgagtagccacgattacacgtgcgcaataccacgcctggct

SEQ ID NO: 29002 - DNA, 1051 bp, Homo sapiens
ggtggggctcagtatttgagaaatactgttgatcctagttttctcttagagatatattctgcacagtagtgaattaatggctctgagaaattctgttgaagagcggtctttcactttatttaatctggtacttcccaaatgtacttgatcacagaactttttctcaaaggactcaaggtgctaggggatatggagtggcgggtagccagtattaggttagtttagggtctgcactggttcagttggtgtcctgttagattatgaggatggaaggccaacaccaagttaactaccagctttccacagggccctgggatagagtcatcaccacctagaatgaatggcctgaacacctttgaactgtggtaggactatttcttccatttcagcttagatttgtggtcttctctataattgggtgatggggtatagggagttgtagtataaaagaaccaagaaacagtgcttctctttgaagaatttaatttctactggaatgggaagattcatgaaggagttaaacagtaccaccgtccaagtaggtatgaaataatgtcaagtagcctgtcttgtaggcattttgtagcctgtcttgtaggcaggtgggggccacaggaagcaggggcagcctttattgtgacttgacttaccaaactttgggtactgtgatggcgggcagataagatagaggagtccccccgacccctgcagccctaaatgcctcttcgtttgccccgcctctgtgtgtaatgtactatgtgtgaaagtctcttagactccccgcaaggtagacattttagagttggatgaaatgcatgataagaactccttctggtactttccagatgtatttgatcccagaactcctttttctcaaaggacccaaagtactggggaacatttggttccttctggaaggagaactccctctggctgatctgcaggcccccactgctgggttggcatcctggatttcgaggtggccaccttctgtgactcttaggccttgagcttggctatctggttttggagacctggtgccttggaagtg

SEQ ID NO: 29003 - DNA, 1060 bp, Homo sapiens
cccatataaccttttccttcttagcatttttttcttttcttactcctgagttaaacgtgtagcagaagaggtgtaaagacacagggccagcatgaatagtgctccctttttaaaatgtggaaaccggcttggagaagttaagtgacttatccaaggctgtacatccagtaaggagaaaaactggccttgtgacatagccccagggatgtgctgtgccccgtgatggccccatatgttggtgttgggagttcagtggctcatcaagtgcctgtagctcttaaaggaaaggagttgataaaatgaagcaacctggggcgcttactccaggggccatttctaatctgatttctgtaagtagtggatttttgagagtgggttcttgtatttcctcctggtctgctgtgttcatgggtatttttctggagagatggactctacatcccaaaactggtgaagatcccctgatagaggtgccgctaatgcccctccccatgcagggattgtactggagaagctgtgtctgtggcctgcacccctctggaagctccagtgagtgtcctggggacacattaggaaagtcagatgtgatctaccctcacacccgccagtctcaaacggctttttttccttcttaaaagtaagcaaggaataaactttaaaaatagcaaagggtcagaagttcctttttttttcaagcttttattataggaaatgttacatgtagactccaatagatagaacatgttatgtacacaccgtccctccatatactcaccatcacccaaaatagttgtcaacacctggccccgcttgtttcacttacacccccatgccaccctcatgttattttgaagcaaagccagccatatcatttccctgcccgtaaatatttctaaaatatctataaaagcttctttttaaaaaacatgatctcaaggctgttcccacaaatgttaagctagtgatgtcccctcccaaggggcaaccccacactccctgagagatggtgtatgtgtttcactgctcatgcactggcagccacgtctagaggctgggtctg

SEQ ID NO: 29004 - DNA, 1964 bp, Homo sapiens
acatcaccctgcctggctttttttttttttttaattttattttttaaagtcaataaaataggccaggcatggtggcgcacacctgtaatcccagcactttcggaagctgaggtgggcggatcgcctgaggtcaggagttcgagaccagcctggccagtgaaaccccatctctactaaaaatacagaaattagctgggcatgggcatgcctgtaatcccagctactcgggaggctgaggcaggagaatcgcttgaacctgggaggcggaggttacagtgagccaagattgcaccactgcactccagcttgggcaatgagcgaaactccatctcaaaaaaaaaaaaaaaagaaaagaaaaggtgaataaaacaagtggctgggcgcggtagctcacacctgtaattccaatactttgggaggctgaggcgggaggatcacttgaggtcaggagtttgagaccagcctggtcaacatggtgaaaccctgtctctactaaaaatacaaaaattagctgggtgtgggcacatgcctgtagtcccagctactcaagaggctgaggtgggagaatcacttgaacctgggaggcagaggttgcagtgagctgagatcatttcactgcaacagagtgagacttcatctcaaaaaaaaaaaaaagtgaataaaacaagttacttttcttgagattatcaatgtaaacttgagttttggctgagtaggggcattccattggacttggcaaagtcagcttatctgaaatgttaacgctttcatagaaaggctttagcttttcttgtaaacctgctcaaagcaccgggcgtggtggctcacgcctgtaatcccagcactttgggaggccaaggcaggcgaatcacaaggtcaggagattgagaccatcctggctaacacagtgaaaccctgtctctaccaaaacaaacaaacaaacaaaaaaaacctgctcaaaggatccgggaagcccagaaaaatttgatttatatattaaatgagcatgttttgcaaagttaagatgagctacaacttgttgcacttagaatggctttatatgaactattttcttttgctttgctctgtatcccctccaaaacaaattaatatgtgattctgtgtgtgtttgtatgtgtgtgtaaggtcttttagagtagaagcagcattcatcatcttcgctgttgtgaacaggagctggacaggtctacaagctaacctgattcttagaacagactagattcacagaatagataagctctttatcacatggcagcatattttaattccagcctgtggcttccctccttacgggagctcagatagatttctcttttactgtgtgtgtatgtgtgtctatatgtgtgcatgcatgagtgtgcatctttagaagcatgatctgactttgcattgggctcctatggcttccaggatgccaagagctgtgactttagctacctgggtagtggatctgctgactgtgccttttgtgccagtgttgtgcctgttgtattttgctgtagctatagaaggcagctgcacaggctttaaataatgaagtcaagaccaccatctccagtttgattttgtttagagaccatttttggtacagtttagagccagtggataattgcaagttgattagtgtctcccaaccttctcttttggtctgtatttaatttttgcccaatcttttttaaattttatttttaaagtttttaagcccatagaaaagttgaatgaatagttagttgtgtgtggcaaaatgttaacagttgcttgatttgtgaattctctcttacatacacttagttttgattttttttacccgcgtttttactcactttttaaaaccacctttttaggccagactatttgaaagttgccaacataatggcatttcacaccttagtactccaacatatatacatctgctgagaccaaggatgtactcctaactgctg

SEQ ID NO: 29005 - DNA, 1029 bp, Homo sapiens
ttaaattgagattgactgtgttactgataaatttctgcggagggacattttcttttataataagccccatcccaatctgaaaatccagaagtgtctagatgtccactggccaagggattgaaatcagttggcagatgacaactgagtgtgtgccttttcacgattttcacactttagcagaagccttgttatctgatactgttgggacctgtaggtggttgggtaattgaaaaaggtcagttaaattgaagcagggaatgatttaaaaagaatcatcttaagttttaattaaagcttataaaagggattcaagctcaggcctttgtgaataggaccacagatatgcactccttacattaacctcagccttgatgtatcgtttaaaacatttctctcagtttgagaaaaaatagaaataaaaaacatttaaaaagaaaaaatgaaaatgtacatttctgatgggttttttatttgtttgttttttcaaagcagaacaaatacgtataaacacttgtaaagctatcaggaactatctagaattttgcttttttttgtcttccaaagttgcacttagctctcaggtgcttttttttggtttttgttttttttgtagttatttgccttcatttagtctttctatccaaagtatattcaacttattttcatagaataaaatagtatattttgcattgtttaatattaaaatcagttacataattataggaggtgagtctgcataaacagatctagaaacacatatagctcagctggtgggagcagtggtgtgtggaggtactagagagtagtttcccagccaggagtctgcagtgcatgcaggctgaagttataggtctgctaatagcccctgccatattctgaaattcatggaaagggccccagaggatggttccgatttgagagttggaagattgggttcaagccccggttctgttgctttctccatggttttgggacaagcccatcagtaggcacaagcctcaggttgcttatctgtcaaatgggaatgat

SEQ ID NO: 29006 - DNA, 1091 bp, Homo sapiens
ccacacacacacacacacactcactctctctctctctctctctctctctcccctccctcctccctcctccccctccccctcatctgggtctgaggaagagggctgcagtgattatttcattgtatcatggtgagtggtacctcttttcttatttgggatactcattagagttgctcggtggagatggaatgatggtggggtgcagttaaacatggctgagtgctttctgcttaaggacctgatgtattaatgctctccaggtcattcatatttgggggaaggaacaaagagggtactgctctactgcagatgtgttcatttgcttattaacaaaaggctgggtgacccagaaacttaaaccctgagaacaaaagtactttccagcttccaaatgggaagatcttggagactcttgagtggctcctctggagtgctttctttaccacctagctgtttggagctgtcgtgcctaatagcttctcagcctagagggccccataaaattttagtctgtttctgtatagagtgctttggagtggccgtttctctctgcctcttatttactctcaaataccctttggaaaaagagctgatgaggtgcattgagacttggcatcaaaagccattcattgatagccatcgctcaactctcttggacttaaattttgttaaacaacaatcacaaaaagtcttaaagaattacccctgtttcccctgaatgttgaagtaagaaagaaaagaattactcctgtaatgcaagaagacatactcattaaaatctaaacagcgaaaaagtatatcgattaggttgggcgcggtggctcattcctgtaatcccagcattttgggaggctgaggcaggcagatcacttggggtcaggagttcgagaccagcctggccaacgtggtgaaaccccgtctctactaaaagtacaaatattagccaggtgtggtggcagatgcctgtagtctgagctactccagaggctgaagcacaagaatctcttgaacctgggagatggaggctgcagtgagccgagatagtgccactgcactctagcctgggtgacagagcaagactctgtctcaaa

SEQ ID NO: 29007 - DNA, 1101 bp, Homo sapiens
cttataatatatatatatatatatatatatatatatatatatatatatttttttttttttttttttttttaacaaaaggaaagaaaaaaactcatgccagacttgtttgtctgagatttatcactgtagggatcccagagacccccatggaagctggctttagtggtggctgcggctggggactggacagaacaggtcagtgtgagcttgaactagactgcgcctgcctcctggtgcacgtactgtgtttgggcatgtgttggctcttaaaatgctgttcatccatcaacatactgaccccttttgcaagtttcattgttctattattgtgactataaaagtggcacttgttacaaaaccagtttctgtgatctagaaccgtgttctcaaacttgcatctatcagaatcatctgccccacctctagagtgtctgatcagtagctttggggtggggcctgagaatctgcatttctaacaagttcccagatgctgctgctactgcagctgacctggcaaccaccctttgagaaccactgatctagaaggtacaaggaaatgaacatcgtcttcagtcttaccactcgggagagaaccactgttaacattttagggtataatgaatatattcatacatatgtggacatatttttaaaaacaatgatagttttgtgctgtacatagcgttgctttttaaaaaaacaaccttctttcttttggaatagttttagatttgtggaaaagttgcaaagatagaacagagggctcctgtatacccagcacccagtttctcttactgttaatatcttacactattatggaacatttgtcagaacaaaggagccaacattgatacattactgttaactccacattgttactgcttttattgaaaatacatgaatgtattttcataggattcaaatatcagaaatacataatgacagagtgcctcttcactcctaccatcccacttcctatatatttcagagtattttttatatatttatatacacatgtaattatgcacacacacccatccatcttattttaagacatgcttttttcatttaaatatgtcttgaaagcttttttttttcagt

SEQ ID NO: 29008 - DNA, 1023 bp, Homo sapiens
ttcatttaagaatggttaaaaacacattacatgttaacaaaaataacttttttttttgagatggagtattgctctgtcaccaggttggagtgcagtggcgtgatctcgactcactgcaatctccgcctcctgggtccaagtgattctcctgcctcagcctaccaagtagctgggactacaggcgtgtgccaccacacccagctaatttttgtatttttagtagagacggggtttcaccgtgttggtcaggatggtctcaatctcttgaccttctgatccgcccaccttggcctcccaaagtgctgggattacaggtgtgagccactgcgcctggctacaaataacgttttttatttaaaaaaaaatttttttaaaaaagatgtggtcctgctctgtcgcctagactggagtgcagtggcacaatcatagctccatgcagccttgaattcctgggctcaagtgatcctgctgccttagcctcccaagtagctgggactacaggcatgtgccaccatgcctggctatttaaaaaaaatttttgtagagaccgagtcttgctttgctgcctagggtggtctcgaactcttggcttcaagtgatcctcccaccttggcctcccaaagtgctgggattacaggtgttggcccagcaagcctggcctaaaatatctttttgttttagaaaatatagtgagaaaaatggccttgttttatatatttgcaaatctctttaatgcctggcttagtaagacagttggattcttgcatccacttccgtacctagtctgttgcaatatgctttggttgaagtataactaagaaaatctagccttacacagatatgtagttggaaaagggaggagtattttatagcctgttaagatattagtaattatgagtattctttgatactatatctaaactggacaagaggtagtttctgaaagattagttgcaatgtagaatctgaaaccatgtcaatgaactattcctactgtttcactttgaaatctattggtctctg

SEQ ID NO: 29009 - DNA, 1030 bp, Homo sapiens
aggccaggcccagcctcagaccaggcatgggcgcatctctccagctttctgagcctctctcctgtacttaatgtggagaggctgttgtgggttccttgttcttctaatattttgagcttctgtatcatatttaaaatctttctttgatattctagttcggagagattctagttacagcattgaaaaacaggctctgttacctgtggcagtttaagtcctaagaagttaaaatagaataaaattgacatttcttagagtttgctattaagtaagggtcttggccaggcacggtggctcacacttgtaatcccagcactttgggaggccgtgccgggcagatcacttgaggccaggagtttgaaaccagcctggccaatatggcgaaatcccatctctactaaaaatacaaaattagctgggagtggtggcatgcacctgtagttccatctgcttgggagtctgaggcaggagaattgctggaggtggaggttggagtgtgctgtgatcgcaccactgtactctaggctgggcgacagaggaagaccctgtctccagtcaatcaatcagtcaatcagtcaatcaatgtaagggtcttaaaccatccccaaagcaaaggagtctatgtttatgtcccgggcatcttaaccctccaattcaatcagtgtttattaagcatcttatagagctaagaattttgaaggttgactttaatagctttacctgtggagagtctcatggcagggaacatgagaggtgctggcgtttctagcaaagcctggttggccctgattctgtaactcaaggcagaataaatgccccataaccaccaccccatgttagagaagattcttagggagaggtttggaaaacagcatgggccaggcgtggtggctcacgcctgtaatcctagtactgtgggaggctgaggcgcgccgattgcatgagctcagggatttgagaccagcctgggcaacatggcaaaacaccatctctacaaaaaacacaaaaattagccagtcatggtggtgca

SEQ ID NO: 29010 - DNA, 1066 bp, Homo sapiens
gctcctatgcaagaccctgggactcctgtggcatggaggccaaaggcctggacccaaaagtcaggaggacttctgccacaaaccccaaaagcttgccccgtataaatggttgctcttgtgcccatggctgtgtccacccagcatttttgtgcctgctgggttccaggtgccatgccaagacctggtgaccagaggatgtctgtgatcattgttgtttggaggcttttgattgtgagggacccagacttctgctttgggggtatctttccccagacatcacaaaaagctcaattgtttattgcctcgaagacacattttctcttcaacaagcgctttccttaagtctgaggtagagtagcataagtgggtttcttgaaaaccagaaatgtagctgagaaagcagttgggccattctaggagggaaagaacaagggcttgatgagttaggttaagaagcacattcccagctcaccatctctccctctcttacctccttagcatcttggtctgtggttacgcatcttggctgcacctaagagttggcctgaggagctttcaaacctacaaaggctagatctacctccagcccggttcccattagtcaatctccaggaaggagtctacccctctattttttatttaattttatttatttatttatttatttttgagatgaagtctcactcttgtcccccaggctggagtgcaatggcgcgatcttggctcactgcaacctccgcctcccgggttcaagtgattctcctgcctcagcctcccgagtagttgggattacaggtgcctgccaccatgcccagctaatttttgtatttgtagtagagacggggtttcaccatgttggccaggctggtctcgaactcctgacctcaggttatctgcccgcctcggcctcttgaagtgctgggattacaggcgtgagccaccatgcctggccccctctattatttaataagctcccccaggcattccgacataccactgggctgacagccactgaccaccctctgccagactcatgctgtgtcatcatttcttggcctaaactggg

SEQ ID NO: 29011 - DNA, 1046 bp, Homo sapiens
tagaaggctgggtttgccttctatacatacacacattagaagtgtcttacttccctaacaagattcaggctcctaaaagccaggacatgcatgtatgtatgtatgtatatattttgtggagacagggtcttgctctgtcactcaggctagaatgaagtggtgcaatcacaacccaacctctacctcttgggctcaatcaaacctcctacctcagcctcccgagtagctgagactacagttacgtcctgccacacccagctaatttttctgttattttttagataatggggtcttgctatgttacctagactggtctcgaactccagccatgctatatcttaagtcttgtttttccacagcttctgccttgctgtccccttagctggacatggaattagaaggttctttgggatggaaaggaatccttcccccacctcccccaaaaagaatcccgtcacttctcatttgttcctaaaacattctaatctcatccctctgatcagtagttccccaagtagttgaatcatctgaatcccccagaaagcatacacaactcagtttcctgggcctgactccagccctgctcaatcagtctctgtggtttgagccaggaaacctgctttacaaacttcccaagtggcttttgatgtgtagccaggtctggcagccaactgcttcaaaaccccatttacaattatttttcacagctcccaccaccgacagtgtctccagaggtcttcagcttgtgtcacttattaaaattaaccattttgagactcattcagaaatactcaatatattcttctaactgggtgacatgggaaggaaaaaggaaccgcatgagatggaccaaaggcacttgctttggttgccaatggctctgaaacaggaaatactgaaaccaatacctctgtactgactgggcaggttgttgatgtgtaggttgttttcagtatttgggctggataggaagacaaaagtttgttaagttatcaattatgtattttcccctattataagtcatctgacctcatgattaccataca

SEQ ID NO: 29012 - DNA, 1005 bp, Homo sapiens
ggtgccagctccctcccctgatgattgttctctctctttcccaggaccgagatctcactcagcagacagcagcagcccgggagcctgagctcaggaggaactcttacctggaaattgggaactgtatggagactccaaactgacttctttcaaaaaacaaaaacaaaaaatttttttagctttgacaaacacacaaaagtggtaataaagagagccctccttgtcaacccaaaatgtgagccccctgtggcaaaaccaccccctaccccattaacaaatcaacagacaaaattctccgagtcctttgcctcttttgataacatgttgttctgttttgtaaagtgtgtgtgcttggggttccgaggtgtgggattgagttctctgctttgtttttttttaagatattgtatgtaaatgtaaaaagttatttaaatatatattttaaagaaccctaactgccaacttttgctgaaaaagaaaaaaaaatcactgctgcattaaatgaaccacatcatgtgtagatactgttgtctccctgaagggagctcaggcctttgaaaagctcagggcttcacctgccttagaaaatgaaccagaaacttgaagtaaagctagttgataggggtacaggctctgaggagcagtgcaaaactgcctctttctttctcgtggcaaatcccaatgtacacgatttcaggtctcagacgccatgcctctccagcccacgcctttaggcaggtgatggcagcagctaggaatagggtgtacatgatccacagccctgcggagccaggtcaagccgctgctatgaaagctccagggtgatggggacgattctgcccagtgtcctcagtctgtcccctcaggtcatggtcccaagtgaaatgacagagttcacagccctggtcttggctgaggtccaggtcatagtaagggcatgttcttggggccctcgacctgaactctgaccctccgggcagggaagaggaggttgtcccctttggt

SEQ ID NO: 29013 - DNA, 1021 bp, Homo sapiens
tattagatggctgtacatgtgccttagtgtcctaaagttggaggaaaacatggcaaccaagtagttctcttctagactagtagggattgctaaccaatcccatcacagtatgtaaattacttgctgttgttcaatctataaaaattcatcttcaaagaaaattattgggctggtaaaaatatttttaataatgaccacagaagccatatttgtttttctttgatgttcttccgaagacccttctggttctaatcagattgttcccacataaaatacagtggaaatctacaataataaaatccctattcctatgtctatggggaaataaacaggatggggactgtccttttaaggggctttccccttccctttccccagactcaaagcctctattactggtgggtgttttggcatcagttaagggccttcaatccttccctccctccatgttttgctctttcattaaagtgtttctgttgtctaattatatcctttcaatcaaattagagactgtagcatctggtgagggctgtaactgctgccatctgcacctcgtctatacaggccttttcagctgagaatcactcaacttccaaatggcaggaagagatttggaaaaagtttagttggaggggagattaacttaaaaggagtgtcttcaaaggctgggtgcgatgccctgcttgctgtgatgtgtgcatggccaatgcagagcttcactggcctggctcaccaaagattcttccctagcgcttctggcagatgaagggtttttggttgtcttagctgaaatgactaggccttctttgttaggggcttggagggggccaggggctgagctgagaaagtctcccttgagaacaatctttagttatatgaccactggttaatgggtgtgacactttctgtttatttgaccatttcttctaactcagtgatttcaactggaggagattttgcccccaggggacattttgcaatacttggagacattttggctgtcacaactaaagaggtacta

SEQ ID NO: 29014 - DNA, 1026 bp, Homo sapiens
actggtagtcccagctactcgggaggctgagatgggaagatcacttgagctcaggagttcaagactgcagtgagtatgattgtatcactgcactccagcctgggcaacagagtgagaccctgtctctattaaaaaaaaaaaaaaaaattaggccgggtgcggtggctcacgcctgtaatcccagcactttgggaggccgaggcgggcggatcatgaggtcaggagatcgagaccatcctggctaacacagtgaaaccccgtctctactaaaaaaatacaaaaaattagccgggcgtggtggcgggcgcctgtagtcccagctacgcgggaggctgaggcaggagaatggcgtgaacccgggaggcagagcttgcagtgagctgagatcgcgccactgcactccagcctgggcgacagagcgagactccgtctcaaaaaaaaaaaaaaaaaaaaaaaattagcagaggagttacatcatttctgaagaagcagattttacttaggaaaaaaaaaaaaggagctctgcagagccttggaaagagttttttagttttttaagacataggacaagaacttagcatctggtttcttaaagcaaatatcccagatctggtgagagcagtggaatagaaaacataataatagtcagggctgcttcttagtgaattaccagctgaagatttagattcaaactgagcctttactatgatggccgtgccttctgtcttcgataatgatttggttaccaggactagaactcattcaagctaacttgagcaaaagaaatcaatttgaagaccattgggatgtatcacagaacccaaaccctgtatcccaagaaactagaaagaaagcagggactttcactatctgtctctgtggccacttcatctcccttctctgcctctctctcagcttgttatccatccttcttcctcttcgtggaccagcagaattggctcattcatccactcacgtggctcaaacttgagtttggttgcctcaactcctacttgacaaatccct

SEQ ID NO: 29015 - DNA, 1054 bp, Homo sapiens
agccaggcagtgatgatggcctggatgggtcaaagttggagaggagagaagttggggagcgagagctcaggggaagatggcccgcttccatctttcccctgccattcattcctcaagacctactgagaactctctgcacagccccacccctagggccatgacattcacccctcagccacagggactccccccagccatttgggcccaaatgactttgcaagctcagggcttctcgctgcctggggattcagggctcttgaagagaacacggacgtcctcacccatcctcctggagtccccagcaggggaccctgtgtggtacctgagtttcctctctttgggtctgtttcaggaactggtgctcctatgtggtgacccgcaccatctcatgccatgtgcagaatggcacctaccttcagcgagtgctgcagaactgcccctggcccatgagctgtccggggagcaggtaaatgaggtggagaaggaactgatggcattccaggtggaggcacagtttgggcaaaggcctggttgggggactgcatggggagtgtgggggaagactggaccccagggtgggcggagcaaaggtagcatcagccgacaccattctcagcctatcccctgtgctgttgaagcaccctggagggcttcctgagggatggatacaccatttgcctgcattcctttactcagtgagtattcacgctgggctcaggccagcccagcctgcagggtcttcttgtccagctggtatccaatctccaatccctgtggcaaggtggtggggggatggaagggctgaatcccaaaatgcaggagagagcctccaaagggacctggaggcagcagaggatcctggaagctctaggtttgtccccatgggtgtccagggcagtgggagaggtcatggaggaccctgtctcagctgggccacctggggactctttcagctacagaactgtggtgagacccacatacaaggtgatgtacaagatagtgaccgcccgtgagtggaggtgctgccctgggcactcaggagtgagctgcgagg

SEQ ID NO: 29016 - DNA, 1029 bp, Homo sapiens
ggtggtacgcacctgtagtcctagctattcaggaggctgaggcaggggaatcgcttgaacccaggaggcagaggttgcagtgagcagagatcgcgccactgcactccagcctgggcgacggaacgagactctgtctcaaaaaaaaaaaaagaaaagaaaagaaaatagaaaccttcacaatcattgaaaatcattgcaggggagggattttcgggttaggacctagaaatctactcacccaagagacgtgggggaaagacgaggaccctaaaacataccatacccaaaagccccacgacacagggatctggaaaccatcactgacaggggagacatctggaaaatggacagagtggaggcagacactccttcaggagagagagacaactaggaagctctttttggcggtgggggggattgtgactccccctccacatgcagtctggctgggacaccctacttcctggcagtcacaagttagtgaggatgtgggtggcacccagtgcctgccttgccctcttagttcttgattgtggggtcagtgatggatacagccgtgggagccccctaccctgcacgagtcttcccctgtgtctgcccatgacttctggtgccctgctacctctccagttagcctctcctggcccctgctgtcctgaatctcctcctaccccatacccatcctccgtagctccagagtctcttaatactgccagtatggacatgagctgagctgggatcagatagacccatgcaagcctggctctctgcctcccctaggctaattactggcctctcccagaggcccttggtctgggaacacatttaccacccagtccaggaggggtgggagagattgggcagtcctgtcccttcatgagaatccccggcaggatgccctggccaccctagaccagtccttgaacccagaaccacctgtgggctccccgcaagaggtagcagggcccctgcccacccaccttcctgcccctcttctacctgcacttctgcccctgcttgctgcttgcc

SEQ ID NO: 29017 - DNA, 1052 bp, Homo sapiens
cacctggttccaggccttagagacagtgggagaagatgagaaggaagacaggaaaagttctgggcactccagagtttttggagtccagaatccagcaacttaaggacagtttaagaattctccccatctgtggtcaataaacaggtaagtgttggctgttcgtgccgggataccaaagagtggataccaaagagtgccggtagaagagaggactgaaataccacagctaacctcccggtgggaagtggtttcctaggtgccctatccaccctcttctgctctgcaaaagcctgaaaaggcaaaacgtgtgcgttgacatttttgcgtggctggacgtgccttttttcagtcaactttgttcaaaccttgttcaccagtaactaccatgtgctgtactgtattagaattacagttgtggtttctgttgacacaaagtaaacacattaggcctggctgggggggccttcagagagtcacataagtaatctggtccttagtttcctttcctgtaaaatacagaagttaggctagacctcttaagcttttgagcccttctgaccttccagcataagcattccacaaatttgtcctatgctgacttcagctcaggtactgtgaagctcaactcaggtagtgtgaagcagcttccatagtgactgctctaaagtgttaaaccgttgccttgggttaataatagaagttttctctcctcgtatgttatctcatgtagaaaagtacgtaaagcatatatatccagtgcaacaaagaattggaatgcagactcgcagcaatctagaacccccagcgctcaatcacagtgaagtgatttttagtgaagtcagtggctcacttttgggggttaaaaacgaacacggttgctgaataatctgaccagtttgtaattgtattaggttggtgcaaaagtaattacgtttgcatcaacctaatagcttgcttgagggcctgtgatgtttgtgtgctctaggaagataaatgtaagttcatgaaacaaatttgctaccttctatagcccaccagttagtatagggccg

SEQ ID NO: 29018 - DNA, 1602 bp, Homo sapiens
gaaaaaatgatctgcatttagttttaatgtcagagagagtatgacttgtagtgctattgaaaatgcctttaagattgtcatgaacagattatttttttcattataggttagcctttgggcagttgatttgttcctcttggtgattcagggttttgagttaagagtgtgtacaaaggaaagaaagtagtccagtaaagtacagagaggtaggcagataagccaacgtgaagagatggattcagcaaagctctctcaggccgccgagggattgtgaggctggctttggattccatgaagtggatgccatgaagagctgtcaattgttggttttggatgagggactactttctgattggaaaataaaggaccccttttttccgtcctaatggcagtactgtcttcagacagaacaagatatgtgttcttgtggagaagaaagaattgggcagaattttcaaaaataattactttaactgcctttaaaaaaaaactaaatttatctaactttaatgcagtagcgctctgaaaactattttccgtttgtttttactacttgtagacacctcagtggaccagtttttggtccctttggatgcatgttataaatttcataggaaaaggaaaattatagggaggtttacttagataagggatgaaaattcatgtcttttttttaagttgaaatcattttgagttgtatgaaagacaatggtgttaccaaatttttcccagaaagactaaatgctttttcttctttgccagtcttcagggttctgccttagctctgcttcaccagggtttataatatatctagcttttaagttgctgcacaaatatagttctgacacagcaaaccctttaaaacactggagtgtggtgactgccttcttgtctgccattccgtttcactgtcgttgagctagggaatgatggtttgtctaacttgctaaagtgaggggagtgaaaactaatttttgaggagaggtaggttctaacgtaaccaatctagtgttaaactttgtattattgttgcatgcctccgttttatatgagggtagaaacttctgatcctgttagtagatcttgttgtcagtctgtgatattgatgatcatcctgtattttaaatgacagttgggattgggatgggttttgtggtcatgggaacataaaaagtatacctgccaaatcagctgatcttgacctcattagctagtcccacagtcaaatgttgagtttaactggtttagacttttttttctgttagatgttgagaggtaagggggactcatttggacctgtgttggcaggtctccctacagtttaaagaattcttcctgccacgtgaattctttcccccttttttctcttctccttgtttctgctaactttacactatttttcctccttgttttcctctagattacagtacctatagccaagctgcagcgcagcaggggtaagtcagtcttttataaccgtattttgtgtgtgattaatattttttgaatatggagccttctataattgtagaggtggtatttgaatgttctctattcaagttattgcatttaattcttttgcagctacagtgcttacaccgc

SEQ ID NO: 29019 - DNA, 1047 bp, Homo sapiens
ggttatttattaacccagtgtctattgctgtaatctttagcatgacaaggccctaactgttgctgcatagttttatgacatgagttattgccctgatcacttttagttttttgtttttttaattgccctccttgtaaatcttatagacgtgtcatgtagtggggtgtaatcggtatatgaacggtagggtagatggtattagattctaatttaaataaatgaatgccttatgtggttgaccttaggactctgcaaaaacttaagcagttcagatgaacaacatgccaactcaaaaacttttattgcttggggcttcctgttttctggaactatgtatactttcatacacattttaactcagcagttttgacaaggacattactatctctgtgtataatttcagaatttccttttaatatttgaggtagagaagaaagagtattattatattctgtgctacaaatggtgattgtacaaaaggaagctgatacttgtttctggccagtacatgaggacactttaaggccctaaatcttaactaaaatgggcagtcttgattcaggatttattttaaatatggaagctttttctttagtgagatgtagactttttttttggatataaatgccagcacctagaccaaagttttgttttgttttgtttttttaagatagggtctctgttgcctaggctggatcttactgcagccttgacctcccagcctcaagcagtccacccacctcagcctcccaagtagctgggactgaaggctcacgccaccatgcccagctaagtttgtttattttttgtagaggcgaggtctcactatattgcccagggtggtctctaactcctaaactcaagcagtcctcccacctcagcctcccaaagtgtaaaccaaactttttattgcatggcttaattgtacccattgaccatgaggaagaagagtccagcaccaggaatggttgtaacacctcctacaggaaaggtactctagttaggagctgcagactttcgtggttttggtcatgctccacgccgaag

SEQ ID NO: 29020 - DNA, 1031 bp, Homo sapiens
tctgcctcctgggttcaagcgattctcctgcctcagcctccctagtagctgggattagatacagacgccaccacaaccggctaattttgtatttttagtagagacggggtttctccatgttggtcaggctggtcttgaactcccatcctcaggtgatccgcctgcctcggcctcccaaagtgctgggaatacaggcatgagccactgcgcctggcccagtttttgtatttttagtagatacagggtttcacaatgttggccaggctggtcttgaactcctggcctcaagtgatccgcccaccttggcctcccaaagtgctgggattatgggattacaggtgtgagccaccatgcccagcctgcaagttttcttaacccatgtttaattagatgtgggttttcaaattgtttgaattgtgccctgaaagttttgctagaagtagcggttcccttttttgcactcatttcattgttttgcagcagatgtgaacaggtttaggaacaagtagaattgattgggtgtctctccatacagccagcttggagcaaaagtgggtagggcttacaacccttcttccacagagcaggttcgtacctattgcattgagagcagttaatagcagttaatctggcaagttggataggtacacagtgagagattattgaattcatacagcaatggtgagggatgtggtgtgttagaagctttgtttgtttgtttatttttggagaccgggtctcactctgttgtccaggctggggtacagtgacacagtcgtagccccctgtagcctcgaacttcctggcctagtttaatcggactttaaaatatgtgtccttactgtttctcatcatgatttgtaaagcttaataccagatgggtttttttgtttttgtgtgtgttttgttttgtttttttgagacggagtttcactcctgttacctaggctggagtgcaatggtgcgatcttggctcaccgcaaccctcgcctcccaggttaaagtgattctcctacgtcagcctcccaagt

SEQ ID NO: 29021 - DNA, 1038 bp, Homo sapiens
gcactttgggaggccgaggtgggcggatcatgaggtcaggagatggagaccatcctggctaacaagatgaaaccctgtctctactaaaaacaaaaaaactagccaggcgtggtggtgggcacctgtagtcccagctactcgggaggctgcggcaggagaatggcatgaacccgggaggcagagcttgcagtgaccggagatcacgccactgcattccagcctaggcaacagagcaacactctgtctcaaaaaaaaaaaaaaaaaaaaaaaaaatttttttgttttaccctcccatttaatgttttattctgaacacaaaagtatttgctgagttgaaattcaaattgttgatgtgtagaaagtaactactgttttatggatgtctgtgtcacatggtgtgaatgtctcttttattcaggggatttgaaataacaagcctctttctaaaaaagcttttttttttttctcttctctctctttcagctattcctctacacagccgactagttatgatcagagcagttactctcagcagaacacctatgggcaaccgagcagctatggacagcagagtagctatggtcaacaaagcagctatgggcagcagcctcccactagttacccaccccaaactggatcctacagccaagctccaagtcaatatagccaacagagcagcagctacgggcagcagagtgagttgctaagagagaaaaccaaataagaatgaatgtgtttagagtttttttgtggggttgattttttttgttggtttgtttttcttttgagatggagtttcactcttggggctgaggctggagtacagtggtgccatctcagctcactgcagcctccgcctcctggttcaagcaattctcctgccccagcctcccgagtagctgagatgataggcgcctgccactatgcccagctattttttgtatttttcgtagagacggggtttcaccatgttggtcaggctggtctcgaactcctgacctcaggtgatcctcccgcctcagccacccagagtgttgg

SEQ ID NO: 29022 - DNA, 2942 bp, Homo sapiens
cagtagcatgggtgtttatgggcaggagtctggaggattttccggaccaggagagaaccggagcatgagtggccctgataaccggggcaggggaagagggggatttgatcgtggaggcatgagcagaggtgggcggggaggaggacgcggtggaatggggtaagagcaaaccttttctccttttacctaattttgtttcatccataggattttcagtggaaagaagggactgaaagacataagaaattaatttctgcatttccatggacaatctgttgagctcaagccatcttctaaaacatggaaatgtcatctttgtggcatatattaagtggcagtttattttctttccctgccagtatacttcgttgggtcggggagaacaaagaatggttttgaaaccagagctttcagttcccttcatggtttccagaggtgagaagcctctgtgggtagtagatttgggatggaacacacacaacccttctaatgaccctaagttgttaactaactgcctttgaatggttgtcttgaaatacctggtgtatatactgcagaaaaggaatgcagctgttttccacagtgtttgtccccaacttctgtttgtactcagaatcgttgaacatatgaagattttggtcccataatccttaaactatagcctgaggtgcacctgattacatagagtttggatggagcaaagaaaaatccaatagcattttgcagagtaatgtatataattatgggctcacttcctactggagatgttgaaagtctaaatcggtttgaccattttgattgatggcacaatctggtttagaaaactttgtttagatcaatgacataaccctgctgcctctgcctgcccttcccctcccttctcccatccccttttccctatctggtgtctgtactttgatgaaggtgagctataatattggtggttaacataatccagaaggcttagttctgtgtgtgttctgtccctatataaactggtaaagaaaaaaaaaagttatgcagaatgttagatatttacatttgatacggtgtgccactattcaaggaaaaattaaatagcattttttaaaaaacagaatgaacttcaaaattaaagttgatttttaacttccatattagcaaatactcttcactactgaaagacagtactattttgcatattctgcataactttaagaaagtctttagtgaaatctttattggaagaaagtcatttgacaacaggcaaaaatttaatgattcggtatgaagtaaaatcaatcttctgatttggaaaatactctattataaaggtttcacttctttttggatgttttaaaatagacatagacacttgaaagtactatcatcacgtctcaaatcacctagaattcctagtatttttaaattgcaaatacaatttcaagtttatttaaatactccagaagttataatcctactaattgtgctagactttgctagtagagggggcccctctttctggatgagaagtctctcttgcagccatagaagagaccatggctttccccataggtttttcaacagactgtgaagcagtctgtcggatcctgtggggatagacgggcatttccctcgttgcccccctttttattgtggtgtggtgatggttttcagtgtcttgtacaggtaaggcactcaatgttgttaacatgccctttttcattgcctcagtattttgatattttcattggctgttaaacgtggaaactttttaacatgctttgtcgcatttatatgctacaggttacaaagtgagagccttgtatacacttcaatacttaaaaagtacccgtactcagtactcagccggcagcataatgaaaagtgggactagacacggtgtccatatggagaggaaaaatatacatagaatatttttaacaaaatgtattcattgtataaatggaatccttctgtaactttggtaactgcatacttgttgtttggtaatgaaccagaggaggtataatactctagaattgtgtaacattaaagtgtaaacttttgtgtttaaagagagagaacattttatggtgtgtacttttaaaaaggaaacaaagctgcatgcaacagcttgaaattgtatattcaggtattaaaggtgcaatactggttagaaaaaactcagggcctcccactggggagctgcctttatttaattttaaagaaaacaaaatctaacccaaaaagtccaattcatatttccctctcccctctttaagtaattttacatggccatagtcattattctaactgatatgtctataaagttgcacccccagtccgttgagccttggtatttgttgtaaattctcctttcacagcgattgttaaatctattcgtgccctgagatgtatggctttatgctgaagattggctggatgcgtcctctgatgtgtgttgtaggaatttaatgtggttgtctcctgcttttattatactgtgacttgttaggaaaccctgggcctcatttggctctcccttgggagaggttgagggtgcacctttatgaacatggaaaggtttatcacagcagttaacccccacttgctcctcccctctataccaagctcttctggtttttcacctgacggggtgggtgtttgggatctattttttcttgctaatttgccaagtattgcactattaataccagcccccgaaatgaaaggaaccaaccacactggtgtgtacaatcagacaagcaaggttgtatattgaggaaatttgagcaagctgccctgaagaaaggcatagtgacaagatgagagagatgcattgtttggagatgtgtttagccagtgcccttcttccccacgagcccccccaaggctcagagcggtactggcttttaaagggaaaggccttcatttcttcgtttatccccccagcagcgctg

SEQ ID NO: 29023 - DNA, 1031 bp, Homo sapiens
aaatggtggtatagtagatagctatgtgtgtttgtaaggtttgtagcttgcaagacgtgcactaataatattttatatgatctttcctggttggcaggacccatggatgaaggaccagatcttgatctaggtaattttgaattctagttgtgcttcatatcgtgctttgtaaattaatggtacagaggtaaatgcatgcgtagagttcagcagccttatagaccagtgtgatattcttgctgtcaaggacagtttgggaaatcctatgtgagcatctactcataattgccttaagtgaagtaaaccaaaagtttgatagcattcttcttagtatgcttggtagttttcttagatttatgatgaatatccttgggcagtagtgatcaggtagttaagaaacccctatagatacatgataataattctcctgtcttgttgtctctgaaaggcccacctgtagatccagatgaagactctgacaacagtgcaatttatgtacaaggattaaatgacagtgtgactctagatgatctggcagacttctttaagcagtgtggggttgttaaggtcagtaaaagcataaccaggtcatctggcagaactttaaaccacagagcattttaaagagattgaattgatgttgagagttgttttctaaggttgcctttgcctgacttctttctaggtatcttatggtttgttcctttttaaaaaagattagcctttttttttttttttttttgagacggagtttccttcttggtgcccaggctggagtgcaatggcgcaagtcttggctcactgcaacctctgttcaagcgaatctcctgcctcagcctcccaagtagctgggattacaggtgtgcgccaccagctaattgtgtctttttagtaaagatggggtttcaccgtgttgggcaggcgggtctcaaactcctgacctcaggtgatctgcccaccttggcgcctcccaaagtgctgggattacaggtgtgatcccctacgcccggccttccctcctccacccctag

SEQ ID NO: 29024 - DNA, 1096 bp, Homo sapiens
tagctcacgcctgtaatcctagcactttgggaggccgaggcgggtggatcacgaggtcaggagatcgagaccatcctggctaacacgatgaaaccccgtctctactataaatacaaaaaattagccaggcttggtggcgggcacctgtagtcccagctactcggaggctgaggcgggagaatggcatgaacctgggaggcggagcttgcagtgagctgagatggcgccactgcattccagcctgggtgactgagtgagactccgcctcaaaaaaaaaaaaaaaatacagttgattttgggcgggcgtggtggctcatgcctgtaatcccggcactatgggaggccgaggtgggtggatcacgaagtcaagagatcgagaccatcctggccaacgtggtgaaaccccgtatctactaaaaatacagaaattagccgggtgtggtgacacgcgcctgtagttgagctacttgggagtctgaggcaggagaatcagttgatcccaggatgcagaggttgcagtgagctgagatggcgccactgcactccagcctggcgacagagcaagactccatctcaaaaaaaaaaaggaaatacagttgattttggtaaatcttatataaggtgatttctccctgcttgtaggtgtgtgtgtgcacagatatcacacacacctcaaaagtaaaatgcttttagtgtctactgtcacattctaccctgtgcaagactccttgtttgcttttttgttttgagatggagtcttgctctgttgcccagactggagtgcagtggcacaatttcagctcactgcaacctccgcctcctgggttcaagcctcaagcctcttgagtagctgggagtacaggcttgagcatattaaaaagactgctttttaatatgtatataacatgtagtttattgaggaatgtggagtttatcctggttaagaaagtagtatttaccatcaaaattttggaaataaagatgttaaaatagatttccaagctggatacagtggctcacatgtgtaatcccagcactttgggaggccaaggcaggaggatcccaaggattgcttgagcccaggagtttgagacca

SEQ ID NO: 29025 - DNA, 1048 bp, Homo sapiens
agaacttcgcctggagaacagagtgcaaccagtgtaaggccccaaagcctgaaggcttcctcccgccaccctttccgcccccgggtaggtgcaggtttcatgagtgtcccctcagcttcctggtgctaaacctcttttcttatttgtgggcttggtaaactgcagttgccctctgcttaacaactttgagttgtcgtgtcctcatttctaaattgtcagcccgatgccgagattgagtgaagtgtctggtttgttctgctgtgagagaaggaagcagagcagcttccacagtgtccacagggcctctgcagccacccactgactgctttcgccctgctattctcaccttaggtggtgatcgtggcagaggtggccctggtggcatgcggggaggaagaggtggcctcatggatcgtggtggtcccggtggaatgttcagaggtggccgtggtggagacagaggtggcttccgtggtggccggggcatggaccgaggtggctttggtggaggaagacgaggtggccctggggggccccctggacctttgatggaacagatgggaggaagaagaggaggacgtggaggacctggaaaaatggataagtaagtgctggtgaaaagcagctgtgggccgccaggcacagtaagaggacagcccttcccagcttggttggcgcaagtcctcatgtctctaggaagcttgtgatagtggttgggaggagccaggaaggggcacctgggggctctggaagggcttcctcaccccttcccattctaaccgattgggaggagccaggaaggggcacctgggggctctggaagggcttcctcaccccttcccattctaaccgaagggccctctttaccttgcagaggcgagcaccgtcaggagcgcagagatcggccctactagatgcagagaccccgcagagctgcattgactaccagatttattttttaaaccagaaaatgttttaaatttataattccatatttataatgttggccacaacattatgattattccttgtctgtactttagtattt

SEQ ID NO: 29026 - DNA, 1031 bp, Homo sapiens
ccgtcccgaggcgtccccggcatctccggcccgaatcccggagtgccgggtcgcgcctgcaccgaaggtcccggctcctgtgccctccctgcagccgtcagggcccgtcccccaactcccctttccgctcaggcagggtcctcgcggcccatgctggccgctggggacccgcgcagcccagaccgttcccgggccgggcagccggccaccatggtggccctgaggcctgtgcagcaactccaggggggctaaagggctcagagtgcaggccgtggggcgcgagggtcccgggcctgagccccgcgccatggccggggccatcgcttcccgcatgagcttcagctctctcaagaggaagcaacccaagacgttcaccgtgaggatcgtcaccatggacgccgagatggagttcaattgcgaggtaaccggccggcagccccgactgctgcggtgacagtcgaggtggaagctcgagaggttctctttatatcatcttatgggtgtagctagagacgggcagaaccggaagggccaactaggcccaaaacctcatgttaaagatgattgctgctttttttcataggacttttgggttttggcatttcctgaaggttattttcattcattgttattggaagaagctggatgctcctgtgatagaaaattcaggatttcagtgtcaggcttaagttaggcttacgcttaaaagcttgaaagtttattctttcattaggtaatattgttatgtacccaggtattagaagttgcgtcttgtttattggaaagccaatacttgtttcccttttctaaagcttgcatattctgggaaaaaaaaccctttgaagaacgatataacatctcatacttactttccacatagtttccaacatgatgataacagctatcaattgttcagtattttcaaagtgctagacatttgcacatttaatcctcagaacaaacccatttatctagtaaatggcaaggtggggttttgaaccaagctcacagcccgtacagtactgcttctc

SEQ ID NO: 29027 - DNA, 1015 bp, Homo sapiens
catttccagaaccttccaggtaaagaaagtacacaaaggaaaagcaagaacttaaataaaattccaacacccaaatctgtttgagggtagaagataacataccacacactcttgttgaattacttgagatgagtttactgtttaccaagggcaaggtgggaaactaaggccaagaaactccgtgatgagtctgttctctgactatcttttgatggggatgggaaattctgcttgacctcagtgtgtttaatagactcagggccgggcagagctttgctggtgtctgctgtggcttttgtcttctggcagcgacgtggctctagaggaatggcagggtcagaatgcttgatttggtgcccacccgctctccacccatctcacttagctccaatgacagtgtcttccgttctccccacagggatgaagctgaaatggaatatctgaagatagctcaggacctggagatgtacggtgtgaactactttgcaatccgggtgtgttgaaacctctctgagctccttgtgtagtagacagagactgagtgagggccagactgctaaaatggttacttcttcattccaaggcgatagactcttttatggttctgtggtaaagaaggaaagaggaaggaaagagaggtcttagtgcctaactttctatttttggacttcaattagatcataggtaattaagtgtcacttgagccttgggggacttggacctggttctgctctcagcagaaacctgtttgaatgctctgagtgtaagatttgattatttctggctctgtgagatctccgtccacagggagcacttgtaagtacttctccccccaacacacaccccacccccatccccacccccacccccaccccaggcactagtagagtagatctgcctttatagattactgatttgtttgggattctcactatgaggctaattggttttctattcagactattaatagtctgctgtctgctgggaacccactgcttctgcagggagaggcatt

SEQ ID NO: 29028 - DNA, 1050 bp, Homo sapiens
cccaccttggtttactgaactttttgtaaccatgggggcaagcagaaaaccccgctgcatttcagccagtgctgccaggtgttccctccatgggaaggtgctgctcaacctgaatgtgacttcctctttcttctttctataatgatgcagaatgctgaaattcttcagggtcctgattttgactgtcatttctcactgagcttttactgcagacaaaagaagtttcatttttagttaaatttgcactgctcctgggacatacatggatgcatttatttattcatccattttaatgtctcgatgtgaacttgtttttaaagcaggctaccaggcagttaatcaaacactcgggttaatcaagggttaataaaagcagggacttgatgtttaatgggacaggcattctctcagcatcactagattcaataatgctgcactattaaattttgctgcacatgaagttcagtgcatgttccattttctagactttggcagtgcctgtggtcagtgaccgggactgatgagcagccacatgcctgcactagggtggctctggggtggtgcatgctgcagtctggctggcacaagcctagctgaagagaagtactgctttaggcttggatgtggggatacctagatgtcaagggcagaactccatctagaatgcctggggatgagatgcaaaagctgatagtgaatggaacagtttccaatgtccaaaagcttgctaatctgggatcaaaccagcctgtgttgatgttagttttgctttgttttgagacacggtctccctctgtcacccaggctggtacattctcggctcactgcaacctccacctcacaggctcaagtgatcctcctgcctcagcctcccaagtagctgagactagaggtactagccaccacactcaactaatttttgtattttttatagagatggggtttcgccatgttgcccaggctggtctcgaactcctgagctcaaccaatctgcccgcctctgcctcccagagtgctgggattataaaagtgagccactgtgcctggcct

SEQ ID NO: 29029 - DNA, 1025 bp, Homo sapiens
tgggcagagtgccacctgtgtgcaccagccctccctgcctgcacaagccacactgagaaagccgttgcctccagctcatggagagaaacaccttctcagctgccacgtcatgagcaagtttgcttcgggaccacctgggaaaccaggagtagaaggggtaaactcttcctcatctgccacaggcctgccttgcctcaggccacgtcaccttaccccagccatgttgccagggcatgaggactaagatgcttgccctgccaagcccggaggggatgagcagcctcagctggtgccgccacagacagcacaccacagaggtggctcagggaccttggtagatgggaatgtgagaatctattaaaataggcagggatctccggtcctctgtcaagaggcaatgctgacggctttttcctgctggcgtgcctctgcccaccagccttccccttgcacatcctcatttgtcacctcctaatttgaattattgggcaaatctggccgcttatttgggactgacagccaacttcttgagcatctatttgaacagccttccctttcgctcccagccacctttgaggtgagtccaagtggcaggacaggaccctgtgtgacagagcggaggtcttgtgccctctcagcttcttctctgctttcttacagctcaccttgcagagcgccaagtcccgagtggccttctttgaagagctctagcaggtgacccagccaccccaggacctgccacttctcctgctaccgggaccgcgggatggaccagatatcaagagagccatccatagggagctggctgggggtttccgtgggagctccagaactttccccagctgagtgaagagcccagcccctcttatgtgcaattgccttgaactacgaccctgtagagatttctctcatggcgttctagttctctgacctgagtctttgttttaagaagtatttgtcttcctttgtctaatgtgggattcctgactcccttcgtccaaggcaccggtgtgtgtgtgtcttgc

SEQ ID NO: 29030 - DNA, 1023 bp, Homo sapiens
catcatccccaccccgcccagggttccggaacattcattcccccaccggtgaggacctggcatgcagcgaagcagcccagcccggcggatcccaggccagcacgcctgccggcttctcatcgtcagggagcccgcccagagctcgtgacgagcaagtgctgggtccccgccaggcaccccgaggcggcgctctggctggcagctggtggggaataggcagggcagctgtggctggggagagactttaggcagaagctgtgatgcaggctgactgccagccgaggggctgggtagtgccgtgcgggagctgatggtacagggcactcgctgtccccctccggccaccctagaccagggtccgagaggcaggcaggagccactcatgtcttccccattgcccgacgcccatagacgctccttcctgtgtggggctggggtactccctggtcgtactgcagtcagcacccgtaacccggctatgaccagggatctgtaagccctgtggctccacaggtgctgcttctcactggcccagactctgagctccaccggcccagtctgcacggcccatctgcttcaccttccctcccagccacgtgccagtggccacagcccacttcccaacccactgttgtacccaggcctcactttgctgttgcccttgtccctcttcgggccctgaattttctgttccctgggggccagccagggccctttgtgcccctcccagcacaggcctgatgcaggtgtccactcacaggtggcgctcacctaggctgtcacaggacccacctccatgccaggcaacagagggccacagaaccacccccacggctcactccttggtctggggccaccttcttgccctttctttttttttttttttttttttttccgagatggagtctctctctgtcacccaggtgggagtgtggtggcacaatctcggctcactgcaacctccacctcctgagttcaagcaattctcctgcctcagcctcccaagtagctgggactacaggc

SEQ ID NO: 29031 - DNA, 1034 bp, Homo sapiens
taaaataaaaataaagtatacaatgtaatgattttgggcatgttcagagttgcatggtcataactgctatttaatttcagaatccctaacagagacctcatgccctgtagcagttattccactttcccactcctctttagaccttcgcaactgctagttgattttctctttcaatgcatttacctattttgatattttatttaaatagaaccgtacatgtggccttttgtgctggctgctttcatttagcatgaaagcattttcattttcatctgtgttgtagcacattatcagtacttaattccttttaatggctgaataatactccattgtgtgtatggatataccacattttgttcatccgtcagtgatcatttgggtttttattattttactattgtgaatactggtgcttttaatctttatgtacagatttttgtggggacacacgttttcagttttcttgggtatatacctaggagtgaaatggctgaatcatttggtaactgtatgtttaactttttgaagaactaccacactgtttcccacagtggagctataccatgtcacattcctatcagcaattattaggattttaatttctccacattcttgattacatttgtgattatctgcccttttgattttagtcatgctagtgggtttaaagtggtatctcattgtggctttgatttgtaattccttgatgcctaatgatgctgggcatcttttgtgtacttattggtcatttgtgtatcttctttggaaaaatgtttatttagattctttgcctatttttaatttggaacttaaattattgtcatgggagttctttatgtattctggatagaagttccttatccttgggttgtcctgattgtgccctttaaagcacaaaaatgtttaattttgatgaaatcccatttatttcatttttctttagccactaaatgcttttggttttatatctcagaaaccattgcctaatctaaggttatgaagatttactcctgtgttttcatatagaagtttaa

SEQ ID NO: 29032 - DNA, 1044 bp, Homo sapiens
caaagcagttataaatattgaagtacctctggcacttagataaaatgattctgcgtggctttaaactcagttaatttctaatgcttgaatgtctggattttctatgatttctgaacaactcagatttaagtatgtcttttgttttctgtgaaattataagggttttttccttaggagatagggaacatttctgttttttatttttttatttatttttttattttttgagatggaatttcactctgtcgcccaggctggagtgcagtggcgtgatctcagctcactgcaacctccgcctcctgggttcaagcaattctgctgcctcagcctcctgagtagctgggattacagatgcacaccaccatgcccagataatttttgtatttttagtagagacggggtttcaccatgttagtcaggccggtctcaaactcctcaccgcgtgatctgcccatctcagcctcccagagtactgggattataggcatgggccaccaccacgactggctgggaacatttctttcagatggtaaacctaaatgctgccttataaaattagattttaaactcttaatttctatagtaaaataatgcctaccttgtgatatttcatagaggacatagattcagaaaataactttacagattacttacagaacttccttaccatcttgttaatgatatatcagtatatctgagttaaaagtataaagtgggccgggcgcagtggcttacgcctgtaatcctagcacgttgggaggccgaggcaggtggatcacgaggtcaagagatggagaccatcctggcccacgtggtgaaaccccgtctctactgaaaatacaaaaattagctgggcgtggtggcatgagcttgtaatctcagctacttgggaggctgaggcaggagaattgcttgaacccaggaggcagaggttgcagtgagccaagatcgcgccattgcactccagcctggccatagagtgagactcagtctcaaaaaaaaagtataaagtgaatgtgttctgcatgtagaagggaatataag

SEQ ID NO: 29033 - DNA, 1049 bp, Homo sapiens
tcagggctgcctcctcttccctgttgagatgtataaagcaataaggtgcatgtgaaatgcaaccagcctgttgtctaaaaatgttagtgtgtaattactttgcttttcatttctcacatttttgggtttacatctggaaacgccactaaatgaagacgagtgatttttaagcattaatcactaatctactgtttcagattctgtctattgcagaacttcttttgaagaatgtatttagaacctttcccacattaaaaaggtcaatttatgtaaatgaagaataaacaacatactctgtacctcgtatgtagttacatacttacacatgattgatcttttggtcattatctattgaaacagagttttcacttgttaatagtggaaattatcttaagtgttgctggttcaagtgatttattacaagtaaaggttttttttttttttttttgagacagtctctcactctatcaagtggagtgtcgtgtagtggctcgatcatggctcactgcaacctctgcctcctgggctgaagtaatccgcccacctcagcctcctagtagctgggactacaagcatgtgccaccacgcccagctaatttttgtgggtttttttgtagatgatggtttcatcatgttgccgaggctggtctcgaactcctaggctgaagccatctacccgccttgagtaaaggttttttgatacaagaaatgattataacttggagttcagcttggattctgacaacttactagatttttttccccctcgggagaggatggttgtttcttgcttaggaaatgataatattttagcagcttatctgtgccccacagctggcagagtaatgcagtatgctgatcatgaagttgcatctggaaccctgaaaacttccagaccttaatgtttccaaagagatagaaaagacacatagcttctggtgtgtgtgtgtgtttttttttttaaaatcatgttagttggaggtctcattgaaccaggacaatgacagaattttatatttatatttgttttatctttttcaatgcatggt

SEQ ID NO: 29034 - DNA, 1077 bp, Homo sapiens
cactaatctgctttctaagattttcctgttctggacatttcatataaatgatatcataacaatatgtggtcttttgtgactcgcttcatcatttagcataatgtttttaaggttcattcacgttgaagcatgtatcagtacttcattcctttctctcttttttcttttttttttttttttgagacagggtctcactctgttgcctaggcttctggtgtgccgtggcatgaagatctgggctcactgaaacctcgccactgcatcctgggctcaagtgatcctcccactttcagcctcccgagtagctgggactacaggcacatgccagcacgtccagctagtttttgtattttttatctttttttcttttattattattttatagagatggtgttttgccatgttgcccgggctggtcccgaactcctggccttgagtgatccacctccctggacttcccaaagtgctgggattacaggcatgagccaccatgcctggctcaatttttgtgttttttgtagaggtggggtttcaccatattgcccaggctggtctcaaacacctgggtaaaagcagtgtgctgactacatcttttcaaagtgttgggattataggcatgagccactgtgtctggccacttaattcctttttttttttttttttgagatgagtcttgctctgtcaccaggctggagggcaatggtgcgatctcggctcactgcaacctctgtctctcgggttcaagtgattctcctgcgtcagcctcccaagtagctgggactataggcatgcactgccatgcccagctaatttttgtacttttagtagagatggggtttcaccgttggccgggatggtctcgatctcttgaccttgtgatctgccctcttcagcctcccaaaatgctgggattacaggtgtgagccactgtgcccagcccacttaattcctttctatggccaaataatttgccattgtttagatatgccacattctgtttattcatccatctgttgatggacatttggtttcagtgagcctagatcttcacgccactgcacaccagtagcctgggtg

SEQ ID NO: 29035 - DNA, 1030 bp, Homo sapiens
ttggttttaattaaaaacaaaccaaaaaaaaaaaaaaaaaaacacctcgaggacatccagtcaacctgtttcttttgtcattacctcatgttgttgagcagtggcggtgtatatagcattactcatcaaatattagcataccagacaaccacatacttataagtcatctttaggatgagacaacacttgggatatttcaaagtcatgcctttttataatctgccccagtacatgatatcacaagtgtagactctgaggggtggaagttagtttaatcttatagcagttaataaagccttttatggagtcttctctacctagcctgctagaagtagaatgtatcagagaggagagaaatgagaaaattacataattgtcttagtattcatataaatcttagtttctggctgttgaaccggtcatagttaagccggctgtactgtggtcacagctctaaggcttaatcagctttggaagaagtttcaacattgctgttggagtttacctgtgaaacctgcagaagcctttgccaaattcttgacccttctcttagcccctcaaactctaaaaaagtggactgaaagctaaaagcttctctcccatgtccttaacttcctgctcctcattgcaattgacttgttggtgatggctctgtactagagtgttaatctggaggcctgacagatgactgggcagcttagctgccagtttagtagcatcaggcctacctctctaacctctctcatgtgaaatgtcccttaagcccatcttgtttatccacgactagcatatgactctgggtcttaacactgctgtgaagctgcctatttatctgtcttccgggtttgaatgcagtccaggaagttgcatctagaggatttactgtgacctttgtacatagaaaagcataattcctttctccgtatttgaaaatctgctaagaggtagttcttaccttctctgactctggtattggtctgcttcctcacctgccaggtaaaggcctgtcccttctgtcccaggcctttta

SEQ ID NO: 29036 - DNA, 1060 bp, Homo sapiens
tttgggaggccgaggcgggcagatcacatgaggccaggagttcgagaccagcctggcccatgtggtaaaaccccatctctactgaaagtgcaaaaattagccagtcatggtggcatgcacctgtaatcccagctatttgggtggctgaggcacaagaatcacttgaacctgggaggcggaagtttcagtgagctgagatcacaccactgcactccggcctatgtgacagagtggaatcctgtctcaaaaaatatatatatatttacatatatgtaacatatgtatatttctttgtttttattccacctgttttgcaaaatggtattcatttcttcctttctgctgtttatctttggcctctaggggagcatgtaacttcaaggtttaaaaacgaggtggagaggatgggttttgatatgaacaacgcctggaggatttccaacatcaatgagaagtacaagtgagttatatgggtccctgtggactgtttcacagccagtgcctttgcagaaaccgcaattctcatgtggcagaacatttgaacttagactttttatttgaaatggttttatttattaaatctaaaggcatgatcttcagagtatttattgaatcttctgttcccgttgctatcattggagtggaaagtgatccttacttaacaggatcctagaaccttcccttttaccccctctaggcctctgttttttctggtacatgcatgtctaaataatattgtatttgcctgtaggcaggcagttaccatttttctcatcaccacttggcatcacattagagagaggatcagtggtctcataagcagtgacagaacatttatgaactagtttttatgactgtaattttactccaggtggtgtgaaatagacataagtacagttgagtatcccttatctgaaattcttgggactgtaaatatttcagattttggatttttttcaggttttggaatatttgcatgaacataatgagattatcttgggcctgggacccaagtctaaacacaaaattatttgtctcatatacacattatacagctgga

SEQ ID NO: 29037 - DNA, 1055 bp, Homo sapiens
ggttaatagcttagtcacattactaacctggttcaatgggactgaggctgtgtatgcagatagactggcttgtgttggttttgcatacccatggctgcacctgttacctataaggatgacaccctgtttggttcaaatcaaagaatgagttaatcctgtgaagtctctggaaacttgcaattgtgggcttttttccttccctgagggtctggtagaactgacacggactctcagttctgtaattggactgggcgctcatgtagttagaaataacctatgtacttgttacagcagaagagttgtaatggagtataaagagctgaccctcgactcccctttttttcattgatagttaagattgccagattcccaaaaggtagcatcaagtggaacaattcaagatagtatcatttgttgtatacacataagtaaacatttaaggcaacaaaacaaaacaaaacacacttatggtaacccattctgttgaggagtccaaaactcgaataaagcgcctcattgcctttaactggttctgtggcagtgagatcatcatccttatgctggctcacctagtgtctctctctctctcccgttttctctctccctctcttatccccttgactctccccacttctcatcttctctttagattatgtggtagctatcctcaagagctcatagtgcctgcctggatcactgacaaagaactggaaagtgtatcaagtttcaggtcctggaagcgcatccctgccgtcatctacaggtaagttaaactggaccagtcccagcttgggctggtgctgctgcctgctgcatatggtctgctgcctctgctgctgctaacctgggaagggtggggagagttcagagaactttctaggcaaggctgtacttccttattgttaaagcttctcctccagtaacacatcagtactgactgcattcagaacactagctggttgttcatttgaaacagataagaaagttttagttgtaaagtggctggacttgctatttcaatatccttcttacattctgtgagaagataatgtgct

SEQ ID NO: 29038 - DNA, 1049 bp, Homo sapiens
gaggaggaggaggctactgcatggcttactgggttccccgtcctgacagagtaaattgaagtgttctcagggatgttaggataaggtggctcagctgagctgacttatcagagtgtgcatgcctgattgcttaatttgtgcttcattggacttccataggtgaaactggtgcagcatacctattcctgcctgtttggaacattcctgtgcaacaacgccaaggagagaggggaaaagcatactcaggaacggacatgttccgtgtggtcacttcttcgggcaggcaacaaggctttcaaaaacctactgtattcctctcagtcagaagccgtatgtatccttcagcctttccactgtggtcagcagaaggaatttggggttggttacatatgagagcctttttgagtagtgactgtttttgtgaagacatctctactgtctctggatggactggttccatttttcccccatgattctgtcctgaggaaggcctgcttctgatggtgctctgatctgtttctgatgactacttgctgagggtggtttggtttaacacagatctctactttgccaccctagacatgaatcttttttggcactgcctccagagcttatttctagcatattctgtcttacgggagaggcacttaagttgcttcctgatgcactgatagctcagaatgagctgccaccaggcccccagcaccctcccagtgtcaataagcaatgatacccaccaaagcttctgtctcagaacagtaaactgtgtttgacattggtatgtgtgtctgtctgattctctgctcacatgaagagctggcaggccctttaagactttgttccccgaaggaatgaataccttctgttaagcagagaaaaggaggcacatagacctatgtgtcagtttcatagtaatactagctttgtcagaatgcatcttagaccctaaagaagtcaaaaggaggctaatcagagttcatactgatttcctggactattaatatggttctcattacatttaagtaatcacagaaaagatttaagctgac

SEQ ID NO: 29039 - DNA, 1029 bp, Homo sapiens
ggtaactgactcaccacctttagtgagttgtcttggttttgttttttaaaaatactctgcaacaaagctttacttgtttttgttgtctgttacagagtaaaccgtggtgtagattcttctgccagaaattctcacacttttggagttagagaacagaaatggttcagtaagtgacaaaatgacagccagaatagatggtctagggctttgtcccacatccaccatggccttagcctttttctttcaaccttgtttggctggctccttcctctatccctaaagctgtccagtcctccagcctgcaaagcaaattctttcaagtcagagcaaattctttcaagtctctgcctccagcaagtatcctgtcttgctccttcccttcactgtgaaacgaatagaaagagtggccagctctatatcgtctttgctccaccaccccttcctcttcctcctgcttctgctgccccccaccaccccaacactgggtgtccccaaggactagccacacactctagacccactccaaagcattctttcttgcaaccattctgcaacctgccaccttgctaaccctcctgccagttcttctgcctctgtagttggcctgtgagactttgcaggcagccctctcacctacttccttggcattactgctctgaggctcagctctctgccctccttccacgcatgcttccttggacatgcagaaattaaagtgctgaaaatggaggcctgttatataccacagttctaagtctctagaggcctccttcaggcacctggggagactgcgagagcatcaggtgtccccatctggacgtgtctatgtggccatgcttcacctgcacccccacgcagttcgatggcattaacctggggactagttctgggcctgaaaactgagctcagccttgtcagccagagatgcctcggggcttcccctgaactgagaggccacgacgtctgctcttcgcttttatcctctgttgcaggatgcagtcagcacctagtgcaggggtgaacgccgat

SEQ ID NO: 29040 - DNA, 1043 bp, Homo sapiens
ggggcaggctggctggttgtgagggaggaggaaggcatgagccatggacatgcttctgtcttcagagaacacctgagagagcaaagcacagctgggctgggagggcggacgggggatttgctttagatttgacagcaacattggtgatacaggtggcattccaggcaggttgggggtggtttactcattgtcagcagcaatggaagtcacagtccgcctgccagaatgagcatgtgtagtggcaaggtcaaagagtagggccggagccgtggggcagaaggtagaagacaacctggggcagtagtgtcttccggcctttgtgtgtgagaatcagtggtatgtattccagttctttggcttttccagaacccagaaaagaatggagtaactgaactgtgatttaaaatcttgctgtgtggcttgggttgtttgtgttggttccaaaccctgaatcttttggggtcttcaatttgtgggcatgtcagtggaaattctaagctttgttttaatggtgtgtgtgtgtctgtctgtctctgtgtgagtgtgtttagaaattggcttctctgggttcctcgctcgtcttctggaaggtggggttatagacatgctggtgaattctgaatgttttataaattagactattaacggagttaaattgaagaaaccttctgtcataagaccttccaggaattccattccaaatgaggaaatgcataaagacttgtccacttggcaaacattgggtgtttgggaggtgattgtgtaccctgtccccacatttaatacctgcaaccattgcaacaggaagcccatgtaacctggtgctcgtgattactgatttgtttcttgtcattgagttttgacagtatgttacttaataaaaaagagaagaaagaaaaataagctcttggaagtaattttcaagtagaggtagtggttttgtttatttttttaaggtaccatatgtggcatgtgcttcctttctttgatgtgaaatctgaaggaacccttgcctccttcctagcacacttcctaaatgataa

SEQ ID NO: 29041 - DNA, 1035 bp, Homo sapiens
ctcaggagtttgaggctgcagtgaactatgaatgcagccaactatgaacaatgcaatgaaccatcgcacttcagtctgggcgacagagcaaggccctgtctcaaaaacaaaacaaaacaaaccctctattactaacaacttaacaatcattgagccttcagccagttttttttcttggtggagggccttgccttgatgttgatggctggtgactgatcagcgtggtgattgctgaaggttggggtggttgcagcaatttctgaaaataagacaacactgaagtttgccacatcagtcaactctccctttcacaaacgatttctctgtgccatgtttgatagcattttatcctcagtagaacttctttcaaaattggaatcaatcctctcaaaccctgccactgctttttcaactaagttgatgtaatattctgaatcctttgttatcatttcaacagtgttcacagcatcttcaccaggattagatttcatctcaagaaaccactctgctcatccgtaagaagcaactctttattcgttcaagttttgtcatgagatttcagcaattcagttcgttctttctttctttctttctttttttgaaggagtctggctctgtcatccagccaggctggagtgcagtgacgcaatctcggctcactgcaacctccatctcctgggttcaagcgattctcctgcctcagcttcctgagcagctgggattacaggagtgtgccaccacacctggctaatttttatttttatttttagtagagacgaggtttcaccacgttggccaggctggtctcaaactccttacctcaagtgatccacccacctcagcctcccaaagtgctgggattacaggtgtgagccaccgcacccggcctgcaattcagttatatcttgaggctccacttctaattctgattctcttgctatttctactacatttgcagttacttcctccactgaagtcttgaacccctcaaagtcatcctggagggttggaatcaacttcttccaaacttctgtt

SEQ ID NO: 29042 - DNA, 1034 bp, Homo sapiens
tggctcactacagccttcacctccctgggctcaggtgatcctcccacctcagcctcctgggtagctgggaccatcagcatatgccactatgcccggctaatttttctattttttgtagaagacagacttttgtcatgttgcccaggctcttttggcagagtttggacagaaggtggcattgggctggccctcaaaggggtgggtggggcaggacctctggtgggggcagatatgagaaggttccatgcagtggggacatggcgggaaaggccccaaacaggagcgctcaggcctttgcagggaacaggggacagattggtgtggctgggggatgggcatgagcagagagcaaagtgaggttgactggacgggggtgattggcttggggtaggcctgcgatgctgagaaaggagcccaggctccattctgggggcctctgtgcccagagagcagtctccacctctccacccagcagagcccatccttccctgcacaccacaatgtagggagctggcgccctgcatgcaggtgggtgcctgtaggcctgccgcctccaaagcccagtcccggccctgccattcaatctgggctctctttacagtccttcccactgactcaggtgggcccttgcccaccccaccctgggaaggctgggccaggatggggcaggcacctcaccccggccaggaacaggaacgggcaccatctcggggactgatgttttttgaatggcgctatccaccctgccctgctcggcctggctgtgcaggcctcttggtaccacgtctgttcgtaatgaccgtaacaactctattttcttccacagatgactctggggacgacgacgaggctaccaccccagccgacaagagcgagctgcaccacaccctgaagaatctttccctgaagttagatgacctcagcacgtgcaatgacctcatcgccaagcacggcgctgcactccagcgctccctgacagagctggacggcctcaagatcccatctgagagtggggagaagctgaaggtggtgaa

SEQ ID NO: 29043 - DNA, 1028 bp, Homo sapiens
aaaaaaaaaaaaacgaaaaaaaaaaaaccaaaaaaaaaaaacagagggtcccacggcagtactggtggccatggttcccgtagccagaaggagtcgctcacagagccccacacacagcatatgtagggaatctaccttttaatatggttcagggcgacatagatgctatctttaaggatctcagcataaggagtgtacgggtagtcagagacaaagacacagataaatttaaaggattctgctatatagaattcgatgaagtggattcccttaaggaagcttgacatacgatggtgcactgttgggcaatcagtcacttcatgtggacattgcagaaggcagaaaacaagataaaggtggctttggattcagaaaaggtgtaccagatgacgaagcttcagggatgacttcttaggaggcaggggaggtagtcacccaggtgactgggaaacaggcccccaactgggcagccacttcagagatggtcctcccttccacgatccaacatggatttcaaagaaccgacagaggagggaagagcacaaagaccacgactccagcttaaacctcgaatgttgtgacgcccctcaatgaagtagccgatcccaactctgctatcttcaggggtgccagacccagagtggaattcgttcacaaggagcaagaatgagcctgcggttgggagggaatggaacatggggggttggagcaggaccacagcctggtgaacccctgggccatgttcctgcagcttccactcccatacctgccactggcctccccacagtggaaacacagcttgttgtgagtgcatgccagctgtcaacaagtggtttttagtacattctgggctttgctgtatctatctagtgcctgtttgtgcgtttttttctttctaccactgcttccccattttccttctgtccttttcctcccagctcgttttcctagcagcacatggggttccccagaggatcggaggtggccatgtgggggagtcgtttgggctgcggtactgcatcattttt

SEQ ID NO: 29044 - DNA, 1465 bp, Homo sapiens
aagatgaaaggacagctttttaaaaggagaaggtcataagacagtttgaggaaggcattggaagaggaagaggggcaatgtctcctttgttttattgttggtatataaacttaaaatctcagttctttttatggcacttgtggagccacttcctctcctcaccaaaaaatgcccagtaccctgaatccgatcaaattactctcctaaagtataaggcttagtttctgtgtgctgcttcgcgagacagttcccacaaatcgagagtgttaatcagacttttgtgttttcttttttggattgctgttgtttgttttcatttatcatttgtctttgcctaagccaggctcatcaagaattaacagccatcaggctgccgatgtgctgacagcagacccacttagagtcctgtgtttgtaattccatgcatttgttattttacctgttttgtccctgccccttctagtcctgtgcctcctgattgctgagtgttcacctggaccttctgactaccttccctgtgctattccatcagcctacagacctggtacctggatttttgcccgagatgattcctaccaccttactactgacgaagacacccattccagtggaccactgtgacccaggaggcattcagccatcatgatgtggcctttacctccactcctgtcttgttctacccagattcagcacagccctttatagtgaagtcagagtcctcaagccaaatagctaaagctgttttatcacaacaaaggcctagtttgttccatgagtgtgcatttcatttcttcagttaaagccttcagagacacacaataaatttggaccaggggattttttagttattaatgctctctgaagaaaggcaacatctttttgagagcagcattggaccacaccccacaatctcaaatgattgaaattcatgaacatctaggatcccgtgaaggtcactggaccctgttttttctacttcaaatcctgtagtagcctactgaatgagaaaacatattctgacccattgggatcaaatcaaaggcacagtgaactcctcatagcatcttctttggaattactcaggaaccagaactttttacacaaatgtaagaaattctaccaaggagtccccttacctaacagcatctcacaaggctgcaccagattccagaaaaggcttctcttgatacatcaaggtagaacctctatggtaaatccctctgtttataatgcactttacagtttcaaagcacttgtacgtacatttatctcaattatcaaaataacagtgaattataatccctttttggaaatgagggaatgtaaattttaaaagttaagcaattatccaaggtgacacagctgtgaaagtggtagaggccaggctttctgacacccagtccagtactctccttggaattagcctccattttacccacagtgttaaaatggctgggtattggga

SEQ ID NO: 29045 - DNA, 1052 bp, Homo sapiens
atctatcattcgtcttcttttccaaactacacatcactgtatgactcaaccagtagcagttatattgccccttggtttttattcagtttaactactgtttccaagataaatgagctaataagctttaaaaaaaaaaaaaaaaaaggctgaattcttttttcttcatcactggcatatctgcctattctccagaattattatgactattcagctcactttaacagttgaacttcaagcgacaatctttgaacaccccttctcatgtgatttaaaatgaaaccatttggaaaagtttcttctagccagtaatagattttttttttaattgctctgccttgtgccgagagatgttcttttaagatgaatcttttgatgtctgataccaccaaatataggtggtagggagagttggaggctggccctttgagcaggccattagcttacttgctgggcatttccgatagcttattgcctacctttttgctggaaacaaactgatttgaaaaacaaaatctatgaagactgcagctaaggattttatcggtagacttaagagcttttgtccttgtggatattttagtggaaccacatcagtctcaatactgtcattttacactgactcagagcagctgacttcattccttgccatgatatatatttaaggcaggcattgtaacagacataaagacaacttatctgtttcagcaggaaggattcagtttatgaactctcagaccagatcatgttgaacaaggagactttgatgtgtgtcatgagaaaactcattctttacttcccagtcaatttaaaggccagctatcctgagctactcgaatgaatgcactggttaaacattggaaatagtttgtttatatccttgtctctctctaggccaattgtgattacatgactcgactctacatctcgtcaaacaaggcctaggtctggttgctgtagactgctcgccctcaacaaataaaatctggttgactagcctccttgtatatacaactattatttgttaagaagaaattatcgtcaattttctacta

SEQ ID NO: 29046 - DNA, 1030 bp, Homo sapiens
caaggatttttaatagtaacaacccacacctcacccactaggactcaatgttcacaacaggaaggaccattgctgcatactccttgaccagcaacttttttgaagatatttttaagtgcagagtaggcctctattcctgtatgtaattgttcattttcagcacctggaacctcatctatcgggtctggaaggaatacagcagttcgaaagccgcgtccatttctctccttcagtagtgcagaaatgagtccgattcaccagtacacacagaactgtaccagttcaacctagcaaaagaagaaaagtttccactgtacttaaaatttacagctgactcaaattgcctcacagaattatttgatgtagaaggctagttgtcttacttcagatcagcaggacagttgggctctcagactcatgaccactgagtttgcttgtgttgaaactgtggtttcatccaacatatgctattggacatgattattattccattcaaatggattacagacttcttgaggacaggacaaacttatctctcatggtgtttttttagaatacttttataaccaaggaagaaaccatgccagctgttaccattcaacttcttaagcagagattaagctttttcatatctgttcttatcctggacatcagtagtttttaattgcccagcatccgttccatcttgtaacaactccctgatgtttcttaaaaccacctcttcctattttcagtctgtggtttggacagtctgacccaaccttgagctttgtgggtgaacatgtaattcagacctcatcaatcagcaaatccatctgaactgtggaggagaagctctctttactgagggtgctttagctttgtaggatgaaaacctcaaactaacagggcctaccatgtagagaatgaagccagtgcaggggaaagcagagccaaaatatggagagacttgaatcctgatgacagcgtttgtgcccctggatccaaccgtgcctgaagctagaatatcccctggacttttcagttatgt

SEQ ID NO: 29047 - DNA, 1028 bp, Homo sapiens
agctactcttcccctggatcagattgcttctcagatcccatcaattgctcccttcctggatctaaatattcctgcctccagctgctcttctcctccaaccaaagacctgctgatggcccacccagctacttcctcactcagcttctccttccttggactcagctaccccctcactagatctagatacccctcctgacttagctactcatgcctatagaaaccctttttggatccatacccctttgagtttagctactccgtattctctagtttctgcctgagtccatcaaacccttcccacactccattccctgtcaagttatggctgtcccctcaccccagctgctcctagagaggcccttgttacctgtgtcattcatgtttctaacaagccaccctccaccccgtcttgtgtgccccatgcacctgtgcatctgtgctgtgtgggtgttggtggcccttttgcgcatgcatggggcatcccctgcccagaccagcgggacaaggagcgggaacggcggctgcaggaggcacggggccggccaggggaggggcgcggcaacacagccactgagaccaccacgaggcacagccagcgggcagctgatggctctgctgtcagcactgttaccaagactgagcggctcgtccactccagtaaggggccaaatggggccggcccagggctcagggtgggaacacatcctcccccagccccctgtgcctttcacatccttctcatcccctgcccctgcagatgatggcacacggacggcccgcaccaccacagtggagtcgagtttcgtgaggcgctcggagagtaaggccacctggtgtcgccctgtgcctgcctgcctgtccgcccacctcctccggctcttccttgagctctctctccgtgtcttcaactgtgccgtcactttctcttctctgcctgcggctatcaccacccctccatacagcctcccatcccatctcctgatgtccagcccaggccctcacctggtgccccttccccttttttgcag

SEQ ID NO: 29048 - DNA, 1041 bp, Homo sapiens
tcaaatgccacagcctctacattctgctccttgagttcagacaaataacctgacctcccaagatctgccaacgagagaggcagacctcgggaggtcaggcctcagtggctgggttggggagcagggcgccccagtgaccagcatttcccccagatctcgctgccttcctcggagttggccagcagcagcacagacagctcaggcaccagctcagagggagaggatgacagcacactggagctccttgcacccaagtcccgcagccccagtcctggcaagtccaagcgacaccgcagccgcagcccgggactggccaggttccctgggcttgccctacggccctcatcccgtgaacgccgtggtgccagccgtagcccctcaccccagagccgccgcctgtcccgagtggctcctgacaggagcagtaatggcagcagccggggcagtagtgaagaggggccctctgggttgcctggcccctgggccttcccaccagctgtgcctcgaagcctgggcctgttgcccgccttgcgcctagagactgtagaccctggtggtggtggctcctggggacctgatcgggaggccctggcgcccaacagcctgtctcctagtccccagggccatcgggggctggaggaagggggcctggggccctgagggtggggtaggcagatgggccaaggtgaccaccattctgcctcaatcttttgcaagcccacctgcctctctcctgctgctcctccagctgtatctgcacctgcctctctgtcctggccaggggtggacaactggggtcccccaaaactcagtcctggcacctcaactgtgacaatcagcaaagccccacccaggcccccatctgggatgatgggagagctctggcagatgtcccaatcctggaggtcatccattaggaattaaattctccagcctcactctcggctctttcctacttgttagtagtcttgggatggtggtagtcagaggcagggactgaagaggtgagggaatgacagaaccgacatttaccaggcacca

SEQ ID NO: 29049 - DNA, 1063 bp, Homo sapiens
aggctccatattatgacccagttctgctgacttgctcccccgccgccacaaaagttagggttgagccaaaacttcctgccagttatcgacttgtgtttcccaagattaaaaaataaaaaagttgtgaaatgcttattcagatgttatccaggtactgggtaaaatgatcttaatttgttggagtttttagaacttctcgatctaaaagtttccttttaaagaagtgtctgaattgacattctcataagtatgttcttcaggccactggtctgaagaagtggctctgaaaaaaggatttgatgctaataataagtttgagaaagccacataccattattctttcttggagcttctcaatgtgtaataccacattaaaaccactgagaggtcctgcaataaggaaatgtgccttataagccaagataataacttgttccatttgtttaatctacttgatgtcaaatcttttttttttttttaattgaagcacacgttagcaaattctgacctagagtggggatctgcatactatatataggctgtgaaccaaacctggacctactgcttgtttatatggtctgtgagctaagggtgctttttacatttttctttcttttttttttttttttaagacggagtctcgctctgttgcccaggctggaatgcagtggctccatctcagctcactgcaagctccgcctcctgggttcatgccattctcctgcctcagcctcccgaatagctgggactacaggcgcccaccccgatgactggctaattttttgtatttttagtagaggtagggtttcactgtgttagccaggatggtcttgatctcctgacctcgtgatctgcccgcctcagcctcccaaggtgctgggattacaggcgtgagccaccacgtctggcctgctttttacatttttaaatgatgggaaataaaagaagaataatattacataggtgacaattacaggaagataaaatttcagtgttcatttcagtcacacccatttatttatattcatatatatttacatattgtctttgggtgctttaatgc

SEQ ID NO: 29050 - DNA, 1014 bp, Homo sapiens
tccaatttgtctactttttcttttgttacctgtacttttggtgtcattccaagaaatcattgccagaaatatagtttttaaagtcatgaccaagtggctcctggtttaaaattctcagaggcggccctaattgctgcctggttatcataccctacttctctttttttaatttttagttttttaaagacagggtctctctgtcgccgaggctggagtgcagtggcgtgatctcagctcactgcaacctctgcctcccggactcaagcagtcctcccacctttgcctcttgagtagttgggaccacaggcatgcgccactgctcttggctaatttttgtatttttttgtagagatggggttttgccatgttacccaggctggtctcaaacttctgggctcaagtgatctgcctgcctccaccttccaaagtgctgggattactggctgagccaccacacccagccttcaaaccgtacttctctactctgcatctgctgtagatgacaggagtccatctcttcatttcattggtcgttgggaacaaagctcccgagtgttggatccttgtcttccagctggcctaaggacatgcaaagattagaagcagcacttctatgttcattgagccagattgtgtctgcttctgtggaaatggcctaggggactcactggccattctgtcctgggtccagttgccaggttaattcctgtgatagtttctatagcacctgactctgatactcgctctcttaattgctcctcagaagtgccttgtgatgtaacagtgatgtggttttttgttttttttttttgtttgtttgtttgagacagagtcttgttcagtcgcccaggctggagtgcagtggtgcaatctctgctcactgcaagctccgcctcccgggttcatgccattctcctgcctcagccccccgagtagctgggactacatttgcctgccaccaggcctggctaatttttttcgtatttttagtagagacgaggtttcaccatgtta

SEQ ID NO: 29051 - DNA, 1038 bp, Homo sapiens
agaccagcctgaccaacatggtgaaaccccgtctctactaaaaatacaaaaattagccaggcttggtggcgcacacctgtaatcccagctacttaggaggctgaggcaggagaatcgcttgaacctgggaagcggaggttgcagtgagctgagatcgtgccactgcactctagcctgggcaacagagcgagactacatttcaaaaaaaaaaaaaagaaatctttttgtgtgtaggattctgatgttgtaaagagataaagattgatgctgtcaacttctggcctgagtgggcagtgtgcatagctgcagtgttctaatagcctgttttctcctttctgtctctccagctgtccctgggacaccccagtatgtggacgagcagttcctgtcacgcctcttcctatttgtggccctggtgatcatgttctggctcctgattgcctaatgctgggctcctgcctacatccgtggcagggctctggactggtgacgtgccaccccaactcctggtgtttggcttcctggctaatcttgactcctggaatcagtgggatcagtaacacatcaaggagtcttgtttcttcatcagagctttggaactcgagaccagttggcgatgacccctgaatatcgccaccgctgtaaacactctataacttcaggccttggcattgagtcatctctcatgggtgacaccatgaaatcttgtttcagccagttctgcaggtcctgactctgcagagggaagaggcagaaagagagaaactgtcagagtataatttcacctgagtttaatattacagaaacaaagggatgcaccaaatggtatttctggaaattttcatgtctttaaataccccttggtaagttgcttctgaagccagtgggggctcctcagatagagaggttcccctttcaaatcccagtgccgctctgttctctttccttcccctcccactccccctcttcttcctctgtagagatgcaagaaattgctgtcccataaaaatcataattgcagtagctaaagctggggtc

SEQ ID NO: 29052 - DNA, 1047 bp, Homo sapiens
atgctaaccttctgtgtctcagtccaattttaatgtatgtgctgctgaagcgagagtaccagaggtttttttgatggcagtgacttgaacttatttaaaagataaggaggagccagtgagggagaggggtgctgtaaagataactaaaagtgcacttcttctaagaagtaagatggaatgggatccagaacaggggtgtcataccgagtagcccagcctttgttccgtggacactggggagtctaacccagagctgagatagcttgcagtgtggatgagccagctgagtacagcagatagggaaaagaagccaaaaatctgaagtagggctggggtgaaggacagggaagggctagagagacatttggaaagtgaaaccaggtggatatgagaggagagagtagagggtcttgatttcgggtctttcatgcttaacccaaagcaggtactaaagtatgtgttgattgaatgtctttgggtttctcaagactggagaaagcagggcaagctctggagggtatggcaataacaagttatcttgaatatcctcatggtggaaagtcctgatcctgtttgaattttggaaatagaaatcattcagagccaagagattgaattgttgagtaagtgggtggtcaggttacagacttaattttgggttaaaaagtaaaaacaagaaacaaggtgtggctctaaaataatgagatgtgctgggggtggggcatggcagctcataaactgaccctgaaagctcttacatgtaagagttccaaaaatatttccaaaacttggaagattcatttggatgtttgtgttcattaaaatctctcactaattcattgtcttgtccactgtccgtaacccaacctgggattggtttgagtgagtctctcagactttctgccttggagtttgtgagagagatggcatactctgtgaccactgtcaccctaaaaccaaaaaggcccctcttgacaaggagtctgaggattttagacccaggaagaatgagtgatgggcatatatatatcctattactgaggcatg

SEQ ID NO: 29053 - DNA, 1051 bp, Homo sapiens
tcatgttttcaaacttaatactggagactggctgagaacttacggacaacatcctttctgtctgaaacaaacagtcacaagcaaaggaagaggctgggggactagaaagaggccctgccctctagaaagctcagatcttggcttctgttactcatactcgggtgggctccttagtcagatgcctaaaacattttgcctaaagctcgatgggttctggaggacagtgtggcttgtcacaggcctagagtctgagggaggggagtgggagtctcagcaatctcttggtcttggcttcatggcaaccactgctcacccttcaacatgcctggtttaggcagcagcttgggctgggaagaggtggtggcagagtctcaaagctgagatgctgagagagatagctccctgagctgggccatctgacttctacctcccatgtttgctctcccaactcattagctcctgggcagcatcctcctgagccacatgtgcaggtactggaaaacctccatcttggctcccagagctctaggaactcttcatcacaactagatttgcctcttctaagtgtctatgagcttgcaccatatttaataaattgggaatgggtttggggtattaatgcaatgtgtggtggttgtattggagcagggggaattgataaaggagagtggttgctgttaatattatcttatctattgggtggtatgtgaaatattgtacatagacctgatgagttgtgggaccagatgtcatctctggtcagagtttacttgctatatagactgtacttatgtgtgaagtttgcaagcttgctttagggctgagccctggactcccagcagcagcacagttcagcattgtgtggctggttgtttcctggctgtccccagcaagtgtaggagtggtgggcctgaactgggccattgatcagactaaataaattaagcagttaacataactggcaatatggagagtgaaaacatgattggctcagggacataaatgtagagggtctgctagccaccttctggcctagcccacacaaactccc

SEQ ID NO: 29054 - DNA, 1057 bp, Homo sapiens
tgcgcgcctgtagtcccaagctgctcgggaggctgaggcaggagaatcgcttaaacctgggaggcagaggttgcagtgagccgagattgcaccactgcactccagcctggcgacagagcaagactctgtgtcaaaaaataataataataaaaataaaatcatggctgcttggtggctcatgcctgtaattgcagcactctgggaggctgaggggggtggatcacttgagatcaggagtttgagaccagtctggctatcatggtgaaaccctgtctgtactaaaaatacaaaaagtagctgggcatggtgatgcatgcctgtagtcccagctacttgggaggctgaggcaggagaatagcttgaacccaggaggcggaggttgcagtgagccgagatcacgccattgcactccagcctgcatgacagagcaagactccatctcaaaaaaataaaataaataaaataaaatcaggctgggcatggtggtacatgcatgtaatcccagcactttaggaggctgaggcgagcggatcacctgaggttgaaagtttgagaccagcctgactaacatggagaaaccctgtctctattaaaaatgcaaaattagctaggagtggtggtccatgcctgtaatcccagctacttgggaggctgagtcaggagaattgcttgaacccaggaggcagaggttgtgagctgaggtcgcaccaatgcactccagcctgggcaacaagagtgaaactccatctcaaaaaaaaaaaaaaagtctaccactgaggctgggcatggtggctcacgcctgtaatcccaacactttgggaggccgaggtgggcagatcatgaggtcaggagttcaagaccagcctgaacaacatggtgaaatgctgtctctactgcatctcaaaaaaagaatgaggggtcagggtcaggtgcaatggctcatacctgtaatcccagcactttgggaggctgaggcaggaggatcacttgaggccaggagttcgagaccaacctgggcaacattgcaagaccctgtctctacaaaaataaaaattaa

SEQ ID NO: 29055 - DNA, 1030 bp, Homo sapiens
ggcgcagtggctcatgcctgtaatcctagcactttgggaggctgaggtgggcggattgcctgagctcaggagttcgagaccagcccaggcaacatggtgaggaaacctcgtctctactaaaatacaattagccaggcatggtggcatgtgcctgtagtcccagctactggggtggctgagggaggagaatcgcttgaacccgggaggcagaggttgcagtaagccaagattgtgccactgcactccagcctgggcaacagaaaatgtgtcaactcttgggcaaataggtgctgatttcatggcatacaaagcaaattgacttctggtataaatcttctgtagctataagaacttcacgtatgcatgtatgtattacagaaaaatcctttgacacttaaatgtagggggaaaaaacacctctacttgagtatttgggttagttaaggctttattgaactttcttgcgtatgtttttttcttactcttcagtggcccgaacctgtaacttgatcttgattgttctggatgtcctgaaacctttgggacataagaagataattgaaaatgagctggaaggctttggcattcgcttgaacagcaaaccccccaacattggctttaagaagaaggacaagggaggcattaatctcacagccactgtaagtggggaatatgacatggggcaggctgctgcaggaattggaatggggagtggattggggtgcatggaccctgacattggaaaatttcctggcttttccctgcactaattgagataacacaatgactttataatgactgacaagaaaaacttcaagattaggataggagccagtctcagacttacctttgctacttatttcctcttttggattatctattgggaatgatatgggcgtgtggaccaatattatgcttgcataaagtagatggccgccaatatcttctgttttcattcatttaacacaaatttatagagtgcctaccacgggccaagcattattttaggctctgggcaggaatggaagag

SEQ ID NO: 29056 - DNA, 1084 bp, Homo sapiens
aattctaaacagagggtctatttctgaagctgaggaatcacatggagtgaatagcatgggggaaggggattactaatgaggctgaaagaaaagtaccaggaagagactgacttcatgcataatccataaagccaggttttcttgaaaggtgacctgctttcttgtattcctgcaagtacacggcagggtgggcagttccaggcttatagtcattattccctaacaaacggtcaagacttaggctgcccaagactctactacccttgtagtcaaaaatccaaccaccttgacctttacctcattatctgaccctttagcatggagtcctaaaatggtcctgaatggacaaatatctagaactctggtaaattaacttgagtagcatgggaaataagtatcacctcatagcaggactgaaaaacctccagttaggaaaggggactcagaactgtactgtattctgtagaatctttatccgtaagtgctatgtatatactaatagttaaggtgaataataaaacaattgtgagctaaggaatgtgatacagaacacaaggagtcaattaatgcatgagtcttaagggaaattcttagacttcagtgggtctaagctcagaactctgagcttagagaaacaggatgccccagtaaacatgatttgtttgagagaaactaccatatgtaatagatgattcctcaataaactgttttcactaggtcagtttaatcttggaaattacactatagatatcctggtattagccacaaggctatgctatctatagggtcagtccagtataaactgacctgttggggtctttaaagctcaaggaaaaaggccatagttgatttctcctaaatcaagatagagtccaattaacttttttttttttttaagatggagtctcactctgtcgccaggctggactgcagtggcgtgatctcagctcactgcaacctctgcctcccaggttcaggcgattcttctgtctcagcctcccgagtagctgggactacaagtgtgggccaccatgcccagctagttttgtatttttagtagagatgggatttcaccatcttggct

SEQ ID NO: 29057 - DNA, 1031 bp, Homo sapiens
aaaactaaaaatttctagaacaaaatataggaggaaatccttgtggcactgggttaggcaaagttttcttaggcatgacaccaaaagcatgatccatttaaaaaacactgatagactgggcttgatcaaaatttaaaacttctactctttgaaagacactgtttagagaatgcaaagacaagccacagactgagacaaaatatttcaaagcatttttctgataaaggacttaaattcagaacacataaaatctcttaataaaccaacccagtggctcacgcctgtaatcccagcactttgggaggctgaggtaggtggatcacctgaggttaggagttcgagactagcctgaccaacatggtgaaacctcgtctctactaaaaatacaaaattagccaggcgtggtggtaggcacctgtaatcccagctacttgggaggctgaggcaggagaatcgcttaaacctgggaagtggaggttgcagtgagctgagactgcaccactgcactgtagcctgggcaccaagagccagactctgtctcaaaaaaaaaaaaaaaaaaccaacacaattgaaaaatagacaaatggtttgaacagacacttcaccaaagaggttatgtggaaggcaaataagcatatgaaaagatactcaacataattagtcattagggaaatgcaaattaaaccatgtgatactactacacgcctattacaatggctaaaatttaaatgaccattccaagtgcagatgaggatgttggagcaagtgcaactctcatacaccactggtggaaacgtaaaatggtacaactactttggaaaacagtttggcaatttcccagaaggttaaacatacatctgctatacaacccagccattttaatcctaggtttttacccaagagaaaagaaagcttatgtccagagacttgtacatgaatgttcattgcagctttggttatttaacagtcaaaaactggaaacaacccaaatgtacatcaacagataaacggatcaactgctaaatccatac

SEQ ID NO: 29058 - DNA, 1031 bp, Homo sapiens
agcattagagagtccatcatttccttcttctagaatacctttcttctcccaggttctagttaccatcctcttgtgttttttctcctacctgtttgactgccccttctaactctcctttgttgattcttcctcatctgaatatcccaacacctagtctttgcactgcttctctagctgcctcacaaccaaaatctcattaaatctcacagtgattctcagatgtgtatgcccagccaagacctctgccttgaaactctggacttttacgtacgtgacaactccactgggtgtcacaccatagtatgcccgaaactgaaatcgtcatcctccccctctcagtgagtggaaactccatccttccaagtgctcaggtcagaaatggtgaagtcatccttcacacctcttgttctttcacaccccaatttaaaatgccatatgccaaaatcatgttgcttcaaccttcaaaatgcattcagaatccagccacttttcagacctccagtagctaccacccagtccaagccatcagcatctctcccccgagtgactccaatggcccctcattggtctcctgcttcctgtcttgcccctagtcagtatcttctcaggaggtagtctgagtaaatcaagtcacatcattctgtcaaacttccagtggcttcctgctgaaagtaaaagcccagagtccttactgtggtctataagaccaaccaactttttgtgtcacctattgagtttgtttttcatttctgctgtcatatttttaatttccgagagcttgttcttgttctctgcatgttccctttttaatttccaaaagcttcttttgttctctgcatgtttcctttctttttaatagtatcctggaggctcaaaattttttgaggataatgtggtttaagatttttatctgcttacactgtgtttcttctaagatccttttttctttgtatttttggtcactctgtcatgttggagcctttcctcaaatgtcaagagattctttattgtctgtttatatttaagagcag

SEQ ID NO: 29059 - DNA, 1051 bp, Homo sapiens
ccatgttggccaggccggtctcggactgccctcaagtgatccacccaccttggcctcccaaagtgctgggattatagacatgacactgcatccagctgaaggtgttaattataagcttggctgcaagcagggaaagggatggtgggtgtcattgttcagtttgtagacttttggtctaggaccatctcccaagctttgcctagtattctggagtccagttctcctctggctcgcctctccggagatatacctgagtctttgcttgagtgaatatgagtgaataatgggatccaggggcctaaccacttctgacacataggcttgcaaacagtcctgtgttttcatctcagtccacagctcctcgcctcctgatgcgtctcatttccacccctttctggggcctgtgccaccagctgggtgcttcttgtctcccttctccccctacaagaagacacttagttctctcctttatctggtgattcatctgccactctcttgcctaaaattgactaaaatttgttgacggctcttgtctgtcaccctttctcctattctcttggtctttttaggcttacacctttttgaatacatttgctgttatttaatgcggcgtggggaatggaaggaggtaaatggttatgttcatttcaccatgtgcaaacggttcctttttattacaattttttagaattgtaggccaggcgtggttgcttgcgcctgtaatcccagcactttgggaggccgtggaagtggatcacaaggtcaagagttcaagaccagcctggccaacatagtgaaaccccgtttgtactaaaaatacaaaaattagccaggtgtgcctgtaattccagttactcaggaggctgaggcaggagaattgcttgaactcaggaggcagaggttgcagtgagccgaggtggtgccactgcactccagcctaggtaacagaacaagactccatctcaaaaaaaaaaaaaaaaaaaagaattgtgaataaatctgttcaacagtctttcaaatattatagaaatgtacagtttaggctgggcat

SEQ ID NO: 29060 - DNA, 1383 bp, Homo sapiens
gcctccggagtaggtgggattatagacgtgtgccaccacacccggcacacggtatttttagttgagatggggtttcaccatatcggccaggctggtcttgaactccttgccttggcctcccaaagtgctagggttacaggtgtgagccaccgcgcccggcctgttattttgaagaaatgccatttactttttttggctcctcaggtattacctgtacaacctgatgttccagacgtggaagacctatgtgcgtcagcagcaggagatgaggaacaagtacattagagccgaggttcatggtgagaaaaagaagtccatgtctgaagaagatgcccacatttactttgcagaaggtcataggaaggacaaacacattgtctcagagagagaggaactctaggccaaaggaagatttgtttgattctctttcatatttttcagaaagtgtgatctctgagtgggcacctgtatgattgatccctatggttttctccatatggcatggtttgagcccttaaaactcatttaatcagaatttgtgtgaactggctgttcctggcctgctggttcagtgggctggctgtgactctcctgtggcacctggggctgccatctatcttgctgcgtcaagttgcccagagactctggagcagagctgcagtgctcttttctgatctgctttgctcaagttgtcccttagtgatactgtggccactttaggtctggtcagagtctggtttctcttgtgaattgagcccagaaacacatggagagtctaagggaaaaagacctagagtttcaaaatgataatacaggctgcattagcagcagaatgtcctaaaggtagctcaaactctgcaagtcacaagtacaacctgtcaactcccctaccacttacacctgctgttcctttgactcttctgtctaggaagacttacttaggaatggtgtccattcctcatgcctcatgtcatcacttacctaatcttttaagaaggccctctgaggcatcacttgcaatcatcgttgcattgctactgcctgagagtaatcctcatctttttcccagagtgttgtaagtgccacttcattaatctccctcatttattttttcgtgcttctcattgtacacatagctgcaagagtggtaagacatagataagatcatgacactcctttacgtaaagttaaccctgcttggtatgtcgtacaaggtcttcatttcttctgctttgcaccctctgcccttgacacactggatgtgcacttctttatctttccatctttgtccctgtagttcttccttcaggcccatttaaatgtgtagctttccttgatctcccccagcccagtgatctttcccctgtctgtattcccaaagta

SEQ ID NO: 29061 - DNA, 1605 bp, Homo sapiens
tcaccgcaagctccacctcccggattcacgccattctcctacctcagcctcccaattagctgggactacaggtgcccaccaccccgcccggctaattttttgtatttttaatagagacgggatttcacagtgttagccaggatggtcttgatctcctgacctcgtgatccgcccacctcggcctcccaaagtgctgggattacaggcttgagccactgcgcccagcctttttttttttttttcagatggagcctcactttgtcacccaggatggagtgcagagtggcgtgatctcggctcactgcagcctctgcctcctgggttcaagcaattatcttgcctcagactactgagtagctgggagtaaaggtacctgccaccacgcccggctaattttttttttgtatttttagtagagacatttactgctataaagttctcttaaacactaactatattacacgaattttaataagttatatttctgttttcattcagtaaaaacttgttttctgattttccctgagacctcatctttgccccacagattatttagaagtgtgtttagttttctaatatttgggagtttcccaatatctttctgttaaggatttctagtttattctattattgtcagagaacaagacttagtatgatttcagttcctttatttttgttaaggtttgttctgtggccccaaatatgctctatcttgtaaatgttctatatttacttgaagaatgtacattctgctgtcttatttatagttacagtgaatctagctagatattatggaatagaaggaaaaagtcacttggatgacttttttataggcggtggctcacgcctataatcccagcactttgggaggctgaggtgggaagattgcttgggcccaggagttcgagaccagcccaagcaacatggcaaaacctcatctctacaaaaaaatacaaaaattagccaggtgtggtggtgcatgcctgcagtcccagctactcaagaggcaagagttatttctgacataagacaagttatttcaggccattcccctagacctcagggagtgtccattcactcttggactgttaaatgaaaagtttgcaagtacttttaggccttaaggaagcatggttctcagttgtcacgtgcatcagaatcatggcagagacagttaatgagattcctgtgttccatactctggaaagagcagttagtgtttattttagatatttttcatagttaaatcatctcatttacactttccaaacataactctgagagaggcaccattttacagatgaggaacttgtatgagattaggtgtgtaataaatgaaagggccagtaagtctggcttgtcttactcaggatcccaaactctaaaccacagcactatactagtcctgattacctgaagtatgctgattcctgaggtccacagtgaaaccaaggaagatacatgttaaattctccttcgtatgttgatttgtcttgtcaacaactgtgaaatatatagttatagtcctgtcgactacatcttggaggctgtcctaaaaatgatttatataattttattttctcctttgtcttctaaaaagaagag

SEQ ID NO: 29062 - DNA, 1034 bp, Homo sapiens
ccaggctggtctcgaactcttgacttcaggtgatccacccacctcagcctcccgaagtgctgggattacaggcatgagccagcgtacccagcctcttttttttttttgagacagagtctcgctctgtcacccaggctggattgcagtggtgccatctcagcttaccgcaacctctgcctcccgggttcaagtgattgtcctgtctcagcctcctgagtagctgggattacaggcggccaccaccatgcccagctaatttttgtgcttttagtagacatggggtttctccatgttggccaggctggtctcgaactcctgacccaaagtgatccacttgcctcggcctcttaaagtactgggattaccggcgtgagccaccgcgtccagctctatgtataaactcttttttttccctttttttttttgagatggagtttcgctcttgtagcccaagctggagtgcaatggcccaatcttggctcaccacaacctctgccttccgggttcaagcgattctccggcctcagccccacgagtagctgggattacaggcatgcaccaccatgtccggctaatttttttgtatttttagtagagacagggtttctccatgttagtcaggctggtctcaaactcctgacgacctcaggtgatctgcccgcctcggccttccaaagtgctgtgattacaggcctgagccaccgcacccagccatattcttaatcactacccctaccatactgtgtgcccaagtgtgagaatttggactgcctaggatgttcatccacacattttatttgttcatcaaagtcttgctttgtataaactcctgcttaaattctgggatatgaggaagctcagactaatgatagttcattgtctagtgggggaaatagacatgaaaatatgtctttaaatatggcatgataattcctatcataaagatttgtatgaagtcctgtgagagcgactgtggagattcagccaaggaggtaatgtttgtgcagagtctaagtcataggagatgagaagtt

SEQ ID NO: 29063 - DNA, 1048 bp, Homo sapiens
caggtgcctgccaccacacccagctaattttttgtatgtttaatagagacggggtttcaccatgttagccaagatggtctcgatctcctgacctcgtgatccgcccgcctcggcctcccaaagtgctgggattacaggcgtgagccaccacgcccggcctaattttttagtttttttatacagacggagtctccttctgttggccaggctggtcttgaactcctgtgctcaagcagtcctcctgcctcagcatcctaaagtgttgggattacaggtgtgagccactgcacctggccttttaggcattattgatggagctggatccaggtccatcctggcccaactccaacccttcctttcactaaagattccttcttccattttagcagcactgcatttataatcatacaaatgtatgcactgagcccacatggtaaaaaaacaaaaaccaccacagacaaaaagtctgtcttctcctgagaggcaacagttgatgtttaccttggtctgtagaattgtcatgtgggtcatggggttctttcctggtgtgggtgtgtttgttcttgtgcagtatagatggacagcagggagggttcagcaaatatttattaagtgcctgctgtgcaggctggcttgtgttaggctcccagttgaatctcaaagcagagaaacactcagggagatggaacagctacaagaagctgtgaccaagcttctccccgctgatttgaggcactgtttgccttcctctactcttagtttacagactctactgatcccagtccttgtaatcagttgtgtcctttctttgcacagtatttttgctttagagccctaaaagacaatgtgacccacgctcatctccagcaaataagaaggaatcttgctcaccagcagcatggtgtcacggtgagggttgtcttctgtatcaagggacctcttctgaaggccattctctctcgctctttttttcagtcttgccaaattaagcagaactctttttaaaaaaactttttgtgcttcaagatttgtccagactgtcaactgt

SEQ ID NO: 29064 - DNA, 1088 bp, Homo sapiens
aaagctgcaggagcctttctgggcgtttggtggagcctagcgagtagccagccccagaatccagtgtctcccagggaagacggctcagcggaaaaacccggttcatgctgacccgtggcttatcagtgctgggggacctacagagtgagtcctctaggcggcactccctgcctatgcaggagacccctggcaccatccaggactcctagcaatgggaggacattcagctgggcagaggctgggttagatcaggacccaccccaggctgtctaggctgggtcaggacgccactctctgtgcacttgctctcccccagctcctgcacaggcagagcacccaactgctggcacagagactcagccggacctgcttccgccagtggagacaacaggtgggaacccaggagatgtcccctctgcacttccttctccatcctctggcctgtgaggcctgggcagtgaatgaccttcagcctacacctctagttcagtatttttactatcaccctccccagggccacctcctctaccaccttcctgtcatttccaggcacatcagcttccttccgtctgcagtctgcataagaacagttacttcaaggccagtttctctctctacagtgttgtattaaaaaatacatcagtggaggccgggcgcagtggctcacgcctgtaatcccagcactttgggaggccgaggcaggcggatcatgaggtcaggagatcgagaccatcctggctaacacggtgaaaccccgtctctactaaaaatacaaaaaaaatcagccaggcgtggtggtgggcgcctgtagtcccagctactcgggaggctgaggcaggagaatggcgtgaacctgggaggcagagcttgcagtgagctgagatagcaccactgcactccagcccgggcaacagagcgagactctgtctaaaaaaaaaaaaaaaaaaaaatatatatatatatatatatatatatataatcagtgggccgggcatgatggctcacgcctataatcccaggattttgggaggccgaggcaggaggatcacttgagcccagaagttcaagaccagcctgggcaacatagt

SEQ ID NO: 29065 - DNA, 1368 bp, Homo sapiens
tgggagcctcgactagagagggagccaagagggacgagctgggcagggccccgtgatcaccacggcctccttgaaggggctatagggaaatgatctggtctttctggccctagctggcagccaggaggcaggagcagcgggcgacagtgcgggccctgtggttctgggccttctcgctgcaggcaaaggtaattggggctctgcatcctaccatccctgcctctccctcaggccttagccctgccttgggtggagggagggcacctggtctgtgggggagctctaagcagggagacctgggcctcacctcctgccctccctggaggtgtgggccacgtggctggcctttgtactggaaaggaggagaaagaaggcgcggctgcagtgggcgctccaggcctaccaggggcagctcctccaggagggtgccacgcggctcctgcgctttgcagccagcatgaaggcctcccggcagcagctgcaggcccagcagcaggtccaggtaggcccagggccccttcctgtggggagcaggcagggtgtggcatgagctgaccagaggctgtgttgtaggcggctcacagtctccatcgtgccgtccgccgctgtgccacgctctggaaacagaaagtgctgggccggggcgggaagcctcagcccctggcagccatcgcacccagcaggaaagtgacgtttgagggtccccttctcaaccgcattgctgctggggctggggatggcacccttgagaccaagaggccacaggcttctcggcctctgggagctctgggccgcctggctgctgaggagccccacgccctggagctgtgagtagcctgtgctcaccttgtcctcgcttccaccctgggcaaaaggttggatggcatagcagggaggaaaacagccctgacgggatgggacgggctggtcacggccttgtcacagctgagctgctgggaaccccctcttctccagccagatcccatccctcccacggcaagagggagagaatggagtgggatttccaaaccctctctcctttgcctgccaaagctcaggaaataggtgtcccctcctctgcaacaccttcctaccctctctcccgtcctgctgacacgatcttttccggagtcatacacgtagttgacaaagggaacaagctcagctcctacccgtgcctgccggcctctcttctgctccatcacagccaagacactggctttttgtcagaagcccctctttcttgtgtgagctggcacctgtccctctgcccacccctactatggtctcctcaaaccctaacctgccctgccccatgctgatgaagctggtggctcccacagcaaccagcactacccgagagccttg

SEQ ID NO: 29066 - DNA, 1035 bp, Homo sapiens
ggaacaagtctacagcccaaagtgtgtccctctgtcttaacaggaagaaggaggataccctgagcaccaacagggattttcagatgcaggtctgcgatgtcactgtcacctgggcctgagctgcagacacagggtctgcagcccccacaggtccagccagcactcttgagggcctggatgcagccagtctgagaagcccagccctgctgagccccaccttggccccacggcaggacttgtgttcaacgttctactgtgactgagccaggccataaagccatctgcacctggggttcctcccaggaggcaaagagaagtcatcccctcaggcccctctgttctctcttccttcagggaagcctggagcacctaagacagacgatggcctggggacaagcactgggtcccactagatggtcccagagctctccggcagggccaggtacccaggaaggggcagcctcttaaacttcaggtgctgctgccactgtagaagctgcctgtaattggtggctgctgcttctctaaacacaaccaagacaccaactccccaaggtgtaaaactgatttcattccaactttcaacacctctccaaggtaaggtaagctcccagagagctgctcttatcccttccagctgatgcccagtcacacagaagggctatgtgagcccaggcccttcccaggcacaggtgggagcctgggctaatgtccagggtgcctcagtgcccctgagctctgatgacacccatgtgactgtcaaaggcccaggaacagggtttcctccttggggtcaacctgcctgggaagccaagggcaagagcaagccctctagggaccaggagaggacaagccagttcccttgcccattcctggggcatgcctctgggttccttaagggtgtcctcaccctaagggacccaaacaggatccatccatcctgaaccacccctttggcatcccggaattaatttggcttctgttcaaaatcacctataagctcttttttgcttgaacacagaaaaatcagagaca

SEQ ID NO: 29067 - DNA, 1030 bp, Homo sapiens
catacacacagttctagatggagaaaagaaaaccctgacagattgtcactttttaactttatttttatatatttatttctgagatgggcttcctctatcgcccaggctggaatgcagttgtgccatcatgcctcactacagcctcaacctcctaggcccaagcaatactcccacctcagcctcctgagtagctaggactacaagtgcgtgccagcatgcctggctctttttttgtttttgtttttgtttcattatggtagagacagggtctcactatgttcctcaggctggtttccaactcctgggctcaaacgatcctcttggctcagccccctagagtgctgggattacaggtatgagccaccgcagctggcctcttttagacttttaaagatctgtcctgatattttgctcaggcttggttaaatgtaaactacagtcttctatcttttctccagaagacttacagtatttctacactggatcaaaggttactttcttttgctgacttcgtgaatgcctgagaaaaaagatgctgtgggcctcctgtgagaaaaataaagtatagtcatttgtatagttaaagtcattacaaatggtcaaataatttccctgcaatttaactttcaatctggtaatagttacatagttaagaacacatgagccgggtgtggtggctcacgcctataatcccagcactttgggaggccaaggtgggtggattacctgaggtcaggggttcatgaccagcctggcgaacatggtgaaaccctgtctctactaaaaatacaaaattagctgagcatgatggcaggctcctgtaatcccagctactcgggaggctgaggcaggagaattgcttgaacctgggaggcagaggttgtggtgagccgagatcgtgccattgcactccaccctgggcaacaagaacgaaaccctgtctcaaaaaaacaaaacaaaacaacaacaacaacaaaaaatatatatatagtagcaaaatcttgtctcctgttgactaacattttgcttt

SEQ ID NO: 29068 - DNA, 1015 bp, Homo sapiens
ttagatataacaccaaaagcacggcatccaaattaaaagcagttgaatcagacttcaaaattaaaaacttttgtgcatcaacggacattgtcaagaaagtaaagaggccagacctgctggctcacacctttaatcccagcactttgggaggctgaggtgggagaatcgtgtgaagccaaaagttcgagtaacccagacaacaaaacgagaccctgtctctacaaaaataaaaatagaaaaaaattagctggctgcattggcaaatgcctctagtctcagctactcaagaggctgaggcaagaggatcccttgatcacaggaatttgaggttacagtatgattgtaccactgcactccaacctgggtgataggacagagcaagaccctgtctctttaaaaaaaaaaaaaaaagaagaagaaaaaagaagacaacccacagaatgggagaaaatattatttgcaaattattttctgataaaagtctgttatccagaaaatatgtagaacttctgtaactcaagaacgaaaagaaaaaaccctaattgacaaatgggcaaaggctgccccattcaccatgatgtgattatttcacattacatgcctgtatcaaaacatctcatgtaccccacagatattaaacacctactatgtacccataaaaattaaaaaataattaaaataattaaaaaaacaaatgggcaaaggacttgaatcaacatttctctaaagaatatacatgaatgtccaacaagtacatgaaaagatgctcaagatcattagtcattaggaaaatgcaacctaataccacaatgaaatgccacttcacacccactaggatgactgtatttttttttttttttttttttttttttgagacagagtctcgccatgttgcccaggctagagtgcagtggcgcaatcatagctcactgcagccttgatcgcctgggctcaagccatcctccctcctcagcctcctatagtagctaggactacaggcatgtgccactatgcc

SEQ ID NO: 29069 - DNA, 2075 bp, Homo sapiens
aaaattaattgtattactcgacagtcaataaattgcatttcaaagaatcttccggtttttcctttcagcccagttataggtaaaatcattgtttttatgttaaagtagtgagttttgatgtcctgtgtcatattgtagaaagccatgatttggggaagaaaattccagaagataaggatggctgatgagtggattaaatttaaataggtcattttgttttattttatatattttttagagataaggtctctctcactctgtcgtcgcccaggttggagtgcagtggcacgatcaaagctcactgtcaaaaataggccatttatattcactaaagattgctctaattagttgaaatgactttgaaatgtgtccgttttcttaaaataagtggcaggttgctcgtgtttgtgtgatctcttttagcaaagaatgataccagtaacctcagagtaaagttctggctcattcccaattttagattgatcatttttctttgatcgattcttttgtactgtttgaaatactcagcacagaatttgcacttggtttacatttttatttttagctccagtttgcctttttcaaccataactggtcagaactcttttgcagagtgagccttcttaagacaagctgtttttatctttccataggtatgaatcctaggacccagaataaggattctctagaggacagtgtttctacctctccagacccaagtaagagggggcagctgactggggaaaggggtagacagggagtgtggggtggtcagagcatgaggaaacaagaggaagccctgtgggaagtgagtggtcctgaggtacacatacctctggggtatgggaaggcgatgtggtgagggaggactctctggactctgtgatggaaagtgagggggtgtgtgactgaatgacctgttttggaaggtgattcaggggcacctgggaaaggtagcagattccctataaggcccccatgctggtccagagctggccttcacccttaactgcctaatgatatctccatgaaaaagttggaaagacataataggctgttaactggaatcatttacctgcctgtagttgaaatatttggctgaattgcattccttttgattgtctttttgaatagctatgcagtaagagaatgtctaaatatctgtaataataaaatagcagagaaaatcctaccatttgataaactttacttagctgtgaccaatggatgtatatcactgagtctttttgtccccacttttttttttttttttgagacagtgtcttgctctgtcacccaggctggagtgcagtgacgtgatctcggctcactgccacctctgcctcccaggttcaagtgattcttctgcctcagcctcttgagtagctgggattataggcgcgcgccaccacgcctggctaatttttgtatttttagtagagacggggtttcaccatgttggttaggctggtctcaaactcctaacctcgtgatcctgacctcgtgatccgcccgccttggcctcccaaagtgctgtgattacagccgtgagccacctcgcccagcctttgtccccacttaataatccttttactatttgttcaggtccctcctagcagtcatttgtaatggcaacattaagcatattactgtatcttggtttgagtagtcatttcttattcatgaccatttggatggctttctgctttttagccatagcatataatgcagctatgataatacctggtgggctgagcatggtggctcatgccagtaatcacagaactttgggaggctgaggtgggtgcttcacttgagcccaggagtttgagaccagcccgggcaatatagtgagaccctgtctctattaaattagaagttaataataatacataatacatggtgcagcaggtgtattttttcttttggttaatgtctttggattacactccccaaagtatggttggcagattgactattttccagaaagctaccagcagtgaatagatgattctatttctctacaaccctgtcaccggagtttgttacctttgctcatcattgttattttagtg

SEQ ID NO: 29070 - DNA, 1091 bp, Homo sapiens
tcagcctcccaaagtgctgggattacaggtgtgagccaccatgcccggcctaacttagatttgctgagataagactcagcttggtgcttcacctcagcaccctgccttaagctactcagggcagttcaggagctgtgggtcagaggggagaatccgacagtgactgccacttcttgctgtgccatctcaccacgtggagttcatcacaagctctgttgatttgcctcctcaatggctttgcatccattctcttcttcccaggccctgagctgccactcagtccagccttcctttgtctttctcttagatccccaggaaaaccttctaatttgtctctgctttcactccacttgtcagtcagtctttttataaaaccactgtgattttgcccaccacttaactagaactttttggtgacttgaacttcaaaaatcttagatgcagcccacatggtcctgcacagtctggtctggtgggctgtttgtacagccaccctggccatcacacagtccctggaacatcacaaactctgcaccagctcagacgctttgcacttgctgttccctctgttccatctgcctggaacatgcctccctccatgcccgctctgtctcactaactcctggtggtcagccatcagctcttagctcaactgtcacttctccagagaagcagagttggccctgttacatcctcccacagcactttgtacttctccagcatggtactcaacatgtttacactctaccatggcagaagcttctttttttttctttctttcttttttttttttttttttttttgagacatagtccggctctgtcacccaggctggaatacagtggtgcgatctcagctcactgcaagctccgcctccaggttcatgccattctcctgcctcagcctcccgagtagctgggactataggcgcccgccaccatgcccggctaattttttgtatttttagtagagacggggtttcaccgtgttagccaggatggtctcgatctcttgaccttgtgatccacccgcctcggccttccaaagtgctgggattacaggcgtgagccaccgtgcccagccaaagcttc

SEQ ID NO: 29071 - DNA, 1033 bp, Homo sapiens
ccgctatgaaggcggtgagcgcgccgggagcccgggcggctggccggggggggcctggcgttggggagggacggggatggccgcgggcgcgttcccctcccggccatgggcgacccggcgacccggctgggcgtggccgcccgcccgcccttagcccgcgcttcccgctcccgctgggcgccccgccacttcctgaggctgggcccagggtgggggatccgggagggtgcagttcgggatcgcgaaggcagccccggaaggggggcgggccggtcggggtcgccacatcttagttcggaacccggccgggggcagagggtgccctaggggacgcgaaggagccgcatttctcctagagcgtttcaccggacccgggggctccccctctcgtcttcctccgttccccaacttggaataaagaatcacctagtaagtggcgccctgtctcagctggttttctctgccacgacctgaagtctgcaattccgatctgttttgctctgctcgttcgaattgttctggttccatcttcccacgcctgggggtctggctttgtgtgcgaagacccctttcctgcagtctaggcgtggacgggggcgggagagtgggcggagggtgtggggccccactccacagccccaggtttgctgctgcgctgtctgcttggagattaaaatgaaacgtgacttctaggtgagacgaatctgtgtgtctttgcattcctgagaccctcataaatcgattctgcagcttctccggtggatgagtcgtgcccagccacaccctagcaaaataccgtgggtcacacaccacctgcatttctgagttccggttaccatctcactctctctccacgttattttacgttttctgtaaatgaatatttcctctccctgcgtcaaggtcacacagtggtagaacaactgcgaccaccaacctatgttcagtgtacaacctcctgagacctgggaggatccccttgaactccgccttagacctatacattcagaaattcgggcggtgagactcagac

SEQ ID NO: 29072 - DNA, 1092 bp, Homo sapiens
ggtttgtagcccaggagcaacaggctataccatacagcctaggtgtgtaggctatcccatctagtttgtgtaaagacactctgtgatgttcccacaagggtgaaacttcctatgacgcatttctcagaacatatcctgttgttaagtgacacgtgactgtatgctaatcgatagcctgcttctctgggctttccacaactgaactcccaatgagaaaaagggaaagagctcttttaccaaggacccgccaacatgtgccgcgtttgcaccaaaaccgtgaagaaggcggcccgggtcatcatagaaaagtactacacacgcctgggcaacgacttccacacgaacaagcgcgtgtgcaaggagatcgccattatccccagcaagaagctccgcaacaagatagcaggctatgtcacgcatctgatgaaatggattcagagaggcccagtaagaggtatctccatcaagctgcaggaggaggagagagaaaggagagacaattatgttcctgaggtctcagccttggatcaggagataattgaagtagatcctgacactaaggaaatgctgaagcttttggacttcggcagtctgtccaacctgcaggtcactcagcctacagttgggatgaacttcaaaatgcctcggggacctgtttgaattttttctgcagtgctgtattattttcaataaatctggcacaacagcaaaaaaaaaaaaaaaaaaaaagggaaagaagaaaaaattatagcagctctcttcatccctcatctttgctggtgtctcattgtcaatgaggccccttcacacccatcatttgagagagtcattgctgtcaatgctgtattacagatgttcaaagagagggttgcaaatgccaagtgagctgtcaatggtctactgcttgttggtagctgagctgagaatcaaactagccaagtaggttctctcttcagccccttacttcccaaaactcacagactctgcacttaggctgttgatttctttgtgtggcaagagttcaggagctggccattccactgtggggtcctttgccaagaagcacagtttagccagtgagaggtggacatt

SEQ ID NO: 29073 - DNA, 1046 bp, Homo sapiens
gctgctggatgctcttattacctgcagttatgtccccacttccacagatgcaagagaagatctgtttgccttctgagaagacttgatatacctcctgagaggctaacggacatgctcaggctcagccagcttgtgacacaataaacatatccacattggtgagaggacaagaagagcccagtggacacagagctctgtggagaaggataccaaggtcaggtcaggatggggagccttcccatggtcaataatgtgtctggggccacctcctgtgctcatgacagtggggaaacaattcttgctgtctcacacatacactgtgcacgtggtaacacatgcactcacttaatcacggcatctactgggcctgactaagaggcagcagccacagccacaacaccagatggccacatgactgtgcttgcaggagctgagatggtgcagaaaccctgttgccaagacttctggaggtacaggattgtctcagccttgaagagtagagaagacacaaaatgaacaggactgtggccagagagtctcccagctcaagtatgaagccacaaagaaaaggaagaatgggccgggcgtggtggctcacgcctgtaatcccagtacttgggaggccaaggcaggcagatcacgaggtcaggagattgagaccatcctggccaacatggtgaaaccctgtctctactcaaaatacaaaaattagctgggcgtggtggcatgctcctgtagtcccagctactcgggaggctgaggcaggagaatcacttgaacctgggagttggaggttgcagtgagccaagatggcgccactgcactccagcctgacaccgagctagactccgtctcaaaaaaaaaaaaacaaaaaaaaacaaccaaacagctgcctgaggccgggtgcgagtggctcatgcctgtaattccagcaacttgggaggctgaggcaggcagatcacctgaggtcaggaattcgagaccagctactagaaagggcccactaagtcctggccaacatggcgaaaccccatctctactaaaaa

SEQ ID NO: 29074 - DNA, 1050 bp, Homo sapiens
ctgtagtgttgaacaacaacaacaacaaaaatccaaacccaacttctttttcagttctagactaactaggctctcagtctagttagtcaccagcacctgcaacaagatattccctttatgagagtgtcatgagaaaataagatgaatcctgaacacagaagactcatgcccttattgctcccttattctgaaacacatgctctgtgaaagttgtctgtaccaaaatagagacacttatgccaaaccctaacaaaatggggctgggagaccatgcaggtagagccctcatacacctatgccggtaacaggaactgttggaagacattatcatgaagactgtctcctagcaacagccagtaccaccaatgaacaaacaccagcacctgcaacaagcaggtgaagcaatcatctttgtttcaaaacagcttacatggactctccctctctgtctttaaaagcctctccttgccccaacccccttggaagtcctgtggtctgccatagcacatgtatcctggtttgcaatccctcactattcccgaagaaactcctcattttggagagttggtctctctgtcgcttattttaggttgacagctcaaatgcacgaaaatggccccaaaactgttttgactgttctagctggtatttttccttacgtcttccaactcagctggtatactttaatttttatgttagtatgcatgagaagcatatcaacatacctggttcatgagagcctgcttggactattgtcacagatcgtctcccgccagcaacccactgctccagttctcctctcccaactgcaccattcatggccatggccatgccctggcatcctgtgttcatttgaaccttgcctttcatttgctagtctcctatctgagctgctacttcctcccaaccgtctgtgtggatgatatgctgaattcgaagtgccaatctggttaccaaacatatagctgaaccaaatgacctgtttcctaccccatcccccacataattcccttccatcaagatgttcacatctaatatggaggattctgt

SEQ ID NO: 29075 - DNA, 1044 bp, Homo sapiens
tattttttgtagagatgaagtgtcactgtgttgcccaggctggtctcaaactcctgggtttgaagcaatattcctgccttgacttcccaaagtgctgggattacaggtgtgaaccatgcctggcctcttacgaaatttctatttctttagtcataagattctttgaaatgttatttaaaagtctcaaaactaggtttaatagctttggtggtacttcacatttgtcaggacatgactgtctgatgacactaggacctagcaatgtctattcagcagttcatcataattagcaaatgtagcttttactttggcattcttgtacacagagtgtcaacagtttctgccttcatctaatcattctgctacatcacatcataacttgcaaggttggagttaccaaatagtaaatgtgtagttgcaaattttgccttgattttttataaaagcacttaatgacgtgtataataacctctattcactagattcaggatacttaatataaaaagaataactgctgaatgtcttgatgatttcctaatttctgatgttttgtttctttactgttcttggcaaatcagctcttggcagacttgcatggcagccagccgttccaggattgattctttgaaaaggagcagtgtgtctttaaatctttccttcacccaaggcatcctgcttggtgcacatgtgcataagcacatcactgggctctttcatggaatgagatgaagtgcgcctttgtatacatgattaaaattgaaccctctggtgatgtcaagtatatttatcctttgggtctggaagagagatgatgctgtgaaaactagcaagattattttaatgaacaaaggaagactcattgccaagggttaaataaaaaataaatggagtttttagtgacttcattagaaataatgattttattgtgtttagttgcctctgattaaccttgttgcatatctttaagttactaataagctgctgcctagtggattttatataaagatgcttactgtagtttttaaaggtggtgttgtagagtga

SEQ ID NO: 29076 - DNA, 1090 bp, Homo sapiens
agtttgttttgtataatgtgtccttagtatattaggagctaggaaatgcaagcccatactaaaaaagaaaggcagttgatgaagtgacagaattctttatcatctttcttttgtttatttacagctacactaaaaatcaacaatgagattagaagtgtgaaaagattgcagctgctaccagaatcttttatttgcaaagagaaactaggtaatacaaacattatttaacttttggggtgaaactctgtgaaattcatataagaaaaaaatctgaaagataatgttcaaaagactgaaaatttctatatgagattaaagcatattgaagacaatgtggtttgtttaagaatgcaaaggtttaaaaaatgtgaaagttttgcttataatttgaggagtttgtttctttcctgtttttcttagggtcatagtgtgctgaattatattgttatgagataacactagtatgtaatttattacactctgatgatagttcatagtttctgtactaatctttggagatctccctattgagatctccatattggtatttaaccaatatggaggggatctgtgtttcatgaaagtaattcaatgtcaagttcattattgaagattattggaggaaaaactacaatcaaaatgtttgtttaaacctatataaatttgatggctattttatacagattgatactttaccaaaggtttgcattctaggtaaggttttgcttaaactctataaaattattaatagatacaaagaagacaggttttcccttttatcatttttcagttaaaccaaactgtgagaggcagttataggtggttggagcagaagagataaggtggagaggggaactgacattttttaagtgcctgtttcattctgtacttgtgcctgtacatatgttattccatttaatcttcttagtaaacttaggagggttttaagagcctagtgggaatgttgtggtacaatgggaagatggcatttatagcagtcctttaggaaaggctggctagattgacattgttgctttgaaggcctaaaggcttattcttgttcattcctaggggagatcagccctgagag

SEQ ID NO: 29077 - DNA, 1046 bp, Homo sapiens
tggtttgattgttgggggcactgggtagacagtgtaggggccatactccagcatgaatgggaataaagacaacctgtgtccagcctggcccatctgtaaagctggcttctagccaccacaacaaggtggaaggaatggctagacatgctgccagttaccagtttgaaaagtgtcttctgttgttggaaaagcacaacctcctcccaccccacttcccttgttccctgtggcccctgggccagcgaatgcctcgggagaaccctgattgccaaacaggagagtacaaaatagcacacatttgaattacagaggagaaactggagcaaatacggacagattaatgcacaaaccaaataggtggatctggggttggccagcaattctactttggaaggactttgagaatctatttggagggcagaatgtaacttaattttagttcagtttagtgaagttttgtttttgtaaggaaaacactgatgtggcctcttcactgggccatctctgcctcagacttttggaaccatgactgtgatcttgtttggctggtcttagtaggcaattcttgggttacacatgggtgataaggtgggatgggtacatgtgatagagtaggcactcctgatcccaaaatacctcctatacttgttctgactacttcatctgtgcttctccacctctccctgaagttctgtaaggctagaatatttttatgaggttgcctttcttctcatcctagggagaactcccaggccttagcttacagtgcatgttagaagtctgaagatggtatgccctaagatggaataaaaatagacatcaccatagtggtgataatgctaataacagtggtagcaaacacatgaggtttgggatggactacatactgttctcagcgcttatattaatacgaccctcacagcaactttatgaggcattgtttcatcattcccatcttacagattgggaaaccaaggcatagagaggtttagcaacttcctgaaggtcacccagcaccagggctgggatttgaaccctggctctca

SEQ ID NO: 29078 - DNA, 1046 bp, Homo sapiens
gtagtcaagggcctgggcacaggagggagagctgcagagtgtcctgcctgccttggctggagggacacctctcctgggtgtggagacagcttggttccctttccctagctccctggtgggtgaatgccacctcctgagatcctcacctcttggaattaaaattgttggtcactggggaaagcctgagtttgcaaccagttgtagggtttctgttgtgtttttttttttttttttgaaataaaactataatataaattctcctattaaataaaattattttaagttttagtgtcaaaagtgagatgctgagagtaggtgataatgtatattttacagagtgggggttggcaggatggtgacattgaacatgattgctctctgtctcttttttcagcttatgggtatttatcttctattagtatttgtatcttcagttcattccactttaggaaacagagctgccaattgaaacagaagaagaaaaaaaaaaaaagcagcagacaacacactgtagagtcttgcacacacacaagtgcccaggcaaggtgcttggcagaaccgcagagtgggaagagagtaccggcatcgggtttccttgggatcaatttcattaccgtgtacctttcccattgtggtcatgccatttggcagggggagaatgggaggcttggccttctttgtgaggcagtgtgagcagaagctgatgccagcatgtcactggttttgaagggatgagcccagacttgatgttttgggattgtccttattttaacctcaaggtctcgcatggtggggcccctgaccaacctacacaagttccctcccacaagtggacatcagtgtcttctctgtgaggcatctggccattcgcactccctggtgtggtcagcctctctcacacaaggaggaacttgggtgaaggctgagtgtgaggcacctgaagtttccctgcggagtcgataaattagcagaaccacatccccatctgttaggccttggtgaggaggccctgggcaaagaagggtctttcgcaaagcgatgtcaga

SEQ ID NO: 29079 - DNA, 1050 bp, Homo sapiens
atctggaaggttgcttctcctcagtgatttcgcattacaggagggttttccttctttgtttctcagacctggtcctgtagacgggaaggagcctggacacagtgacacattctcaaaggccctgcaggaccaccatggcttatgatgactccgtgaagaaagaaggtatgaccccataatctgagaagcattccaaagggggtatcctcttcaatccttgcagcccatggatatagagaccaggactgggcaccacagcctggactcccaagtgatggtccagagcactgttatgacactcagcctccacgccatccccagactgggcccatggaaacgaaaaccaggacaggggttccaacacgagagtctgaaatatgagtctcttagtttattggggtgatcccctgcagcactcttggtccttgccagctccagtgtgcaggagtctggggataggaatcacatcctggactcccacagagagcagcacagcacatgaatccttattcttttcagcctttcgtctgcaagtctgtgtcctcctaccaaatcacaactcagaaaccatatctgaggttgcacatggggcctttgcatagcatggaaacattgtttcttcaggtttgattcttgtatttgcagctaggtcatcaagaaatattctgttcccctgggtctagccctgtatttcagtggacttgattgaaacattgttttaatttggaaatagaggaactgttgcattacctgcatgacgatttggtcattacttacttgactttctcatttcctttcccaaataaacctgtgcttctcagattgttttgatggtgatcatacctttgaggacataggacttgcagctggccgaagccaacgagagaaaaaacgttcttacaaagattttttaagggaagaggaagaaattgctgctcaggtcaggaattcttccaagaagaagttgaaggtaagtcctgaaaatttaaattaggaaagtcttaaactactcatttttttttggtgatgcagagtttttttttgtttttt

SEQ ID NO: 29080 - DNA, 1045 bp, Homo sapiens
tctggctcttcaagccattcggagagtaaaaaggagcaccacaggaagaaagtcagtggaagcagtggggaactacccctagaggatggtggctcccacaaatcgaaaaaaatgaaacctctctatgtgaacacagagacactgacccttcgggagcctgatggtttaaaaatgaaacttattctgtcaccaaaggagaagggaagcagctctgttgatgaggagtcttttcaatatccctcccaacaagcgactgtgaaaaaatcctcaaagaaatcagctcgggatgagcagggtgctttactcctaggacatgagttacagagctttctgaaaacagcccggaaaaagcacaagtcatcctcagacgcacattcatctcctggccctgaaggctgtgggtctgacgcctcccagttcgcagagtcccacagtgctaaccttgatctttcagggcttgaacctattctggtagaatcagactcatcctctggtggggaactagaggctggggagttagtgatagatgattcttaccgagaaatcaagaagaaaaagaagtcaaagaagagcaaaaagaagaaagacaaggagaagcataaagagaagcgacactccaagtccaagagaagtttaggactttctgccgtgccagtgggagaggtcacagtgacatctggccctcctcccagcatcccatacgctggagcagcagcacctcccctgccacttcctggcctccacacagatgggcatagtgaaaaaaaaaagaaaaaagaagagaaggacaaagagagagagagaggagaaaaggtaaagcatcttttaagtgtggtgggggtaagagattaagcaggttcttcctgggtagtcagtggacttttaagttaagcagttgaggtaaaccactgggaattaagcatgtttgggggatatgttggaatgatataaagtataaaatattaccagtagcccagtctgtctgatatagaagcaatctttttttttttttttgagatggagtctcgctctgtcgcccaggctg

SEQ ID NO: 29081 - DNA, 1047 bp, Homo sapiens
atacatatatatataatgtacaatatatacatagactgtaactactttgcttttaataattttatgaaatggcaaaggtttagccaagaggaaattttggcatgaatacaggcttgggattcttttttctcctgtggtggataaatctgccttaaaaatcaatgtaacttgggggctgggggcttgttctgggtgccaagcgcatctctttatggacagctaaaatgtgattattttccaagctcagttggacctccagacccatcactgaccatttgccttacctgtcttagtctgaaatgtaataggaaagataacgggaagatgccagttgactgaaaattcaaagcctttcaatttgaagtgacctaggtgggaggtgataaaatttgttccctttatagttatggaagtggcttaggtgaattgagtagagggttcattccaattcctactgtataggtgtctgtgtctcaaaatttattgtaatcattggtaccattggtggcctcaacagaggccaaggagttctgtgagccctggcagcaaaaaacaccttggggggtgaagctgtcaatgccaccagttggacctccatacattctgagctaacccagaatctttagtcggcagaattaagtgctggtgtctttcactggcagcatgaagttagccaccaagtcctcacaagccgtgctgcttagttgctcggtggttatggataaactttgcccagcatgatttttgggttcatcttatcagttcccctggtgggcagatacacagtgttctgcattccacatgtaagtgaattgcaaaaacaaaacaaaactcactctcttgtaggtttatttatgtgtgtgtgaatgtgtattttaattatgtgtatttaactctttaaaatctcttagattttaatttatcctgtaaatttctgtatatataatttaataacagaagcctccaccagcaacagcatgtggaagatacagatttgtcatttctcccttccgccctcccttctttccttccttccttccctgtttc

SEQ ID NO: 29082 - DNA, 1048 bp, Homo sapiens
gtcagcctctgccgctcccagcccatcagccttgcgtgccctcccagttcctgcctccccaccctgcctagctggctggcaccccccagaggacatttagaagagctgtaaccaagccacctcccatgctgctgagacaaggtgggggcagagtcatctttgtgctggtgagccagtgcaagacaagatggcacctcacccagcagtttatagatgtgttttcagcagcagaatggaatcccccattcaaatacgacctcatacacaaccacagtctataaaataggaaacaagatctgctcaagaaagggtctgctgggaattctccatgagcctacgggcactggagctatttatcagtctcctgagtttggccaatcctggtcatagccattggtggtcttggtctcagtctttggccagcaacaccctccctaacctctccagcctttgctgctgtctgtcatgtaggtcacttgtcagatcctaatttccagaggcaggaaatgagaccctttttaccatttccaggcaggcctggaggatgggagccgtcaatctgtgccccccagcccgctccgttcttgcatcagccatcggtaagggcagcatccaatggcttggtggtctctctttcagggtaaaatacgaagccccccaagcaacagacggcctggctggagccctggacgcccggcagcagagcactggcgcggtaagcagaggggccatcctgccaccctggggccctcctgaaggaggtgagggaatgctcacccactgggtgccgttgtgggccaagcactggcccagcacgtccacaggcccttcctcgtttggccgtcaggtcggttctttttggctagtgtggttattcccagtttatagctatggaaactgctagagaggccaggccatttgcccaagcccacaagcaaggattcagacctgagcctgacttgaaactggagaccaggccgggcgtggtggctcacacctgtaatcccagcacttcgggaggctgaggcgggtggatcacctgaggtca

SEQ ID NO: 29083 - DNA, 1140 bp, Homo sapiens
gccttggcctcccaaagcgctgggattacaggcgtgagccaccgtgcccagccacaaggctgcatcttaaagcgattgagaacgtggcctgaatgaggatgggagtctcttgaaggcctgcccacaggtgggaggctcagcagttgggaaggaccccacccccagccagctttgtgttcacctttcccatttcctcctcagcatgccccaggatttgtcagaggccctgaaggaggccaccaaggaggtgcacacccaggcagagaatgctgagttcatgaggaactttcagaagggccaggtgacccgagacggcttcaaggtatgtggcttggtgggactagccctggtggagggtgtggcaggtgtgggtggacccaaggctcagaccagtggtttaagtggggatgctgagggaccagatgggcatgtccaatagaatcatcttaaaaatgatgacactgaggctcagagagggaaggtgagttacccaaggtcacacagcaagttcagcctgctctgtaatgttgtggaggggctggggcagcagtgccgttgactgagcaccggttccatgttgggcattttgtacacgtggtttctaatctgtgcttcaaccctgacgagaaagatgaggactggaaggctcagagaggttcagtgactaacagaaggtcacacagccagtaagtggaaaaggctgaaatcaaccaagaccgatttcagccttgtactccttgtatttcagagcttgtactcctgatctaactcgaatttgcctctgaagataaggaataatataggttggagtcttaacagaacccttttctaacagtgagactgagggtgcctcatctaatctccctaagccacgttttccccatctgtaaaagagtatttcaacagcagggttttcttaagcacccactatatgccaggtactgattttgctgtttcccagcactgttgtgaaattcatgcaaatagaaggaaagcacttgatgaagaaccgggaagatactgggtgttaaaacatcagcgtggggaagagcttgttcaggttgaacagagggtgtgggggtggggagtagggagctatatcccaccaccttcatcccagtcccttttgcaatctgcacc

SEQ ID NO: 29084 - DNA, 1059 bp, Homo sapiens
aagctaccatagtctgtgtcctcacttcttcaggcttctcttcacatgtccccttaccaggggcatcttgcccaacccttcatcttcagtttggtgtgcacgtacctcgtctctcccacacctgcctacttttttacttttcttcacagcatgtagctgtcactctttaatatgattgtttgcttgtatgtcttttcagcctcccttgataggaacttaggctccacaagagcagggacctttttgttcagtgctgtgccccctgcacctggaatagtgtcagacacatagtaggttttgctatgatgtttacttctttatgttgctataatatctattgaataatgacataattacctagggatacgtagaggcttagaccctcagaatggtctagaactgcctagaatcccactggaaaagatcttgggatttgagtggggctttagtaagagaattgatgaactagctcttcacccatgaggacaccatgatcctgcaagaagaccgagtgtgacctgtctgcctcctctcagcaagttaatggaaggacccagcctcaagcagttcccttgactcttaatccagtgctaggtccgtcagtgttgccttcctttcttacctccaggcagcgttgcctgcctggcttatctccagcttattctggagacccccataaattgccgctggcaacgtctccttgctggctcctgggatgaatgagccctgcctttggattctccaggtagctttggtgactcttttcccttaccttgtacagagatcaggctgggcgccccaaatgcccattggacccgtacttcatcatgcccgacaaatgcaaatgcgtggacttccagaccctgaagctgcaggagctgcctgatgcagtcccccacggggagatgcccagacacatgcagctctactgcgacaggtgaggcagacgggctgggaggtgggcatctacgacggtggatgtcccagctgtggccctaacccgagtgttgggagtgggtcatctggagcagggtgagtagggtggagaaggtggccagt

SEQ ID NO: 29085 - DNA, 1052 bp, Homo sapiens
tttattaaaaatatgaggcagtaaagcacagtggttaagaacatggacttggggccaggtgtggtagctcattcctgtaatcccagcactttaggaggctgaggcaggagaatcacttgaggccaggagttcaagactagcctgggcaacatagtgagacccccatcgctctctctctctctttttttttttttttttgagaccaagtctcactctgttgtccaggctggagtgcattggcgcgatctcggctcactgcaacctccgcctcccaggatcaagcgattctcctgcctcagcctcctgagtagctgggattacaggtgcccaccaccacacccagctaattttttgtatttttagtagagatggggtttcaccatgttggctaggctggtttcaaactcctgaactcaagtgatctgcccaccttggcctcccaaagtggtgggattacaggtgtgagccactgcacctggcctattttattatttttttagagatgggggtggttctcactgtgttgcccatgctggtctggaactcctgggctcaatcgatcctcctgcctcggcctcccaaagttcttagattacaggtgtgagccactgcaccagccaggattaaaggagttaacagccccaaagcactcagaacaccaccaggcccagggtaaaggctttttcagtgttccatatgtaaactatctacatatgtagatagttttttacatacgtaaaaaacctactattgacgtatgtaaacctacacacattggcttgctctaacagaagggctgtgttgtaaggtagtaagctccctgtttctgcacgtggtcaggtagaggcaacccagcatctgttggcgggcttggtcttccaggtcagggagacttctccccggctcctactcagggctcaccaccacctatttcatacttactagttgttttagagacagggtttctctgtattgtctggtctggaatcctccagctctggttattcacaggcatagtcacagtgcactacagccttgaactcctgacctca

SEQ ID NO: 29086 - DNA, 1034 bp, Homo sapiens
aggtgaccacagtgatagtttctcgggtcttgtctcctcctgatataggactcatcaaatcttagaattagatgggatttctgggtgactcggtctctggaacccatcagcttctagcacgcagccctaaggttcccactgccatccctgtcaaactcaaactcatgggtgagtttgaggatcttggctcctggaaccccccagcttcaggcccagctactcctttagagttgaaggggctgttttctccagcgacccagacttcagttccctctgtgcctctcctcctccagggggccctccttccagaaacaccctgcctgcttctggtggtataatagaggacactcagcatggcaccctctcactttatgcctggtgatgggcctgatctgtcgggtcagtgcctttccccagaaggaacgtggtggcatttgttgattcatccgtttgtgtcatggagataatgaccgtacctacaataaagggcgaggtgagcattaaatgcatgaatgtatgcagagctcttagactagtgcctgttacattctctatgggtttctattattattgatacttttagttcattcagctaaatttaccaagcattcacaggtttccgggacactgggaatacagagaacaaagcatgtttcttcctgcttgggggagaaagatccagaaagaacgtcagcgccagcatgaagagccttgtgagaaagaacaagtgctctgtgatatttcaagagatgggaccccatggaggcctggtgtgtgggtaccggggtggccttgtgctttgagatgaagccagggggtctagcggggagtacaggtggcaggcaggcatcagttacataagcgcctcaccctgggagctcaagtactgtgtgacggttctgttcacggcccccacacagaacgtgctccttgtcagtagagcagagcagggaggagaagcaccagagagctgctgcgtggagtctggaagtatctcctccaacttccttggggaggaaagcaagggcccagac

SEQ ID NO: 29087 - DNA, 1030 bp, Homo sapiens
tagattatttataataatctcctcttccctcctcagctctccctcctgtcaggacaagcaaaagcatcagagacagagacagacagagatagagacaaaagataaaagatagagacaaaagacacaaaaaataacagattatttataataattatttataataatctattattattaatagtaagaatgatttttttgagacggtcttgctctgccatccaggctggagtgcagtggtgcaatcatggcttactgcagccttgacctcctgggttcaagtgatcctcccacctcagcctcctgagtagctgggactataggtgtgcaccaccatgcctggctaattttgtgaaaatatatatatatatatatatatatatatatatatatattttttttttttttttttttttttttttggtacagacagtgttttgccatgttgcccaggctgatttcaaactgctgggctcaagtgatccacccaccttggcctcccaaagttctgggactacagacatgagctacctatatacccagaagaataatttttttttaagtccttaatgaagacagtctgagccctgggatgctggtaacttatttatgaagacaaggcccttcctataagtgattagaaatgcaaggaatgacactaggtgtgagttgggatttttaatctgcagaagggagaacctgggggtcattaatatctgtcttcagagtgattgcgccacctcagcagcaatgagaaccatggggcttacatcgtcctcagcatccctcagccctcccgacagacctaagaggtcacgttgccattcggcttttacagatgaagaaatcaaggctaatgagttaggtggctcatcaaaggactcaggccccagattattttggcagctggtatggtttcctctgggtgggtgtattagcttcttatcgctgctttaacaaattaccacctattggcttaaaaaaaatgaatttattattttacaattctatagatcagaaatctcacacagat

SEQ ID NO: 29088 - DNA, 1063 bp, Homo sapiens
tggagtttgagctcttcaccacacgctgcccagcgatcctgccggagggtcttgaccacagagtgggggtgtgggggctgtgattcagattctccgaggtgctgatgcagctctgtggcgcctactgcccccgccccccgactgagaactgtggctgtgctcagccaccgtgactggctggggtatggctcggatcccttgggtgttggccaggccccagttgatctccaagggctctcggtgttccaggaagctatggcttggtgtctgaaacacagtctggagtaataaatgtcgggaggaaggatgtgactaggctgcacagggaagagaccaagacactttgagccaaatctctctttctcttgggaccccaagagctgattcacctggaacatcctggagccatgacacaagccatgctctgatggcagaggctgccagctgccacccaggacagagagcttatgggaggtggtggagttcctgctccccgcaaagcctgagggctggtagagatgtgagggtgtttcaacgttgctttccaagataaggaatgagttctttttctgtccttcttcttctgtccctggacagcctgactgcgtcaaagaaggaggtgggggagccagggggcagctggggtaggaagaagtccagcttggtgacattaatgggaggacagaattgcctggctcttctgtttttggacacgggcacagttatgaaactttgagcaaccccaggcctggggctggttcctggtggccctggcccacccctgcctgctgtgtgaggcctgtgaggtgcatgaggccactgtccataaatggaattgtcagtttattaccctcggtacccagcccagtgcctggaagttcttcccggatgtcgactgccgtggggagaagaggggcccactggccacagtgagggtgctgagctggagacgagttacacccgatctcatcctgggaggagactgtggtctggagggggtgagagcaaaaatgcagaggcttaaaacagaggtgagggcagagggaggcaggagagaccggga

SEQ ID NO: 29089 - DNA, 1091 bp, Homo sapiens
ttctaaagacaaagtgagtaagcagaaaatgggcaggtgagtttcactggaagcaagagcaacccagtgtatttttggaaaaaatcttgaatcatactaatgggataactgtgttttcagttctaataattgaaataaacctcagaatcactgtgtatcattctctgaatcctctggtttattacactattcttgacaaaaagcctggggcactaagaagatagcatctcccccacaatgtcccccgcccccatccttagaaaagcagcagctaccttgacacttaggtgtgactgcagcctccatacatcatggaaagagacaaggccccaaggagtttttttgttttgttttattttgtttttaaagaaaagggcaaatgaggggtccccacatgcaaaaagtccaagactaggataaaggtttcctcaggccaggaattcatgctacttttctacatttagaaccaatattttacagtgcaaataggcttaaaaatttattacaggaaagaattggtacaagcttaaaaaaaatgttacaatgatttttataaactcactgaatgacaggctcatagtgaggtctgactggcacaatgatattttgaagtgtgtccctggtattatagaggacaatttgctccctggtgtccaagagagagaagagcaattgagcagcctgggtctgacccagcaaaactggagtcccctggtggctgaatgtgcccggtaatgtaccaaggagaaaatcattttaggacatttcctgtatgtgtgtttgggaggagagagacaggcaggggctgggaagctttggaacagggtgggcacgatgagatgtcagctaatgaaggaggccctgccttctccatggacaaatccccagctttcaggacagtgtctgggacgtggtaagtactcaagaaatatttattaaataaacaaatgaaggaaagaggtacttctccctgtagtctcaactctttgagtgtttcatccaatctccagaaccccagcttcctttcctccatactactcaattgaaatttaccttactgaagtcactgaagacctccaaatcatggccaa

SEQ ID NO: 29090 - DNA, 1032 bp, Homo sapiens
aaaaaaaaaaagaagacatattatccattatttttaggtgagttgtaatttaacccacggcattgtcgggaacagtagtctggggtttggatttccagatatgggtcctgaaactccacgggtcttgggtctctgtgacctttcttcaacctggagctcagaccctttgtctttctgggagcttaagttacctgcatagaagcttcgcaaatcggtgtccaaacagttctccaggaagcgcctcagaggtaggatgtgcccgatcggggcagtccagtctgttaagaagtcttccacgatgtgatggatggccgtgggccgaggcaggggccagtgtgcagggcggaacctcacctcctgttctgtggggaggagagagggggccatgtcagagctgtgaggctgggcttcccctcctcgggccgacacagcacggatcccacacagcccaaacacttccctcgttcactcgtgctcggctttcccgacagcctcctatgctgggctgtggtcagactgttcaagagccacctgcagatatttgaaaggctgccatgaggaagaggaactaggcttttcccttgtggtttcggaaggcagtgctgaagctaacaacgtgaggctggcgtttccctaagactcacatggactgagatctactgtggctgctttttattttgtattattatttgttggagacagtctcgctctattgcccaggctgtcatgcagtggcacaatttaggctcaccgcaacctctacctcctgggttcaagcgattcttgtgcctctgcctccagagtagctgggattacaggtgcccgccaccacaccgagctcatattttacatttttcgtagagatggggtttctagtctctaccatgttggccaggctggtctcaaactcctgacctcaggtgacccacccgcctcagcctcccaaagtgctgggattacaggcatgagccactgcgcctggctgtggctgctttcaaactggcctttctctgagaagactcagatagaggc

SEQ ID NO: 29091 - DNA, 1124 bp, Homo sapiens
gacactgaaataaacacaggggactcacaacgtgatattcatgaagttgggtttctttttttctttttttgagacagaatcttgctttgtctcccagactggagtgcagtggcgaggtcatggctcactgcagcctcaaccttccagtgtcaagtggatcctcccttctcaacctaccaactagctggaactacaggcacatgccaccacgctcggctcatttttaattttttttttttttttttttttgtagagacagagttttgccatgttgcccaggctggtctcaaactcctgggctcaggctatcctcccacctccgcctcttgaactgctgggattataggcatgagccaccccgctcaaaccaaagttcttttaataaaggaattccgcagtgcagggtagacagcttccttctatctctcatatgtaaactacctccttttcttgctctccttttcccctgacccattgtctccttctctcctcctcaggaggctggatggggacacataccatgagtgacatcttaccagagggtggccatgaacttcatcatgttccacaactgttaatgaccactggcgctggccctgctgctctctgaactcctctctgtggaactgtgccccttctctgggaagagtccttgaagctctactgagaatgaaacctcttctttcagctcatgtcaatcttggtattttcccaacatgttcaggttctggcttggaggtgctatctgttgttgactttggacataaacgaagctgttatttgcctcttttggtttgttatgttaacaagcttttgggatttgttctttaagattccccacccctattgtatgatgataggtgctggaaccagactggttgggttcaaatttttgctgtcgctaacttgctttgtgaacacatgtcagttactgaatctccccgtgcctcagttttttaaatatgtaaacagggagttctcgtagtacccgtgggtcttagtcagttattgctatagaacaaaccacccccagacttagtaacatcaacaacaactattgtttttttcattcatgcatctggagagaggctggggaggaggaggcttgggtttggcttatctag

SEQ ID NO: 29092 - DNA, 1332 bp, Homo sapiens
cagctgtgtatccttctgacatgagcctggggcggttacgtcctggggtcctccactcccagggcaccctcacctacagtgatcccggcttctgaatcacacaggcacctggtttctacccctccctgacacccacagcctgccttcacaccctcctttatggcccacagacctttgtgagaagtgccaatcaagcagggagactggggcagggtgacctcagatctctgaagtcccaccaagccctgaaattctaagattttagatttgctgctggcagttccagggccaccaatgagagtaatggaagaaataatgcaatattattattattattattattttgagatggagtctcactctgttgcccaggctggagtgcagtggcgcgatctcggctcactgtaacctctgcctcccaggttcaagcgattctcctgcctcagcctcccgggtagctgggactacaggctcatgccaccatgcccagctaatttttgtatttttagtagagatgaggtttcaccatgttagtcaggctggtcttgaactcttgacctcgttatccgcccgccttggcctcccgaagtgctgggattgcaggtgtgagccaccacgcccgacctaaaccgtttttaatgattattaaaaccagccagatgtaatgcatggtggttgcccctctacatttattgtttaatcttggctctaagaggtggaggtgagaagctccattataaggaacagaaaccacccagagaccctacacacccacatcacacaaccagttaagcagtggagtggggtttacattgatttggggggctctctggctcctaaaccagggctctttctactgtaaatggatgattgggtgagggaaacaaggatcctcaagaataggggacagtgtttgggggtgcacaggggctgctgtggttcccacaatagggttcctcaggaaggaacctgcagcatctgccagcacagcgccccctagctgtgctgtaacgcagataatggggatcaccccttagccaaacaccccttggcagcctccctaccctaaagaccgtgctgaggcttcctgggcccctggaaaagtcagattagtctggacttcctcctactccaggaagccttcccacctcttctgctgccaccccaggcaaacataggggccctctgtgctcaacactgaattctaaactatcctcaatttcactctctcttgcctgcagcctgacgtttccccccagggcttggcaaaggcaagagtgcctcggtgtccggcacaaggcctgaccgcatgggtgaagtaggttcctaaaa

SEQ ID NO: 29093 - DNA, 1066 bp, Homo sapiens
gggagttcgaggctgcagttagctgtgatggagccactgcactcagcctgggtgacagagtgagaccctgcctcaaaaaagaaaaaaaaaaaagtcagggagctggggtgggagcaagtgggtaaggccacatggcagacccttctacaggacattgtacagaggaacacccttcccgctcccattccttcccccagagatgcatccttaatccctgctgagcagggaaacttggccctgccatgaacctgtcacttaaccttggacaggtctcccttccctccgaacctcagtgctgcctgtcaaataggccacgctgcggctttgcagggttgttggagaatcagatgacatcatgtaatggttggccaactgtggatcgcttcagaacttcagcaaacattccacgaggacttctcggtgccgggggtgccagggagggaagaagatgattcagaagttcccccccacgagggggaggagttagggttgggggaggatcagatggtgggaagggaagagaatgtagtcagaaaacaaagcaagctttgtcctattggcttctttgttcttatcttgttatttaacctattttgaatttcaaataacattagaagggcagtattgagatttctatgcttggaggtggcagcaatggttttaaaaaaggaagaaggctgagccgcagacataggtgttcttaaggatcattattgacttttatcagctgaggtcccaggtctgtgtaggtaagtgacttgcccaaggtcacattgtgaggacacagagcccagcctgccctcccactctcagaaggggccagggtgatgttttggcatgcaggttatcatggagatctgtgattcagctggcattgatttggcacttgttaagtgcagagcccaagctagatgcccaagggagaaaggcaggaaaatccaggcggcctccccaccctccaagtgcattgccgatctcgggaggcgagactgggctccacaagccagtcaagggcttatgtgagtcagaggctctgagttcaagtctcaactagctctgtggatct

SEQ ID NO: 29094 - DNA, 1886 bp, Homo sapiens
tatcctcttcagctgctaatgtttggaccccggatttcctcctctgtcgcgggcctgccgtcaccgcccattctgtcttccttccaggtctccacctctgggcaggagagttgccgaccacctcgggggtgctttctctgcgcttgaacatctatagctgcttctgaggggctgggagccgggcccctgggagagacgagccatgaaccccccacagcctctgcatttggggacctcaccttaggagagtgccatttacagcttccgccagggcaaaggagctgagcagccatcccaagcccagcccacctccctcccccggcccctggtaggcatggactagcagctgtgagcagccagagctgatgcccggcccccaggggggcagaggcgccgccaccatgagcctgggcaagctctcgcctgtgggctgggtgtccagttcacagggaaagaggcggctgactgcagacatgatcagccacccactcggggacttccgccacaccatgcatgtgggccgtggcggggatgtcttcggggacacgtccttcctcagcaaccacggtggcagctccgggagcacccatcgctcaccccgcagcttcctggccaagaagctgcagctggtgcggagggtgggggcgcccccccggaggatggcatctccccctgcaccctccccggctccaccggccatctcccccatcatcaagaacgccatctccctgccccagctcaaccaggccgcctacgacagcctcgtggttggcaagctcagcttcgacagcagccccaccagctccacggacggccactccagctacggtgagggcctgggccatcttggcccacttttcagaggctgaggctgaggcccagaggggttcagtggctcctccaagctccaagtgagctccaagtgaccacagaggtcaggcccagaccccacatcatggatggggagggggtgcagtggtgggaacaagctgactccccaaaacacctgaggttgagagtgaggaggtggagtttgaattctagctgcccctcacttgctgtgtgacctgggcaagcacatccccctctctgggccttagctgaaccagtcacccacccattcttgcccccttcaaccaaagccttcccctcatgtcggaatgatatcatggagaggtgaagggcctgggctctagattccaatccagttctgcctgaatttcaggaagtcagttgacctctataagttcaagtcctcgcctggataatgagtctctcggggtcattgctaagattcagtgccaggagaggcgcaggggggctgatacttagtaggtgctcaggacactggagctgttgttatctgaacttggtttcctgtaactcgacaaatttgggaaaccactcacaggaaccgcaagccacaggccttcctgcccagccagaagtgccaccttggccgttcggtcagagctcacctgagaaccatgggcccctgctgccacctggtggccactccctgccttgcgggagtggctctaacacccctgccccaggcggctgctcagaaccgcactgaggactggtccacagaaacccgattctgtctcaggtctgtagtcctggaagcaggggctggacatgtctgtccttcatttctatacagtcagaccctgattgctggtcccatcctgtgtccacaaaccagctcacgtgctatgggttcacctgcagccatcggccagcgtcatggcagggagccggtggccatggctgaggtcacagttgggactgagaggagatttgagctccagacttgattccacctcgtcagacttctatggccttgggctagctccttcgccccatcccaaactgagcctcac

SEQ ID NO: 29095 - DNA, 1030 bp, Homo sapiens
ggccagggcagtgcctgatggctcaaacaaggccagcacctgtgtccaggccaggctctcttccatctgggccctccccttgacatcaccccagtgccctttccccctttgacctcaccttgacctctgaccctgggctgaagcacaggtgatcttcccgttgttcttgcccccagttgctgccgtccaatgagttgcagacaatggtggattcgctgaagcgagggttgaaatgcaggttcagcttgtctgtcccctggcccagattaattacaaagctgcaggagaaggggtagcaggtgaggttcagggctcaggcctggataaagcagcttgggttggaggaccttggttgaccacaagctggaagaatcaaagcttgtgttagttgagatctgtgccttaaaacaagggaggtaacaacctgctcagacttagcactgtggtagcacattccatttggagcagggatcacgctgttgagagaagggtaactgatagtgacagcttcgggaattgggggtggctctcctgggagagagaaatgctatctcttagatatctgaagacctattaaatttagccaccagcagccaacctaaggtggtgagctccctgtcactatgggtgtgcaaccggggttgtatgacttcttggcaagatcactacaggagcctgggctagacctgcagggttcctgaaagtggggcattctgggtcatggggtgtcttcatttgggagtctcagaccaagggtatcacacattttgacaaacttgagggacccaagtaggagaaataagtcacttttcccttagctcctatggcatgcacctgcccgccccctctctaaccaaaagtagataaagcacagttccaagatgcgctgacatgttctgcaggcgagagagcctttcgctggactgtgactcacggaggtggtgaggccgctggttctaaccaagaggatgccagcgagaccactcagcctcccctggtggctgccctggtttaatgctcatgaaatgcc

SEQ ID NO: 29096 - DNA, 1034 bp, Homo sapiens
atctcagctcagctctgagagccctcccagagagcagctcccgagggctccagagccctccgaaagccctcccagagagcagcccccacctcccaggctgtctgcacttctccttgctatgctttgctctgtaacattttgcaacagtctgcagtacacggggtttgttaatctgagtattcattgtttctcttgctgggcagtgaacttgaggagggcagggattttgtctgttcactgctggagccccagcacccagaatacttaaatctgagttggatgaatggcggccagccactgggattccagggctttgggccccctgccataacatatggcccagggcaggcgccacatgctgggtcagtccccagcctcctgtccacagatccttctctgttctacctcctgggctgtgtccttccacaccctcagctcggtgctcaggcgtgggcagaactggctgggaaggggtggtccttagaggtgggctgtggagaaatgaagatcgagctctggctgccgccatggccttcccatgcaaaaagtattttgtcatccaaaatcaatattttggtcaggcacagtggctcatgcctgtaatcccagcactttgggtggccgaggtgggtggatcatttgaggtcaggagtttgagaccagcctgaccaacatggtgaaattccatctctaccaaaaatacaaaaaaattagctgggcatggtggtggacgcctgtgatcccagctactctcaggaggctgaagcaggagaatcgtttgaacccaggaagctgagattgcagtgagccgagatctcgccactgcactccagcctgggcaacaaagcaagactctttctcaaaaaaaaataaaaataaaaaaatacaggccggacgcagtggctcacacctgtaattccagtactttgggaggccgaggcaggtggatcacgaggttaggagatcaagaccatcctggctaacacagtgaaaccccgtctctactaaaaatacaaaaaaaaaaaaaattagcc

SEQ ID NO: 29097 - DNA, 1107 bp, Homo sapiens
gggtgactcctcctggtccctgcttgtgtgttgcctcttccaggcagcctcctcagccccaaactgaactgagtcccctcctctgtgtttcttttttgtttgtttgagacggagtcacccagagtcccagctctgtcacccaggctggagggcagtggcgagacctcggctcactccaagctccgcctcccgggttcacgccattctcctgcctcagcctcccaagtagctgggactacaggcacccaccaccaagcccggctaatttttgtatttttagtagagatggggtttcatcgtgttagctaggatggtcttgatctcctgacctcgtgatccacccacctcagcctcccaaagtgctgggattacaggcatgagccaccgtgcctggcccctcctctgtgtttctacagctccttggcttccctctgtcacacgttattgagaacctagcttcccttggcccacttcccggctacacagctccttgagggcgggactatgatttttttctcccttacttctggatctcctctgagcataaatttcatgagaattatggagacactgttctcagcagaatcagaggaggtggggctggcgtgatgggtccagctgcaggggtgggaggagtggggaggaggggaagggccctgaccatagtctctaaaagtggggccctttggagggcagctgtgctcatctgtctgtctacacccacaatcaggtcttgaggctgtctgggcaggaaggcagggggagagctttcccacgtgctcagtcacactcctctcccactcctgaccacacctttgccagggtcaggagtggaagagcaggaatcccactgccgggccacaatgaccccagctctcctcttccagatagagccacgaaccccctgaacaaggagctcgactgggccagcatcaacggcttctgcgagcagctcaacgaggactttgaggggtaggtggccgtccccacttgtttgcactgccctgcactctccagaacccagtctcgggtacaatggcctgggtgggtggagacccggttttcattctgaacgtattcacaaagtgatgaggatggggcacttgg

SEQ ID NO: 29098 - DNA, 1100 bp, Homo sapiens
aggtttgagggcccttgcaaccccctcccagcagtggctgggcactctttgctgccccagaagctggtcccctatggattcatcttggcctgacccagccaggtggccttatttcttccctgtcacctcccctccttgaaatctgggccctggtgcctgctgaagattccctctatccctgagtacttagtcttctcccccttccctggggcttctagagctctctctgcccctcaggtcctggcccttgggtccttgtcaaccagaggtctagggaaccacaacccttattgtcctgggtggaccaatccaaaggctaagtgatagtgactcatcaatgttgggtcctgtggggtaccagtttaggttcctaagtaatagtgaccctttcacgtcctggagcccgagtggaccaatcggaagcctaagtgacgatgaccctcgcatgtcctaggtccctgggtggacccatcaggaccccaagtgatagtgacccagtggtcttttagatcctcagtagaacagtccagaagcctgagagacagtggccccttgataatctgggtctcacgggaccagctaggggtccaggtttcagtcagtaaataagagtggtccacgtcctaaagacacctctcctttacaaagacttgtgatgctctggggcttctgtggccaagccccaccctttcctggtcatggtacccgtacagcgttgatggccacagctcgaaggggggctttcgtgtccccctgtgcggtcagtgttttcagtaccacctctctcccgtgcccacttggctatttacttatttatttattgtgtgccagtgatggtgggtgggggctgggccttccccgccacctccacccctgttgtgacctgtccttccgtacttaataaagtgcgcgtgggagtgttcacctgtgtttgagtctatgtttggggagggaggaggaccccctgctggagtgtgctctccctggacctggcccaccacattgttctctgcatgaaatgacccattcctgttcctgagtgtcttctgtgtgtagcgatactttgagtcaagagtgctttatagccaggcgcggtgact

SEQ ID NO: 29099 - DNA, 1051 bp, Homo sapiens
aaattagccagggggccaggcgcagtggctcatgcctgtaatcccagcactttgggaggccgaggcgggcgaatcacctgaggttgggagttcgagaccagactgaccaacgtggagaaaccctgtctctactaaaaatacaaaattagctgggtgtggtgggacatgcctgtaatcccagctactcgggaggctgaagcaggagaatagcttgaacctgggaggtggaggttgtggtgagccgagatcgtgccattgcactccagcctgggcaaaaagagcaaaactccgtctcaaaaaaaacttagccaggcatggtggcgtgcacctgtaatcccagctactcgggaggctgaggcaggagaattgcttgaactcaggaggcgcaggttgcagtgagccacgattgtgccactgcactccagcctgggtgacagagcgagactccatctcaaaaaacaaaacaaaacaaaaccatactgatctcacaccggtctttcattttatgctcactattctgcaagttctgatacaaagacaagtcttgtccccgttttgctaggattttcattcctgaatgtttaagtatgtcctggaagcttctaggggcaggaaagggtttggaaacagaccttcccctgtgtaatccttgctttagggcagatagacttcttccatcagaagccttctctagtcccaacccaggcctgtgatgcagcagggcgcgccaccacttgccagagccatggtggctcggggtgcccagcccaggtccccccagctactgctccatgtaagtcattgtcttgtgcctctttagggaggggctggagacaggtctgaggaggaggcgtcatccacggagaaaccaaccaaagccttgcccaggaagtccagagaccccctgctctctcagcggtgagtcttggcctgctgcctccccggtcccacccctcctggctggcagtagtgacctggcccttagggtggtgtggagcaggtgtagggcccggagcagccctctgcctgtccagtgatcctctgcctctcc

SEQ ID NO: 29100 - DNA, 1023 bp, Homo sapiens
gtgccaggtcatcccccatcaccacactggggcagcgtccccaggcttccagcagctcccaggtgggtcccaacgtggaaggattaattaattctttctaaagcagttgcagccgggcttggtggctcacgcctgtaatcccagcactttgggaggcccaggcgggcagatcacttaaggtcgggagctcgagaccagcctggccaacatggtgaaaccctgtctctactaaaaatgcaaaaattagccaggtgtggtggcacacgcgtgtaatcccagctacttgggaggctgaggtggaagaatcacttgaaccctggaggcggaggctgcagtgagccgagatcacgccattgcactccagcctgggcaacgttgtgaccttgtctcaaaaaaaaactaaaaaataaagcagttgcatcttgactcgtacaaaagtagcccccaccagagtagaccctgcgggtgccagctagaactccacaaggggccatgtcttcacactccttccagatggatgagttgatggaaaccctgtcccttccttgtcccagcttgtcagtcctgggcaggagagaatttcaggttgtgccttggttagaggagctgtgttgggtcctaaacactaggaccacaaaggggagtgaactgtgttcccagggcttgctgacgcccgtggactatggagtcaggatgacaggacagtgcggtgaggggcatctgcgacaggactgcgggctctacccgccctgatgtgggagctcctggagtgggggtgagcagtgagccagggtctgcagggctgtcctctctccacagccaacagccaggccttacagtggggcaggcttagtgactgtgcctcagttatgctgtacctgggagtgggcaggccctctcccatgtcaccatcaaaacccactgatgaaggctggtgggagtctgagggctgcacccgggtatggtgagttcccctcagggattgtgctgagcgccttggcctggcttcttggctccgcccac

SEQ ID NO: 29101 - DNA, 1028 bp, Homo sapiens
atggagtctcgctctgttgcctaggctggagtggaatgcagtggtgtgatcttcactcaccgcaacctacgcctcccaggttccagcgattctcctgcctcagcctcccaagtagctgggatcacagccatgtgccaccacgcccggctaattttttgtatttttaccagagacggggtttcaccatgttggccagcctagtctcgaactcctgacctcaggtgatccacccgcctcggcctcctaaagtgctgagattacaggcataaaccaccgcgcccagcctccagtgctgtgcatctctttatttacttattgtattttgcaaaattgaccaaagtatgtgtctctccagcctgtcaaatgagaatctggaaggccaggatgacaggcaggagccaggttgtgatggttcctgactgcctagaagaggaatgtagcactgatctgtcagcattggtgatgtgtggaagaactttgagcagggaagtggtctggtcactgtgttgcgggtactaggaggagtcgcaggggccagaaaagcctggaggaggctggtgctgttaggtgcccagggcactggaccaggaccctggtggtaggtgaggtctcctgcgtgttcattcactctcccaaggactgactgcctgagtgaggtgcaagggtagggtgagaaaactcagcccggggtgccagaaggccagtttctagagttagatggacttaaccttggcctcattcctcatggtggagagactcctggcagcaaatgctgggaaagaacttcagctccctgggcctccatttctttatctgcaaaatgggaacagtaattataaaagcaataatttttttttttgagagggagtctcgctccgtctcccaaggtggagtgcagtggcacaatctctgctcactgtaacctctgcctcccgggttcaagcgattctcctgcctcagccttttacatagctggattacaggcgcctgacaccacgcccggctaatttttgtatttttagtagaga

SEQ ID NO: 29102 - DNA, 1031 bp, Homo sapiens
tatttaaaaggtgacagttattcattcaagaaatattaagtacctgttaccacttactttccaacagtcttgcctctctcccctccaacgcacacttttctaggccctgagggtatgtctgagtacaagacagacgagattcctgacttcctagacttgggagaagggtgcaaaacagataataagtgaaaaataactttaagtcatggtaatatttttgaagaaacagggacaacgagattgggagtgacttgagatgtttgtatctctgagtattcaaaagggaattttacgcagacctgagtttagtttctggggtggtcttgccatttcgttctatcatatatgtgggtttgagcatactctgtatttgttgtatccaacctccaggagatccaaagcaggaccttgcttatgaacgtcagtatgaacagcaaacctatcaggtgatccctgaggtgatcaaaaacttcatccagtatttccacaaaactgtctcagatttgattgaccagaaagtgtatgagctacaggccagtcgtgtctccagtgatgtcattgaccagaaggtgtatgagatccaggacatctatgagaacaggtatgggctactggctgaaagggcctctttctgggtgggactggcctggtaatatagttcctacaaatgaggtgagcactctgtaaacagtactttcgggggggttggggggtgggggtctttgtgagtccttgaggctagggacattttattttgttagactttattttatttatgcatttgtttattttttgaaacggagtgtcactctgtcgcccaggctggagtgcagtggcaagatctcggctcactgcaacctccgcctcctgggttcaagtgattctccagcctcagcttcccgagtagctgggactacaggcatgtgccaccatgcctagttaatttttttgtatttttagtagagacagaatttcaccatgttggccaggcgtgtgttgaacccctgacctcaagtgatccacccgcctca

SEQ ID NO: 29103 - DNA, 1030 bp, Homo sapiens
ccacattgtcttgattactatatttttgtagtaagttttgaaatggggaattgtaggccgggcgcagtggctcacgcctgtaatccaagcactttgggaggccgaggcgggtggatcacctgaggtcgggagttcgagaccagcctgattaacgtggagaaaccccatctctactaaaaatacaaaatcagccgggcatggtgacacatgcctgtaatcccagctacttgggaggtggaggcaggagaatcacttgaacccggaaggcagaggttgcggtgagccgagatcgcgccattgcactccagcctgggcaacaagagcgaaactccgcctcaaaaaaaaaaaaagaaagaaagaaattgggaattggtaagtcctccaactttgttctttttttttttttccccaagattgttttgactattctgggtctcttggatttgcttattgattttaggatggacttgtcaatttctgcaaagtagccagctgggattttgagaggaattgcctagaatctgaagatcactttggggagtattgccgtcttaacagtattaagtcctccaggccaggcgcggtggctcatgcctgtaatcccagcactttgggaggtgaaggtggacggatcacgaggtcaggagatcgagaccatcctggctaacacggtgaaaccccgtctctactaaaaatgcaaaaaagttatctgggcaggccggcatggtggcgggcacctgtagtcccagctactcgggaggctgagacaggagaatggcgtgaacccgggaggcagaacttgcagtgagctgagattgcgccactggactccagcctgggcgacagagcaagactgcgtcccaaaaaaaaaaaaaaaaaaaaaaaccaatattaagtcctccaatctatggacatgggatgtctttgatttatttaggtctttggttgcgttcaccagtgttttgtgttttcagtgtacaagtctctcatttgttttgttatagctaacgtttttttgaacacttaactc

SEQ ID NO: 29104 - DNA, 1028 bp, Homo sapiens
tggctaattttttttttattttattttttgagatggagtcttgctctgtcgcccaggctggagtgcagtggcacgatcttggcgcactgcaagctctgcctcccgggttcacgccattctcctgcctcagccttctgagtagctgggactacaggcgcccgccaccatgctcggccaatttttgtatttgttttagtagagacggggtttaaccatgttagccaggatggtctcaatctcctgacctcatgatctgcccacctcggcctcccaaagtgctgggattacaggcatgagccaccacgtctggcctaatttttgtatttttagcagagatggggtttcaccatgttggccaggctggtcttgaactcctgacctcaaatgatctgcccgcctcagcctcccaaagtgctgggattacaggcgtgagccactgcacccggccaagttcttgtttttaatcttgcttttgtacctccctcctgcaaagccatgctacaaagcctgttggctggaagaatggtgtgtggagaaacacgaccgtctgcctcaaactgtcaagggcttcctttgggttcccgtggttcctctggtttccttttccccgcctttattaggctacaggcagaattgtttatggaactgtttccttccctggcctagccagtccttccctgccaggatcctgccccatggctagacacctgcagctgttacctgggaagaaatcagaaaggattcagccagatgcaggggcttgtgcatataacttcagcattttgcgaggccaaagcaggtggattgcttgagtccaggagttcaagatcagcctgggcaacatagtgagactcccgtctctacaaaaaataaacaaaattatctgggtgtggtggtgcatgcctgttagtgccaactgctcgggaagctgaggtgggaggatcgcttgactccaggaggtggaggctgcagtgagccgtgattgtgccagtgcacccagcctgggagacaaagtgaaaccctgtctc

SEQ ID NO: 29105 - DNA, 1040 bp, Homo sapiens
tacagaatgggtgacagaatgagagcgacactgtctcaaaaaaaaaaaaaaaaaaaggccgggagcggtcgtttgtgcctgtaatcccaacactttgggaggccagggtgggcggatcacttgaggccaggagttcaagaccagcctggccaacatggtgaatccccatctctactaaaaaaattaactggacatggtggtggacacttgtaatcccagctactcaggaggctgacacatgagaattgcttgaacccgggaggcggaggttacagtgagccgagatagcaccactgcactccaacctgggcacagagtaaggctctgtctttaaaaaaaaaaaaaaaaaaaaagttttgtcaaaacttagcagagcaaggctaagaaagctcaggaacctggggcctcggcgatgcctgtagtggcaacttatgtataggggctgcagggagaggttaggctgtggcattgagccctgatagcccctatcatcaggaagtggtagatttcagttaatcctgagttctggaaaaataaaaaaaaaaggaccatctgactggtttcctctgcgccctgaatacccctaagccaacatgtgctgaggctcaagagcattggtacaaagtgcatggggatttgattagctaccttcccacctgccctgtgggctgcttgcgtccctctcccttgtcctcccccagggagatggagaaaggccctagctgagaccctcacttactggtggcttgaggcttgaactgctcccggctgtaggccccattggcttgacacatgttggcaggccggaggtggggacgggctgcgaggatgggaggcaggtagatgggcgaggctatttgcttggaaggtaagactctctggctggatgttgggctgcactgtaggggcaaagcatctcctcctggggaacgaagagttggggtgggaggacccacatggcttttttttttttttttttttttttttgagtctgagtcttgctctgtcactcaggctggagtgcagcggcgcgatctcgg

SEQ ID NO: 29106 - DNA, 1067 bp, Homo sapiens
ggtgactgggaaagccttgtgaagggattagaattctagtggggacaggtaaagagagttggttttgtgggtactccaggtgccagaaacagcccaaggaaaggtccaggtggaggcaggcagttgtggatttgtgatgagggatcataagcagcttggggcataaggctggagaagatgacactggtcctgtgagtgacaggttcagaagattagagttcatttggtgggcagtgtgcagcacttaaaggttttgaggccaacatccagcatccaggccactcataaatccaagtgtcctgtttttcttttctttctttctttcttttttttttttttttgagatggagttttgctcttgttgcccaggctggagtgcaatggcatgatcttggctgattgcaacctctgcctcctgggttcaaggaattctccagcctcagcctcctgagtagctgggattacaggcacacgccaccatgcctggctaatattttgtatttttagtagagacggtgtttcaccatgttggtcgggctggtcttgaactcgtgacctcaggtgattcacctgccttggcctcccgaagtgctgggattacaggcgtgagccactgtgcccagccaagtgtcctgtttttcttggggagcaaagcttgatccagctcattccagtctttagtgctctttccacttaagggctatgacaccatctggtggctccttgcctgctgtaagctcttgtacagccataatgggactctgcacttggtaggtgcaggtggagtctcactctgtcacctaggctggagtgcagtggtgccatctcggctcactgcaaccttcacctcctggttcaagcgattctcatgcctcagcctctcgagtatctgggactacaggcatgtgccaccacggccggctaattttttgtatttttagtagagacggggtttcaccatgttggccaggctggtctcaaactcctgacctcaggtgattcacctgtctcagcctcccaaagtgctgtgattagaggcgtgagccactgcacctggccagaacaac

SEQ ID NO: 29107 - DNA, 1049 bp, Homo sapiens
ctgggaggtggaggttgcagtgagccacgatctccccattgcactccagtctgggcaatgggagtgaaaccttgtctccaaaaagtagagagagaaaatagaaattgaaatgaggtgcactgggcactgaggcaaggctctggggttggagcagttagaatggtgtgcctttgcacatgtctccctttccaccaggacattctgctgtggccgctggactccggagtctgtgataggcctctgccagggaagatctctggcagtgcccctacacaccactccctactgtgcctgcctacctagaagatgacgtttctaggtggggaccaggatgccgttccaccctcactgcctgttgggcccttctccctgggtttgtagtctccctaacacctgtccctatccctacaggatgtgtgcccctgtgatggtggagctggagggggagacagatcctctgctcattgccatgaaggaactcaagtaagtcactcaaatcatggttcacttctccaaatctctgggaggcatctgttgggctctctgttgcaccctttgctcccacttgcctggctggagaagttgatgcttattcctacagatccttaggaacagctcaccaggaagtaggaggaagagagaagaggaggcagggaaagtgggagggcactgatgagacatggacgtcttctggctgttggaatttccctgttcctgctgcaggaggccttaccaatattctgtcattcttccccctcttgtctgatataaaaactttctttttcttgtaattgctttcttacaaagtacactcatcagccccaagaggctgctcctaagacttctctttgcttgtgttttgcacacaatctgttccttctgcggcagagctggggtcaccagccctcatgtacttgtgacttctcccctgccacagggcccgaaagatccccatcatcattcgccgttacctgccagatgggagctatgaagactggggggtggacgagctcatcatcaccgactgagctggagtcatcttcctgccc

SEQ ID NO: 29108 - DNA, 1081 bp, Homo sapiens
tgcacttgtttctctctctatatatatactatatatatagtaagagataggaggctgggcgtgctgggtcatgcctgtaatcccagcactttgggaggctgaggtcaggaattcgagaccagcctggccaacacggtgaaaaaccatctctactaaaaatacaataattagctgggtgtggtggcgtgcatctgtaatcccagctacttaggaggctgaggcacaagaatcgcttaaacccaggaggcagacgttgcagtgaaccaagatggcaccgctgcactgcagcctgggcaacagagcaagactccatctcaaacaaaaacaaaaacaaaaaaaagacagagtcttactacattgcccatgctggtctcaaactcatgggctcaggtgatcctcccacctcagcctcctgtgtagctgggactgcgggcgcattccaccatgcctagctttgtttcttcctgtacttaattcactcgttttcatccctgctcctctctctagactatgggcccctgaggccagggactgtaggcttctctggttagtacccctggtgtccactccagtgtttgacacaaagtaggactcagagcgtgtcctctgaaggcagagctctgctcactgagcacttcccatgtggcagacctgtgtgtgtcactttctgtacattaggaacacaggcaaggcagctgtggtgccaagcagatgcccgggagccaaactggggaagttcctgtttgtttctcatcagtaaaatgagagtaacttgccacagctgagatctgagcccaggcagtttgggtacctcatcacattgtttgcaaggattgagttagtatacataaggcaactagcacctagcacagtgcctggaacagagtagctgctcaattaaggttagctgttattatcattaatgaaaattaaacaagatagcttatgtctggcccatccatggccagacacggtatcacatgccatgtctcctctgtcagaatggctggtgggatttgggaggccgaggcgggcagattgcctgagctcaggagtttgagactgggcctgggcaatatag

SEQ ID NO: 29109 - DNA, 1057 bp, Homo sapiens
gagtttggtcaactcggccgcctaagcctcaggccctgtcatccctcagcacctgccgctgcccgctctgggactccctgaacacctgcgccagcctctcctgctgcgtgtgggtgatgggggtggagctggggacctggggtgggggtagtagccactctgacagcctcacctgtcccacacagtcgtactgcctgaaggtgaaggagatggatgacgaggaatacagctgcattgtgagtgttggagggggtggggggcttgtacttccccccacctggtctgccagggatagcaggtggctcaggccaacccgggagagaccggggggacttggctggactctcgttcctggagatttagggccatcttcccagtcccgctcgctgggcctcggggtgctgggcacccggccgggaaccactccctcagtctgggggactcttggagggaaatcggattttcttcactcctatgaggcgcttttaagtgtttgatttttctgctgtcgggatccatttcgtggccagtgttcattgaatgtggcagaggtttgggtttggttttttcctctcttcaaagctatcactgagtgcttctgagaaacactgaagtctcagaaatgaggtctcaggaatgaagaacagccgtggctttgaaagcacagtgcggtgcgaggccgtccctgagcaggcactcctgtcccacccccgccccaggccctaggcgagcccctttaccgggtgagcaccggcaactatgagtaccgcctgatcctgcgctgccgccaggaggcgcgcgcccgcttctcccagatgcgcaaggatgtgctggagaagatggagctgctggaccagaagcacggtgagcgccgccctcctccccgtccgctctccatttcagaggtgggaaaactgaggcccagaggggtactctcagggccaggccacggcccagatgtaaagcccctccaggagcccagccatctgcccagagcctggcctgggtggagctggcctgtgcgcgtgggctccgtgggctgccatccatgatccat

SEQ ID NO: 29110 - DNA, 1042 bp, Homo sapiens
ttacttgattctcgcaatagccctgggtggtaggtgcaattattatctccagtttataaaagaagatactgagggtcagagaagttaagtgactggctcaaggtgtcacattcagtaagcgttgaaggggtctgtgttggtctgtccttgaagatgccccctacgactacactttcaatgatttctgccttgaacctggccccatgactaaaaacctcacgtcaaactcaggcagcaataacgggaaggcttggtgcctcccatcactggagcaactagtctagctggtcactaagtggacagcccctctgtttccctgcagtaactaattagcagaatagcacaaagataaaacccgaaggcctttgtgcagaagtttcagagacataagcaaagtgagagcattaggttctgcatatctttcttgttgttgttgttgagacagagtctcgctctgttgcccaggctggagtgcagtggcacgatcttggctcactgcaacctccgcctcccggcttcaagtgattattctgcctcagcttcccaagtaactgggactacaggcgtgcgccaccactcctggctaatttttgtatttttagtagagacagggtttcaccatataggccaggctggtctcaaagtcctcaactcgtgatccacccgccttagcctcacaaagtgctgggattacaggtgtgagccactgcacccagtcacatgtcgtattttaaaagggatttaaaagtatcattggattgtttgtaacacgaaggataaatgcttgaggggatggatacccattctccagcatgtcatgattacacattgcatgcctgtatcaaaacacctcatgtaccccataaatatatacacctactatgtaccacaaaaattaaaataaatggtgggtgagaagaaacactgcatacggtttcaaaaccatcagagaggccatgggaaaaattttaaaaatatatttacgaagtgaaacagccattctaagtatgacaccaaacccataaacttgaaaagaccgata

SEQ ID NO: 29111 - DNA, 1101 bp, Homo sapiens
ctcctgggctgaagcaatccttccacctcagcctcctgagtagctaggactacaagggtacaccaccacgcctggctgatttttcaattttttgtagagatgaggtctcattatgttgcctaggctggtcttgaactcctggcatcaagtgatcctcctgtcttggcctcccaaagtgctaggattactggcataagccaccatgcctggcctagcagcactatttttggtggtcaaaaactggaaacaggccgggtgtggtggttcatacctgtaattccagcattttgggaggctgaggcaggcagatcacgtgagcccaagagttcaagaccagactaggcaacatgacgaaactcccatctctattaaaaatgcagaaaattagccagcatggtggtgcgtgcctatagtcccagctacccatgaggctgagatgggaggatcacctgagcctgggaggttgaggctacagtgaacagagatggtaccactgcactccaacctgggggaccagaacgagaccctgtctcaagaaacacaaaacaaaactgcaaacagctcaaatgtccatcttctgtagacaagtaaattttgctgtgtttatacaatagaatattatccagcaatgcaaatgaacaaactataactacacacagctgcatggataaatgtcagaaacatgacgttgagtgtgagaagccagatgcaaacgaggactcactgtgcaattctgtgcatgtacagtggccaggtgaggcttatggagtgctgaaatgctctgtatcccaatctggagggtggttttaaaaaaatgttttgagccagtgcgttggttcacacctgtaattccagcactttgggaggccaaggtgggcaggtcacttgaggtcaggagttcgagaccagcctggccaacatggtaaaaccctgtctctactaaaaatacaaaaattagctgggcatggtggcacacacctgtaatcccagctatttacaaggctgaggcacagagcagggctctgtctcaaaaaaaaaaatcataaataaaaaataaaatttaaaaaatacttgattttaatttttttagagatgggggtc

SEQ ID NO: 29112 - DNA, 1048 bp, Homo sapiens
tttcataaggagcttgcaacctagatccctcgcatgcactgttcacaagggtttgtgttcctatgagaatctaacactgctgctgatctgacaggaggtggagctcaggcagtaatgtgagcgatggtgaacagcagtaaacacagatgaagcttctctcacttgcctgctgctgatctactgctgtgtggctcagctcctaacaggccatgggccagtgccagtccacagcccaggggttgagggctcctgttgtagcacctgagttgaccaacagttaatgtgtgggtggggattgggatcgggcccatgctcttttagttgtctgactgtgctttcagtattatttttgtagacgttggccccatcaggtatggtgagaataagctctctaggcctgtatgatgccttacacccctccttttcttttccagatacttctaggacctaacacagggctctcaggaggaatgccaggggctctaccctcacttcctggaaagatctagattgttattgctgtttgagctgtctcagtgggataagtttgaaattcaagtgtttgaactgctgataatttggatttttttttttttttaactttggcacattgatctatctaaacctggtggggagaattatccccacattgtctcatggaaagactcaacttgcaactgtgccctccacactatccttacttctgtctccactctgataccagagtgcagccatgcagatggttattccagctctggtcacccgactcctttcaccaaattgctcctaactggaagatctcactttccccttgtggggtaggaaccgatgccagtgggagggatgtgcccctgaccattaacgactgttttttttttttttttttaaagaatggagttgttggggcaggacatgcacacaatgtgaaacagacaaaatgcattacacctgtagtgtaaagtggccactatgaatccctatgtatgagaggagggaggcaggctgcagcttcagccacagaatggggactatggaagacagcaggagc

SEQ ID NO: 29113 - DNA, 1062 bp, Homo sapiens
tccttccccgcagaagcccacagtccagcgaggaggtgcatgtgcagtgtgctgtaatcccaggaactgggacccttgtctgcccagggcctgggggtgggggatgacgggtgggcattagctggaggaaaaggtgggagatggtaaggcaggatcagagccaagaacaggcttcacgggggtctgtagccccagagataagcccccacccttccacagcttaagcgtatttcatgctttcactcactgcctcccgttgtcctgaagccaccaggtggctccagcctatcctgacctctggcttccttgacagtgcactgtgggagcatcaggcagacagccaccattctgagcatggacaaggactgtctgcgcactggggacaaggccactgtacacttccgcttcatcaagacccctgagtacctgcacatagaccagcggctggtgttccgggaaggccgcaccaaggctgtcggcaccatcaccaaggtatggccaggacagaccttgcctgcctccaggaagcaccaggggccactcctgttctgtgaccctgagtgcagggcagaggtttagtcactgccatgggagagctggacccactgaggtgtggcctcggtgccatctctctactcccttagaggtatcctgtggcctcctgtcctgggcagtggtggtgaccatggagaggagaaggtagggttagggtatgatcttcctccatagaaaactggtgacagaatgtctgggcccagccaggctcagcctccagggtgctgtcacaggttcctatggcctcactgggaccatgtctaaggtctcctctcagagcagaggtctggttggagtaagtgcagggggttatgggcgtgagttctcttggggcttaagctgttggtgtatcctggacacttgcccactgcagaccttgcccctggtcttggaggggcatttgatagaggggtttgacccctgctccgtacaaaggaggtactggccccagcctatctgagatcttggaatcagtctttggctggccttgcctccagaaaaggcccc

SEQ ID NO: 29114 - DNA, 1035 bp, Homo sapiens
agtgacccagtaaattcctggtcaggctagggtgaggaccacgcagcctgctcacgcatcttccgtccctgtctccccgctgctcagcacctctgctctctggccctgctcctgatgggccagtgcttctcaagctccttctctctctttcagcctaagcccagcagtggaggccggcgacgagggggccagcgccacaaggtgaagtcccagggggcctgtgtgactcctgccagcggctgctgaaccttcccctggcccaccctcaccacccaaggggtcatcatctctggccaccactccaccagatgggcagagcagctatgaccgccacccagccctcccgctcaggccacagccggagcctccgcattgcccccacccccattttccaggggggttgtaatttataagctgacgaaggtagccagacttccggaggactgaccatctctcactgtcctccccaccttcttcctcactcacacattttttgtacatctgggcccttagtttttattctgtttattatatgtctctgtctctctctattgtgtgtgtgtgtgtgtgtgtgtgtgtgtgtgtgtgtgtggtgcaggagtgccacccccagggccctgtcaacctctcttttctcctccatggctgtctgcctgcgtatctgtctctgagaatcctcggggcggtcaggggatgtcaggaggggaaggagccgccctccctatcttgctgctcctcttggcactcaggggcaccttccatggagccagaccgggtggaggggcttctgggatttggtgtctgctgctgccagagcaggaacccccagtctaggacttgggcattttaacagggagaaagtagtggcttcccttttctctctctcctcctttttccctttaagcccacagattcaggtcatgccaaaagctctctggttgtaacctggagacatgtggaggggaatggcgatgggattataggactctccccatctcgggccctgaccctgacccttgccaccaacccaaagac

SEQ ID NO: 29115 - DNA, 1088 bp, Homo sapiens
ccggtgtggggcttaggccaatggtttgttcaaatgcaggctcctgggtcctgtcagccctaaggaaccagactctcctggggtggagactgggaatctgcatttctaactgacttaggagatcggatgcccactgaagtttaagccgcatgcactgcctgaggctccagctggccatggtagaatgcccgcgccctggcatgtgctggcggcggctcctcgaacgcctctcccggccttcctttcctggccacccaacccctcttgtgtaaagcccacctcctggtgtccttttccaggaagcttccctcatgctgcccttctggaaggtgccttcccctgtgctgacgtctgcaggatgcgtgttacaccccatttggatatcacatcttgagctgtgggaaaggagagcagggcttccctctctgaaccccatgcctggcagggtaagtgcccagggagcacctgctgcctggatggggagtctgcgccacttctgctagcacagcagcatcccgtacctgaaagtgaaacgtctgaataggctcgccgtcctgatcgtaagtgaacttgccaaggagtgtcccctcctgctgcaggtcttcgtcaaacccctgcaaagagagcggagggaagtggggaggggctggagcagggagaacacccctccccactccaatccctgctcctcccacccagcaggtcaggcaccagagtggcctatgacaagtcacttcactctcttgtgccacagtttctgcctccaaagcctaaggtaacagggactgaagtgctgtctcccaccctagctcctcctcttccaaatccactcccctcccttccagtccaagggtgaccctgacttgatcctcagtagagaggcccacaggatccccctgcagcccctctggccccaccacaggacagatactcacaaagatggcgaagtccttgggggcactggagatagtgctgttgggtgacaaggccttgggcacatgctctaaggtaacggctgtggggcggatgcgggcagagaggcggaccacggcgaagccttgtggcccctggaaggcccagcagttgcc

SEQ ID NO: 29116 - DNA, 1093 bp, Homo sapiens
gctgtcactgggttctggtcctggctctgactgtgtctccctcagcctcagtttccttctcctaaggcgagagcgctgagtggaagaattgtcttcagactcatccctacccccggtctggaccctcatgggtttggcgctgtcttccaggccctgcgtcctctgacgcgtatgtgcacatagatgcacacacatgttggcaccatggactactctgacctaccagggtagggtgctggcctcctgggtccttcctatgcatggcactgttagaattgtctatggacttgtctgcctcctgtactagaaagtaaactccgccgggcgcggtggctcatgcctgtaatcccagaactatgggaggctgaggcgggtggatcacgaggtcaggagatcaagaccatcctggccaacatggtgaaaccccgtctttactaaaaatacaaaaattagccgagcgtggtgggggcgcctgtagtcccaactattcgggaggctgaggcaggagaattagcttgaacacaggaggcggagcttgcagcgagccaagatcgggccactgcactccagcctggagcgacagagcgagactgtgtctcaaaaaaaaaaaaaaaaaaaaaacgaaagtaaactccttgaggacagggacctgtgatctcttgtttaccgctgtgtctctattatctatcaccatgtgctgggcactcaataaatacatttgtgaaaggatgagtaaaggtttgtagccaggtccagtgctcgcccttggcgtcacagaggtgagtagacattggctcagggataacctggaaccagagccttgaaattattctcccaggagcacagttcccaggcctccccagtggggattgctgtcttcccctccacacctttactactcctttattttattactgctgggcacgtctgtcttgttaccgagttggcattgattttagacggctggccctctgctttgtaagttcccagagggcaaggtccctgtataactgtccccactctagttagcatttgggaaacgctggttggattgtgacattgggagggaaaattgtaaatggtgcaggctgag

SEQ ID NO: 29117 - DNA, 1089 bp, Homo sapiens
cctccgtaggcttggatgctggaaagatcaagcaggtggggatcatctgtgggcaggagagcacccggcggatcggggattacaaggttaaatatggctacacggacattgaccttctcaggtaggtgccagcccagctgtcccctgtgcttgaaagaacagaaggtcctagggaggccaagatgggaggattgattgtgctgggaggtcgaggctgcagtgagccgtgatcatgccactgcactccagcctgggcaacagagcaagaccctgtctcaaaaaaaaaaaaaggtccagaaggcctggggcagacgcagactgtaggccccagtgacacatgtgcagtcaaagtagttcagagcccaggcaaactctttcttcctcccagagaggttggtttggggcaggttaggcccagcaggccaggagttgggtactgtagaaacaaggggtggagttgagctgggccaaagctgagggcagcaactagtgccacaagggaggcaggcgaagccagagttggcatgggatggacagaccaggcctgttggtcggtgctgcccatggctgcagcagaggtgtgagatgaattgtgtatttccctctgaggacacctcctctggacatcaccccagcgctcatggcagcagaatgggcagtcatcatcacacggccaagcccgtgcagagctctggatgtaccttcttttatgcattccctactcaggccccctgaggcagtcactgccatcaccccagaggcattttcataagaggaaactgaggcatggagacatcaggcagcccaccctggtcatggggcttgaacacaggcagcctgaatttggaatatgtgtccttaaccgtcaggtaacctgtatgtgaagtgttggttggggagataggcgcgtccacttgcctgatgccaatcatggcatttaatgtcatggccaaggctgttcccaaagccagagttcccatcaacagaggcctcatggcctagaaagtgcatgttagaactccttgccctcacgcgatctaggcaactgagtgtcgaatatttgtccctaatttgtggggtcctgtttcc

SEQ ID NO: 29118 - DNA, 1030 bp, Homo sapiens
tgagttggccgatcgctgtgctgtaaatcctccccatatggctgattttaagccacccatggcctaacaagagtgtcataatgggagctggtacgtgccagctttagtccccaggcattcagcgggtgcttaatagatgatggttgaatgaggaggaaaggatgcagagagtgttggtcagctagatttgggagctgcgggcgatactgtaggtgagaagggctttcagggggaggcatgggagggctggaggtgaggggccaccctgcaccagccctggggtgaggcttgagggaacggagagcttctggtgtcctccccgtcctgagaccctttgcacccctgaccctgacgcacacttgcactaacccctccttcgaggggctcctctccaccttggcctggccttggggttctgcacagaatgggccccaagcttaagccaatgagagctcagagatgtggcccaagcaggtcccaaacctcatgttccattcccttgctgtgctgttccctcgacttgaattcctcttccattcactgtcccctgtaactctgttgtccatcaaaagcttcctcatgacccccttcctctgtgacaccagccccacaacccaagtcagacagacccatctccccttctgctcttcccccgatgctacagcccctcccatgtacacgttcctgcctataaaaatatcaatagccagcatgtgttgtgttcctatggcagccagtgacagaggttccaggatagtcccctctacagatggggaaattgaggtgcagtctcttgttcacactgacccactcttttttttttttcttttgagaagagtctcactctgtcaccaggctggagtgcagtggcatgatctcggctcactgcaacctctgactccctggttcaagtgattctcctccctcagcctcccgagcagctgggagtataggcacgtgccaccatgcccagctaatttttgtatttttagtagagatggggtttcaccatgtgggccagatgttctca

SEQ ID NO: 29119 - DNA, 1483 bp, Homo sapiens
tctgccataggaatgtgagaggggtgtttgctgagcgctccgggcacggccagagggcaagtgagcatgcacggacctcttccccctgtcctgtttctcacccagcacctggggagatcggtgctaccaaggaagagagcacacagataagacagaggggaggaggtgggcatttcctacattcctccttgtttgccgctgctgagattgcagtatttattgcaatgtaaatgtatcctgaaggtggggaggaatgtttaatctaccatgtccgtgtgtcatcttggtttgtgtttttccctgtttgtagcaagactctgatgataattctgtttctcatctgcccattcagtattttgttttccttccgtcaagttgtcttattttttcaatgactacctctccatcattgaggttctggtgaagctctctgcagctgtctcattccttcccaacgatagtaacaggaaatgactctttagcatcgatacctcaacatcaatttagggtagagattcctgcccctcttttgtcacagattaggaaattgagaactagggttaaccttgactatatttagaggtctttttgcctcttttccccttaacaaggatttcttatggtggtttcagtttcatttgcataaaggtattgagagggaacaaaaaacataaagctgagaatcttgagagagctcatctaccctgtctgttggtcagactcaaatgagagttaaaaaaaaaaaaaaaaatctgtatgcctgagtaccatcctggatgaatctagaaggtatggggtagagcttgacagggttcctgtgtacccactgggtatccgttagaggtaagggagaggagaggattgatagagtgttgcaaaagtatagattattcattgagataaaggatttggtttccctgccatgagtattaaaaaaatttaagttttcccaagcttgcatctctgaccaaatttcacataaaacattggaaggaggctgggtgcggtggctcatgcttgtaatcccagcactgggaagctaaggcgggtggatcacttgaggtcaggagttcgagaccagcctggccaacatggtgaaaccccgtctccacgaaaaagataaaaataagctgggcgtggtggcaggcgcctataatcccagctactcgggaggctgaggcaggagaataacttaaacccgggaggcggaggttacagtgagctgagatcgtgccactgcactccagcctgggtgacagagtgagaccctatttcaaaaaaataaaaattggaagaagagcttaaaaaagataagattttaaagagtcccaagttatttaagttgagtgtaattgtcatttaaggaaggcaaatgagtttatcatccttcttaaagagcatctcttttaactgttggacaaaaccataactttgtcattttacaaggaagaacctcttaagaagtcctcagaaccagaagcaa

SEQ ID NO: 29120 - DNA, 1052 bp, Homo sapiens
gcagcgttgctgtaaccgacaaagacaccttcgaattaagcacattcctcgattccagcaaagcaccgcaacatgaccgaaatgagcttcctgagcagcgaggtgttggtgggggacttgatgtcccccttcgaccagtcgggtttgggggctgaagaaagcctaggtctcttagatgattacctggaggtggccaagcacttcaaacctcatgggttctccagcgacaaggctaaggcgggctcctccgaatggctggctgtggatgggttggtcagtccctccaacaacagcaagggtgagtgggccaccaccacatcgtcctggtgggatctagggttaggggcctcctacctttgtatctgactcacttggccccatcactcaaatgttttgcagaggatgccttctccgggacagattggatgttggagaaaatggatttgaaggagttcgacttggatgccctgttgggtatagatgacctggaaaccatgccagatgaccttctgaccacgttggatgacacttgtgatctctttgcccccctagtccaggagactaataagcagcccccccagacggtgaacccaattggccatctcccagaaagtttaacaaaacccgaccaggttgcccccttcaccttcttacaacctcttcccctttccccaggggtcctgtcctccactccagatcattcctttagtttagagctgggcagtgaagtggatatcactgaaggagataggaagccagactacactgcttacgttgccatgatccctcagtgcataaaggaggaagacaccccttcagataatgatagtggcatctgtatgagcccagagtcctatctggggtctcctcagcacagcccctctaccaggggctctccaaataggagcctcccatctccaggtgttctctgtgggtctgcccgtcccaaaccttacgatcctcctggagagaagatggtagcagcaaaagtaaagggtgagaaactggataagaagctgaaaaaaatggagcaaaacaagacagcagccact

SEQ ID NO: 29121 - DNA, 1065 bp, Homo sapiens
cattgtggcgccagcctgcgcttcctgaactggccagagccgggactcaaccgatgcagcacgttagctttggaagcagacagtctctagactgactgactgtactgaaaaatgtgtatttcatgtcattttctcttgctttgctttaacctcctatttttcagaccttgggcttatcattcagggtgcttttcagaaaggtaactggaggctggagaggggcccctacttcacctccgtctggagaggcgtgatgctgttggataccctgtcgctggcaacccacctgcccagtacttgaatcttgaaattctgacacattgaatctggaaacattgccatatcctttagtttttcttttctctgtggctttggactttgaccttctcatttttatgttcatgccaccatcctgaatctaaatcatccttggtctatttctgggttatttaaatagctctctagtcagttgtcttgtttctagtttctccccagaaaacatttcctacgtactattttcttttcctttctttagcaacctgtccttactgtgtgaaatccaaacacctttgttccagccaagttcgtttactgctcccatttatcaactgtcatttctttcttttgaatctttgcgttctgtacaatcttttctctgttttccatattattttctctctttttgtccccatgctctataaaggtttgacttatgtaaaattttctccctgcttctggctgccaattcattgtcccccttactctcaaaaagccttctcgaaactttgtcttcctgaaagcctttcttaagtaacgcctccttcatttggatatagtttgttcttactgatatgattgtgatgataatgaattacgtagactttgctaattgcattcattagttctaatggcatttttatagatttcgatgtttttttaaacaaatatatcatttacaaagaaagacaaatttactttccagtctttgagttctaattcataccttaatgtcctggctagtacttcgagtaccatgctgaacagaagtgatacgagtgggcattc

SEQ ID NO: 29122 - DNA, 1455 bp, Homo sapiens
atcaggtttcaccaccaatgaattccagaaaagttttggttttcagaagtttttggattttggaattgtgggtaagggactgtagactatttactttcttagctctaatgtttgctagcatttgttactctctgaaaatggaacccactttcctttttttttctgctacaggatgtaagattaaatctgttctttctctataggccagttaatagaaattaggacacctcttcacaaagctcaataccttaggcagttgccactgtcccctgatacctccactagatacttcctactccttgctggctttatatgaaggatctcatagttcccctcttctcctctctcctttcggaggtacctcgtgttaataaatgctaagtaaaagagatttaaaatgtacagtacctcatgtaatatctatcctatctcaaatagaaatgtttcagaaggtgcaacatgctttctctggaccgacttttcctattaccagcgaatgtggaagcttaaaaagtaacgtatacttgtgtgtcatttggactttggtattaccataagggaatatatacttatgataacatgaaactccaaatggtacagaagtataaaggaaaagcagaagttttctcttgccctactgcgcccctcactcctccagcttctgaccacaaggtttggacccttttaaaataatttttttctttagctcagacattccaggggacagtttggggaattctgattaggcattataaccccacttggattgattttgtgttcattgtatgttaaattatggagatggccttttctgtgttaactggcagttatagcttttatttctagagcgatttgttcagattgcatggttttgaactgttaattaaatactttttgtttgtttcgagaccggatcttgctccatcgcccatgctggagtacattggcgcgatcatagctcactataacctcaaacacctaggctcagtcttcccacctcagccttttggaaagctgagactgcaggcatacatcactacgcctgactgatttttaaaaatctttttgtagagacagggtctcactgtgtttcccagactggtcttgaatgcctggactcaagcgatcatccaacctctgcctctcaaagcactgggattacaagatacattttttaagaatattaattgtgacagattgaaagtgtctgagtattattcagacacagagattgaaatataaattattgatctatttaatgaaaaataatttttaggagtcaaaaacagcatataatatatttgacagtgaggtttccctaacggagcgcttacttaagaaacggggtgttggctcattcaccaagtcagttgttctcaaggtaagcatgtgggcagtgggatgcagatgtcatcctactaattattcccaaggatgttgttgacattatttatg

SEQ ID NO: 29123 - DNA, 1092 bp, Homo sapiens
aggagggagaacagagaccccatccttacctgccccatcaggggagttcaccctggtgatgggtgaggtgtcaggtggcatagctgaaccatccttacatctcactggggagtttggactgtgttgtctgtgggctggaaggcttttgaacttgttgaacaaaggaatgacatgatcagatttattttttattataagagcaatttatgctctttgtaaaaacttgatgtttatgaagtagaaaatggaaaattcttgcatcctattcctcaggtgtgtcctttttttttgtttttgtttttgttttaagacagccagacagggtctttctctgtttcccaggctggagtgcagtggtgtgatcatggctcacttcagtctccaactactgggctcaaacagtcctcctgcttcagcctcccgagtaactaggactacacgtgggtgccaccacacgcggccaatttttaaaaatatttttgtagagattgggtcttgctatattgcccaggctggtcttgaactcctggactcaagtgatccaggcctcccaaagtgctgaatttacaggtgtgagccactgcactctgccaaaggtacctatttttaaaggctgttggatgtcttgccagacttttctccatgctttcaggtatatcatacacacacacacacacacacacacacacacacacacacacacacactgtattatacattgtatacattatatatacacgcagataatgtataatgtaatatatatgttttatatatttatttgtatatttttgaccaacaggggattaagatatacaaaatgttttataatggcgtatcttatttacttatttaagacagggtctcgctatgttgccccagctagcctcaaaatcctgagctcaaatgatcctcccacctcagcttcccaagtaactgggactacaggtgtatgccaccactcctggctggctcttattttaatctaacaagtagttgttagattaaaacaactttaaataaatacatttgtatacttgtgaggtgtgtgtgtgtgtaagtgtatgtaaaatccacccttagagggggaat

SEQ ID NO: 29124 - DNA, 1073 bp, Homo sapiens
ttgagactgggtcttactgtgtcatccaagctggagtgcagtggtgtaatcatggttcactgcagccttgacctcccagactcaagcaattctcctgccttagcctctttagtagctgagactacaggcacatgccaccatgccccgttaattttttacatttttttgtagagatagggtcttcctgtgttgctcaggctgatctcgaactcctgagcttaactgatcctcctgcctcggcctctcaaagtgaagtgctaggattataggagtgagccaccacgcccggcctagaggaattcttgcagccggcttgcagtttagcaggacctggggattgatttaacccaagatccactgaacattcccaccccttctatgaattccaagactagtttggctgctctgaaagagaagagagaaaactggagtggttcacagttttactgctgcagctgtacctgatcagatggtaggattaccgtgtagttctgagcatttcaaagcagttgtggaggaatttgccgctatttataccttggaaggaaaatagtgctgtaggtaacttcaactagataatttcaaatgttgattttataattaatttttatgtttattttgaatacgtgtgtacctgatacagaggttcacagcctggcagagaaagtaatgcagctgttctgtaaaacctggattcaagagtacttggaaaactgctcagtttccctagcctacctgtcctctaccttaattctttttttcccctcccttctgaatacaggcagtgtctgagactcactgccaagcaggctagggactgagtgacatggtctctttctagccttgtctgttaaggagacatgtaatgaacaactttacagggttggcacactatttggactaatgatagatccagagaagaggctgtgttttaacctaagcgggaaactttaatcagaatagggaactaaaaattagtgttattctcttgatagtctctgcggttgacaaaaaattaatgaatccagtcgtcctctgaagtgctgagggtcagacataaccacgtagcctcg

SEQ ID NO: 29125 - DNA, 1999 bp, Homo sapiens
atggcataagcctatttttaaaaaaacaggtggaagttctgtactataaaggatatccatttctcaaacaaaccagtctttatctttaaaaacctctctagtaacccttatcctgaatcagcttatttaggtattcaggaaatgttgctgggcagattctcctacaagttttatgttatacaaactgtacttctttgagagtttcaaacagccccagcaagttggaatgccatgtgtcgtatccttaccattctcccttgttttgttttcacaagtctcatactgcctggccttttcacagatgaattctgttctatttctgttttcttctgggcctggtcagctattacatactgaagtgataaagcagaaatcagtcgtctcacaaggtgctgtgagcaaaggtgctgtgttcttttgtttgaggcaacaacaataaaaatatttacaaaacaaattttttttaaatctcagaactgcagttggcaaatgattattactatactttgtaaatatgattcagtctggatagggaatctaggaactgagtaatttttttgcgtgtgtgacagagtctcgctctgtcgcccaggctggagtgcagtggcacagtctcggctcactgcaagctccgcctcccgggttcacgccattctcctgcctcagcctcccgagtagctgggactacaggcgcccaccatcacacccggctgatttttctgtatttttagtagagatggggtttcaccgtgttagccaggatggtctcgatctcctgaccttgtgatctgcccgcctcggcctcccaaagtgctgggattacaggcgtgagccaccgcacctggccggaactgagtaattttttaataaaagtaatgtaatataagcttgtcagaaaacattcaaacagcaattgtgactgtagaaataaaggtgagacctggccaggcgcggtggctcacgcctgtaatcccagcactttgggaggctgaggcgggcagatcacgaggtcaggagatcgagaccatcctggttaacatggtgaaaccccgcctctagtaaaaatacaaaaaattagccatgcatggtggcgggcgcctgtagtcccagcaactcgggaggctgaggcaggagaatggcgtgaacccagaaggcggagcttgcagtgagccaagattgtgccactgcactgcagcctgggtgacagagcaagactccatcttaaaacattaaaaaaaaaatttaaaaatttaaaaaaaaagaaaggtgaaacccttcccttcctaatcttcctaaacattttctgtacatttttaaacaacaattaaattgatttttctcccaatatcattcttctaagacttaacttttgtaatttgagatattttcagtctatttctttttctttttttttgagacaaggtctcactctgtcacctaggctagggtgcaatggtacgatcatagctcactgtaatcttgaattcctgggctcatgggatctttttgcctcagcttcctgagtgcctgggactacaggtacataccaccgtacccagctaattaaaaaaaattttttttgtagaaatgaggtctcacgttgttgcccaggctggtctccagctcctgggcccaagcagtcctcctgcctcagccttccaaagtgttgggattacaggcatgaacctccttgagcggcctatttcattcttttaaacgtctgtcaaacattctgttgaatggatatactacagtcattcttctctaagagatattttgggccaggcgcggtgactcacgcctgtaatcccagcactttgggaggctgaggcaggcggatcacctgaggtcgggagttcaaaaccagcctgaccaacatggagaaaccccgtctctactaaaaatacaaaattagctgggcgtggtggtacatgcctataatcccagctactagggaggctgaggcaggagaatggcttgcacctgggaggcggaggtt

SEQ ID NO: 29126 - DNA, 1033 bp, Homo sapiens
ctttttaaatttttatatagcaaaatcagcctttctggctttcatgttttatgcttgccttgagaagtctttcctatcctaacctgataaaatatctttaggttttctattttagtttttacatttagatgtttaattgattcactactcagttttgtatatggtgtgaggcagagatctaacttaatttttttccaaatggttctcattcattggtattagcctgtacaaacagcccatttcacttacagaggctggtagagcacatgactaatgtaacttactcaaggtcacagagcagattcttgtaatgattaggactaaaattatgtaattagctgatctgtgccactttctttatctccccatttaacgttttgaccataggttcccaaaacctcaaaaaattattttctgtgatgtttatttcaatagaactaagttctattaagaggcagattaggtagctgtatatgtagaaagctcttgaaaaataattgacttgtgatattgagaaatatctgtgctaaactattaatattctagatcagttgtgctgaattctggtatttgtatgtgaataagatttataatgtatatagctgtaaacactttatgtgtattgtttccatggggtttatttactattagtctatctaatgtaatcatttttctgggatattgtctttgagaattatattagcaaatcagacaagcaaagtttattgccatataattactacattaaaattacacagctttaattgcatgacgtgtttactgcaggagtaaatattaaaactatgacagcttttaaaaaagcagctaagcaggtacttgctcatagattgtgtttgaccatgctttttgagaggtcattatagataaaatgcagacgggcttttgatttggtcttatttatatttgtgatggtctaaaggtttgtgggaagatcacttgttctaattttgaagccaaataccaatttttattttttttgagacagagtttcgctcttgttgcccaaactgga

SEQ ID NO: 29127 - DNA, 1082 bp, Homo sapiens
cacatgcagtgtctgtaggcggagagtatgagataacagcatttcacaaatgaaagtgagtggaaaagggctgcttcccctttaaggcagtctcagctccagctccctcccctttcctgattgacaaacctacccgaagtcacatgatctgcctctatttgaaggtcacaaaaagctgcttcctttagagacagagagggagagagagagcaagagggagagtgtgtgagagagagttagttcaagccaaaatggccgacagagtctctgctggtttctgaatatttaaaatacaaaaaaacagatagacaaaaagaattcattttttggaccttttttcatttccatttctaccttgtatgcctcaatttgctggatttaagcactgctgcactttatgaggttggtaaatattttcaattttttttaaccaattgatttatatggatcttgtctaaccgttttcactggtggtgttgcaaatcgacatttgtctagcatggagactggcttcagacatttcgtggatctgtgtaaatcagacccgtgatgtactttggttcggcattttagaaatggaaaagacgtggtaaaatatttagattttgaagtgatttaattgcacttttaatgtatatgcagattttcatcatcgtttctatcttgcaataaatgaagctgcgagtaattggaaatttgctatttagaaagaggtttttaaaaaacacagacctccccctccccccttaaatctgctgcaaaaatttgcataaatataaatgggtttgcattctttcggctgctaaggccgacaaaggatctgggagggcaagccctagaacgggaaagcctttttctatctttttattttttaaactgggccctccttcctagagagatgtaaaacctaaagtaagacctaatacattttaaacatcaggttgggggcgggtgaacaccaggaggtttggggtttgtagattcccctgcttgaaaacctcccaagcaatatgtggctcacccctctcctttctgcgcgcgctcatttgcactgggtctctgtgtgtgttctcaaatgtgca

SEQ ID NO: 29128 - DNA, 1052 bp, Homo sapiens
aattggtcttagagtttacaaggcaaaggagaacattgaatacagcgttttctccctcattgtgattattctgggcccacacatgtaaattctgtttatttgactaaattattactaggttgtttttttttttttaatatgagatggagtcactctgtcgcccgggctggagtgcagtggcgtgatctttgctcactgcaacctccgcctcctgggttcaagcgatgcttttgcgtcagcctcccgagtagctgggattacaggcgcctgccactacacccagctaattttttgtatattttagtagatacagtgtttcggcatgttggccaggctgatctcgaactcctgaccttgtgattcacctgcctcggcctcccaaagttctgggattacaggcatgagccaccgtgcacaacagccagttttgactcaatgggcaaaatgaaaatttaggtccattgcccactttatacaatgctgttgaattaatatgggtgacagaaaaatggctttcattcattgacgttggaatttgttttttaaaaaacttagaaaatgatctgtttactcattcattctgcaaataattactgagtgcttttcacatgccaggtgttgataagtacaagtacaagcctagcagtagtgtgaagattttctccagacacgactgctgaagttagagaatagatgcaaggggctggctggtgctcagggtgttggggggttaaaaagggtggacacctagagagataacagcttctgcaaagaccacggggcactagtggacattggcatatttggggaacagcatagagagtactttgacatggttggagtgtcgtgtgcttaagggaagaaataatctgagaaatgagaggtaagctgaaaaactaagccttgaccagatgcagaagagtgtataagccacgtttgaaagtctttttcctgagaacagttgaagggttttaagtgggaaagtcacttgttcagattggatttttgaaagacgattctggtgtgttgtggaaactggctgggacattgca

SEQ ID NO: 29129 - DNA, 1046 bp, Homo sapiens
tcaccttcctcagccctctacttttcatccctattcgcttcttaataaataaaagcgaatcaaaaagacagcaaagagaaaggagaaacattttataatgcagagttttgagcaaaatacttaactctgtgtctttatatgccaccacatctctttaatttttagaggatatgaatattttgtcgtttgtatttcataagccatctgtactgtgttcagactctgtgggttctttgttgtttaattataggaaaaggaggtatagggcaggaactttttacatacttgtgaattttggtcagtcctgtgaaatgtaagcctctggcatttattcacggaccattgggataaaccaggcatgtaggttcaattttttttgcctttgttgggatgctgtggccagtagccagggccagtcattccagattcatcccctgccactctagtccccagggactaacagagtccagacagtgtacattttcctggctacgggcttgaccttctgcttcctctgtcccactgcattccaaaaatgctaacaagtgactagcgagcgtaaattttatgtgttgcaaaagcagttgtggaacttgggtttcaatgtttgcaccactatttgtaagcaggatgttatctctaaatgatacatgtgtaactgacccaggggggctgcctggcctccttgatgctcttctgtgagaataattgactctggtagtgacagagctgcctgcggctactaagaagctctgctgtacttaggccacctgccattgttctgtctctgctgctgctgctgctttttctatttttaataagttgccaattacttggtttttatagtgataccaacagttcactaaaatgggcataggaaaaatgtagttggtttctaaccttcaatttcacttatccagtgaaattaatgacattaaacactttcatcagttattattgtgaaagtacaggtacatttttatcttactgaacatcatggtttagtttttccattttgaagacagtatacaactatgtagctaaga

SEQ ID NO: 29130 - DNA, 1025 bp, Homo sapiens
actcataaaattggcaaaaattaaaagaattaagaaaataccggccaggagcagtagctcacacctgtaatcccagcactttgggaggctgaggtgggcagatcacgaggtcaggagatagagaccatcctggctaacacggtgaaaccccatctctactagaaaaatacaaaaaattagccgggcatggtggcgggcgcctgtagtcccagctactcgggaggctgaggcaggagaatggcgggaacccgggaggcggagcttgcagtgagctgagatgcgcccgtctctccagcctgggcaatagagtgggactccatctcaaaaaaaaaaaaaaaaaaaaacaaaaaaacaagaaaaaaacaagttttggtgtggttatggaatagcaggagcttttacttttctggtgggagtgtaaattgttgaaaccactttggaaaagagtgtagcaatgtctagtaaagttggaaaacatggacactctatgagccagcagtttcagttgtgggctggtaacctaccccacagaagagctgtatgcatgtacaggaggcatgccctaagatgtctgcagcaatgtggcttgtcctggcaaaaattggaaaccttaatgcccatcagtaggcaaatgtataaatacagcgtggtactctttacatttacatgaattttagggacatagcattgtgtgagaaaaacaagttgcagaagaataaagtaataaaattccacttaagaaactcagaaatacaactgaaatgttgtttaggttaccaagcatggtgtggtcaatcaagggagtgctaagttaaggggaagttaacgcttgtggagtagggaaaggtgggattatacagggggcttctgagtaccggaaaggttattccttaagctgagtggagggtatataaaagttattttgtatgtattaaatatgtaataaaaatttttctccagaagttttattattttttaagagtggaaaaataacacaaatgtcatctccatccaaaaagtaattc

SEQ ID NO: 29131 - DNA, 1093 bp, Homo sapiens
tcgcttccttcccccacctgaaagggtttaactataaaacagagatagaaatatctgtggtacaagttcactacacagatcaagtagtcaagtgagatgagacagacagtgagtaagaaaaagctgttgtctctcagattctgtgggaatataggcacagatgatgctcatcctaacaccaggcattggccccctcactgagcaagcctggtaatgttatttgttcaacatgcaaaatttgatctttaaaaaacagctttgaaagtaacatggcttggacagtctttttcttaaaattggtaagggagtttgtatatcagtttctgcttctctattcattgaaaactgttaacactttggtaaaaattattttctttaccattttatacgcacagctttcagttgttaacactggtgtagaatctaaactcatttacactatttaagtttgcccctttgactgcagtggagacggtgttagggcttaaataaagactggcttcagaaactattaacatattgttggtagcaaacattcattgataaccgtctttcctagaacttaattaaattgtaaggaaaatattctttacctgtcaccttagtccaggaacctggaaatatgcttgaccagagtttcaaaaccttggaaatgacatttggggctgggtaattctttgttgtgggggccatccagtgccttgtaaggtgtttagcagcctcctaagccttctacccactagatgctattagcaccctgccacctcagtcatgacaaacaaatgtctctatatattgtcagatgtctcctgaagggcagaatcatccttgctgaaaaccactgtcttacactcttctttttcacttccctcccacatttagtcagttaccagcccttttaatactgcttcctgaatatcttagtgagatttcttcttcatcttcttcttcttttttgagacaggatcttgctttgtcatccaggctggagtgtagtggcatgctcctggctcactgcagcctcagcctcctacgtagctgggactacaggtgtgtgccgccacgccagctaatttttttattttttgtagaa

SEQ ID NO: 29132 - DNA, 1275 bp, Homo sapiens
tccccttttcagtgactagttaataactttatgtctagttaacaattttttatattctttgtatgacaatctgtatgttaagatgatgagtgtgatttctgtctcctatgtggacctcgactaatacctcgtgaacagagccaccagctcagcatgggctgcatctcagcttctccttcatacatgctctgttctctgtagccagtgaccttttgaaatgtaaatctgatattcctccccttcagatccatcagtggattcctatgctctcaggtaaaagaagaaaattcttgcagggacgtgagtggtctggctcatttacaagcctggtctcatctcacacttcgcttcccttcatctttgtgatgcagccacacaggtcttattttagctcctcaacagccacattgctttctgctgcatagccttggcccatgccgttccccctagttagatgccccgtctgcttcttacctagtcagctttttctttcttgggcctcagtttaattgtaacttcctggggaacacccttttggcctccctggcaaggtctgttccccgaccgcatgcactcccagcccctcatttcccttatggcacccacagtctccgtgagcatttgtatgtgctactctctacagcaggcctctttccccacctgcactatttagtttcatgagtgcaggaactaagtcagtgttttttttcttgctgctgtgccccagagcttggcacattatatatgctcgataaatatttgttgaactaaaagtaggaagagaccatttggtgaatcagtttttaccataagcgtgaatcccatgaacccaggacgcagaggttgtagtgagtctagatggcgtcactgcactccagcctgggtgacagagtgaaactctgtctcaaaaataaaaaaacagaaacaaaaacgcaacacctctatattaagtggttctttctaattttttagaaagtctctcttgctgtgcatttaactacttcagtaaaaatactgacaaggagccaaaccaggagaaaaaatctacttattaaactggaaataatgtatgttaggttgctgccttctctagtattcatcgggaaagataatattgaaaacgtacatactcagttgaaacctaattctcatagtggtttctgtattaccacccctccttaaaagacaaacatgaattatcctacttcgtttccttgagttgccatcagtcccaaattggaggttttgataccacgaacccacagcgcacaggta

SEQ ID NO: 29133 - DNA, 1022 bp, Homo sapiens
gtttttatttaaattcgagataattatatattcaaatgcagttgtaagaaataatctcttttatccttttatgcagtttcccccattggtaacatcttgctgtattctctctctctctctttttttttttttttttttttttttttttttttgagacggagttttgctcttttgcccaggctggagtgcggtggcatatcagctcactgcacccttacctttgcctcccaggctcaggcaatccgcctgcctcagccttgtgagtagctgggactacaggcgtgcaccaccacttccagctaatatttatattttattgtagagttggggtttcaccacgtcacccaggctggtctcaaactttgggacttgagcaggccacccgccttgtcctcccaaagtgctgggattataggcatgagccaccacacccaacctgtattatatttttaaaaattgaatgcctctagtttaaaaaggtatatagttgtgttacagccaatagcatttccttctctgactcagtagtaatactaggtttttttttttgaaacggagttttgctctgttgcccaggctggagtgcaatggcgcaatctcgactcaccgcaaactctgcctcctgtgttcaagcaattctcctgcctcagcctgctgagtagctgggattataggcgtgtgccaccacacctggctaatttttgtatttttagtggagacggggtttcaccttattggtcaggctggacttgaactcttgacctcgtgatccgcctgccttgacctcccaaagtgctgggattacaggcgtgagccactgtgcccggccagttttttgttttgtttcaaggaatctctgttcacatataaaaaattgcgtaaaagccccccttttcttacgtacatgatatcatcaagtacacattttttgcatcttgcttttaaaacttaacaccttatcttgaagacttatcttccttagtacaaaaagaactgcttgttataattgcatagtattctct

SEQ ID NO: 29134 - DNA, 1029 bp, Homo sapiens
atcacttgataacaggaattcgagaccagcctggccaacatggcgaaaccctgtcgctactacaaaaattagccgggcgtggctgggcgcgatggctcacgcctgtaatcccagcactttaggaggctgaggcgggcagaacacgagatcaggagatcaagaccatcctggccaatggtgaaaccctgtctctactaaaatacaaaaaattagccaggtgtagtggtgcgcgcctatagtcccagctactcaggaggctgaggcaggagaatcgcttgcacccaggaggtggaggttacagtgagctgagatctgctgcactccagcctagcaacagagtaagattccgtctcaaaaaaaaagaaaaaaagaaaagaaaagaaattagccaggtgtggtgcctcgttcctgtagtcccagttacttgggaggctgaggtaggagaattgctaaaccctggggccggaggttgcagtgagccaagatcgcgccactgcactccagcctgggcgacaaagcaagactcgtcacaaaaaagaaaaaaaaattatcagccggtcgcggtggctcatgtctgtaatcccagcactttgggaggccgaggagggtggatcacaaggtcaagagatcaagaccatcctggccaacatggcaaaaccccgtctctactaaaaatacaaaaattagcccagcgtggtttcatgtgcctgtggtcccagctactcaggaggctgaggcaggagaatcgcttgaactcaggaggcggaggttgcagtgagctgagatcgcaccactgcactccagcctggcagcagagcaagactccgtctcaaaaaaaaaaaaaattatcttactttatttggtttgagtaattccagacaagccaattccttgcatatgccttaaaatacgtaaactgggaaattcatgaaaagcttggagtcagagggctatgtcggcaaaagtctattgccatatttcatggattctgagcctcacgttcttttactcacttgacatctctgaagt

SEQ ID NO: 29135 - DNA, 1069 bp, Homo sapiens
ggcaccctgtgaatcgaatgcatggcagcttgacagagagagagcactttgtttgcattgcttgatgtaaagtccaggaaagccattcattatataaaccactgggattagtcaaaagatgagagaggatcctagtatgcgatgtgtattggtgattcttggaactgaggtttagtgttccgtaagtgtgtgctcttggcataagggctaacttaactgctgttgcttattattttgggggccttttttccttctcagactagagtgttacaaatttgagcctccatagttccaccgtcatatgtgttcagggcataattggacatggggcttgtgcgaaggcgaatctttagatgcctgtgttatgtttccagaatgctaggaggatagagaaaatgatttgctacattgcaatatagaatcttcggaggattctaaaataatactatagtttttaaattagatttttaaactcagtatttctttttgtgggccctggattttgagctttgttaaaaactgtatgtagaaataagggatatttagctgaaaggttctactagaagttttgagagtttttggccgggcacggtggctcacgcctgtaatcccagcactttgggaggccgaggcgggtggatcaccaggtcaggagatcgagaccaccctggctaacatggtgaaaccctgtctctactaaaaatataaaaaaattagccaggcatggtggcgggctcctgtagtcccagctactcgggaggctgaggcaggagaatggcgtcaacccaggaggcggagcttgcagtgagccgaggtcgcgccattgcactccagcctgggtgacagagccagactccgtcttaaaaaaaaaaaaaaaaaagttgtgagagtttttaatagatgaatactaagtcaactaacagctaagaaattctaaatatcttttaaagtttattaacagatttcaacttaaaatgtcttttggggtgatattaaaattcagagcttgaataccattaggcattggcaaagataatgaattgatggttgtcaccagtaggatgcttta

SEQ ID NO: 29136 - DNA, 1033 bp, Homo sapiens
tctgttcaatcttccaactctactacagagaacaacaatggactaggaaattggaggaatgtgagtggtcaggatagaattggacctggctctggcttcagcaactttaacccaaatagcaacccatctgcctggccagcactggtccaagaaggaacttctaggaaaggggcattggaaacagataatagtaattccagtgcacaggttagcacagtaggtcagacatccagggaacagcagtcaaagatggaaaatgcgggtgttaattttgttgtctctggcagagaacaggctcaaattcataacactgatggaccaaaaaatggaaacactaactccttgaacttaagttcaccaaaccccatggagaataagggaatgccctttggaatgggcttggggaacacctccaggagcactgatgccccttcacaaagcactggagatcgaaagactgggagtgttggatcttggggtgcagctagggggccttctggaactgacacagtctctggacaaagcaattctggaaacaatgggaacaatggaaaagagagagaggactcctggaaaggagcttctgttcagaaatcaactgggtcaaaaaatgactcttgggacaacaataacaggtctacgggtgggtcctggaactttggcccccaggactctaatgacaacaaatggggtgaagggaacaaaatgacatctggggtctctcagggagaatggaaacagccgactgggtctgatgagttgaaaattggagaatggagtggtccaaaccaaccaaattctagcactggagcatgggacaatcaaaagggccaccccctccctgaaaaccaaggcaatgcccaggctccctgttggggaagatcttccagctccacaggaagtgaagttggaggtcaaagcactggaagcaaccacaaagcaggaagtagtgacagtcataactctggccgtcggtcgtacaggcccacacatcctgattgtcaggctgtcttgcagactcttttgagccgaa

SEQ ID NO: 29137 - DNA, 1047 bp, Homo sapiens
gatctgcccacctcagtcttccaaagtgctgggattacaggcgtgagccaccgcacctggcaacttttctattttagtctcttactgtgcctaatttgtaaattaaactttgtcttaggtatgtatgtataggaaaaacatagtatacttagagttcggtactattggtggtttcaggcctccactggggggccttggaaggtgttcccctcagataaaaggggactactttatctggataatgtttctttcatcacctaaaatttatctagagagcatctatcctaaaaagtctgttgtggcatatgctgacatgcttgtgtaatctattgttacttataaaacaatgctaagagcatttctgtgatcattttctgcaaagaactacagagaaactgcctgttttcatcctgcagggtgtctaccactgccaccagtagtacagctttttaatctattcaatagtaatctgtttatcttccaaagaaatgaactgaaatggtggactgatcttaaatacctatttaagatcttgatgggacaggcgcggtggctcatgcctgtaatcccagcactttgggaggctgaggcgagtggatcacaaggtcaggagatcaagaccatcctggccaacatggtgaaaccctgtctctattaaaaatacaaaaattagccgggagttgtggtgtgcgcctgtaattccacctactcaggatgctgaggcaggagaatcgcttgaacctgggaggtggaggttgcagtgagtcgagattgtgccactgcactccagcctgggcaacagagcaaggctctgtctcaaaactaaataagtaaaaagatcttgatgcaaaataagttaatcagagtgaataagtttgttcatccaactcataggttaggaaaattgtccctaatcgctgaagatcttaagtggtgaaagtctaactggggtgaggggtacagcctttggtcaaaatgcctgatgtcagcacaggacatagagaagtaggcagaaatagtctcaccttgagatgggcaaagtagggg

SEQ ID NO: 29138 - DNA, 1755 bp, Homo sapiens
aatttcggtatttaaatacttttttttttttttaagcatcaatgtagtagtactctgggccgaacaggggtcaacgtttaatctacagttatcaccaacatgtatgtacttatgtcggaatcaaaatgtatcaaactgcttattgtgaagagaattatagcagacctgaagggggcgaaaaaccagatagggtggggggatggatgccggtgacgtgctagcacttgtgtggacatcccagtctgcattatgctgtttaacataaagtgccgacattttgtaccagcaaatacctgcccattccaacccttggtgggagcagacctctactgtcctctgtaacttgctgctattgaggacaagggagtttttctttctttagcgtcttcagtgaaggatacaatacaacaatgcctaatgtatttgactttttagcttgtgtctgtgtgtaggtgggtgggtgggtgtgtataggaaaagcctaaaacaagttatttgcatttcagtggttttgtgagacaaagaatgggaaattctgtagcccttctggcttaccctgttgattataaacctagcctcaaaagagattgacaggcatgactcaagtgagtgttcacatatacaagcctgcatgagccctctgtgggtaggtggtcacacttggcatctgcagcattgacgtggccccgctgggtgccttgagcatgccctcttcctgctctgcaatttgaatcaccaccgtgccccttccaccactgttccccatgcaaaagctctgcttccagcagcccccactgaccgctctctgtgtggagcaaagtgctgtcgtgcggtgaccaccaggtgaagagcagcttgtattcagacatctagagaaggttaaatcttagtgtccctgggccaggagcatatcccaaggctcctgcgagccagtggcgaccctgtccactgccgctcttggttcactgctgtgtcctgccccaccctcctctcctcctgcctgttggttccttgacctgcactatgggttagttgagttccttacgatactacggtgaaagccgggtgctagagcccctcttgtttacaagacataatgagggatttgaaatatgtaaaaataaacatgagaagctaaaatgttcttccatcataagcttaaagggaaaaaaactaaaaactttaaaaaaaaaagaccaaaaagtgcgtatatatatacatataaatatatattttagatgaagactaactctgggagcatttaacagtgttttttgtttctgtttttaacatttgttttcctgctttaaaatttgcaagcattctcaggaattctagggtaggaagccagttttttgaagatggtttatttaaccatatcttatcctagagagatggctgtttctttcctgttaataaacttttacaagttcctgaaacttcagaaagtttaaacaatttttacttaaaaaaatgtaaaaagaaaagtctccaaacattattgtcatactggggatcacacattttaaaacacatagaaatattttttaaaaattatcaatttagcagcaacaggtaaattcattatcttaaaaatatgggagaaggattaagctttgtaagagctcgatcatggattcttttgaaattgtgtgtagtttaatgggagagtgtttggtgtatatagatgagaatgccatcactttgttcctttccatttgagactgaactgaaatctcccctagtaatttttat

SEQ ID NO: 29139 - DNA, 1084 bp, Homo sapiens
caaacaggtaacaggaaggtacagcaaaaatcctctcatctgaaacactgtcagcagaaacaaaacctgtaaaaatgactaatcagctgcacatattgatgctctctgcaagttacctttaagtgttttttttttcttatacttgaagttgcttttacgatattattttggtggctttcttttctctctttgatgggcaatagaggaagtagataatgggatttaaggacgcctgggggagaaaagggaggatgtggcattgtctttttttttttttttttttttttttttagcatagaggtttaatcaaactcccatatgttgaaattgctcctcatattactggttttacatggacacagaaactaggcactttagaggtgcacttgcatggcaggctgggcccccttttctatattttattttcctttttagtatagtggtacttaaaatcactggttcacttaaaaaaacaaacaataaaatgttaaactctactaatgtacaaataagctgaaaagttgcattttatgtgtattttttgccatagcaggtactgtatttctcatgctggatttcaaaaaaaaaaaaaaaagtatcaaaaacaaaaaaaactaaagggtggtgttttattggattgtgacaggttgagtaataaggaattaagtcgtcgtcatttcattaaaactgagagatgatgtaatgcatatataagagttttctgaagggttttttttgggcttttaaacagcttatttttgtttttgtttagtttttttattttattttattttggaaagatatgattgtattatgtgcaactcagttgcttacattataactacaaaatatttttgggttcctggaaaaaaaagaaaaaagactaataaatgtgtttggctgctaagcatttactattgtggtttcctgttttattctgccagtttaatttgctcatttgttgaatgtttatatattttttcttattcttctctccctgctccacatgtaaaagctgtcagaaattcaacatttgaatttgggccgcaactctgtctaccttgtcttgtcatgtttttgttag

SEQ ID NO: 29140 - DNA, 1075 bp, Homo sapiens
gtcaaggtgggcagatcccttgaggttaggagttcaccaccagcctggccaatgtggtgaaacgctgtctctactaaaaatacaaacattagccagatttggtagcatgcctgtaatcccagctactcaggaggctgaggcaggagaatcacttgaacccgggacgcggaggttgcagtgagccaagatcgcaccactgcattccagtttgggtgacagagcaagactccgtctcaaaaaaaaaaaaaaagaaaaaaatctaaatgttcaataataagagaataagtaaggcatagtattcatacatccataggttggaataacatgcaaccatttaaatgatgcttacaagatctaatgtgcaaatgcacttaggtttgtgttatggtaacaaagacagtttataaattgcacaaaaattggttgaaagtacaccatgatgtaaatgttgattactctggtttatgagataataggaaaattaaatttctttctactttttgagttttgttttgtttttggagagggagtcttgctctgttgcccaggctggagtgcagtggtgtgattttggctcactctcactacaacctctacgtcctgggttcaaatgattctcccgcctcagccttcctagtagctgggactacaggcgcctaccaccatgcccggctaatttttttattgtttggagagatagggtttcgccatgttagccaggctggtctcaaactcctgacctcaagtgatctgcccacttgagatccgcccacctcggcctcccaaagtgctgggattacaggcgtgagccaccgcgcccggcctagacatttcatataaacagaatcgcatacaatatgtgaccttttgtgtctggcttctgttgctgttttcaatatccatgttgaatcagaacttcggttctttttatgactgaaaagcgttccattggttgtaccatgtttcatttacccaattgtcaacaactgatggacatttgggtaatttctactttttggctactatgaataatgctgccatgaacaagtccatgctaatttacttctttctttgc

SEQ ID NO: 29141 - DNA, 1029 bp, Homo sapiens
ctgctaaaagaccctagcaacagtttggagagttggctgtaaggagacagggatcatgtcagaacaagttaggggctactttaaaagtctgaggccacattggtgcagtggccatgtaaatggagaggaaggatatagatccagagtcgaaggcagactggccagcccagccctggtggttgaccggagtgagtataaagagcttggtgagtggggcgctactgccatttactgaggcaggagctacaagggaggaatggcaggtatgtaatggtgagtaggaggaatgagaaagtggctgagttcagtttggggattgaggtacccatagatcaaccaggtggacgtctcactcagtaggtatgaggtctggcacttgagcaagtggtctggcctagaggtgacagatttgagggtcgtgaggttattggggtaatcataagattgaaggagattatccagagagtacagtcagtagggcaacttgttgggacacacactgcatttcactgaaattatttgtttaaagacatactgaatggctatttgttttctagacggatctgtttggccgaggcatttcttaccgcagatactatattgaatacgctgcagaacatttctgaaggattggtcgtgtaccccaaagtaagaagcctcaattcaaaagtaaagtactagggaggggttagaatgtgggagggagggtgctctggggtgtgttgagggagctgtattctgatccgataggcattcttcccacccgagctcatccttcagttcataagctctagggaactagctctgtggaattcatagacacattatagaaacagaaaaagaagtattttaaattgccttaaactatctagcagcatgaatcatcagctctggtgtgactaggcagagtagatgtctccatttgcctgtttttaagtacttgaggcagatgggttcatttctctcctatacttagctcttgaggctgagcactgatatgtaacaaataggggttttaagaattctttc

SEQ ID NO: 29142 - DNA, 1038 bp, Homo sapiens
gaggcgggcagatcacctgaggtcaggagttcaagactagcctggccaacatggtaaaaccctgtctctactaaaaatacaaaaattagctgggcgtgttggcgggtgcctgtaatccgagctactcgggagactgaggcaggaaaattgcttgaacccaggaggtggaagttgcggtgagccgagatcgtgtcattgtactccatcctgggcaacaagaacgaaactccatctcaaaaaaaaaaaaaaaacctcttcctatgtggcaactttttttaagttaatatttcctttttaaaaatcaaaagtctgacagggcgcggtggcttacgcctgtaatcccagcactttgggatcacgaggccaggagatcaagaccatcctggctaacacagtgaaaccctgtctctactaaaaatacaaaaattatctggacgtggtggcgggcgcctgtagtcccagctactcgggaggctgaggcaggagaatggcgtgagcccaggagacggagcttgcagtgagctgagatcacgccactgcactccagcctgggcgacagagtgagactctgtctcaaaaaaaaaagaaaaaaaaaatccgaagtctgagttagtaagaaaactgaaaaaacatcatatagaataaaacaacttgttactctccataatgtggtagttagtgtctgtgctgtgcattttgtttgacatcctgctgtgtttatgactttaaccttgaggcacctttcttggtcattcaccgtatcttttcctataggtaattgaacggcgcattcggcaagagctgcctttcatggccacagagaacatcatcatggccatggtcaaagctggaggtagccgccaggtttgtaacccctcatgttcctggataagttgagagtgcacgtttggtcctgctctcttctccgtgaaggagagcagatgaaggtgtttatgtcattaccttcagtcacagtaatggtacagagcagtggccataatctgccatctatggagggtgattttggtgaactgaatt

SEQ ID NO: 29143 - DNA, 1049 bp, Homo sapiens
ctccctgtccccccccccttttttttttttttttttttttgagacggagtctcgctctgttgcccaggctggagtgcagtggcgcgatctcggctcactgcaagctctgcctcccgggttcacgccattctcctgcctcagcctcccgagtagctgggactataggtgcccgccaccacacccggataattttttgtatttttagtagagacggggtttcaccgtgttagccagatggtctcgatctcctgacctcgtgatctgcccgcctcggcctcccaaagtgctgggattacaggcgtgagccaccgtgcctggccctccctgtccctttttaagcgtggaggtgtgtggtctgggaggggagagggtgaggtgtctattgatcagatatgggtaataggttaacataacccatgaccagaacattaaaaggctgtaaacaaacaattgcttcaatataaaaacgcatacctcgtgaatttggaaacatgtcaggttgatagaaaagtgaactcgggtagaacctcacagaaatgaacccgacattagggtgaaatattgagaagggaagggaggagataatcatctcttttattttacagccatctttctatgcctggagtggatgtaggaacagcctgctggctcagaagcttaaaaaaagctctgtgtgttttcagtttttctcttcttagttctcaatgaaggttttggcaggagcccaaaatcttgtacatttgataatttaacatcagtttcatctgcttactctccagatagcctgttattcagctggtgacgtcagtaattttccacagcagccattcatgagctcatgcagactgtcacaaggaaatgggaatagcacaatgagtgttacagaagaaaaaaagatcctgtttctttgccatcacatattatacacagacttagggaatctagactggagcacaagatatgtgggaggggttagaacaccactcctacctgtagtaataatcattgaaaccacttattggatgccttctgcttaccagacactagtt

SEQ ID NO: 29144 - DNA, 1058 bp, Homo sapiens
acagcaagaccctgtgtatattaaaaataataatatggccgggcacggtggctgatgcctgtcatcctagcactttgggaggctaaggcgggcagatcacttgaaggtgggagttcgagaccaacctggcctacatggcgaaaccccatctctactaccaaaaatacaaaaaattagccgggtgtggtggcgcatgcctgtaatcccatctaccaggaagctgaggcagaagaggaacccaggaggcggaggttgcagtgagctgagatcacacactgcactccagcctgggtgacagagcgagactctgtctcaaaaaaaaacagaacaaaaccaataataataatctaatgggttgttgtactgaatgaactgtaaagttctctccaattctgagatcgtgattctctgattgaaatctaaatctgcagactccgagacctagagttctttttagaagatttacctgcttttcctcacttttccaacctagtctcttatattcccgcttcaccacctatgtgctgctctttgtttcggacctctgcttccatcagctcctcaccttcttcaggtgtttgctcagatttttcttactgagccttccctgactacctaatttagaatagcagctcctgaaagtgcctatggttcttcctgcctcattttactctgtagcactattcatctgacatacagtgtggtctcttattaattttttaagttacttctttcccctctagaatgctgggactttcaaagaagggatttctatctattttgagcacttctgtgttcccgacacttaaaacagtgcctggtacataataggcactcaataaacatatgttgattgaatgagtatttcctcaacacaaagtcaccattgggtctgctttgtgttctaggagaatatctagctcatgctgtccacttcgtaccttttctctgttgcttcccttactcgctggtgcctttctcttttcctcttctctttggatcacagcatttcaagactagaagtctgagatcacctcttcataaggaccagagtccct

SEQ ID NO: 29145 - DNA, 1030 bp, Homo sapiens
gccgggaggtcgagagagactttgcctccgtgtattcccgtctggtgctctgtaagaccttcaggtaactcggcccgggttcttctggtggggtcaccagcagtgggagggcggggcctgacccagccccggcaccccaggagctttggtgtcccctcaggttggatgaagatggcaaagtcctgaccccggaggagctgctctaccgggtaagggggcctcctctgccagaccctagagacctctctggggttagcctgtgggggagcctgagtgacagctgacggtgccgttcccaggctgtgcagtctgtgaacgtgacccacgatgcagtgcatgcacaaatggatgtgaagctccgctcactgatctgcgtggggctcaagtgagtgtggaaaaggggttggaggagagccctggagtggggggacccagcccagcatcagggggggtccttacagggaaccctaaaggacaaagaacctcaggggctcaggtccttccccaaagagggtggtctgggagctgctgagagacaggtcagaggcttccaccgtggctgcagccagaagggcctggagctgcccctgctccccactcctggccatgtccccagtgagcaggtgctgcacctgtggctggaggtgctctgctccagcctgcccaccgtggagaagtggtaccagccctggtccttcctgcgcagcccgggctgggtccagatcaagtgtgagctccggtgaggaccttactgggcttgggggatggaggtggggtgggaagggctagctgggggtgacaagagccttaccaccccttcctcacctctagagtcctctgctgctttgccttcagcctctcccaggactgggagctccctgcgaagagagaggtgggtggtgtgggcctcgtagggcctgcactgatggagctgcccaaaccgttcgcggggtggctaaggtgggaacccgaagtgctggtgtcagcggttaggaactaccccagccatgcccaaggcctgtgaggtgag

SEQ ID NO: 29146 - DNA, 1046 bp, Homo sapiens
catgaaaatgattccatgtaggaaggcaagtggcattctgaactgtgagtctacttttttttttttttgagacggaatttcgctcttgtcgcccaggctggagtgcaatgacacaatctctgctcactgcaacctctgcctcccgggttaaagcagttctgctgcctcagcctcccaagtagctgggattacaggcgcctgctaccacatccggctaatttttgtatttttagtagaaatggggtttcaccatgttggccaggctagtctcgaactcctgacctcaggtgatccacccgcctcagcctcccaaagtgctgggattacaggtgtgagccaccacacccagcgatatttacagattgtacagattatattatattatctgtacaagaaagatgcttccatggttccctgattattgccaaaggagtaatgttgtcattagcaggacagcaagacattcatctcaaaaaaacactgaaacatatcagagaatgaacgggaagaatcagtggaattcctaatgaagcattatttctaaaatttttacattcttaaaattagttttagaatatgtggtatagtttggaatgctaggtttaaaaagggctactcagggagttgggcttgtcagaataacttgtctgacatatgtagaaccacttcatggttgttttctttttctttttctttttctttttttttttttttttttttttttgagacagagtctcgctctgtcgcccaggctggagtgcagtggcgtgatccggctcactgcaacctccgcctcccagattcaagcaattctcctgcctcagcctccagagtagctgggactacacgtgtgcgccaccacacctggctaatttttgtatttttagtagagagggggtttcaccatattggtcaggctggttttgaactcctgaccttgtgatctgcctgccttggcctcccaaagtgctgggattacatgcgtgagccaccatgcctggcccacttcttggttttcaactacagcagcaaacagatttttaggg

SEQ ID NO: 29147 - DNA, 1027 bp, Homo sapiens
tccaggctagtctcgaactcctgagctcaagcagtccgcccaccttgacctcccaaagtgctgggattacaggtatgagctgccatgcccagcttcattctttttaaagactgaataatattccattgtatgcgtatgccatattttatttgtctattcatccattgataaacatttggtttctatcttttttttttttttactattgtgaataatgttgctgtaaacataagtgtacaaatatcttgtgttcaagtctcttttaattccatttggtatatacacacaactggagttgctagatcaaatggtaattttatgtttaatattttgaggaccaccatactgttatccatagtggctgcaccgtttcacattcccactagcaacgcaccaagggtttcaatttctccactctacaccaacatttgttctgtttttgtggcaatagccaatcctaatgtgtgtgaagtggtatcttactgtggtttggatttgtatttccctaatgattagtggtgttgggcatctttttatgtgcttcctgccttcctaatggttttttttttgttttgttttgttttgttttgttttttctttttgagacagtgtctcgctattgctcaggttggagtgcatggtgagatcatagcttactgcaaccttgaattcctggacttaggggatactcttgcctcagcctcctgagtagcttggattacaggcacataccaccatggctgtttttaggtttttgtagagatggggtgtcactatattatccaggctggtgttgaactcctggcctcaagagatcttccatcctcagcctcccaaaacactaagatcacaggcatgagccaacatgtccagcatcctcttaacactttcagtcagtatgtttcctgccacaccttgaccaaggaaggaactttagcaaaatagctctggctaattctaaacctggaattagcacaacagttcactctacccccataaccaacattaactctattttttgataaaa

SEQ ID NO: 29148 - DNA, 1111 bp, Homo sapiens
acttgagcccaggagtttgaaaccaacctaggcctcatagtaagaccccatttctacaaaaaaaaaaaaaaaaaaaaaaagtttttaattagctgcatgtggtggcacatgcctgtagtcccagctacttgggaggctgacatgggaagatcacttgagcccaggaagtcaaggcttcagtaagccacgatcatgccactgcactctggcatgggtgacagagacccttcctcaaaaagttacatggtttagctgggcgtggtggctcacacctgtaatcccagcactttgggaagccgaggcgggcggatcacaaggtcaggagttcgagaccagcctggcctatatggtgaaaccccgtctctactaaaaatacaaaaattagctgggcgtggtggcgggcgcctgtagtcccagctacttgggaggctgaggcaggggaatcgctcgaacctgggaggcagaggttgcagtgagcagagatcgcaccactgcactccagcctgggtgacagagtgagactccatctcaaaaaaaaaaaaaaggttacaaggtttgacagatgttcattctcaatgagaaggatcctgcaacagaactcatttatctaccacagaaaacactagtcctgtttaaagtttgtccaggatccacaaactgcactacaggaaaagaatgcttggcactcagttgcattgttggagctgttaaaaagcacctcaacaggttgcatcctttagttagaatttccatagaccagaggttccatgagtctcccatgcatgcacaacgtgggtttctgctgtgggaatcactggcagtcgtgcttgggataccttggactccatttaaattaagatatctgtaatgcagcttgtgttaacatgcaagcttattccttttgttgggttgctttgggcatgctgtcatagtgcatgctgtaaattgttaagacccattttgatagcactgtctatcatttcaaacagcttgccacttttgttcttattcctgaaataggatgccttcaaggcacactcttggcattggcaaatgtatttcttttcttttttttttctttttgagacggaatcgctgtgtcaccaggctg

SEQ ID NO: 29149 - DNA, 1948 bp, Homo sapiens
cctaagaagtgccaatcataaagtctaactcttgatctttactggaaggacatcaagcatatagtaaggataggtagcatttgaactgcatatcatgtgtacctggaatgctctgtaaagaaattgactcataggaggcacattccttacaaaaagaagtaaagcaagattaggcatttgatcacctaggaaggaggaggaacttttgtatcctgttgagtctgcataacagtttgaaagagtcatgactgtcctggcacaatggtgtgcacctacagtcccagctactcaggaggctgaagcagaaggatcgcttgagcccaggagttcaagacagtagtgcaccatgattgtgcctgtgaatagccactgccctccagtgtgggcaacatagcaagaccccatctcttaaaaaaaaaatttttttaagccatgacaacaattatctatgccaggcaataagggttcaaagcaaaattaataaaaagacaaatccctcttttgagtgaatgaagccactaggactgccatatgttttaggtttcatgctaaaaatatagtgctgaataagttatttgtcaacatttgtgattgtgtgtgcaagtgtcctttaattgattttttaatttttttattttttttgagatggagtcttgccgtggtacccaggctggagtgcagtggcacgatctcagctcactgccacctccaccttccgggtacaagtgattcttctacttcagcctcctgagcagctgggattacaggtgcccaccactatgcccagcaaattttttgtatttttagtggagacagcaggatttcaccatgttggccaggctggtctcgaactcctggccacaagtgatctacctgcctcagcctcccaaagtgggattacaggcgtgagccaccacactcagccatttaatttttttttttttaattttttttttgagatagagtctcactcttgtcacccaggctggagtgcagtggcataatctcggctcactgcaaccactatctcccaggttcaagcaattctcctgcctcagcctcccgagtaactaggaccacaggcgcgtaccaccacgcccagctaatttttttgtatttttagtagagaccgtgtttcactgtgttagccaggatgatcttgatctctccacctcgtgaaccaccgcctcggccgcctgaagtgctgggatcacaggcatgagccaccacacccggcccctttaattgattttaattgttcattatccagcagatatttactgaacaccaactgtgtgccaggcactgctctgggttctgaggatacattagtgagcacaatagactatccatgctcactcttcacagttacattctggtggaggagagacagtaagcaaacaagacatgaagtcatctggaattaaatgctatgaagaaaagtgaagcagtgaagggggatgaaatgtgatggaaggtgctaatttagatgggatagtcgggaagggcctctatgaggaggaaacatttgaggaaagatttgaatgaagaaagggagcaaaccatgtaaatattcccaccattgcaccacttgcttttactcttttgggcattttggcaatgccgttcaacctcatactatgaaatgttttcatgttttcttttttttttagacagagtctcgcactgtggcccaggctgtagtgcagtggcacgatctcggctcactgcaacctctgcctcccagttcacgtgattctcctgtcccagcctcctgagtagctgggattacaggtgcacaccaccatacccagctgattttttgtatttttagtagagatggggtttccctatgttggatagactggactcaaactcttgacctcatgatctgtccacctcagcctcccaaagtgctgagattacaggcttgagccaacgcacccag

SEQ ID NO: 29150 - DNA, 1050 bp, Homo sapiens
gagtggttgagaggtgggggaaggacagggtagggtggggtggggtgggtggaatggggagtcgaagcgaatgcggcggtggaggatggggcagtgcggcgagagcctggaacctgaggtcctaccgcattagaggcctctgaggaccccccttggtgatcttgctccgcccctttttgaagcttggggtcctctcacttggaggggtcctctcacttggagggatcctcgctgaaccgaggcctcacactgcctggttagagtctggagtgtaatgcttggctcttctgagacgtctgttggcttttcacacaaccaccccactcttgggttctctgtcacgtccagaatctcccccttccaaaataataataaaaagcatggtggaacttgttaagaaaatccgagcccaaatcctgtggcagttagggagggttgagtactagtcgcgaacgacttggtaagcgtgggaaagcaaaaatggaacgtgtctttttgcatgaaatgccttttagtggtttgccacagtttgggagaacagtatcgattctcacctaacatgaaagctgttcaaaatggagattctaaaatagggaagatattcctagaacatctggctaaacactgacaatatcccccgtcctagtgctttttggtgtctcattgtggccactgctgctcagttacagccagcagccatattgaaaaataatagaagtaggggcttttcctccaccttgaagctgtgatgtgaaaagtggtaaagaagttactaggcactgagaatggggtttgaaagcgaagaaggtttgggagtatttgtaattgaggaagccagagttgaatgaatgaaattctgttaaactcttactggaattattatcttaatagaagagtctaaacatataaaagttgagaacatcagtttattttatggtaagaatcaaaattctagtgaattgtagaatttgttatgaagtaatctaagatttaagtgatgaccttgttctgtgtactgacacgggtatttaattatccagcttatcccat

SEQ ID NO: 29151 - DNA, 1011 bp, Homo sapiens
gatcggcccgcctcggcctcccaaaatgctaggactataggcgtgagccactgcacccggccagactaaattattttaaactataggaaacaaattaaaagatgacattaatttctgtgttcatatactcagccttttggagaatagaacatacgtgtagtctactgttgtctttggtataataagattaacgtaatatccaaaaacttttgtttggtggttccctgtggccaaagagatgataactgcagctgcagcctgaggtcctaaagagtatgtgtgtgtgttacaagcagaatgcactgttccctctttttgtctttgcagtggaatgcagtagccctctgggcctgggatattgtggttgataactgtgccatctgcaggaaccacattatggatctttgtaagtaattggaggaggatgggaggaagttgagaaggttgcagagattgtggctatcttgatgtgactgattttcttcttcacacgaggagatagcaagcctactctgagcactcggtcttctgtatctagtctgttggtgtgtttgaaatagagtagtttttttatgatgtcctggaggcatacccagctctcagaataaatctactcaatctaaagatggcagggacacatttagaattaattgtggacgacaggcactgttgatttttcctgcatatcttccatcttgtacctagactcaaaggtagaaatagtgaaaggaggaaaataaactttgagctaaaatattctgaggccaagcgcagtggctcatgcttgtaatcccagcactttgggaggccaaggcgggcagatcatttgaggccaggagttgaccaacctggccaacatggtgaaaccctgtctctactaaaaatacaaaaattagctgggcgtactggtgcatgtctgtaatcccagctacttggcaggctgaggcaggagaattgcttgaacctgggaggcagaggtggcagtgagccgagatcacaccactgcactac

SEQ ID NO: 29152 - DNA, 1056 bp, Homo sapiens
ggtgaaaataggccgccatgatcagggcagcccgaaagttcaaactgtctgagcccctgttgggagtgagcaggcggagctccctttcacaaccaccaatgacttttccctctcacctccctaataccaccaggcagctactggcacctgtcaggtgggcatggttgagtcagagggagagcctgtccctaagagggggcagtaggcaagaagtcctgtaagatggggaggggaaaggggaatcacagcgacagccaagctagtgtcagtgtcgtcacctaatcctggagcacactgtgatcacttaggttctaactaaagttgcttatgtgtttaagcaggttttatgtctcaaacaggaaattatcttggaattaatcagagtaatttactttgtctttcaggtatgggcactaggaaaagacttcttccatcaagcttaattgttttgttattcatttaatgactttccctgctgttacctaattacaaattggatggaactgtgtttttttctgctttgttttttcagtttgctgtttctgtagccatattgtattctgtgtcaaataaagtccagttggattctggaacggatgctctctcttgtgtatgtgaacaaagtgaacataaatgaagagtctccccttccaaggctgaaaactcagcttttgaaagtgaaatgtttgttcatcggggccagagcagggttgtcctctgagcgcatcacttagtgacgaggaatccaacagctcaaggcagagtgtggatcaccggctcccgaaaacagcagtcagcccttctttctcctgtgtgacagcagtgggcagctgaaagagggaagaatgtgggattcagtcatcaaacccagttctgagtcctggttccacagcttgggtactgatggcaatcttggccaagttgtctctctactctgaactttcctcctctgtactgtgggcttctgaggactaagtggcatcatgtgggcacagagagaagctttgtaaaatgtaaaaccgctatacaaatgtgacctttggttgtgtatgacag

SEQ ID NO: 29153 - DNA, 1048 bp, Homo sapiens
tgcatttgtgtgtaagagctcctatgcaatttaagtttcattttttttgttcttggcaaatgaatttcgaatcctttctctttactgtacttactgtgtttcctctactttccactcttcgaaattttctctcctttgcagaatattttctgttgaggaatagggtgtaaaaaaatcttgattttgtgtgtgcgaggtccaagatttcaggttagaggtgaagtttaacaattcttttatcttacctaccattcttagcttttttttcctttttcttcttatttgctttaagaatcaatatggagcgcagttcatttcacatctcccagttctttggtgtgagaccaaaatgtctgaaactctgggtttttaggttgggagaacaggggcatgttctttgcagtttgcagtcactttctcattttaggggaaataagataaacaattttgtggagttacgtacctggaaatcaaggttagaagttgaaagagttccaatcatgaactacaaacgtgaactgattgtacaaaagtttaaaatgtgcattaggtttggtgtttgtgtgtgtctttgtctttttacacttttaaacatacttggagatcaagattttcgtttaaaagctttacgaccagttcattcagttgtggactagctcctttgtcaggagaagttcagggagacttcttccatcatcccttcattcttttcttacagttagtttaatggtgttatcctgatgggtaaggaccttttctttgctgggataatgaagatgaagaatggctggccatctgacagtccacaagatgttcccctttactacggagcatctctttaactccctgagagcaggctcagcgtcatccctccatctgccagtgagagtgcataatggagttaaatgtaccctttgagtttgtagagaacttcgagagcatgtttctaaataggcttcatttcagagggtgaaaatgggaagacagagctaatgctttgaattcgttgcttttataagaaagatgtgaaatgaatttaagttaacct

SEQ ID NO: 29154 - DNA, 1040 bp, Homo sapiens
ataatacaggaatttagactttccattttacccatttaatggatggggcagaattgtgctttaggcagttaagtaaaaggaggaatagtttgggaagaacagggaaaaacaggaggcagggagaccagtgaaacagctgttttagggttccagccacccttaccacagaagatggaaagaagtggaaagatttgagggaagatggatgatcagcagaacttggtgactgattagaagttaggtagtaagatggacaaatcaaggataattccccagtttaaagtttgagcaacttgttgggtgatgatttatttattatttatttatttattttgagacaatctctgacccaggttggagtgcagtggtgtgatctcagctcactgcaacctccgccttccgggttcaagcgattctcatgcctcagcctcccaagtagctgggactaaaggtatccaccaccacgcctggctaatttttgtatttttagtagagatggggtttcaccatgttgatcaggctggtctcgaactctggcctcaagtgatctgctcgccttggcctcccaaaagtgctgggattacaggcatgagcagctgtgcccagctggataattatttaataaattggggagcataggaagcatagtatttgtgaagtgggtaggcaggtgtgatgggggtagtgatgttacatttggggcattttgaagttggtggttcttctgagttgagcagtcagtcactcttcatttgctgcacctttatctcattttagccaacagacattgaatacctaccaagtcttaggtatttgcaatgtaaagacaaattaaggtgccttctgctgtcagagacttcagagatacagtggggttggtatacatgtccacacagttttcccgtaagttatgctttaaaaggttttttaaatgttatatataaaggcaggggatgggttgcttttgacagagtaggtttggagcgttgatggaaaacttcatggagaaaatgtatatttgaacagggttggtggaaatt

SEQ ID NO: 29155 - DNA, 1023 bp, Homo sapiens
tgcttgatgaactctgtacatgtgatgtgactagtatgaacttctgaggttgttgagatgaatgagaataaacgtgaggtgccaagaaaaatgcctgacacattgaaagtgctggataaatgtatgctgtcatcattgtaagctgggctatctcctaatagtgtaatgagtccattgaataacaataggtaacatgtttatagtgcttagtgtgtgccaggtactgttctaaacactttacatttattcactcatttaatcacaaataacatgaagtaggcactttgctgttatgcagagatggaaacaaggttatccctgcatcttttttttttggcagggggaggaggacgggaacggatggagttggtttttttttttggagcttctgagacccaagcttcaggccatgctcccccaagcacctccccaccaccaccccccaagatgtagtcttgctctgtttcccaggctggagtgcaatggcgtgatctcagctaaacggaacttctgcctcccgggctcaagcaattctcctgccccggcctcctgagtagctgggattacaggcgcctgccaccacgcccagctaatttttgtatttttagtagagatggggtttcaccatcttggccaggctcgaactcttgacctcaggtgatctgctcgcctcggcctcccaaagtgctgggattacaggtgtgacccactgtgcccatcctgttccctgccccccccccctttttttttaagttattgagacagagcctcacttggtcacccaggctggagtgcagtggcaggatcatagcgcactgcagcctcaacctcctgggctcaagcaggccctttgagtaactgggacctgtaggtgcatgccagcatatccagctaattttttttttttttttttttttttttttttttttttttgagacaaagtctcactctgttgcccaagctggagtgcagtggtgtcattgcaacctccacctctcgggttcaactgattctcctgcctca

SEQ ID NO: 29156 - DNA, 1057 bp, Homo sapiens
tgatccacccgcctcggcctcccaaagtaaagtgctgggattgcagatgtgagctaccacatccggcctatatccagctaatttttaaaaataatatttttgtagagaggtggtctttctcccctcggccttccaacgtactaggattacaggcgtgagccacccttctggctgtcttttcctttttattttttcacacttccagtggtccttgggatctgtgtatactttagaatcatcttgtccagtttcttgacaaacttctagaagtttgattgatactgcattgaatctatagatcagtactggggaatgatgtttttaatactgaggatttctaagtgtttgagatattctgtttagtcagcctttacttttgagtttacacctgttttatatacattgtcagtttttccctatgttataaatctttttttttttttttttaaatttgagatagagtctcactcttgtcacccaggccggaatgcagtggtacaatctctgctcactgcaaactctgcctcctggatgcaagcgattctcgtgcctcagccttctgagtagctgggactacaggcatgtgccaccacgcgcagctaattttggtatttttagtggagaccgggtttcaccacgttggccaggctggtcttggctggtcttaaactcctgacctccagcagtccacctgtctcagcctcccaaagtgctaggattacaggcgtgagccactgtgcccggctctacattatttaaaaaattatttgtaaccatttgttgctggcatacagaaattcactttgatacgtttatatttatggtataaccagtcatcttgctaacctctcacaatttccagttgtatgtatttctttaaaattgacaacagttgtgtatattcatgggttatagtgtgatgatatatgtatttgctttgaactttctatgtcaacagttatattatctacagacaataagttttgtttcttcctttttcctttttctttctttccttcttttttgttttgagacggagttttgcttttgtcaccca

SEQ ID NO: 29157 - DNA, 1015 bp, Homo sapiens
tgataaaatgctaaaagatacagaaggagcaggattgggaagaaaaaaaaaaactacaagaagaggaagggcacatacaggaagagttatacttaggaactaagattaattggatcaagtagaccattaaggcaatattttgtcttcaagggatggtccattttttaagaggataatagctgtggaatttttgttgttgttagtagacaaggtctcacagtgcccagacttgatgtgaattcctgggctcaagctatcctcttgcctcagcctcctgagtagcttggactatagatgtgtaccactatgcccaacacccagtaatgcctttttaatgtgaaaactactttagagaattgaaaggaaagaaaactcaaataatttttatagtaggttaatactgtcaataggtcaatcaggagtaattttcttcccccaggggatgtttggtgatgtctggagacagttttgattgtcacaattgggatatgggtgctactggcataagtagaaagaccaggagtctcctaatgataatagagggcacaagacaatcaccctccacccacaacaaagaattatcacatagctcaaaatgttaatagtgccagggttgagaaaccctgcattaatctatacttagcacccagttttgtttgttcttttttgagacaggatcttgctctgtcacccaggctggagtgcagttgtgcagttaaagctcactacaacctcaaattcctggactcaagtaatcctcccaccttagcctcctgagtggctaggagtatagcctagtgccaccacacccagccgactttattgtttgtagagacagggtcttgctgtgttgacctgggctgaagaattcctcctgccttggccttctaaagtactgagattacaggtgtgagctaccagggctggtcttgcaccctgtttttggtaggggtggtttgtatggtgaaggagccagaggcatggtgttgtaccctattctggctagactttggtt

SEQ ID NO: 29158 - DNA, 1056 bp, Homo sapiens
aagaaattactgccagctgatcagcaatcagtgtagtctgtgtatttaaacccatagtctgccatagaggagcttggagtttccaggtaatgcatcgtgatcaagggaacaagcagtgtcaggaattggttgaaattcagttggtctaggcaggcaaggcatgcaatcatgaaggaccagattgtttggggaaatatttggataaagacattacatttattaacaagagacaacaacacagcttagaaattccaacattttgttgattcagataataggactcttgagggcataatttattgtcttagtcttttattgtttgtcatgcgggttctgtgatagaatgactttcatactatatctatcatgaattttcatgctaataagaaacaggttaaacaactcccccatgtataggtatggatattattggagccacataggataaatactagtagtttaaaaaaaacataggtagcagcagcacttgcagtcagatttgtaactaccaaaagtagcctggacttgatttaaacctgtttctgcattctattgcccctgcaatcttttggccatatttacatagaatcaagaaggtttttttctttcttcttcttcttttttttttttttttttttttttggagacagagtttcgttcttgtcgcccaggcaggagtgcaatggcccaatcttggctcattgcaacctctgcctcccaggtttaagtgattctcctgcctcagtctcccgagtaggtgggattgcaggtgtgtgctaccacgcccagataatttttgtattattagtagagacagggttttaccatgttggccaggctggtttcaaactcctgacctcaggtgatccatccaccgccacctctcaaagtgctgggattacaggcgtgagccaccgtgcccgaccaagaaattatcttctctgaatgcttctcatttcaggccacctcattcttttatgcttccatcaaactgccacttgtaaattacttgtaaatcattcttgtaaattacttaccttagtctctgaatttcat

SEQ ID NO: 29159 - DNA, 1028 bp, Homo sapiens
ctcccaaagtgctggaattacaggcgtgagccaccgcgcccggccaaaacacactatcgtttttgtgagcaagtatctaaggatgtgagaagagaataaattttaaaggtcttcccatgtggtgatcctcatagactttgatttttatttgccctagcatagcatactttaaatgttattgagggtttgctaactgtcatgtaggcaagtgttcaatttaatacaatttactgcagtcatttttacccgatctaatacaatttgtatgaagtcattaaaaagtgttcttataggcatgtgtgtcataacattggtttagagtacatttgcttagaataaagtaggttgtgtatagcatggtgaaaaatgagggctcttaagccagactgcttgaggttgaatctcactttgagtactctgtgactttgtgcaaattgcttacccattctttttgcctttcttgactgtgaattctgagtattaataggagctaccttatagggctgttaggaagatgaaataagttaatgcatttatgttacttattaagtggtcaacaagttagctattattaatgtaaaaacattaacctgctcttgaaaaaatatgttttcttctctttagtggcacactgtgcatcttctcgacaaatcatttcacactggaagaattgtacaagacatgattgtcctgtgtgtctccccctcaaaaatgctggtgataagagaaatcaacagcgtaagtgatgaaatcttttgaaggtttatatgaaaagttttaaagtctcaccagtgccatttatagtactacttgattatgtgagggacctgtggtgttgtactatgttgaataaatgtttttttcccttttaatttttctgcttccctagtgcatagaattgaactgcttagggagtttgaggctgcagtgagctatggtcatgttactgcgctccagcctgagtgatggagtgagaacctgcctcaattaaaaaaaaaaaaaaaagaaagaaaaaacagtgcagtggc

SEQ ID NO: 29160 - DNA, 1066 bp, Homo sapiens
atgaacatgcacagtttaaaatcagtctagtcacacacttctccctgcctagctccttaatgcgaatagaagtgacatagcatattgattccattacaataatcagtgtcagcttgaattaaatgaggtcttctcctacctttcttcactaaaactatttggtgacccctttttgaagcccaatgatgagtgaaaatgccagtgtgccctccctgggtcctatgccaacagcagctcaaccatccactactggaattcggaaacagtggcacgaagatattactcaggatcttcgaaatcatcttgttcacaaactgtaagtaagattgtggacacgtctcattcgtaaagagatgttacgtcaacatgttttcaatctcctgggcatttaattactaaaggaatattagcaatttttctgtagcatggaggttgatgttgatacttctactcttgtggatttcttgctgctgctgcttttttccttctcaacctttcccaccatcatctatggtagtctttcagctttaatggtatgtgaactattctgtctagtgacagtaaataatatattaaacattgtttttagctattgcctttgcaaaacttatatatctaagaaaaactaggcctcagctcattaaaatattgcattgataacatccttttctgttactcctggtagagcaggggttttttgtttgtttgagatggagtctcactctgttgcccaggctggagtgcagtggcacgatcttggttcactgcagacttcgcctcccaggtgccagtgattctcctgtctcagccgcccaggtagctgggactacaggcacgtgccacctcacctggctaatttttgtatttttagtagagacggggtttcactgtgttggtcacgctgacttcaaattcctgacatcaagtgatccgcctgcctcagcttcccaaagtgctaggattacaggtgtgagccaccacgcctgtcctggtagagcttttattatgtaaaaatctggtagggtggactctctggtcttctcgtcctccagatgtgcacatggca

SEQ ID NO: 29161 - DNA, 1041 bp, Homo sapiens
ttcaccatgttggccaggctgaaacttctgacctcaaagtgatctgcccacctcagcctccaccgtgcctggtcccatggactcttatttggcaaagtctcttcataaatttttagaagcctttggattctgcttctaattgaccgagtctgtcttcactgactttgtgactgaaaagttaagctgagggtgaagagtgttttaaggtgataagacacaatgttttttaggagctgtctgaaacaaagcggggcttagaatctagaatcagtgattgagcctgtagtgatatttccatggggacagagtggttaattttgttattgattcttgagatgcttttagagcttcaggctgaatgattttttaaagttcttctgcttaattggtaactaatttcaaatgcactttttttttttaagttttcaaaccagaagaactacgacaggcactgatgccaactttggaggcactttaccgtcaggatccagaatcccttccctttcgtcaacctgtggaccctcagcttttaggaatccctgtaagtatttggtggtacttttgattttattttttaatttgataacagctttattgagagataattcacattccaaacagtatagccactcatttcaaatttgtaattcagtgattttttttttttccccctgagacagggtcttattctggttgcctaggctggagtgcagtggcacgatcgtggctcactactgtctccacctcccgggctcaggtgattctcccacctcagcatcctgagtagctgggataactacattcatgtgccacctcacctggctagttttttgtattttttagtagagacggggtttcgccatgttgcccaggctggtcttgaacgcctggactcaagcaataggcccatctcagcctcccagagtgctggaattacaggtgtgagccactgggcctggcctaattcagggagttttagtatattcacagagttgtgcatgacactttcattttcatcatctgaaaaaaatcctttaccat

SEQ ID NO: 29162 - DNA, 1010 bp, Homo sapiens
gagccaagattgcaccactgcactccagcctgggcaacatgttgacagagactccatctcaaaggtcaagtgcttccaggggcaaaagccttttaggacttttcctctcttgtatcttgctgtgatttcagatggaacattttaagttctgtgggcttagtttcctcattgtacaccccttctagtactaaaattttaaatgtctttgactttactgatctcacatgtactttcataaagaacctgaagttgcttcagtagaatatcagcctgatgtctagaaagtccatagtagttctgtttctctgccctttgagtagtttaatatctctgtaaactaatatttaaagaagtgatggacatcagtcacctcttggggaatatagacaggccagaaactaaaacactgcctggaaaattaacaatgataatggatgatactccatctcccgtaaaaatagtgagacttgagtaatgtttgatgtcacttgtctttctaggattactttgatattgtgaagagccccatggatctttctaccattaagaggaagttagacactggacagtatcaggagccctggcagtatgtcgatgatatttggcttatgttcaataatgcctggttatataaccggaaaacatcacgggtatacaaatactgctccaagctctctgaggtctttgaacaagaaattgacccagtgatgcaaagccttggatactgttgtggcagaaaggtaagaaatgtgtttcagatttgactttaacttttctgggatacctagaataatatagtggtgactgggataagagaatatcctgcttctggctttgacatggcttttttttttttttttttttttcctttttgacagggtcttattctcccaggctggagtgcagtggtgaggtcatagctcactgcagcttcaacctcctgggctcaagcaattctcccacctcagcctcctgagcagctgggactacagccgtacgccaccatgcct

SEQ ID NO: 29163 - DNA, 1048 bp, Homo sapiens
gtaatcccagcactttgggaggccgaggtcagaagatcacctgagggcaggagttccagactagcctggccaacatgatgaaaccctgtctttactagaaatacaaaaattagctgggtgtggtggcatgcgcctgtaatcccagctaactcaggaggctgaggtgagagaatcgcttgaaaccgggaggccgaagttgcagtgagctgagatcgtgccactgcacttcagtctgggccacagagcgaggagactccatttcaaaaaaaaaaacaaaaactaacaaaaatggcgttggattgtgggctgcactgtgttggctgtagatgaagagaacatggcagggaaggcagcccagaggggccccgagccaggccttaccctgtgttttctctcactctcctgagtgagctgctgggataccggatgtgggacaggcaattggtgtcaggacgtatcccaagcccttgagctgggccagagggtctgtctggtttaggacccctgtgtcagctttgcctgttggctgctttgtgacctctgagacgctttccttcctggtgtgtttggaaatagcactgcttagtctagtctaggctggttcttcctgacccagcagtgccctggggctggaaaagccctacaccctacctgttccctgccccaggcaggacagcactgaagtcacagtgaacaaaaagaacctcctcctctgtaccccagcaccatggctctctgtagagcagctcgagggcatcttggtcaccatccctcattaggtcagttgctaccaaggcactgtgaaagcactgcagagctgcagcccatcagggtcagaaagggacacaggaagactcagttctctggacatgagtcttgtatgtgccacaggcagagggctgggagggggcggggagggcaggatgcctggggatcagagtgcagagcccatgaggagcacaggctgcacaccagcttccaggcccagctctggcacaaatgagtctgtgtaattctgggcaggcgtgacctctgggtcacttttcct

SEQ ID NO: 29164 - DNA, 1034 bp, Homo sapiens
gaatctgaaaataatccctcaatctgaaaataataatccctcaaatatcactttttagtttataacaaaagggctttcacatgtgttggctcatctgtcctccatagcaactgtgtcaggtagacattttctagataagaaaccttaggccgaattgtgtgtcttgctggaaagtcagacagcagaggtaggattcccacccagttttctggctccaaatcgtcaccctttcccagagtcctgggccaccttagcaagttacttttcatttattttattttattttattttacttttttgagacggagtctcgctctgtcgcccaggctggagtgcagtggcgcgatcttggctcactgcaagctccgcctcccgggttcacgccattctcctgcctcagcctcctgagtagctgggactacaggctcccgccactacgcccagctaattttttgtatttttagtagagacggggtttcaccgtgttagccaggatggtcttgatctcctgacctcgtgatccagccacttcggcctcccaaagtgctgggattacaggcgtgagccaccatgcccagccttctttttattttttgagacaaggtctcactctgtcacccaggctggagtacagtagcacaattgtagctcagtctgccaggctcaggcaatcctcctgccttggcctcccaaagggatagggttacaggcatgagccaccacacctggctgctgcaagtttctttctttctttctttctttttttttgacagagtctcactctgttacccaggctggagtgcagtggcatgatcttaggtcactgcaacctctgcctcccgggttcaagtgattcctgggctcaacatatctgaattcaagtgaactcctgggctcaacatatctacccacctcggcctcccaaagtgctgggattacaggcgtgagccacctcatgcctgtctgcaagttacttttcaagtgcctcttgtgagatgctgtggggcaggtttgcaattgactttgtcatttat

SEQ ID NO: 29165 - DNA, 1046 bp, Homo sapiens
ctactcaggaggctgaggggggaagatcagttgagcccaggagatggaggctgcagtgagccaagatcacaccactgcactccatcctgggcaacagagcgagaccctatctcaaaacaaagaaatttttttcccagaggagggaagggtgtgggctgttaggtgcctgtagggctggggcctttggtctcctgacgcattgttaatcaggctgcctgatgcccatctctgcggtgtcactgaacccaggatccaggctgactgcatggctttgaataactttcctagcctcttggagtactattttcctgcctgatggggatgttgtgagatttaaataaatctcagttatttagtgacaacacatttttttgtagagcaaagctagacatagagtggcccttttgtttaaaagctcctgtgactcctctaccttagggtggaatccacagtctgccccgtctacaaaacctctatgggctgggtgacacacgtggctcatgcctgtcatcccatcactttaggaggctgaggtgggaggatcacttgagaccaggagtttaagaccagcctgagaggctgggcgcggtggctcacgcctgtaatcccagcactttgggaggccgaggcgggcagatcacgagctcaggagatcaagaccatcctggctaacatgatgaaaccccatctctactaaaaatacaaaaaattagccgggtgtggtggcaggcgcctgtagtcccaactactcgggaggctgaggcaggagaatggcgtgaacctgggaggcggagcgtgcagtgagccaagattgtgccactgcactccagcctgggcaacagagcaagactccgcctcaaaaaaaaaaaaaaaaaaagaccagcctgggcaacatagtgagaccttgtctctacaaaaaattttaaaggttagcgaggcatggtggcgcgcgcctgtgatctcagctgcttgggaggctgaagtgggaggatcccttgagcccaggagtttgaggctgcagtgatcatgccattctgggcaacaga

SEQ ID NO: 29166 - DNA, 1027 bp, Homo sapiens
gggctgtggctggaagtggggctggaactggggccaggctggaggtggggctggggtcagtctgctctttctcaacacctgtacctggcaaaacctggctgtctggccccaaggaacatgcaggtccttccatcagaactggaaggcctgcatggcaatgatttaggagaagaaaaccgcagtctgttcaccctagtccacaaggtgatggctgaggtctgagttggaggagtagctctggacctccatgaagctgggaccgccgggctcacccaggcctcgtgttttcttttcctgataggtcgacactacccctaaagcaagaagaatatgaggtgagtgtcagctgccaggctgagcaaaggtgaagggcggagatgtgcaggggagaggcgtgggccgggtgccagagctggggccagaggtcatgagccccctacacaccttgcccccaacaggcctttctgctcaagctggtgcagaatctgtttgctgagggcaatgatctgttccgggagaaggactataagcaggctctggtgcagtacatggaagggctgaacgtggccgactacgctgcctctgaccaggtggccctgccccgggagctgctgtgcaagctgcatgtcaatagggccgcctgctacttcaccatggtgagcctggcaccctcttttctctcctcctctgctgccctgatcccctggatgcccagtcgagccaggcccataccccagtgagcctgtagaccagggccagcctcctcccagcctgctttcagaatttcattgtctgttctcgtggctcttaatctcaactgtacaacatgctcagctggagagcttttaaaagtacggatgcataataaaaagtttttaaaaaaaatgatactgatgccctagccctagccctgccctagatgaagtaagttagaatcttggggtgaccctgggccttggtgggagtctgacttctcctgctcctccctcccggccccactgtttcttccatagcctcagcctcctca

SEQ ID NO: 29167 - DNA, 1033 bp, Homo sapiens
ttcctacccaccgcatgggcctgccagccatcactcttcaattctgcttccggaattatcatgtgtgtccaccctgcccataggcccccgggctggcgactacacctaccgtgagggccttgagcacaagtgcaagcgggacatcctgctcggccggctccggagctcggaggaccagacctggaagcggatccggccccggcccactaagaccagcttcgtgggctcctactacctgtgcaaaggtgggtgggctgcagcggggcaggcagcacagctggggcccagcccctccacccccagccgctgctctactccccatcacaggtagacagaacaggggtgggcctcacagctgcacgggaggagaaagccacggcctaggctcctggggcccgtgcaggatgaattccacatcagaatgagcgtcttcttcccttagcagcttccagaggcaggtgggacacatttgggacattcagctggagaccgagcccgtcactggcctgtgctctggagtgtcaggagcctacatgactcatagggggctggcttctcttaccactgtagggccctgaggggccgcggggcagtgtgcccagcagccacatgaagcatttaggactggcgcatggtgagggctccatccacttgagctctctgtcactcttctgttgtcactgtcctcatttctggctcacatcagcctggttggtatttaatggacatccatcatgtccctgactagcttctttctggtcccagccaagcgccttggtcccgctgtacggcgatatgtgaatagtcacgaattgctaaggccttcccagtgtagccctttcatttcaccagcatgcagcctcacagctctggaggaggaaacggaggctttgagagtgcacccacggctctgcctctcccccaacctggcccctagcagtggcccgcccaggcctcctgaacttgctccttgtcctcccagcagccaggctggtctaaggacatgtcactcttgggtcaaaggcctccatca

SEQ ID NO: 29168 - DNA, 1617 bp, Homo sapiens
ctccccaccaccgccccggtgtgcgtacccaggcgcacgtgctgcagcccccggaggccccgctgaaacctgggctgcccttcccccacccccacggctctcctggttgaggagggaggggcctggctgacccctccagcttcagcctccagctttaacttctgtctgctcctaatgggggcccaaagctcagggctggggagcctggggtccccacttgaatctccagcaggagggtccttctctccctggcccgtcctcctcccaccccctccccctgggggcaaatcaggacacaacagagggcagaggccccattagctttaaaatgtagccccaggttggagctgggaacactgtactggccacttaccctctggggcctcagctttccctccggaaggctgggaggaggtgggctagatgatctttggagcttaaggagtcccagccctttctctgatgccaccacctgaaccctgctccctcgtgggccagtgaaaatagactgtaggtcctcagagccttcagagatgatccagcccaaaccccattttgcagagaggaaaactgaggcctagaagggaggagtggtccacccacggtcccagcacaaggcagagctgggatgaaaacagggctgaaaagactcagggccaattattggctgagcccacggtcccctcagcagggatgcgatggtctctgaatcagtgtgcagctggggtcccaggcagcgctgcctgggggctggggaggggaggcccagaggagggctggccatgtgagcaccccatgaagggaccgccccctcccaaggatggtccctttgggtgcagcagcagaggtcacctcctgacatgcgctctgggaaaggtggcagagggcaggacaccatgagctcaggatctgtgtgaggtgtgggaggtgggaagggtgagggtctgggggaatgcggagaaaagggaggcttgaccccgggcaccatgggccactccaggatgggacacggcccctctttcttggggacccagtatgtcctctcctctagacccagacatacagttataaccgtctgtcctagcccctccctaatccctggccctcccagctgtctgggacttcagtggacccccagcccctgcccccactcaccaaggcctcgctcgtccctctcgtctgacatgtctgtgtgcacccccctcctctccaccctaccttccatcaaccagggcagatccaccgtgccctggttccccagacattccagaatgccccacatcattggcacaggagtggggcagccccggaaggaaccagggattaggctgtaggggggtgagaaggagagaagggaccaccccattcttctcaagcaaggattgccagcgcgcgctgacacagtgatgggctgcccagggctggaggggacgctgttcctcccgccgccactgcccaacctttcctgataatcgtggcatgcgccctttcctcttccctgccccaccccctggccgcagcaggccagcactgcagagtttgggtgctggtggtgtggctgtaggggaggggagaccacacccaaggtgggggctgtggccatgtgtggccgtgatg

SEQ ID NO: 29169 - DNA, 1045 bp, Homo sapiens
tagtgtgtatatatgtcgcccccgtgatgcatatatacacaggtattaaatatatcgctctatataatattatatatgtgtgtggtatccaaggaatcacttttatgagggctaaagataaagaatttggccagaaaatgcagccatccttgtgtgattaggagggtttcaggggccactggactatttgcaaggtgacagggactggagccatggctcagaggtgattcgggcagccagggacaggagccaccctccccaggcccaactctgctagcttcccagaccacccccatcgagtgcggagagagtgggagtgctcagggaaagaaggtgatttgtatttgtctccccgctgaaaagaacaggattcaagtccagagttttcatcttcagcctgtgatctgtccagggacccttgggatctggggcttcctggcctggccagagctggagcccccacagggtaaggaagagagagtgggaggcagagtgtgatggggaggagggacaggaagacccttttaatgatgagggtaactatttcagttgtgagccttctagggccccaggctgggaggctcagaggactgaatctgggacctgtgttccccccggcaggcagggacaagatggcatggcaagcatgggggcggggtgggtggggagggatgctgcatttctcagctgggcagtaatcaatttaatggtcctttaaaatgtctgtgtattaaaaatttaagaataccacactttaatattaaatattcataaggtctagtatcttgataataatgtagatgttttaataacaatttttgtccttcttaaaataaaatgaaagaaacttgcttcccttagcctttgttctagaaaataaacttgtgcactttgacctctgtccccgagatgtcactcctgttcctccccacctggtacttatatccaggggccttagctgctctgtcctcatgggacagacctggccggtactagctactctgaggaatgctaagcattccgaggggtgaggggcaggtctgtg

SEQ ID NO: 29170 - DNA, 1115 bp, Homo sapiens
tcctgcgtcagcctcttcagtagctgggactacaggcacccaccaccatgcctggctaatttttgtatttttggtagagccagggtttcaccatgttggccaggctggtctcgaactcctgacctcaagtgatccacccgccgccttggcctcccaaagtgctgggattacaggcatgagccaccaccatgcccggcttcccagacagctttaaactgcagtgtggagtggaccaggacagcggttcaggaccagagaattgcctgaagacggagtcatttgggccaggtgtgcagtagacgctcagatgcttgataaatgatggcacgaggaacaaaagcagccagctttattgagcatcttggttgcagcaggtactgtgcagctagtacatccgtccctcacagcaaccgtggaagttcactgtccacatttatagcccagagagtttcagtgaaggttccaaggaccctcaggaaggaggcagaaaaaagatcgagaaccactgggaactgggtatcggcaaacgtcccttccgccctgacattctggaattcacagcacctctggatgcactgtgaaaaaccgaagtggcgtggcaaggcagagttcccggaagaaaaatacagactcatgcttaggctggagagatcgcgtgcctgcatcaagaccttacaggattactcctgtaatcctgccttgggagatcaaggcaggaggatcacttgaggccaggagcttgagactagcctgagcaacagtaaagccgtatctctacaaaaaaaaaaaaaaaaagtaaaattagctgggtatggtggtccacacctgtggtcctagctacttgggaggctgaggtggaaggttggcttgagcccaggaggttgaggctgcagtgagtcatgatcacaccaccgcactccagcctgggagacagagcaagatcctgtctcaaaaaaataaaaataaataataaaggaacaattaaagagtaagacaagcagaggccgggctcagtggctcactcctgtaatcccagcactttgggaggcagaggagggtggatcacgaggtcaggagttcgagaccagcttggccaacatagtgaaacccccgtc

SEQ ID NO: 29171 - DNA, 1087 bp, Homo sapiens
acagtggcaggacaggcatctccaagccagggagggtctcagcagtggtgcgcccttggtctcagggtgcagagtgcggagaggggttcgaggaggcatgtgtcacaccggctctgggactctctcctaggcctgctggatttggggaagccatggccagtgtgtggccactgacaggtgctgtgctcatgtgggaccaggacaggacagggggtcctattgaaagaatctggctggatgctgactgcttttgaagctccctccccctgtacgctgggggtggcagaggagcggcagggactgtggatttgggcagcaggagcctgggtctgaagcagaggctttccttggtgcgcctgctgcagctcccgcttgccggagggctgaactcatggatgggatggaaactgttatgtaacaggaccacaaggctcgaagccctgcgttcctaggataccacaggcaaaacgcgcgagggaggagagaggagggcgtggactgaggggcagacctggtggccagcaccaggtgtctcccaagtcctgcctgggaaccccatggccagattagtttggcggagaatactgataaatctctctccaaatctcttctgttcccagaagtcagaggtcacccccaggtccccagggctccaactcctccttgcctttagaggggcccagctggcttttgctgcctgagtctgacttgagcacctggggtgtcctctcaggggacctttctcaggcctccctctcatcctgctgtgccagcacctgctacctagcatcaccaggtggccctggttgtccccgcaggactccttccttccacaggacgctctcagcccactcccaaaccagagccaggagacagatcccacagcccccggcctcccttcacccctctggaactgggtgtgggtttgcttgggctaagccaggaaaggagggtcagcaggttctagccccagggagacattgcccgaacggggaaggacgtactgggagcttagggcaggggctccggagctctcgcacgcagctctgggctcaggcccctccgaccacactccatgctgtcaaat

SEQ ID NO: 29172 - DNA, 1023 bp, Homo sapiens
gccatatccttcagcagtttggtagaaagaaagggagtcatgtggcatttggccccagtgtgactccctgtagtttctctccttccccgggccatcggctgtgttgatgttcctgcctccctggctgtagcccagccactgggcaagagctcactaggccacaggaactggggttgaaaaagtccttgctttgaaggacaaagggtttcttgtatgttgccatccccagggatgagcaagcagctttcaagctggtggtgctgttaggaactggtgggaagagagaattttgcagttttccatcctttcctatgaaaaacttacagcaaggatttttcatccaaatctttggagtcaggcacacctgggtccaaactccatgttgccacttgtggcctagctgtgcctcaagttcctcatctgtaaaacgggagcaactgaacctccctcccggggaggtttgtgagactttaataatgatgtgatgatcatggtgaatatttagatggtactcactgtaggccaggcactgatttttgttttgtttgtttttgttttgttttgtttttgagacagagtctcactttgtcacccaggctggagtgcagtggcgtgatctcggctcactgcaacttccgcctcccaggttcaaccgattcttgtgcctcaccctcctgagtagctgagattacagatgtgcaccaccacgccggctaatttttgtattcttagtagagatggggtttcatcatattggccaggctggtcttaaactcctcacctcaagtgatccacctgcctcagcctcccaaaatgctgggattacaggtgtgagccaccatgcctggcctgttatttctcagtgtaaagataagggacctgtgatattgaggggttaaagtacttgcacagtttcactgctagtaatcttggagagccaagatctgaactcggggatctaggcccttacccacaaccaacatgcctaagtaaggcaagggtgtggacagtgcaatgctttgt

SEQ ID NO: 29173 - DNA, 2008 bp, Homo sapiens
gtgcctgggccaccatgtgccttaaattataaagtcgggcagtgacgctcagtaggggttggtttctccaccttcctctgggtgaccttaggcagattttgcctctccgaacctcagtgtccccacctgtctaaaatggccccttccttctagtgtggtggggaagaacagcagcatgtcgacacccggtgagtacttagccaggtagctgtgaactctccttatctaaccctccctgccaggggcctgccacagcgccagacctgggcctggttaggtggtgcccagctgggccagtcagctccctgtggaccttggcctttgccctgggagcatgcggtgcaggcctgccctgtggctcagcagctgcagaatggctggtgttctgtggcctggtgatggtggggagtgggtgcttccctgtcaccttccttacaagaccctgggagcacctgagggtcccttgcggtcccattcatggtcttactaaggtagctcacccagaacctgttttgagcatctaggaagagcaagctgtgagatgaggaaggtatctgcccaggccttctctgagctcctcagacactgggaacctcagtctcttcatctcttccttgggcatagatatcatacctccttcccttccctcctgcttggcccctgccagcatgagatgaaatgtcactttccctactcccacaaattggcttggacataagcccagggctttatgctcattttacctttttttttttttttttttttttttttgaggacagagtcttgctctgtcacccaggctggagtgcagtggtgcgacctcggttcactgcaaccgccacctcccgggttcaagcgattctcctgcctcggcctctctagtagctgggactataggtatgtaccaccacacccggctaatttttgtatttttagtagacatggggttttgccatgttggccaggctggtctttaactcttgacctcaagtgatccacccgcctcagcctcccaaagtggtgggattacaggcgtgagccaccatacccggcctcattttacctttgagcaaacatatgagaggagaattagtgtccaggccacacggcaccagcctcgcctttgacaattgaggaaaccaagagggggagtcgctcttccaggcagggtaaccagtcatcctggtttgctggaaactgaggggactcaggctttactgggaaaactgggagttaccctatctccaggatacacacctggcaagtgacagtgtcttatgttcaaagtctggttgccgagcctgtgtgtggcaccaaactattgccttcaattttttgtttgctgaattaataaatgcaaatgaatgaatgaatccttccctctcactgcccttctcagtcctccttgggcaccttggctcatgtgccttggtctgagtctagactgtgccagcagcatcctgtgggaggccagatggctggttccgctgctgagttccaagaaaccccttggcccctgcttggttcagcctcagccttcaggaaccccccagggtccacccaacaggcttgtaccgtgtgcctagggaggaggctgggttcccacctggtgagccactcagccccgtagtattagcggtttggcttcagacttgtcactttgcttcttggagctcagtttcctcacctataaaatcacagtactgggggctgggcgcggtggctgacacctgtaatcccagcactttgggaggccgaggcgggcagatcatgaggtcaggagattgagaccatcctggctaacacggtgaaacctcgtctctactaaaaatgcaaaaaattagccgggagtggtggcgggcacctgtagtcccagctactcaggaggctgaggcaggagaatggcgtgaacccgggaggcggagcttgcagtgagccgagattgcaccattgcagtccagcctgggtgacagagcgattctgtctccaaaaaaaaaaaaaaaaatca

SEQ ID NO: 29174 - DNA, 1048 bp, Homo sapiens
ctgttccccttcaaattcttcacctactaggttgtcaaccctctgaaaagccttccagggccacgtgggagcctcgtctgggtgcatatagctcctcggccgcctcctgctgtggatctgatgtggtgttgaagtatgagacctgggtttgtcttctcccagctcttccaccagtagaagtcccctccaagggcaaggcctgggtctgctcctgcagtggtccttgctctggacctggcataaaggagggctccaggagggtttgcagttgaatatgtgagagaaagctctctgtctctttttttttttttttttttgagacggagtctcactctgtcaccaggctagagtgcaatggtgtgatctcggctcactgcaacctccacctcccgggttcaagtgattcttctgcctcagcctcccaagtagctgagactacaggggcatgccaccatacccagctaattttttgtatttttagtagagacgaggtttcatcatgttggacaggctggtcttgaactcctgacctcaggtgatccatgcacctgagcctcccaaagtgctgggattacaggcatgagccactgcacccggccgagaaagctctcttattgtctttgcccctagctacagataaggcaaccacggggcaagaaacttactgcgtattgaagagaaaatcccagcttcctatccaggcttcaggcagggcccatgctatggcctggagccccctttgacctcatctgctccacttgcctcttgcttgctgctggtcttttcttccctgaacccaccgtcctgttcctgcctctcgcccttggaagtgtctggtcctgctgctcttctccctgttaagcatgtgacaaggaatcgtatgcttcaggtcacaggttgaaagcccccttctcgggaagacctgccttgtcttgtccacccaatataagtgtctacttggtcactagccactgtcactggtcgtgattatcttaccatctgccattttctcatttatttgtttgttttcagttaatagaacattgct

SEQ ID NO: 29175 - DNA, 1076 bp, Homo sapiens
attcccctcccattttgaataatcatatgttgaacggcatgcaccgtgcttgcaaaatagtgagctccatgagcaagcaagtgaggcagggagaaggtgggggcacatcacctgtctgagagtaagcaagatgtgacgccatgacaagtcaggctggtcataattggccccagttaactcgcatagatgcgtcaccctttcatacacactccagggcaagaaattttgtattgtttctttgaagttatccaagaaaatacttcctcaatttgatctcttcagcaggtgcaaaggaagaaactggctttggggaagcgtggttgcctacttaagaaaaattatttttaaaaaatttttatttattatttattttgagacggagtcttgctctgttgcccaggctggagtgcagtggcatgatctcggctcactgcaacctccacatcctggtttcaagtgattgccctgcctcagcctcccgagtagctgggattagaggtatgtaccaccacacccggctaatttgtgtgtgtgtgtgtgtgtgtgtgtgtgttttgagacggagtctcgctctgtcgcccaggctggagtgcagtggtgcgatgtcggctcactgccagctccgcctcccggattcacaccattctcctgcctcagcctccggagtagctgggactacaggcgcccgctaccacgcccggctaattttttttttttgagacggagtctcgctctgttgcccaggctggagtgcagtggcacgatctcagctcactgcaagctccgtctcccggggttcacgccattctcctgcctcagtctcccgggtagctgggactacaggcgcccgccaccacgccctgctaatttttgtatttttagtagagacggggtttcaccgtgttagccaggatggtctcgatctcctgacctcgtgatccgcccgtctcggcctcccaaagtgctgggattacaggcgtgagccaccgcgcccggctaatttttttgtatttttagtagagacagggttttaccgtgttagccaggctggtctccatctcctgacctcgtgatcc

SEQ ID NO: 29176 - DNA, 1158 bp, Homo sapiens
ggcagatcacctgaggtcgggagtttgagaccagcctgaccaacatggagaaagcccatctctactaaaaatacaaaattagccgggcgtggtggcacatgcttgtaatcccagctactagggaggctgaggcaggagaattgcttgaacctgggaggcagaggttgcagtgagccgagattgcaccattgcactccagcctgagcaacaagagtgaaactccatctcaaaaaaaatattttaaaaaaaccccacaaaacaaaaaaaaatgctacaggtcagggctgggcgtggtggctcacacctgtaatcccagcactttgggaggccaaggcgggcggatcacctgaagtcaggagtttgagaccagcctggccaaaatggtgaaacactgtctctattaaaaataaaaaaaataaaataaaaaaaaaaactagccgggcttggtggtggttgcctgtaatcccagctactcaggaggctgagggaagataattacttgaacccaggagtcggaggttgcagtgagctgagactgcgccattgcactccagcctgggcgacagagtgggactcttgtctcaaaaaaaaaaaaaaaagaaaaagaaaccctgtctctactaaaatacaaacaattagccgggcatggtggcacgcgcctgtagtcccagctactagggaggctgaggcaggggaattgcttgaacccgggaggtggaggttgcagtgagcggagattgtgccactgcactccagcctggtgacagagcaagactccatctcaaaaaaaaaaaaaaaaaaaaaaaaacacacaaaaaaaactacaggtcagaatagagtgacacatagtctctctgaaatttagtcagttcagtttcattccctgggaagttaattttaatttagaagctgctaattggcaggccaaggtccacatctggcagatttattttcttggcatatactgacatattacagttttaaaagtgagttgccaatgttgaaaatttgggatattgtacaaaaatatcctaagttgccacttgtcctaaattcaaaatatctggcaacactgggcattcaaactggcaggaattgtctggagttgaatagcagctgtctcctttagacagggcttgtgttctctggttgcctaag

SEQ ID NO: 29177 - DNA, 1050 bp, Homo sapiens
aaactcctgacctcaggtgatccacctgcctcagcttcccaaagtgctgggattacaagtgtgagccactgtgcccagctgggactatttttttttttgagacagggtctcactctcttgcccacactggagtgtagtggcacgatcacagctcactgcaacctcaatctcttgggtttgagtgatcctcccacctcagcctcctgagtacctgggaccacaggcgtgagccaccatgctcacctactttttttattttttgtagagatggggtatcgccacattgccactgatctcgaactcctgggctcaaaactgttctcccaccgtggtctcccaaagtgctgggattacaggcgcgagccatggtgcctggcctaaggtgggatcttgagcatgtcttttttctggacctcattttcctcacttggtaaaatggcagtcagctctgccctgctgtcctgtgtgccaggtcctgggttagatgctgccaccaaaaggatgaataaggtaccacagaggatgaggagtcggggctggcaatgcacaccagcctgcactgccacacttccaccttgctcttcatcaggcatgaaggagagctgtcatagaagtttgctttgattgattggaacctgaacaactgcagatggggctgtgcccttgcctgcctggtggcttctttgatactgacagtggtgatcctgggagagaacaaatctgagtctacccgctgggtagctgaggctcagctggagaaggaacctgcccacaaccatgcagtgcatgagtggtggtgtctcgtctttgtaccctctagtactctaaccactaccccatactccctttctcatgccactttgctttctatctactggtatccccacttcggttttaagggtagggacttccttaatctggatctccagcctccagcacagcatcatctaattatagtaaaggacctattgtttgtcaaggacggctgtgacaggagtacccaccttgttgtccagtctggcctgggtacttgacacacattatttctgt

SEQ ID NO: 29178 - DNA, 1026 bp, Homo sapiens
cttgaactggcctcaagcgatcctcctgctttggtctcccaaaatgctaggattacaggcgtgagccaccacaccaggcccccaggtcagggttaaactcagagcttctgactcccagtctgaaacttttttcttggcctcaaacaataggacagagcctgtcaggtgtgggttgaactctgctcctccttaggaaggaagtctcaagcttggcctaagctttgagaattctggggggcagagcgtgaggtctgaaaggggctgttgtggcaggcagggcggccacaacagcccctttgctctgttgtgtgggtgcagccgggagtcagccggaacgttgagcctggcagggagagtggacccgcgcagagctcagtctagatggctgggaggcttgtggggagaagacggttgagtcctgacagggccggaccccagggcaggtttggactgccattttggctctgatgaggaagggaggggtggggcctccggggaaatggggtctaggaggaggaggagctgtgagaggccagtggcagtgacccggtctctgttcttgaaaactgacagatactcctgtctatgtctggagctaatgggcaaagtcttagtgtcatagttgggtagccaggcatcccaggcctgaggtgtggagggttgtagatggcggacagggtggacaggtgaaggggatgctggtcctgattccctgtgccttagtggggctgagggcacagagggaagtagcgaaatctagctgtgaacttggtcactctcctgagcctgtttcttggttgttgttaaatggctttcttggttgttgttgttgttaaatggcaggaatgatgagatatgcatgttgcggggacttagtaggaattacgatgctgggaaagccaggatcctttgaaaagaaccagcgctgccctcttgtgatgttgtcattcacttactcatcaagtaattgtggagcacctaacaagtgccaggtgctgcaggaggtgaggaggtggtgcagtgaac

SEQ ID NO: 29179 - DNA, 1030 bp, Homo sapiens
tcactgtgttagccaggatggtcttgatctcctgaccttgtgatccgccctactcagcatcccaaagtgctgggattacaagtgtgagccactgcgcctggcctatctgatttcttgtattgtaacgatagtgcatatacatttatttatttattgagacagagtcttgctctgtcgcccaggctggagtgcactgactcaatctcggttcactgcaacctccgccaccccagttcaggctattctcccatctcagcctcccaagcagctgggatgacaggcgtgtgcgccaccacactcggctaatttttgtatttttagtagaggcagtgtttcaccatgttggccaggctggtcttgaactcctggccttaggtgattcacccacctcggcctcccaaagtgctggaattacaggtgtgagccactgtgcgtggcctatagctcattttaaatataccataatttggccgggtgtggtggctcacacttgtaatctcaataaatatactgtaatttgtctgggtgtggtggctcacgcctgtaatcccaacactttgggaggctgaggcgggcagatcacttgaggtcaggagttcgagaccaccctggccaacatggcaaaaccccatctctactaaaaaatacaaaagttagctgagtctgtggtggcatgcacttgtagtctcagctgcttgggaggctgaggcacgagaattgcttgaaccggggaggcagaggctacagtgagctgagattgcaacactgcactccagtctgggcaacagagtgaaactctatctcaaaaaaaataaaataggggccgggcgcggtggctcacctctataatcccagtactttgggaggccgaggcaggtggatcacaaggtcgggagatagagaccatcctgactaacatggtgaaaccccgtctctactaaaaaaatacaaaaaattagccaggcgtggtggcaggcgcctgtagtcccagctactctggaggctgaggcaggagaatggcgtgaacccg

SEQ ID NO: 29180 - DNA, 1069 bp, Homo sapiens
tgcccactgcagccttgacctcctgtgctcaggtgatcctcctgcctcagcacccctgagtagctgagtagtggggactacaagcatgtgcatgcccagctaatttttttgttttttgtagagacattgttttgccatgttgcccaggctagtttcaaacttctgtagcaatcctcctgtgttggcctcccaaagtgctgggattataggcatgagccactgtacctggcccgaagacttaattttgttagtgctccagaattaggtaggcccctagaactgatgaactctcttttttttttttttttgagatggagtctcgctctgttgcccaggctggagtgcagtggcgcaatctcagcccactgcaacctccacctcttgggttcaagcgattctcctgcctcaacctcctgagtagctaggattacaggcacgtgctaccacatccaactaatttttgtatttttagtagagttggggtttcaccatgttggtcagaatggtctcgaactcctgacctcgtcatctgctcgccttggcctcccaaagtgctgggattataggcatgagccaccgcgcctgggtgaactgatgagctcttacaagacctgatgtaccagatgctgacattagtttatatagaggggtagacctttcctgttactggaatactgatgtctttaactgggtagttaaacagttttatttcaaggatgcgcttactggtagttattgacttattttcaggtcacatgtacttaagcattgtaattattttatatagtcatcccttgttattgagggaattggttgcaggactccccgtggattccaaaatccgaggatgcccaagtcccttaaataaaatggcatagtatttgcatataacctacacacatcctcccctatactttaagtcatctataggttactcatagtacctaatacaatgcctatgcatcacttcattcacatggcttcaatgtagtacttggcacatggcaaattcaggttttgctttttgaaacgggaatttctttgtttttcctgaatatttgagatttga

SEQ ID NO: 29181 - DNA, 1048 bp, Homo sapiens
ggggtcaagcgatctttcacctctgcttcccaagtaactgggaccctgtgctgccatgcccagctaatttttttgtttttttttgtttggtagagatggagtctcactatgttgcccaggctggtctcgatctcctagggtcaagtgattctcccacctcagcctcccaaagtgctgggattgctacagatgtgagccactgtgcctggcctgaatatacgtattgttaattctctgatttcaatggcagggactgcttatacttctaatgtatacttactgcattctggtttttgttaaaatttgatatttatgcccattactttcactgattcattacccctgaaggtagggatcttgccttattttagtgccatatacaaattcagtgcacatattttgagcaactaataggtactgagcacttatggagcttccatttagtggtaagtaaatattaattgaattttttttttcagtgtatccaaagtgtgtacatcagtaagatcataagcagtgatcgagatctcttggctgtggtgttctatggtaccgagaaagacaaaaattcagtgaattttaaaaatatttacgtcttacaggagctggataatccaggtcagtaatattttaagatcagcttttcccttatatatgagaatatcagtactctgatcaaagaggactgtggagaaggaagcaagttacatcttgtctaggagtatgctttcctccataaggggaccttgctcgatgtggactttgttaaatgggttaaacagctctggggtgaaaaagggtccttctgttagtcttgtggtaaaggcagccactgacattcttctgatttttctttccatttgactccctgcctctgatcaggtgcaaaacgaattctagagcttgaccagtttaaggggcagcagggacaaaaacgtttccaagacatgatgggccacggatctgactactcactcagtgaagtgctgtgggtctgtgccaacctctttagtgatgtccaattcaagatgagtcataagaggatcat

SEQ ID NO: 29182 - DNA, 1026 bp, Homo sapiens
ctacagtctgaaacttttttgagcaccgacctaatgttcaaaggaagtgcttattggagcattatgggttgttagatttttgggttgggaatattcaaccagtaagtactataaaatgcaaatattccaaaaaaaatctgaaatctgaaacatttctggtcctaagcaagcattttgcaaagggatacgcaacctgtagtacgttctttatcattgttttaagtagttaatatattgtggtacagattctgaggtggtatagcaaattcgattgtattattaaaaagcatatttatattttgagagcttgcttaggattattggagagaataaaacagtgaagctttggtgttatgagggaattttagatagaaaagtgcagtttttcagttcatgctctttcattttttactccctcaggttaaagctgaagctcaacaaagatatagtgatctctgtgggcatttataatctggtccagaaggctctcaagcctcctccaataaagctctatcgggaaacaaatgaaccagtgaaaaccaagacccggacctttaatacaagtacaggcggtttgcttctgcctagcgataccaagaggtctcaggtaggtagagatgccttttgttgttgttgtttttgagacagggtctcattgtgtcgcccaggctggagtgcagtggggcgaacatgactcgctacagccttgacctcctggactcaagcgatccttctgtctcagcctcccaagtagctgggatcacaggcatgtgacatcacacccagctaatttatttatttatttattttttaagagactggatcgactgggcacagtggctcatgcctgtaatcccagcactttgggaggccgaggcaggtggattaccgaggtcaggagttcaagaccagcctgaccaacatggagaaaccccatctctactaaaaatacaaaatgagctgggcatggtggtgcatgcctgtaatcccagctactcaggaggctgaggcaggagaatcacttga

SEQ ID NO: 29183 - DNA, 1050 bp, Homo sapiens
aaagttagattggaggaatctagaattcaggagctagtccagtatacaagtagataatgagaactcaaaaacaatgcacagggctgcagtctaataacagatgtactatagctttttttagaaacaaaattttctctttacagtgatcacataggaataacagatttaaaaaccatttaaggctaggaagcaaaaccaaggcagactttagattttacttaacagtcttaaggttcctgggcctgccaggaagtgacagattttactcattcactgtaaggctgggaatctttgaaggcaggctttctatgtacattctcaagtatgatattctagttaaagccctggtaatataagcaatatttgttgtattctgttataagagagaacaggctgggcacagtggctcacgcctgtaatctcagtacattgggagcccaaagtgggcagatcgcttaaggccaggagttcgagaccagcctggccaacatggtgaaacgctgtctctactaaaaatacaaaaattagtcagacatggtagtgctcgcctgtgatcccagttactggggaggctgaggcgcaagaatcacttgaacctgggaggtggaggttgcaagatctgagatcgtgccactgcactccagcctgagcaacagagtgagactctgtctcaaaataaaaaaaaaagagagagagcaaagtcttactggacttttgcaaataaccacattgccgtaagaatactcatgaatagaccagcatggtggctcacgcctgtaatcctttcactgtgggaggccatggcagcctgatcacttgaacccaggagttcaagatcaacctgggaaacatgcccaaaccccatctctactaaaaaatacaaaaattagctgggtgtggtggtgcatgcctgtactcccaggcccttgggagactgaggaaggagaattgattgagcctgggaggtcaaggctacagtgagccatgattataccactgtactccagagggagaccctgtctaaaaaataaaaaataaaataaaaaaaag

SEQ ID NO: 29184 - DNA, 1067 bp, Homo sapiens
aatattccaaatatatgtcataaacacattactctggcagggtggctcatgcctgtaatctcagcactttgggaggccaaggcaggaggattgcttgagctcaggagtttgagaccagcctaggcaatatagcaagatcctacctctacaaaaagattttaaaaattataatagctgggcatggtgacatgtgctggtagtctcagctacacaggatgttgaggtaggaggcttgtttaagcccaagaggttgaggctgcagtgagcctggatgacagagtgagaccctgtctcaaaaataaataaataaatacagaaaagaaaagaaaattatcttcatcagtttttaattgagttctgtttgattttgattagagatttcaggaattcatcagtttcttcattagagttctgaaaattctttatttagtccatagatcttaaagtttttaagtttttagaaacttgtatttaagattacttgttagagtcttcttatgaatctgattgcaaatgctcttagagaagaatcagaaccacagatgacaaagacttggaacaaccatggttgaaaatcttttttttttaggcgactaattttttttttttttttttttttgattcgcagtctcgctctgttgcccaggctggagtgcagtggtgcgatctcggctcactgcaacctctgcctcctgggtacaagcgattctcctgcctcagcctcccaagtagctgagattacaggcacatgcctccacgcccggctaattttttttgtatttttagtagagacggggtttcactgtgttagccaggatggtcttgatctcctgaccttgtgatccgcccacctcggcctcccaaagtgctgggattacaggcatgagccaccatgcctgtccccatggttaaaaatctaatggaagttcattataatcagcagtggacaaggaaatttgtcaatttgttatttatgtgtcgcaagcaatacagaaggttaccagggtgtaaaaacaaaaaaatcttaaccctttcatagctcaggttttatgaaaaagttgtgaatt

SEQ ID NO: 29185 - DNA, 1118 bp, Homo sapiens
ggcactgcgaagccactcagccctggcgggattccctcaggtgctggaggactcccggacagtgctcaccgctgctgatgtgctcccagatgggcccttcccccaggacgagaagctgaaggatggtatggtctgccctgccccgccctgtcctccgcaccacccgatcttctctagctgctccttctctcctgttcttgtcactctttttttctccccggaagtgccctcttgtggcaccttctaagtggtccccttgggcagatgggcgtttcgtgagtggcctccctaattaactggctactttttagcaatagcatttctttttttttttttttttttttttttgagacagagtctcactctgtcgccaggctggagtacagtggtgtgatctcggctcactgcaacctccacttcccgcgtacaagtgattctcctgcctcagcctcccaagtagctgggactacaggcacatgccgccacacccagctagtttttgtattcttaatagagacgaggtttcaccatgttggccaggatggtctcgatctcttgacctcatgatccgcccacctcggcctcccaaagcgctgggattacaggcgagagccactgcacccggccacaatagcatttcttagattacactgagaggatgcggacagctcttatatattaaatagtagatactttacaaccatgaactcaaatctccaccataactctgggggaagacactgttctctctactttctatatgaaagaggacaagtgatttgccttggctcttccctctgaatcaggctgacttcctgagttctttgaggttcaagattattctgaagccccggggtccctgcctgacatgtctcagacccaccctggcatatctttggagtctacttatctttctgcgtggcctcttagtgctggtgagggctgcctgggccctttctgacaggctggctccaatagggactgcttagacctgtttacacagttacacttttggctaacctggatctgggggacttgctaccatgatggacacatgttccttggtgagcaggtctgtgcaaacctaccctccaaggccaagggagctgagagcgcca

SEQ ID NO: 29186 - DNA, 1024 bp, Homo sapiens
gtgtttcttcatctgcagatggcccaggagctggggatcagtgagaaagactccaacttccagaacccatttaaaatcgaccgcacagaggtgagctgccagggcctatgcctgtgtctgctttgcctctgctgggccataggacaccgaggcctgcaggggctggggaccttgggtggctttggacttggagccaggcagcctgggcctgggtccagaagatatcactgactcattggagcctgtgggcaagtcattgctcccctcttagcctcaggctccctgtctgttcacagcatgtgaactccagttatggggggtagttaggaggctatgaacaaacccatcccagcacaaaataggcatcccacttcaggtggatatcagggtagctagggagatcaggccatgctcttccctgcctttgaacctctgagcaccaactgggcttccatcccgcactcctgtacatgctctcattccaggggttccagggggctgaggtgggctttgagagctggagaccaagtttgggataaaagatgaggacaggccgggcacggtggctcacatctgtaattccagcactttgggaggccgaggcgggtggatcacctgaggtcaggagttcgagactagcctggccaatatggtgaaactctgtctttactaaaaatacaaaaaactggccaggcgtggtggtgcatgcctgtaatcctagctattcaggagactgaggcaggagaatcgcttgaacccggaaagtggaggttgcagtgagctgagatcgtgccattgcactccagcctgggcaacatgagtgaaactccgtatcaaaaaaaaaaaaggggggacagatacgatagatggaggaagggattggaagtgacagggctaggaggggcaggaaggaagggctgtggtggctggaggactggacttgtcaaaccctggtgtcgggaggggtgttgggtgtctcaagggtctaggatttaattctgcctccaggccaacaagctagcct

SEQ ID NO: 29187 - DNA, 1032 bp, Homo sapiens
gctgactggccttggcccacccctccctgtgctgcagcttcattggcaaaatgaatttgatggtatctgtatcccctgcccagccctaacctgtttctctgaggctggcctccctacggggctgcagcagcaaagggaagccaagccttagagaagcctcatggaagggcccagaacatcctgcacccatcagttactcggaagtaaggggacaagaagcagctggaagagagctgggtgtgggggctgggaggagtgctggagaaatttccccatcagaaggcccctcactgggcagtggaggcagggcagtgtggtgggactgactcaacagacatagtttcatctccaccctgcccttctcaggttgtgtgaccccagccacatggacacccgagtctgtgaactaaagggctggtccatggcattaacagtggagggtgtccaggttcttgatgtcttgaacaaagaattgggcaaaatgcacaaagcaaggaaggaatgaagggttttactgagaatgaaagtatactccacagcatgggagagggcctgagcatagggactcaaggggcccgttacagaatttttgggagtaaatacccactagaggattccattggttacttgaggtacaccctatgtaaatggaaaggatgaagtaaatttacaaattcatttacagcatataccctatggggaggatattccctgttatagctgaagcgtgaattggccttatgttccctgcctccagaccctattttcctgcatcaacgggaaagggtcagattcactggctcagctgtttaacctgtcctggtgccagcagctggagctgggtgtcaggaccagcccgcaagctcttccctgccggaaggaccaggccagtcgctgtccttttcatgctagagagtggttgtggttgctgacttagcagagaaggtgcttggctttccccttaactggagaaaaaactttctaagaaccaggcctggttggcagcagacctagctttcttggggtggcagg

SEQ ID NO: 29188 - DNA, 1032 bp, Homo sapiens
agtcactgtcccaacttgttggggctctggagagctgtgtctgatacctgaattcatgcagtccccctgccatcagcctccttgtcacctgagcctgcagaggaacttccagtacctgagcctttccatggcactgatttgggcctctgcttgcttctctctgcagacacccagtttcatctttggcagagtatcctgcatgcagtacctggcactgaataggcactctgtaaaggtgtgtctaatgagggaaggaaagcacctcaagttcagtctgggtgttcacaccattgggaaagttggagtggccaactggctgagctaggagtgagtgttggggatggttgtggtcagcacacccctaggaggtggaggtgggagaagagtggaaactgacttcacatttctccagggagggatgctttggaaaaactgctcagtgagatgaagcacagatctgcttttcatcccttttgtacctttttaaagacataaggtatgttttgacactggagtatatatgagggttgctaacgtttgggttgaaagagctgctgttgtccacagcttatttattttccacccatttttgtctcctggtctcatccagttacatttcctgggatatgtttttggaggttgctcagatcacggcactagagtccctttgggtttctcctccctcctctgtctatttggcctcgcccttgacaaacattccccacattcacacccaggcctttggcctaatgttcttgaatgctgcttgcctctcattgaataggcttttatgtagctctcatattcagttcatattttggcattttaaaaaatatatatttttgcttctttctcaactagatcatttcactcctcaaatttgtaattaaaaaaaggaaattctcaagcagttttattcaattagaactttgcaaatatcaaattgtccgtatccttctggattctcgtctgaacattgcttatctgcgtacatatcacagtgttttcacatagggattgctgtatgttgaa

SEQ ID NO: 29189 - DNA, 1048 bp, Homo sapiens
ttgagactagcctgggcaacatacctggacaacatagtgagaccccatttctgtaaaaaaaaaaaaaatacaaaaattagccaggcttggtggcaccagcctgtagtcccaactacttgggaggctgaggtgggaggatcacttgagcctaagaggctgaagatacagtgagtcaagatcacaccactgcacttcagcctcgtcaacagagcgagaccctgtctcaaaaaaaaaaaaatacatacacacacacacacacacacacacacacacacgtatatgtatatatattttttaaattaagaaaaaatgtctgctctatgctggacacttaaagtgacttcccctgggtcctagggtactttctgagccttaatttcctctgtaaggtgggggttgggtaccttagctcacttagttcttgcagcacctatgatgtagctaaggtacaaaaaaggaagaggacaggacctaacctcttttggctctatttaaaaatgaatgaggaactgaatgaacttcagtttgcacattgatgtaggactaggggacctgtttttagaatatgtttggaaatgtttattttttccttttgaaatggcttttgtaggtgtggtagtgggacacagaggagcagtcacagagtgtggtgcaagtgaccacaaaattaagggttaaactttgttgacatgatggaattttttagagtagcagaatcccagagcctgtgccttaaggtaaggctccctggggaactttgtttagaaatgaatcctaaactatcgaagggcttgcaaactagaaaatttctgcatatctcaggccttgagaattgctaatggatatgtatctaaatgtcccttacaagcttgctcctccacgtggccctgtggaacaggtctgttgggttcaggatctagtttggaacagtgatgaaatttcgagctgctgaaccagatatggaactgctttgctaacctggtgtctgcccagcttaagccccctccatcccacagctgtgaaaggaaatcatgcttcttcccaagtg

SEQ ID NO: 29190 - DNA, 1050 bp, Homo sapiens
ttttctgatgtgggattccatattcttcgctgtcctatgaaaatgaggtgggagatgccttgattcaggaagcctgtctgtctaggagccccttctctggtcaaaagttgtttttaaaaaatccttgctgcatttcaacgtgaatgagtatccactgtattcatagcacagtgctagaagctgttagagttgaatgaaatggcctctgctttcagggagctaacatgtaaacatccagtcataatacatgggaaaatacaacagaggctataacagaggaacaactctaaatctttggaggactgaggaagggaattagaaaaatcttcacaaggactttggcatttgggctgaattgtgaagggtgagtaaataggattttagaaggtaaaggagcaggcatggtgtttatttagatagatttagacaaagttgggaataatttggcatgctctaggaatatgtgtgtcagagtactgcataggacagaggttctcaaacttgaatgtgtctatgaactcccagggtatacccccaaagatctgaatgtggaaggtctgggatgttgtccaacaggaacacctaactagtggagggggcaggatcagaggagccttctcagggataagctgaggtcttaaaggggtggaaggagagagcagctgtgttccaggctgagtgaacagccattttgaagggcttgaccagtgctggtgctcgagtgtctgggttttgtgtagaccacactcttgataactgtgctgttcgttatcttccacaaacagggttttggtcaggtgcctccttgcttcagtgtgttctttatcagtcaggattcttggtgataagcagcagaaaccgcttctatctagcttgaacagaaaaggatttgttagaagggtggttcttggagtgactagaaaagctggagagccaatttggaaaatgggccagaaccaaggaggctcctgcttagtactcctccgccttcatgatctgtatattgtctctgctttcctgggtcattccctcaagggtcgcactcctggt

SEQ ID NO: 29191 - DNA, 1050 bp, Homo sapiens
cctgggtgacagagtgagactccgtctcaaaagaaaaaaagaaagtaatgagatggggctgggcgccgtggcttacgcctgtaatcccagcactttgggaggccgaggcaggtggatcacaagggcaggagatcaagaccatcctggctaacatggtgaaaccctgtctctactaaaaataccaaaaattagccaggtgtggtggcgggcacctgtagtcccagctactcaggagggtgaggcaggagaatcacttcagaaccagggaggcggaggctgcagtgagccgagatggtgccactgcactccagcctggcaacagagcgagactccatctcaaaaaaaaaaaaaaagtaatgacatgattacctaagtgcccctccacacagccccaaatctcctttgttgtcactccgagtctgtcttacagcttttccccaagttgtgatgagcataaatgtaaaatccaagaaatgtttattttgtaaggggaaaaaagtgtgggtagaggagagactcagacaaacctaaatatagatataaattcaaatctcagttcagccactttgtagcttatgtagggggctttggcaaattatctaatttctttgaatcttagattcctcacttttttctttctttttgttttttttgagatagcctctgtcccctgggctggagtacagtggagagatcttggctcactgcaacctctgcctccagggttcaagtgattctcctgcctcagcctcccgagtagctcggattacaggtgcccaccaccacgcccagctaatttttgtatttttggtagagatggggtttcaccatgttggccaggctggtcttgaactcctgacctcaagtgatccgcccacctcggcctcccaaagtgctgggattacaggcgtgagccaccaagcccggccagtttcctcacttttaaaacataataatattggtctcagggttgatataacgtactaagtgggtatcagtggtagctacttttatgttgtcctcatggaggacatgaatgaatttaatttc

SEQ ID NO: 29192 - DNA, 1050 bp, Homo sapiens
tgagatcacaccactgcactccagcctgggcgacagagtgagactctgtctcaaaaaataataaaataaaatttatttatttagtgaccttgtctcactttgttgcctaggccgaccttgaattcctaggttcaagcgatcctcccatcttagcctcccgtgtagctggaccaacaggcatgtgcagcattaaaaaaaaaaaaaaaacttactatgtgtaatatagcaaagttttttaaaagttaaaaacatagccttgaactaaaacatcatgagcacatgtcagaaatttattaacattgttaatgaagataacaggatgacaaatggatcaaaggagactgcaagaaactgatatttacatagaaaaaagaatgcaggaataagattgcaaatttaaatacaaaactagggccagattccgtggttcatgcctgtaatctcaggactttgggagactgaggcgagtggatcacttgaggtcaggagctgaagaccagcctagccaacatggttaaattaaacttcgtctactaaaaatacaaaaattagctgggtgtggtggcgggcacctgtagtcccagctacttgggagactgaggcgggagaattgaaactgggaagtggaggttgcagtgagccaagattgtgccactgcactccagcctgggtgacagagcgagactctggctcaaaaaaaacgcaaaactagttaatgtcctacagtgcaatgaaaacaaaagcttaaaggttttcttttctaccagacagaaatgattttaacttaacaattttctgcaggctaacatctaactttacagaatgggagccttaatcggtagtaaatagaaagtcaaacaaggtgatggttccatagagcatcagataacttttaggcaggcagcttagacagtgctgtagtataactttttttttttttttttgagtcaggggtcttgctctgttgttccaggcttgagtacagtggtacagtcgtggctcactgcagccttgaactctggcctcaagtgatcctcccacctcagcctc

SEQ ID NO: 29193 - DNA, 2297 bp, Homo sapiens
ccttaagtgatcctcctgccttagcctcctgagtaactggaattttagtataactttaaagaggcatataacgtttttttttggtcttatttccaagttttagttaatttttctttcctgttttcttgagacatggtcttggtctgtcacccaggttggagtacagtggcacaaactctgctcactgcaaccttcacctcccaggcttaagcaatcctcccacctcagcctgccgagtagctgggcctacaggtgcgtgccaccatgccccctgctaaagtttgtattttttgtagagatggagtctcgctatgttgcccaagctggtctcaaactcctgaacttgagcgatctggccacctcagcctctcaaagtgctgggattacaggcatgtgccaccacacctggccaataattttctttaacaaaataaatcacaattgagttcaagaactaaaagatgactagatcatctgaggtggaaaagagtccctggtaaaagtaattttaaatagttttgaagtagaattgtgaaattcagagtttggagaaaggaagagggtggtcacaagtagaaaagagaagacatggcacttacattcaaagaaagattgccctaccccacccctcaaaggcatgtgcagaagagggagtgagtacttttccagggtggatgatgaactaaagtgggtgggaagtgaaaacctttggaacagaagggagcagttcataggaagcttggaagcttgtgttaaagaatttgatttgattaagggccgggcacggtggcttatgcctataatcccagcactttgggaggctgaggcaggtggatcacctaaggtcaggagttcaagaccagcctggccaacacgaagtctctactaaaaatacaaaaattagctgggcgtggtggcaggcggctgtaatcccggctacatgggaggctgagacaggagagttgcttgaacctgggagacagaagttgcagtgagctgagatcatgccactgcactccagcctgggcaacagagcaagactctgtctcaaaaaaaaaaaaaaaagaatttgatttgatttaaaaggctgttggatgaacaagatactcaaagaagatgttcgtcactgggtaggaggctatggttgaaattaaggcagagtgtggacgggagtgaagaggtaaatccatgatgctaaggaaggagacttgagtgaacttaaggcaggaggaaaaagaaagagcaatggaaagtggagctgcagatccctctcctgttcaaactatgagagctggctcaggtcccctgctatagtgggccagaaaagcctggacttccactgctttttcctgcagagctgagtccctccagggctgccatgagaggcggggagagagagcactagacagagaagaccagaagaccatttgagaattcctttgggtttccttcatgattcctttttcttctcattctgaattgttttattttattatgtaatattcggtatatgcaaaggaatatatgacacctttgtgtgtattacaaaacaagcatttgagaatccgcacctctccacccaatttttctttgtggtttctttgccagtaaaagagttcactcatctgttgcttaaaatataggatgcttgagtcaccagcttgccatcctgtgtcattcaacacctcctccagactcttcgcaggaaggtgacccagaaaccccttgaaggacatgataccgtccctgtgctctgatgtgccccctggtgtttgagtggagtgatttttagatagcggtttgcctgttaaaaccttccctttgttccctatattattgcttgcattttagggcttctcagttgaaggatgtggttgaaagagcccagttcctcagctgctcctctgggtgactagagtgtgggtaactgatgttttaggtcctggagaaagcagtgatgatcacaaatagtagaatggagaaatggttatctcatattgatcttcaggtttgttactagtctacatttggttttttaaataattattagaaaaaaacattgtgggtggggagataggatcattatgatgaaacagttctgtacattcaatcaggatacttgttgggaattagattttgcatttacctccctcactggtgtggtccatctcattttcagtggcctacacacatcacacaccattattatttccatgttcttgtacttgttgggcagctctaatatgaaagataaaatgaacgaaaagtacaaatgaagaaagtttaggtgactattc

SEQ ID NO: 29194 - DNA, 1026 bp, Homo sapiens
tcatttatatgctttctaaatttttctttagtgaatatattacttttatgattttaacaaattattaaaaacagggccaggcgcagtggctcacacctgtaatcctagcactttgagaggccgaggtaggcggatcatctgaggtcaggagttcgagaccagcctggccaacatggtgaaaccctgtctctactaaaaatacaaaaattagcagggcgtggtggtgtgtgcctgtagccccagctacttgggaggctgaggcagaagaatcacttgaacccaggaggtggaggttgcagtgagccgagattgcaccactgcacgcctgggcaacagagcgagactttgtctcaaaaaaaaaaaaaattattaaaaacattgtctaacacaaggtgcataataaatacaaaatataagaataaatgacctttgtaaactaggtttcccagcccctaatagggctgggtaacaaatacctgttaaaggattattgactgaatctgtaatttggagaaactgtaaccctatttggaggcttcacattctttattcttgaccagaattaatttaaccagatttcaggttacctcattctcaggtagatgctgaaggctgagctgagcaaagtgatatttatgttacctccaagccacaagctccataaagttcatgtgaactcagggtctctttgtgagtcatggggctgcttgcaatgcacggatgataacaggaacctctaattttggttatttgcttttagagaccagaacccagatacagtttcctggggcctcacctactttgttaagcaacttagctataagtttacaaagcagctaaaaacaggagcaggggagtgagatgagcttgagcgtgccagcctagctcgtgggaggcctgtctctggccctgagctttgtggcctgccgtaggaactggagcttcattttcaaagctccataaaactcgccttctcccgggcctcccttttctgagtttcatggctctctgtggaaatgacagcct

SEQ ID NO: 29195 - DNA, 1083 bp, Homo sapiens
aacccccgcctaccaggttcaagcgattctcctgcctcagcctcccaagtagctgggattacaagcacctgccactgcacctggctagttttttgtatttttagtagagatggggtttctccaggttggccaggctggttttgaactcctggcctcaaacagtgcatcgatctcggcctcccaaagtgctgagactacaggtgggagccactgtgcccagctgggggacgtgtattatttttataatcacaaaaaacgtctttatgttatatatcatcgtggactatatcctcttttttctttttttttttttgagagtcttgctctgtcgcccaggctggagtgcagtggcacgatctcggctcactgtgcaacctcagcctcctgggttcaagcaattctcctgcctcggcctcccgagtagctgggattccaggcacgcgccatcacgcccagctaatttttgtatttttagtagagacagggtttcaccatgttggttaggctggtctcaaactcctgacctcatgatccacctgccttggtctcccaaagtgctgggattacaagcatgagccaccacatctggcctatattttcttactaacaatttatcttaaaaaaatcaggtttattatttttgcttctcagccatgtgtctggctttcctgagtcttttctctcctctctgccatccaccctacccatctctgctctgctcctgctgggccactggcaccaccctcttgaaagtctttcaacctaaaaacccatgacctggctgagcaccatggctcacgcctgtaatctcagcactttgggaggctgaggcaggtggatttcttgaacccaaaagttcaggaccagcctgggcaacatggtgaaaccctgtctctacaaaaaaatacaaacaattagccaggcatggtggcacacacctgtagtcccagctactcaggaggctgaggcagcaggatcacttgagcccgggaggtcaaggctgcagtgagctgagattgcaccactgcactccagcctgggcaacagagagcaaccctgtctcagcaaaaaaaaaaaaaaaaa

SEQ ID NO: 29196 - DNA, 1062 bp, Homo sapiens
gcagtgggaccattctgaccacaatgcctgtaatgatggggcaagagaaagtgcccattaagcaggtacctgggggagtcaagcagcttgagccccccaaagaaggagaaaggcggacaacccataatatcattgagaaacgatatcgctcctccatcaatgacaaaatcatcgaattgaaagacctggtcatggggacagacgccaaggtgggtgccaagcaaaattgtgttttatgttccaccatctcccctctacctgtttttgcctcaggagcctagagaagtcccaggctcaaggtaagtgaatacaagaccgagttagaggtgcttttttattaaagcatcttggtgtcatgtcaagattataaaatattaaaaaacataagggactggtgagggttgataaggcagtgacccgctgagacctttgactcctttggctatgctctgcagtgatggggactccactgtcagaggcagagaaagatgcctgccactcagtagttccagatacaggactgtgtgtaccttggagtcagctgatggcatagttttagctgtgtttaggggttaccttttaaggaaaagaaagaaaaaagaggttgagtctttgaccagcaacacatagaggaaactgatgttccaaatgtttctggtgtttcagtgtatgtgtcttctagaaagtaggagattttatttttaaaacctatctatgtttaaaccctattttgaaagaaaatttcattttccttgcctacaaatctgaaagctgtacatcctaagtaaaaatctatgccttaagataactgtccaggctaggcactgtggcttacgcctgtaatcccagcactttgggaggctgaggcgggtggatcacgaggccaggagttcaagaccagcctggccaacatggtgaaaccccgtctctactaaaaatacaaaaaattagccgggcgtgctggcaggtgcctgtaatcccagctacttggaaggctgaggcaggagaattgtttgaacctgggaggcagaggttgcagtgatctgagatcgcgccattgca

SEQ ID NO: 29197 - DNA, 1015 bp, Homo sapiens
atttgccttgtcctcagggagcatagttggcaaggaatctagacagcagcccttcttgagcttgacattgatcttctcatgaggaggactgggctccaggtggggaaagaaccccatcctcacttgtgggctagacgacctgggagtccacagacactgaagacacatcattcttcctattcatttcaaccttccctcgacagatcttcctgggaccaggtcttcaggacagtgtgagctagggtgagctcctgagctggtcttgggggaagtcagggtgggctttctggggaaggtgaatctaggctgacagcaggaggcattgatgagatctctctccttttcagtttattgaagtgctctgggctgatgtcattacatttgtaacttccatgccccccaaaaatgttttgaagacattcattttatcaaaatacaacatacatgcagaaaaatgcccacattttaacttacggcttgaagtgaagttacccatgcaacacccacccacatcaagaagtagaacattcccagcacccccagaagccttcttgaggccctccctgctcttcctgccccaaccaaggtaaccactcttctgaattctgtcactggagtttaatctgtctattgttcatcatttcagtaaacttatcaaagtacatgcttagaagtctggctgggagggccgggcacggtggcttacccctgtaatcccggcactttgggaggccaaggcgagcagatcacctgaggtcaggagttcaagaccagcctgaccaatatgatgaaaccctgtctctactaaaaatacaaaaattagccaggcgtggtggcatgtgcctataatctcagctacttgggaggctgagacaggagaatcacttgaacccaggaggtggagggtgcattgagcggagatcacgccattgcactccagcctgggcaacagagcaagactccatctcaaaataaatacatacgtacatacaaacaaaaattagctggatgtggt

SEQ ID NO: 29198 - DNA, 1044 bp, Homo sapiens
ccacccctccacctctctctcgatttctctctctccccctcagcatcttcccgctgagagtggtggggaagagccttgtcttcttagctgtcacctgccgaggcttctgggccactcaggccagtgcacccctgggcagagccccttaaagctgctgtcactagatgcccatggtccagggcctggtgggcgtgagaggataggtggcagggcagaaactgggcagccctgacttgatagcagcagggggagctcccaagctgccaagcccctgcctccagccttcctgagtttctctctcctgaaccctactctctcctttttgcttcctcagtttttatcaggctttctctgggggacagcagtctctgagcaccagggagcagttgccctcaggcctgtgcccagcatgccctcccctttttatacgaatgttttctaccagtgtgcttgggtttgccatgatgcgaggctgagttgctgtagcgtcttgattctctccctgggtctgcgttccctcccctgggcctgactgagcctgctcattgtttttccctttattacacaggacagccaggggaggaggggggcccagccctgggaggctggtgggaggcagggggcaggcctgcggatgcatgaaataatgttggcattattttttaattttttaaaaaataaatggtatcttatttaattgtcctgttccttcccactccccgcctcctaggatgttagcccaagctcagggtaggcccagggggctgggagaaatgaagccacccatggggactggggaccaggggccttcagcatggcttctaggttccctcctccccctaccccatctcctacctccacagtacagactgtccccaacttaacagtggttcaacttaaaccatgtttcaactttacaattggtctgttggggtattaaatgaatttgtgacttaggatattttcatttatgatgggtttatcaggaagtaaccccatggtaagttgaggcatatctgtatatatttaaacctaattaattct

SEQ ID NO: 29199 - DNA, 1152 bp, Homo sapiens
tcgagctccactaggccgaggaccctaaaccccgaagaaaggaaaggcctctcaccgtcctttcgccgccgccccgcgcttcctgatgagttcgtccagggagatgtccgccatcttgctccgccgagcaagccgaaagcagtcgagaccccgcgagcccgccccttcggccgctagggagcgacgaactacttccggcgtccgcggaccaactctcgcgacagccagctcaaagcaggcaagaaccggaaggggcggggacgttccccgtgagccttcgcggtgctggctgctcatctgcatacggaagttcggcacattatgaattatttattttcctcgagggaaaaaattaaatgaaaagcaacaaaatacattattaacaagtgagacaaacttcaatggaactggatcatgacctcaacagtcaactacgatagtcatcatacgcctaatgagaatagaattcattacctaggaaataaactaaaaacgtccttatgccttaaacttatgagtaaggaaaataacgattcggggtgacgcccgaatcctcactgctaatgtgagacgaatttttgagcgggtaaaggtcgccctcaaggtgacccgcctactttgcgggatgcctgggagttgcgatctgcccgaccttattcacgcctaaaaagtagactgactgtggggtggtcgtgttttttgtttcttgttggtaggtggtgaatgcgtttttttcgttgttttctccgttactcaggctgccagttgcttggcagtcttgtcgctggctgtggacgctctgcacttcatcaccgtccccagctgcgctttgagccggtctaaggttgcccacagtattgacgttgggacccacgaaactggcaatttccatgtgtgcggccttacccagttctcccaaacttctgcgtataaccgcttctctgtgcttcagaaagataagtccggccccggcctcacacagcagctcagttcgtgacagcgtttaatatgtaaaatggagcaaataatttatagggcgttgggagagttaaagagactaattcatttacgtgttaaatacagggaatggcttttgcattgatataaccccagcctccagcatgcgccagacctgacgtaggtgttcggcac

SEQ ID NO: 29200 - DNA, 1047 bp, Homo sapiens
atggaggttctgaagggtggggactgtctctcacacacagcctggccttccaggtgcccatgatgggtggaaagtgtgaacttacaacttgtaaaggggtcttccttttacaaaaggttctttccctcaggcctcgcccctttgctgcctggaagtgtttgcagatgtcaggaccctcactcaaggaggaatgggcttcagactgagggaggaggagcatttgcatgggggtgagagcatgaatcgaagcccatttgctgctggtattttgggaactcacccactgcacaaagcgagacaccttggttggccggtgggccaggtccccagagtttggtgatcatggctgagagatggactgtgcacctatttggtgcgtttggacagggtcgttttttctatgaagctcaggtttactgagcatttagtatgtgctgggtgctgttctatacccttcgcatgtattagtaactcatttaatcctcctgacaatgaggcaggaactattatcattcccattttacagaggagaaaaccaagtcccagagaagtgaagccacttacccaaagtcacacagcttgtaaatggcagaactgggcagtgggaccccagtgctgaactcttggtatagctctgtgttgcctctccttcttgaggtgaagcctccctaattggaagtaagggtgtggacgatgctgattggaagtaagggtgtaggcgatgcatttggagtctggatctgcttcctgcctgggtgaccacagcagccacgtggcccctctgggcctcattttaaaagggggcggttaggctcccctgcctcgcatccctccaaatgttgttttgaggctctgttggaatggaggaaagaatcaccttgcaaaatgtaaagtgctgtgtacctgttatgattgcccccatgaactggcgtctaccagatctgggctcccctgggtaggggtggggtgttgggaggaagacactggacctgaaccttgaggttgagttggcagggaaggcagtggaacaacacatgtgttacagca

SEQ ID NO: 29201 - DNA, 1024 bp, Homo sapiens
ccggccttggccttctaaagtgctgggattacagatgtgagccactgcgcctggcccctacgtattatttttaaacccatttctctcatcacctcccataaaaatgtaacagtatatttttatgcgagtaaatgccatttttaacaggtacatatttcatattattgacatcctatattttagttaataggcttaatttgttagagcagttttaggtttacagaaaagttgggcaaaaagtacagtgttcccgtataacccccatagcttccttattattagcaccttgtgttaggatgcttcattggttaggattggtgaagcaatatgataaccttattaactcaaggccatagtttacatgagggttcactcttagtgttgtaccttctgtgggctttgacaaatgcatgatgtcctgcattcaccattccaggatcacacaaagtggcttcactgcgctaaaaatgctgggctcccttcatccctcccaccagaccactggaaacgacaggtctttgaactatccatggagttttgccttttccagacagtttgggagttgggatcatacagtttgtagccttttcaagttgtcttcttttccgtagtaatatgcacttaaggtccctccatgtctttctgggacccaataacttgtttcttcttattgctgaataatattcctttgtctggaagtaccacagtttgtttgtccattcagctgccgaaggacagcttggttgcttctagtgtttggcagtgatgagtaaagcttctatcaacattcacgcgcaggttgttgtggacagcttctgggacataagttgtcacatctgctgagtcagtgccggggagcgcagttgtttggtcacgtgttaagagcacgcctcccctttgtaaggagctgccaggcgagcttccggggtggccgcgtccttttgcatttccccagtgaggaatgagagagagaaagtttatcatcttaatggctgcgtgttttgtcttatgacacactattatc

SEQ ID NO: 29202 - DNA, 1002 bp, Homo sapiens
cagggcaccccttctggtccctgtctgcatgctcctgctcctagcggtgctccctgccagggccccctaggacaacagatctgtgcagggtcggggacaggcgtgtcattctgcagggcctggccgtgtactcctcattatgagtccaagacacacccccttttatctgtgtgactgtattagcttcccagagctgctgtaacaaagaccacaaactcggtggcctaaaacagcagaaatttgttccctcacagttctggagccagaagcttgaagtccaggtgtcgctcccaccagaggctctaggggaggagcttcttgaagcttctggtggctctttggcttgtggctgcatcactccaatatgtacctccccatggctttcatttccacgtccaaatctccctctcctttctctctctctattttttttcctttcttgagacggagtttcactcttgtccaggctggagtgcaatggtgtgatctcagctcactgcagcttctgcctcctgggttcaagcaattctccttcctcagcctctggagtagctgggattacaggcgcccaccaccacgcccggctaattttttgtacttttagtagagacggggttttgccatgttggtcaggctagtctctaactcctgacctcaggtgatctgcccacctcggcctcccaaagtgctgggattacaggtgtgagccaccgtgcccagcctcttttttgttttcttttgagacggaatcttgctctgtcacccaggctggagtgcactggtgcaatctcagctcactgcaacctccacctcccgggttcaagtgattctcctgtcgcagcctccctaatagctgggattacaggcgtgcaccaccatgcccagctaatttttgtttttgtttttgaggtggagtctcactctgtcacccaggctggagtgcagtggtgcaatctcagctcattgcattctccgcccccacaggttcaagcaattctcctg

SEQ ID NO: 29203 - DNA, 1002 bp, Homo sapiens; identical to SEQ ID NO: 29202

SEQ ID NO: 29204 - DNA, 1002 bp, Homo sapiens; identical to SEQ ID NO: 29202

SEQ ID NO: 29205 - DNA, 1002 bp, Homo sapiens; identical to SEQ ID NO: 29202

SEQ ID NO: 29206 - DNA, 1034 bp, Homo sapiens
tactcttgctgcacagatgctccccacacacagagatgccccagttacgctggaccaaacccaactgccaccagcgccaatacccattgtgttccaggcacttcactttgtagccactgtgtcctccctcaccacccaagctgggcatcgctgggtgatgaattctagggcagcctcctctctcagggtggacatcacaatggtgcagtctgtcactgtctggtccctggtggcaaagggaccgggtaaacccgttgtcaggccaccttggggctgtgagatgtctgtaaggtcggtagtgccagtatggtaaaggcatttgaggggtgggcaggtcggtgcacaagatcagcgtccaccctgctgtcaaccagggcagcaggagcatggccacctcagctgcaaatcaggagggtttccattattggacccaaagatcgcagaaaacccagtggaggcagtttgcaggcggtactaaccacacaatgcatttgctctgacacaggaccagggcacgtagtagacgggcaggggtcagggaacctgcctggggttctgggccaggctacatagggataaagcaagccccttaaccgactggatcccaggatcctggcccataaagggagagggttggaagaagatcttccacatcccttttgccctaacctggcagtcatacacccaaactggggggtagtgttggctttgtggttttaataaggttaaaagcaggccaagtcttagctcaagaagctggcaggctgagttaattccggagaaaacaaacgggaagcccaagaccttggacatagatcttttattccctcctccttgaaattctccatccccaagcgcttattaatgtggaatttgctgcttgggggagaaccaactctccgacttcagaaacatttgtaagagcaaatttaataaagctaagaataataccattcagatgtaattcctttattttgcatgattattccttcttttctatcgcaaggcatttgaaatgcaaggagttattgaga

SEQ ID NO: 29207 - DNA, 1113 bp, Homo sapiens
gaaagtatgaaggcagagtggcaaaaaaatctagatgatttaatcaaattaggctaaataaatggttcaattattaactttctataggttctcttgctgcaaatggccctaccaccttggttgataaagtttcaaatcccaaaactaatggggacagtcagcagccctcctcctctggccttgcttccagtaaagcttgtgtcggaaatgcctatcacaagcagttggccgccttgaactgctccgtgcgggattggatagtgaagcacgtgaatacaaaccccctctgtgatctgacacctatctttaaagactatgagaaatatttagcaaacattgaacagcaacacgggaacagtggcaggaattctgaaagtgaatctaacaaagtggcagctgaaacacagtctccttccctttttggctcaacaaaattacagcaagagtcaacgtttttgtttcatggcaacaaaactgaagatacacctgacaagaagatggaggtggcatctgaaaagaaaacggacccatcatcactaggagcgacaagtgcctcatttaatttcggcaagaaagttgatagctctgttttgggctcattaagctctgtccccctgactggattttctttctcccctggaaactccagtttatttggcaaagatactacccagagtaaaccagtctcttcaccatttcccactaaaccattggagggccaagcagaaggtgacagtggtgaatgcaaaggtaagtaccagctttgtcgttgagtcgaggtttgcataagattcttgtttcttgggaaacccagagactttgattccaaatatgagtctggattcacattgagacgttgttctctccatgtgtgatctcagacagagctaatcagcttctctgagtttcagattcctgctttataaaagagtaagacttttgtagggttgtttataaggattaaaaataaaatgaatttgaaaacacctgactttgaaaagtctcaaacacacatggtttagcatataaaaaacaagtgaattaaagacgttttttgaaaattgtgtttttggaaaagttcatcaagttcatcatgaatgtcccctgaattga

SEQ ID NO: 29208 - DNA, 1058 bp, Homo sapiens
tccagagcgtggcagtggtgtctaagtgatgtttcctgtgtgtatcgtcagtgccccagacaaggcacaaggtctgggccctccagacctctgttgttagcttaaaaagtggggtgatgtcatgatgctgcttcctcacatggtggttgtgaacaggtgatgtctgtgaagacacctacttctaagcagttgaaagtgaggccaggtgaggtggcccacacctgtaatcccagcacttcgggaggccaaagtggaaggctcacctgaggccaggagtttgagaccagcctgggcaacatagcaagaccccatctctacaaaaatttttaaaaattagccaggccaggtggtgggcgcctgtagtcacagctactctagaggctgaggtgggagtatctcgagctcagaagttcaaggttgccatgagccgtggttgcatcactgcactccagcctgggcagcacagaccttgcctcaacaaaagaaaaagtgtacttctcagacatatggacatactgatccttgaggaagaaaactgcatttgccaatttgcctctgaaatattacggttttctatcaggagtctagacttccattactgttttgccttgccctgctttcaagtatatcctcaggcacgggccctctgggcacagggtgaaataagggtctccccttttctttcttctctgcctcccataaataaaacaaatggggagtctttcctgaggcaggcactggggatttgaatcgagtcccagtggaggcaggatgcccctcagtgagcgcctgttccttgtcccttggttatcacagtttaagcatcagaagactcgggagattggagggataagacggacagtcgtgtgacctaatcatctgagcatcacagttgtttttcttagaattgctttttggtgagtttttatgcaactgccgttctctttaagaggatccttttatatatgtggggttttttatttttttgagacagggtctcgttctgtcacccaggctagtagtgcagtgacgcaatcatagctcactacagcctctac

SEQ ID NO: 29209 - DNA, 1050 bp, Homo sapiens
tttgttttactacctgtaaataacaagttcgattttggtagcttgtattttgcattgaactccgtttgatgaacgtttacgtagtgctggatgccagggtttgaagaataagacagtctctagctactctatgctagtttataaaatgctagtgatcttaagttctaagcagacagcatcctggtaagagtttggctttggattaaaaaagacaggaactgcttataagaatctctgctggggccagattttgctttcagaaatgctgataggtccttgaaaaaaaagaagggttgctatgatgacttggctctgggcccacacaccgtggtgacgacatagtcactaaggaaaccgagagatgcagcgtctgaaaggcctccgaagggttttgttactgttttctgggatctgattggcttagacggtgtttggatgggagcagaacgctggagcttgctgtcctgctgaaacttctaggacctggtgccgagtgcttttgagatcaccttacttggattttggtttaaaaacaagggggagatttagggtaatttctagattattgtgagatttgactctgatgtttaggctgctgtaaaacaggaaatgaggtaatgtctttaaacatgtagtgtgataatgaactgtaaatgtctaaatatgggcaactgtgcagttcaagttgcagagttgctgtgttgagtttttatataattgggtactttccgtgttggctcctttgatccttaaaagtatgcatcagtattaaagtctagaggcccatctgcctattgaggttggactccgtgtggttgtgtttgaaatactgtctgaggagccagcaccagacctgcagttcaggctgagaaagaggttttgagcacttaagcgagccacagaccacccaggagtgcgagctgtggcctgttacgtaagtgttaggaatagtgtgatacctcgttcttttgagaaactttgaaatcacttaatttcggagttaaatatagcctgcaaaagtttaatttgttcatactgtttttgaagatg

SEQ ID NO: 29210 - DNA, 1066 bp, Homo sapiens
cccatggagtccctggacttgaaggacaagaccaaggtatgggctgggggtgcgggaggcctttggccggcggcagaacaagcccatggagtccctggacttgaaggacaagaccaaggtatgggctgggggtgcgggaggtctttggccggcggcagaacaagcccatggagtccctggacttgaaggacaagaccaaggtatgggctgggggtgcgggaggtctttggccggcggcagaacaagcccatggagtccctggacttgaaggacaagaccaaggtatgggctgggggtgcgggaggcctttggccggcggcagaacaagcccatggagtccctggacttgaaggacaagaccaaggtgtgggctggggctgcgggcagcctgcaggtgtggggagttctgtgccctgggagctgctctcactttgtagcagtgaattactaataaagtagccaggcatggtggcgcctgcctgcagtccccgctactggggaggccgaggtgggaggattgcttgagcccaggagttccagactgaaatgagctatgatcatgccacttattccagcctgggtgacagagtaagaccctttctcttaaaaaaaaaaaagtaataatggaaagtggcacactggcaacttgggaggctgaggcaggagaatagctggaactgggagggagatggttgcagtgagctgagatcactgtactccagcctgggcaagagagtgagaccctgtctcaaaaaacaaaagaaaaaaaaaaagaaatacctgagactgggtaatatataaagaaaagagctgtaattggctcacggttccacagctgtctaggaagcatagcagcatctgcttccggggaggcctcaggaagtttccaatagtggcagaaggcagagtgggagcaggcatgccacatggcaacagagagagtggctggggggtggtgccacatgcttttaaatgaccagatttctcaagaagtcactgtcacgaagatggcacgaagccatgagggatgatcctgccccgtgatccaagcacctcccaccaggcc

SEQ ID NO: 29211 - DNA, 1045 bp, Homo sapiens
tagggcaacagcttcttattaagggcagaagaaaagagctcctgcttgccatgtgtcaccctctgctcggagttccatattctcacctgacttggtttttcatggcagcatgcagtgctagtaagtagatgatttcatagacgagatgagctgagctggcacaggcacataacgtgcccagacattttgaagctgggattgggatcctggcctgactgcagagcaaaatacaccatttggtgcatcctggcaccggcccacatgtgtggctctgcagagaggcagcgggcttttctcatctctgcccccgtccgccgcttctcattccacccccacactccctggaagaacaggacccagagtaaccctgcatgtgctcgggctcctagagtggggctgagcagctttctgtcccactgagcctccctttccaggttggggcaggcaagtggattcgacaggctgccagaagactgcaaggtcattgggagttttaatctgtgactgtgtcatgaaggacatttgtactcgaattcatggagtgccactcctgatgggagaggaggcccatgacagtgacagtcatgctagtgatcgcggacaccacaccatgctgcctttgccagctggctccttcagcgagtcctcgcaccaagcctgggaggtagaggtgagggcagcgagcagcgcaggagtccgcagcccgcgcgggctgacctgcccagaagcctgttcccagtccctgccgttcccagtcactgcctcagggtggccgaggaggacgagctcttggtgtctcggctccactgactgcttttctttctccttcagatgctgatcgcgtggacagcaccacattattgggtaaagcagatctttcttcttgccagcctgttttttgcctacacattccattgtcttctgtcactaactgtaaaatcataaacgtttgtttttcaccttaaataattagcttgtattaaaacagccccactgaagatgataaatagccatgccttagcatggtccctgccacaccaagaga

SEQ ID NO: 29212 - DNA, 1008 bp, Homo sapiens
taaatttaatgagactcggtggccatgagcgtcctcctgtgtgtgcgctgggcaccaggtgcctccccttgccgaatcatttgggtaaaagggactctggtgagtggcgcggaggcctctgtgcgcagccctgttttccctggctgtttggcccagcgcgttcacagatgggaaaacgcgcatcgatgtgggagctgctcgcctcacatccatgttagtggtgcaggaagtatgaaaccgccgcagtcggctccccgttgccacctattcccatgcgaaaggacatcttcattacacttgctttctcactgaaatgcgactcctggaagcatggctctctttggagagaagccgtagcgtggttgatgtcatctctagtggatggcagggtctgcttggccagtgcttcagtaaggtcacattatgaactgtgccttggcgagtggattctgaataaacaagcttcttaataaattcttctcttttaggtaatgcatgccaggactgtgcaaagaggaagttagaagagaatggaattgaagtttcaaaaaaacgcacacaatcagatactggtattgtgtctgttctttttgtggggagctgcctcgggtctctcttgttggcaggcatcttcagggaccgtgctgcgctttaatgccccgcgccctatggtgggaggacggtgcatacgttctgtcagggccagagagcacaggaggcttacttagcagagaccctgacctctcaccccaacccgattccaactgcccagagctactggtacctctttagaaaaatgttacggagaaaacatacactaagaaggtgcagcgggcagaaggtgctctctccaaaaagaaaagttaaaaagatgaataaaaagtgcacaagttacataaggtcagctccgcatttttgcgaagtgaacgctcccatctaatcacacgcagttgaggaagcagcattgccaggacaccccttgtcactgtccagcctcctccagccccc

SEQ ID NO: 29213 - DNA, 1123 bp, Homo sapiens
cgacaggcttattcttctccatacctccaacaggctctcactgtatgtttgttgaaattgccccatcctcagtccactaagaaataaaagagcatccatgttcatggattgagattcccacagatcgttgcaaatgtaatgtcatcatttgcttgatcccctgatagtactgataattacacaaggtcatttccagacagtggctactgtttccattgtggaggggttttcaaagtcttccgtacataagaacaattgtaaagcagtttctgaaatagaaatctattgcaaataacttcttttagctggactttaacccttgggcatttcattcttttatttaaacagatgatgctggagggtcttgaaatctttacagtaaaacctgcaacttgaaaactagccttctgtaaccacagtgcccaaacgaagaggaatgtatggagaactccacgtggatctctgattgcgaaaccgtcacatacaccaagagagccacatgggcatgtggccctcaaggctgggtgagagggctcccctgtgtgttgaactatgcaggagggtgacgcggacacatttcaggtggactttgcaaggactgatggatagctacctcagggaccagaatccgtgggaagggatggacctggtgttcccgttcccatctgacaggctctcttttgtcaaggtggtatttttcgtaataaaaggggaagagtaaagactgtccaagcaacagtagctgccaaagagaaaatacgaaatagacactttttttttttgagtcagagtctcactctgtcacccaggacagagtgcagtggtacgatctcaagctcactgcagccaccaccgcctgggctcaagtgattctcctgcctcagcctcccgagtagctgggattacaggcgtccaccaccatgcccagctaatttttttatttttagtagagttggagtttcaccatgttggccaggatggtctcgaactcttgacctcaggtgatccacccgccttggcctcccaaagtgctaggattacaggcatgagccactgcgcccagcaaaataaacacattttataatttgtatgtggaaacatgttactatagaaagcattttaa

SEQ ID NO: 29214 - DNA, 1033 bp, Homo sapiens
agtctctcctctggaaagagtcatgtcggctgttccctgacctgctgggctgggctggccggcagcatggccgtgcctctgtcatcaggggctgtctttcttgcctactggactgtgaaggcagggaccctgtctggacagggaccgcatcagcatctccagcatgtggctggagcagggatccatgtgtgcttggatctcaggggctgagccgcagccctgtccaagctggattcagatgggggaggattcaggtctttcttctaggaaggagtggggtgtggactcgcagctggggtctggtggggttttcagtactggtttgcagagtgactaagggatgtgcccccagcctgatgctgtcgtcaagacagaaggacgtgcgtgtcctggtggtgcatctgggagggccctccacccgctgagtggtgagccacctctcagcttgttctcttccctgcacagtggacgcggatgtcctcctggaggcctgctgtgcggacggacaccggatggccactcatcagaaggactgctcgctgccatatgctacggaatccaaagaatgcaggtacgtttgccagtggccactgtttcactggaacaatgttcctttagagaaaagtgggggaggaagggacagtgtgtgccagacctctcgggagaggctggacacccaggcccggatccatccaggctgcgggtgctgcagtgggtgactcctgcctccctcctggcaccggcctggcaccgggccttggctcacccttcctgtgccactctgtgattgtcggggtatgtgtctctttcactgggctgggagcaagaagatctgggcttgcagctgtgggcaagtcagttttctcttttaaaaaaggggggacagttgtgggggagcaaaggagatgatgtgactaaagagctttgcgagtggaaacacggaccacctacagaccccaaaaatgccaatgagccggcgcagagtgaagcgttccaccagccggtttttcagcttctgcagcagccaacatct

SEQ ID NO: 29215 - DNA, 1063 bp, Homo sapiens
caagtcactttgcattccttgtctgagaaatgaggctggaggccaggcgcgatggctcatgcctgtaatcccagcactttgggaggctaaggcaggtgaatcacttgaggtcaggagtttgagaccagcctggccaacatgacgaaacctcatctctacaaaaaatacaaaaattagccgggcgtggtggcacatgcctgtaatccctgttacttgggaggctgaggcaggagaatcacttgaactgggaggcggaggttgcagtgagctgagatcatgccactgcaatccagcctaggagacagagcgagactccatctcaaagatgaaggaaaaaaaagaaatgaggctggaggaggtggaggacaaaggacatgagctggccttactaggagggtggagtgtggtgccactgtgttggacattgccctgagtcagcccacccctcactttcagatgtcaacgagtgccagcgctaccccgggcgcctgtgtggccacaagtgcgagaacacgctgggctcctacctctgcagctgttccgtgggcttccggctctctgtggatggcaggtcatgtgaaggtgaggctggggccccgtccactcacctcccccaggtcaccttcctcctggggaagccacccttctgcagaccggtttgcagcagatccgcgatggtttccctgttaaatgacatgttagcaggggaagtgcctgtaaaatattgttcatcagagaggactgcccgcctgcccacccgatttctcctgatgacatccaccctccgaggccgtgtcggggttcataggctgcggcagaggccatgcgggatgtggctaggattatggggcttggagcatgacacccacgagtcacagggccttggttatgcccgacctctccctgcctccgtgtcctccccggggagaggggttgatgtgtgaaacagcagcgaaaactggacacttgttttgcacaaagacagtgtgtgggttttaatcagatgctgcctaggggagacaggcctctgtgtccattgatctcaagtcacccaaacaaaagg

SEQ ID NO: 29216 - DNA, 1035 bp, Homo sapiens
tctggggcaggccaccgccagcagcacccgtgcccaccttctttcctgcctctgttttgggcccctcccaggcaggactcccccgttcagtgcccctgactcccaggccagtcctttctaagagcttggaatgatcactagccaagtaaatgcaaggcctcctgtcagtcctgacaaacctggaaagaggaggtaaaaggagaccccagtctcgataaatgcctcaagcaagtccaagtaacccagcacgagacatggaaacttaaaaagccaaaagggagatgtgatagaaggccaggacgagaggatgctcctgacctcagaatccagacacagcccagatggcagggcttcctggagcacctgggccaggtcctctggggctccgcacctgggccctgcttcctcaggcagccaccttcagagtatgatgggccaggagttcagtacacaggagacgacccctgtcccatcttgtgacaagaaattagaacttgttactatcctgtagcggaagataataccgatctccatcctgtcacaggaggttagaatctgtaacaggaagttggaatctgtgctcatcctatacaggaagttaggacccgtccccgtctccaccacaggaagttaggacccgtccccgtctccaccgcaggaggttaggacccgtccccgtctccaccgcaggaggttaggacccgtccccgtctccaccgcaggaggttgggacccgtccccgtctccaccccaggaggttgggacccgtccgtgtctccaccgcaggaggttgggacccgtctctgtctccaccacaagaagtttggacctgtattagggttctctagagggacagaactaatggaatatacatatatatatatatataaaatggaatatatatatatatatataaaatggaatatatatatggaatatatatataaagtggagtttattaaggattaactcacatgatcacaaggccccacaataggccatctccaggctgaggaacaaggagagcagtctgag

SEQ ID NO: 29217 - DNA, 1027 bp, Homo sapiens
atggtgttggaagaggctagtgcctgaatcagcagcctggaggtccacggcgcctcccgcaggtgagtgaggtgtgcccttcgtgttggctgaatcggccagaggggcggcgggaggccccgcctgccagccccgcatccccgcgctctgccgtttctccgcttgctggaccggccctaaccctcttcttgtctctctgcccacttttcttgcagccgctgtgagcgcttgccttgccatgagaatcgggagtgctccaagctgcctctgagaataacctactaccacctctctttccccaccaacatccaagcgcccgcggtggttttccgcatgggcccctccagtgctgtccccggggacagcatgcagctggccatcaccggcggcaatgaggagggctttttcaccacccggaaggtgagcccccacagtggggtggtggccctcaccaagcctgtccccgagcccagggacttgctcctgaccgtcaagatggatctctctcgccacggcaccgtcagctcctttgtggccaagcttttcatctttgtgtctgcagagctctgagcactcgcttcgcgtcgcggggtctccctcctgttgctttcctaaccctgccctccggggcgttaataaagtcttagcaagcgtcccacacagtgagcctcgcgtgccttggttttatttggcatggttgggagtctgtgccgcttgttacccgggggtgagctgggcactggccaccgcctggtacccccgagggctgactgaggagcgctccccactagagggtgtgtgctcgggggtccctgttcacagagcccactgtctgtgccgacagggaggccaggccgggtacatcatttcacatgtgttaacttgtcttcatttgtgttgaacccaaagaataaaggtggtggtggagaagggccctcagattgctgagcacagtcccctctcgttttacagatgtggaaactgaggcccagagagaaggggaagggttggccagggtcgtctggcc

SEQ ID NO: 29218 - DNA, 1030 bp, Homo sapiens
ccattgtgggaattttaaatatgtccacaaattctttgatactctgaccttctcaagaggaggaggttaattcttttctccttgagtgtgggctgaacttagtgacttgctcctgaagagtagaatatggtagaagtgacagtgtgcgacttctcagactaggtcataaaaagcatcgtagtttcctctttgctagctctttcttgaatcacccactctgacaaagccagctgccatgtcatgaggacactcaagcatccatatgcagagagctgtgtggtgaggagctgaggcctcctttgaacagccatgtgatgaactaccttggaagcaggtcctctgagctccagtcacatcctcagccacgtgtgcaacctcatgagacaccctaagcctctcagatctgtgtgagatcataaatgttattgttttaaaatgctaaattttgggctaatttgctatgtagcaatacatcattaatacaccagtcttaattctccatgctgtgtattaaatgcattctgtaacccacttcttaaacagtgtcttggtcactaaaataatttaaacatattgcttatggtcatataatatcagtattgagatattcctcagctgtttcttctctgtgtaagataattcttttttctcacatttgttttatactttttgtttaatgtagatatcaccgtatttcacatttgtttaacaagtgatttatcttgctgtgagtctttgcaagtcatgttaaattctttctgaacaagtaagacaaacatttaaaattctattttagttgctcctttaattatttttcttttttttttccgagacagggcctcactttgtcatccaggttggagtgcattttttctagagaagggggtctcactatgttgcccaggctggtctcgaactcctggcctcaagtgatcctcctgcctcggcctcccaaagtgttgggattacaggcatgagccaccgtacctggctagttgcctttatgatgcatccatgaggcatctccaga

SEQ ID NO: 29219 - DNA, 1042 bp, Homo sapiens
ttcctatttactaccccttttgtttttcattccccttcttaatgttcacattcccatcttgatctggcttagatccatggatgagtaataagagcattttttaatgtacatcctcaactccactgcctcctctctaaactttgttatgtttgcctggtaaaactccagctctggtcaaatccaacttgttacctttgcgacagtacccaaatagctgaacaaggctagagaaaaacatacagccgtgcagactgctctcactttaacttgctgatcactaactaacgtggcccttaatgctacctgtcagtcccgctgtttgccctggtcccttgactctcctgctccccgagtcaggtatttcatgctccaccctcttcaaacctccatcccatctccctcatcctcactctcagctctctgaaaataggagcaactagaagataatttccaggaactctcatcaccctctctgcccacctacttgtatctgtgcccgtagcctgcctttgcttctggtctgtggattagcgatcttgctctgaatatgagctccccttaagtttgcactaaattccattgccttttgcacacattgctccagcagtcttcttctctccccccttaaaaatcatcagttttaccctttctattggattgcactcatcagtttatagatctgctgtaatttttccatactaagaaaaatctctccctccatttccctgagtgataatccttcccggatctcagaactcagtcctcagacctcttctcttttctgcctatatttactttcagagtattctcactcaatcttgtggctttaataacttccgtttgctggtgactaacatttttctttagctggacttctttgtttttttttttgagacagggtctcgctctgtcacccaggctggagtgcaggggcacgatctgcagccctgacctcccaggcataagcagttcttccaccccagcctcccttgtagctgagactacaggcatccaccaccacacccggctattttttaaattt

SEQ ID NO: 29220 - DNA, 1103 bp, Homo sapiens
cacagcatctttcttctttgattttgtggaacctgctttttattaaaaatttttacttgaagtcagaagccacaaacaggatgctcactttccttcctggacttggatgtagacagagcctccaggcttccctgtcaccactgtgacgggtaagcttgggctggtccagaagccacttgagggactcccttcggttagacacatatacccgaggctttgatatgattaatgagatttttaagatcaaaggagagagggtaaaaagtgagtcgtgtaacttcaatactaaaccaaacctgccatccatttgaggataaatggatagaaacaacaataatcttgataataatagtctacattctaaaacataactagttatatgctagaagcatctggccagaaggctagtttcttttgtccttttccagtcacaaggtgctctagtgtgatggggaaggaaaggagagccgtagaactaacttttgactgtggctggcagatacacctttgtgcttggctaatcttggtggggaagggagtgagcattcgttgagcctgccttcggcattgggctttgtcccaagggttttgcttgtagtatcttctttaattcttagaacaaactcaagaaattttttcatttttacaaaagatgaaactgtaacttggagaggttaaataacttgtctgagagtcacttgttaagtgagagaggctgggaacattctctccatatccagacatctgactctaaagcttaagcttaacaagcagtctgcccttactgttctgagcttaagctcaaaagcagtctgggccaggcgcggtggctcacgcctgtaatcccaacactttgggaggccgaggcgggtgaatcatgaggtcaggagttcgagaccagcctggccagcatggtgaaaccctgtctctactaaaaataaaaaattagctgggtgtggtggcacacacctgtagtcccagctactctggaggctgaggcaggagaatcacttgaacggggaaagcggaggttgcagtgagccaagattgggctactgcacttcagcctgggcaacagagtgagactccgtctcaaaaaaaaa

SEQ ID NO: 29221 - DNA, 1048 bp, Homo sapiens
aggctgggtgcagtggctcaagcctgtaatcccagcactttgggaggctgaggcgggcggatcatttgaggtcaggagttcaagaccagcctggccaacatggtgaaaccccctctctactaaaaatacaaaaattagctgggtgtgatggcgcatgcttgtgatcccagctactcaggaggctgaggcaggagagttgattgaacctaggagatggaggttgtagtgagccgagatcgtgccattgcactccagcctgggtgacaagagtgaaattctgtctcgaaaaaaaaaagaaccgggcatggtggcacacgcctgtagtcgcagctacttggaggctgaggtaggaagattgcttgagcctgggaggtggaagttgcagtgagctgagatcacgccgctgcactccagcctgggtgacagagcaagactctgtctcaaaaaaaaaaaaaaaaaaaaaaaaaacaaaaccccagaaaattttaatgtaaatttccaggtggataagttagatgtactaaattataggttaaattttgttgttgttggctgggcgcagtggctcacgcctgtaatcccagcactttgggaggctgaagtgggcggatcacgaggtcaggagatctacctggctaacacggtgaaaccccgtctctagtaaaaatacaaaaaattagccgggcatggtggtgggcacctgtagtcccagctactggggaggctgaggcaggagaatggcatgcacccaggaggcagagcttgcagtgagccgagattgccgccactgaactccagcctgggcgacagagcgagactccacctcaaaaaaaaaaaaaaaaattgtcattgtaataacgtctttaccttataattcaatgaatataacctttaaatgagaagtctccagttgcatttaaaatattatttgacttacaaattgttttatatacagttttaatgcctgtactttgcatataacatgaggcatatttctttttttttttttgagatggagtcttactctgtcgcccaggctggagtgcag

SEQ ID NO: 29222 - DNA, 1049 bp, Homo sapiens
taaatgatcacgtacttattggccgtttgtaaatcttctttggagaaatgtctatttgagtcctttgtccagttttcaattgggctgtttgtgtctatttcttgtagagttgtaaaggttttctatacattgtagatacttgggataatattgaatctatagatcaattggggaagaattgccatcttaacactattgagttttcaagttcatgaatatggaacatctctctatttattcaggacttatttaatttttcagttgtgttcctatttagtagatagcttgtgtttcgccacagatgttattggaaggatattattgaggcaggaaggaaaatggaaaggaagtaatatttctcatcaccttgaaaacggcagctagtgaaatgaccgaattttagttggaattcagcaatgaaatttggattcaacagtgaaacttagaaaaaattttatggtgtgttagttcaaacctaatacaaataatcttttaaaaagtattctggttcctaacaaagcgcctgtacttttttgactctttctctgtgagaactttattctaggtagattttttagcagggtatgtgtgccagttttttgttaccacacttgaggtaagaactgtaattacattgtcaaaataatatttagagtattattttcagggaataattgcagtggtatgacgaatatattatgcccatcaaattttatgtaaacacaagcatgagttattttaattgagttattggtgttgtttttggcctttattctttcttactctgtaaaaataatgttgggatttttgagggtcttcataacatttgcagtatttacataaagatcagttgataagctgtttggtaaagtaaactgtcatttgtacctgtctggagttttcttttcttgtgtctgggacatctttaagccttttccttttcagaattgtgttctgatcctgagcattaatcttatgtgcctgatgagttgttggatcagttggttttcagatcaacctatactgttggctttttgcatgttcagttt

SEQ ID NO: 29223 - DNA, 1034 bp, Homo sapiens
gctgtatgtacacttaagatttatgcccttgattgtatatcagtttacttttacaaaaataaagtcatggataaagtaagtaatattgttaaggacactgaaatttataagaaacacaattaaaatagagcatcaaagtatgggcaatgaattaaaattgtttatgtattgaatactgatatgctgagcacaatgctgtatgttttggaagataagaagaagatgtggataaacaatcagtttatccatgtaagaagtgagtaaccagtccatttatcagtgtaagatgtgggtaaccattccatttgtctcgattggatcctggtactttttctggtgattctacttcttaaaaaccagctctgttcataagaaattgagcattgaggtaaaaggtgagcagggaatagagtcagtatacctagtaggaaaggcacagtctgggagtgggagacctggctttgaatctaggctttggtgccaatgaatggggtgactttgatggttgcaacagtataagcagcacagcagggtagcagctgttgtgtacataccctgaactgggcattatccgtatattttttctgttctcacaatagcctgcagagtaagtgttactgtctccccatttggacagatgagagacctgaagctcatcactggtaaatggcagaggtagagtgtaaacccattgctgccatctggatctaaagcctatctatgctcattgtaaatactgtgctgcttaaattccgtaatgcccttccttgttgtacagctttcctgggctcctctgtgaagtatagcgttaagatgggataaactctaattcacctgtagctcatggaatttctcaaattcctgcaaataattaagagttgaaggtgtatatatattaatgttacatatattaatgatatttgagcttaggtggaagaagagaattacgaaattcaagctacagaaataggcattgcttatttttgagaattcattcccttaaaacgttttggatacctaatatctgccaggtt

SEQ ID NO: 29224 - DNA, 1049 bp, Homo sapiens
cacccactgcctcccttagaggacgacattaaaggaagggtggctgggatgtgcgtgtgtgtaatacgtttcccccagtgcctggcacatgtagattcaggaaatctatttatatatttttcagattataactcattttcttctagtagaggaagcatcgccattgaatcagtggactgttatttttctagtttaatgctactcacgtttaacccgttggaaatgttatttaactcttttaacaggagaagggaggttattttctagaccagctttgtaagctttgtccaaattgctgtgttaagcaactgtgggttagatttcccagatctcacaacaaaggagagtggcatttattttccatagcacatttaaatcaaaatttgtttatgaggtataaaaacattttctaggtttttgaactgattgaaatctattttactcatgttgtgagtatagcatcgccattgtatgcatgtatggatatggataatagatgaccttcattaaaaaaaaaatttccctgaaaccccccgtctttaggactgtctctgtttactggtgaggagttcgcctttcgctgtctgttggcatgtgctcctcgatgcccacacaggtgacctttactaccttctattttgtatatcagtattgtaatgcagatgctgattcatctgcctgcaactgttcacgtactttaaaatcaatcataaatgagaaagattgagagaaggaaaaagatgagaagagagaccttcatgcattttgttttttggcaagtgtggaaaatgatgtaaagtgtagttagtgctttggcatcaacaatgtgatttgtgaatgttagcttttctgtgatgacatttaaatgatgaatttcaagattaaactgaggagttccttaggcgaacttacagagttctcctatatgaccgttcctcgtccttaaagcctgaggagccaggttcatctgaatggtacttccaccaagatgcagaaatactgtcactctttagcagaatggttattaagtagaacgaagtgtgagctta

SEQ ID NO: 29225 - DNA, 1023 bp, Homo sapiens
gtgaaccttttaagacatttaagattacagcaaatcaaaaattcactgaaaagaaatgcttttgtgtgtaagtggtgcctataaagtagataagggcatgtctcttttactatgtttcaagtaaccaaactttcctcctcttttttccctaggttcttgattattacagacctctttctgaaaagcccggaattggtacaagccatgtttcccaaactgaacaatcaagaaaggtaaccccccaaccagcgtggtctggagtatttagcattccatatagggtattcgatgcacgtgactgaaaagctgtgtggtttctgagttggcacagaatctctaaatacatgtttctgtgttggtaatggttttaaattggttggttaacattacagcttagccacagtaggcagtgatttatggagggtagcaggatccaggttggtgccattattcagtaaatgcatattaagaaaaacattaagaacaaaatattatgcatatgcctggattttagaatagtaatttatgtaactgtgtattacagttgaatatttgaggtgtactcatttgtttaggtcatgggtgttattatttgtgatacactctgctaggtttgtaggtttctaatggataatttggactaaaataaaattgacgcccgtccacaatgtcacagttactgtagtaggaaaaacagtgacctaggagttctaagacactggccctgtgctttgctgtgattatagttctttatgtgaccttgttgggattcaggttcgtgtgtgtgtgtattttttttttttttcctaaacctctatggtaaggtacaagggattcagtttcttgacctgtaaattaaggagattgaataaataatttgcagtacacttcatttcaatagaatatatttttcctaaccttattagaaatgttgccttaggaaaataacaaaatatattcagaaactacagatctagtgatgaaaatctcttaaagttgttaatcttttgattgtagtcacga

SEQ ID NO: 29226 - DNA, 1040 bp, Homo sapiens
tgggaatgtaaatggtgcatctactgtcttaatctgttttctgctgccataacagagtcctggagagtgggtaatttataaagaaaagaaatttatttctaacagtctgaggctgggaagtccaagaacatggcactggcatttggtgagggctctcttgctgtgttatcccatggtgggaggtgagagggcaagtgagtgcatgtgagcattacagagacacagtccctgcccttactgtgagggtaataaccatgtgttgttatgtacaagaatgacagtgctgtgtaaattcttaagcttttttcttgtgctagttcttttcattgttgtcaaaattagttgacttcttcacccagaggctggtagtctattcatgcagattactcggtggggaaattttggatatagactcatcatcaattcacgtggcatgattcagcaaaaatgagagcctacatttacatacttgtctggtctcctttccaggtgaattggagtgaatattaacaaattggactagctgctcgtggtaaacagcttgtgtagttttcaggtttatgatctctgtgtacggcatagtagttaaggacagatgctagtgctgccgcttactactttggataggttaatgagaataatagtagctaccccatgaaattgttatgataactgattgaaatgtgtataaaactctcagtgcctggcatgtaatggtcacccccgtaaacgtgttgcagggaagaagataattgactttggcatcagaaagagttcaaataccacctcagtacctctgtaacccagggcaaataccttaatctataacctgagctattgctatttctgcttccatgctcttactactattactgcaactacaagtctaacaactactgctactatgctgatgaccttgccgttttctccaggtagcatcaccgttatgtatagaaggcaccatgtagcccttgtcatttaatcctcacagactctgtgaaataggtattattcttgacattttccaaattggagttctg

SEQ ID NO: 29227 - DNA, 1164 bp, Homo sapiens
gccaatgggtttaagtctcatctcattcgtctgattggaaatctgtgttacaagaataaagataaccaagacaaggtaagaggatttcttagtatgtattatacatgtatggcttcatttagaatatagtccttggaagacattcactcttttggagtgaaagcttgaggtgcttagaaagtagcttggatagagagatatatattttatatgaatacacacacacacacacacacacacacacacacacacacacatatatatacacacacacacgtgtgtgtgtgtgtgtatatatatatatgtatatgttaatatataggctctttggagcctagacaaatttctaacacacagtagatatttaataaacactagttattattgcctattatcttaaaaaacaaagcttagatctatatcctatgtttatggacgatagcatcataagccttttcttctagatgttttaaaatggatataaaaggaatataatatttaagtatgaagtctttgaggacctagtaggctgcttttagaaacctcttatgtgcagaagagcttaaaggtagttatattgagaatgtgagagaatggtaagaaagatctcagggcagttggaccacatgcttcagattgatctcgcctttctgtatttttctggagttttacttcgggtggcatttgatttgcttagttaaatattaattaaatttctgccagattatatttttctaagatggtggcagaatgtcttgcattgtacatgtgtgtctgcagtatgactttgccactcccctgtcgagggttggcatctatttctccatccacttgaatctgggcaggccctgtggctgctgtgagcaatcaaatatgtgatcctataccatttgtagcatagcccttaactggtctagctgattctatttctggcttcttagaagcccgtcactatgtaagaagtatagattcccagagatcaccttgctgcgagttgctgaatacacatggaaaagccctggaagataagatacaatgaggagagaggaaaggtctggtgaaggaacatcaaggcatgagatgtgtgcgagaaaccatcttgggagtagatccatcctcagtttcttacttgcccagctgatgccacatagatcagggcccccc

SEQ ID NO: 29228 - DNA, 1051 bp, Homo sapiens
cacatcatatttggcttaacacctgccgtaacactgggtacatagtgtagtgaaattaatggacgctggatgactttgcttgctttactggtgagtcaagcgtagagtagttacttgcttggagcgatagcaggccaaattctgactccagagcccatacttttcctgttaccatccactgcttccaccgtcaccacaaaagaagatgtttgagactggtcctttgaaatctatgaccaaatttgtgtgactctttgaggtggcaggacattgtattacagctttttccacaattcttactgaacttttttcattatcatctaatgtctagtgttttagtaaatgtagtttcttttttctttccctttctttttttcttttttaagaggtggggtcttgctctgttgctcaggctggagtgcagtggtgtgattatagctcattttagccttgagctcatgggctcaggcagttctcctacctcagcctcccacataactgggactgcaggcatgtgccaccatgcccgactactaaaaatttttttttggtagaaaaacagggtcttactgtgttgcccaggctggtctcaaactcctggcctcaggcagtcctccttccttgacctcccaaagtgctcggattacaggtttgagtcaccttacctggcctgaatatggtttctttaaggttcatgttgagggctacatttcaggcacatgcgtatttccgagaagcataatttaccccatactgtagacacagaaagggagacattggggaagtaatgtgctgcccatgatgattccgcagtttgtaaaagtcatgaatccagttttcctaactgctactcagttttctttacttacgccatatgatcaatttttagataacagacgttttaatttaatttaattttatttttgagacagggtcttgcttttgtcacccaggctggagtgcagtggtgtgatcacagctcaccgcagttctgtgctcaagtgatcctcccgcctcagccacccaagtagctggtactagaggtatgtca

SEQ ID NO: 29229 - DNA, 2878 bp, Homo sapiens
ctctttgttcttcttttatactttgtacacctcttaacccttctttggccaagatctgggggctttagcaatgacaatttcaattatactttcagttgaaagatttttaaaagtaaaacgttagcattggatctggagaattttgctaactgagataattaatagctgggctggtggtgatagggtttgtgtgtttttgagagagagagagagagagagaggaagagacagacagagatggaaatataaagatcattcttccactgttatatgtgttttttcccctttaaaggaataggcatttgaatttcctctctgttgtcaggtgttctgacttgggtacatcagctcttactgagtgcttgaatgttcaggatttctatgacatatctcaatctaatgaaaatctgactgtgaaatgtctatatatctccccaggcttcgttttcttggttaaatgagaaaagtgctcttatttcaaatgttggaaagtagctctacctttttctggaaaaaaaaaaaaaataaaaaaaaaataataataataataataataataagatgggaaatgtctgtcccacatctaaagcagttttgatctttagcatatttagtttttttttttttttttttcctggcagcagctgaaaattaagaggatcaaagttatgttcctataaaagacttttttcctgtcagtgcttgaaggcattgtctgactccccccacccccacgttttaaaagctgattgcttatcttattcaggtagaatttaatttcatgcccatcatattctaatagaacaaaaatgatacttagtttcagactgtggattttagtttgaattcaaacctactgctatattgcagttaaagttgggaatattttttactccaaatagaaatgaacgtgctattttggcatagtggtaagagcttgtagttcaattcaacaagtatgtgtttgccatatgctgtgtaccagccagtattctagacactgggaatgcagaaatggatttggcctactgttctctcgaggaattcacagtgtaaagaaggagacagatgtagaaactatcatctcagtatcatagaataagtggtgtgtgacaggattgagagccagtagaaaagtacctaagtgcttggtataaatggctctacttggaacttcaggaagaacctcctggatccaggccttgaaggatgaatgagaaagagttaggcagttagaggagtaggtcagccttgcaggcagtgggtgagcaggtgtgtgggacagtgcaggacccagtggcacctgaggggttggggttggggttggggttggggttggggctggggctggggctggggctggggctgtgccagagagctggccccttggctgcacgatgggctctgcactcactgtgggaactaagggttaggccattttcagcgttagtagattccttattgtagctctcatttctgaggattattttgtggttctttttcagatccacttcttttttttttttgagacggagttttgctcttgttgccaaggctggagtgcaatggtgcgatctcgacgcaacctccgcctcccaggttcaagtgattctcctgcgtcagcctcccgagtagctgggattacaggcatgcgccaccatgcccagctaatttttgtatttttagtagaggtggggttttcccatgttggtcagggtggtcttgaactcccgacctcaggtaatctgcccacctcggcctcccaaagtgctgggattacaggcgtaagctaccgtgcccggctgatcaacttattttttattgtgttgtccatcttcgtcttgagtcatttaagacacttattttctcttggagattgtttttatttctagtttttagggtatggtttttctcatttgttctctctcatttccctcttcccttaacccctcccctcctcctctccacccgcggtttcttttcccagtgattttttttttctgtcttttaacttgatctcatcttcttaggagaaacctttttcggcagaagtcccataggtcctggctgtggacttgtattcacagagcgatttgcttttgttttcatctcctcgggtcctagagggtccactcacctcttaccagcttttttttttttttttttttttttttttttttttttttttttttttttgagacagagtctcgctcttgcccaggctggagtgctatggtgtgatctgagctcactgcaacctccgcctcccgggattaagcgattctcttgcctccgccttcctagtagctgggattacaggtgtgcaccaccatgcccagctaattctttgtatttttagtagagatgcggtttcactatgttggccaggctggtctcgaactcctgacttcaggcaatccacccgccccagcctcccaaagtgctgggattacaggtgtgagccactgcgcccatctcagtttttatattaatataatttcttgacttgggattctagtaccacactgacaatgtgactctggatgcagtagctgcctgtgataatggtcttccctggtcccccactgagatgtcgaagcaacccaaaacctttttaactgctacacagagattttgatgatgtggcagcctgtgatggggtcccatcctagactagagtttttcattctttgtctctgccctttgtaagccaaaagccacctacttgtttgcagtcctgaaaactctagcctccaggaaccttgtcctagttggatcctgcatgcctccactcttgtctgcctctctgggttttatttctggcctctgagaatgatgctcacactgcccagtggcaggacgcaacctgggttcctga

SEQ ID NO: 29230 - DNA, 1011 bp, Homo sapiens
aacgtggacttgatagagcagtatgcgatgtttttgtcttcagggcaagctcttgatgcatagcttcatgtgacatctcgtttataacagcctgaggcatcagtaatctttatagcaagaattctagtgctgtgttatgcataccaagcttaccgtttattctgcccagtaaatacatggcttttatggagtcataaatcatgacagtaggagtcatacctctccaaaaaagaagagatttaaatctttagagttaacaagatttaatgtaatttagacattattcttacttagaagtaccattcttatttaaaggcagtatatctcatatctttaaagataactttagaaacttactgccagagaaacaaatattgattaagagcacactgtgtgccaagcattatgcgaggtgctggagagaaggaaggggaagaaaaggtcctcaccctcaagtaacttgaagcttagagggacaatgataaatagtaaaagattctagagtccgggcatggtggttcacacctgtaatcccaacactttgggaggctgaggtgggcggatcacctgaggtcaggagttcaagaccagcctggctaacatggtgaaaccctgtctctactaaaaatacaaaaagtagccgggcgtggtggcgcatgcctgtaatcccagctactcgggaggctgaggcgggagaatcacctgaactcgggaggcagaggttgcagtgagccgagatagcatcactgcactccagcctgggcagagcaagactccgtgtcaaacaaacaaacaaaaaagattctagagcagtctgatcagggtgagggttccgtactcttcttgtgccatgaagcaggaggaaaggcctcctgagggagctgaggctgcacgaggatgagcaaggtttcataatgtcctccagaggccagtttaccaagctgcatcagctcctccctcccagccaccctgcccttcataaagctctagttttgtaggggatggggtggg

SEQ ID NO: 29231 - DNA, 1026 bp, Homo sapiens
gtttttgcttagtccttgttagcagttacattaaaatctgttttaagttccacctcagggaatatcaaaagttggttacttttctaaatgggcctttaattaaaattttaaaaaattagaccattgtgttagattttttaaaatgttggctaaaacagaaaaggttgatttcagtgcagttgggctgaaactatacttaaatagattaaagtataatctggcttttaaaaaaaacacatctgactgggatgaagtagttgtggtcttaactgaagcaggtgaatggaccatattcgcctttaagagccttctgactcccaggttttctgatttttaaaaacttcctatttagtcatatgtttttacttcactttatggtttaagtgagccaaccaacaaaagttactcataaaagatagtattttacttgtaacaattgcagaaaaagtgaaaagcttgacattacaggtagaaaggaagtcagtctctgtcccctgtgcgtttccgagactgtgtttctatttatttgccctttgtctgtttcccctgaccagcgtgcgtttctttctggaggcgcagggacctcggcttatttttctctgtctttgcattgcttgacagagggcctgacccagggtaggcactcccgcttcatgactacatctcattttttatttatctttgttatgatagatagcagataaagcagttgatttcagtcagaagcagaccacagcagcaggattctttccacggtgcatgttctggctgagtgttggtgggctccaccctagccgaacctgtgtctgcacacctgttgtgtcttcctgggaggctcccaggcatgctcctgtctggccagggtgcttcctcctcgctctccagctggctgaagggaagctgggcaagagtgtatgtgtttaggccacagggagagcacagactcccagagcatgaaccaaggggcttccaggcctcagggactgcctcctggtcccccagaggccacctcactcttactcctgt

SEQ ID NO: 29232 - DNA, 1049 bp, Homo sapiens
gtagtcaccaaatccagagggcattaaaaagaatttacaagacaaacagccagcttgctcagtgacagatggcttgaaaggagtggggaggaacatacctttacagattaaaactatttaggaggcacagcaagcagatgctctgtgttgactttgttggagtgctgatttgaacaaaccagttgtaaaggacatttttgagatgttcatggagagatgtccatggatatttgaacgtggactggctcttaggtaatattaagaaattgtaattaatctttctaggcaaaacaatggcaatctggttatttttgttaaggtgctgtctgttagaaataccaaggtattagctggtgaaatgagttgctgagatttattttaaatactcttggtgggaaaaagtgtgggaagaagacagatgaaacaagttgacaacatggtggtttctgaagccgaatgttgggtgtgtgagtatgtattatacctccctctctctgtactttgtggtgtgtttggaaattttcatttaaaaaaatggttaaaaatttttaaagagttgttattgttgttgacccgaggttgagagctcttggtgggtaggggactcatcatggaatctgaaaggcagctttatcaaaagagtaacgtgtgcagatgggcgccgttcatcccctctcccccatacagacacatttttgttgttatattcatagacacaacagacatttctacaggatctgcttggtacagggcactgtgctaggtagatgggagaatcaagcatgaaatgggtagaatcctgcccgatgagggcacagaaggcccccaatgccacagtatagggggaatggagatggcttggaaaagaggtcaccgtggagttgggccttgaggaatggtgggtagcagttatgtggcgatgaagagactatttcaaaggaatgaattacaccagcagaggtacagaggaagaaaggtaaagggtcagtataggtttggctgaagctagagagaatctcaaatagacttggtcaagaaaagaagaccaa

SEQ ID NO: 29233 - DNA, 1045 bp, Homo sapiens
gctattttgttcgtcgatatttgtgcctgtctcttcaccattacaacattgtctttattactgtcaatttacagtaaatcttaaaattgggtagtgtgattcatccaactttattttagtgatttaatcttctttacccttccatgtaaattttagaatagctttttcataactctacaaaactctgctgtgattgtgattggaattgcgttaaatatacagctctctttggggggaatcaatgtcttactgtgttgagtcttccaatccgtgaaccaggaatgtctttctatttagatcttctctgatgtctttcatcagtgttttctcattttcagcatgtagatcctgtgtatgctttgttagatttatttttagcacagtggttgcttggtacccatggggtattcattccaggacccctgtggctaccaaaaatagatgttgaagtccctgatacaaaatggtatggtatttgcatatcacctatgtacatcctcccgtatacttcaaaccatctgtagacttcttataatacctaatacatgtaaatgctgtgtgcatagttgctatactgtatttttaaagtctttttcccccaagatatttttgatctgcagttgaattagtctgacgctgtggaacccagagacacaagggctgactgtgtataacatgtggtgggggagctactgtacatgttactttttaaaaatagccagttcctggttgttcgtctcgcatgtggaaatatggttaacttttgcattgaccttgtgtcgtatgggcttgctcaactcattcattctaggagatttgaaaaatagattctctgggattctctacataaacaatcatatcctgtgaataaggatgaagttttatttcttcttttccaatttgtatgccttttattgccattttatgtctcattgagtcacaagccttatttgatcatgctgtgatgtccctgcctgccttcttctctgtgggggttaaatgggaacagaacctactttttactgaatgaagaattatttattta

SEQ ID NO: 29234 - DNA, 1116 bp, Homo sapiens
caccagtctctgtaaattctttctgttgctttcaggacaaagttaaaactggtaagcttggccttcagggctgcccctgattggacctgcctggccggctcaggtgtcctcttctgtattcctgcagcccttcgtgtttccctccagtgctggatgtgaatggtgctttttgcttgtctgtggggccttctctctcccttatccccacccacatcctgacattggtaagagcagtacctgtttctgatttaccttttagtccccaatacaaggtctatcacaaagtagctttcttttaaatgtttatcaaataaataaatagaagattaaaagaggtgccaggtgttagcacacagagaaataggtcttggaaaaaggacctgaaagtgctgttgtcatgtttgtgtcatgctgatggcacgattcccgagggcaccgaggaaatggtcagacttctttcctgtaggtcaaggctggtgagagtttggcacttgagatgtcttcctaggtctgctgaggctggcggcccactacccgcatttgtccctgactgctttgcaggccgtcccctgtcctacagcaggccaggtctgtgtcactggccctccctctccccttcttaatcctcatcactcttcatttgcacactttgaggttttccagcacatttaatattatttcagccattctctcttttctgaaaaccagaaatagttacctgcaatttgtgtggtacaatttttaaaaaaaaatgtacatttttaaattaggcagatctgggctttgccactcattaagctccatgactgtgaacaaattaacccttacagatttcattttctttatctgtcatcttggaacattattttctaccttgcaaaaccattaggaataccaaatatttgcatggaagagatttgtaatatagtaggatacttggcacgtttcctttccctcgcctatttcccattttcaagcagagctaacacagcttctaagacatatgatcttgattcgtaagacatagtcccctaattgtaatctgcaccccgagtgtcacattgcacagtctgcctcaggtaacagtggggcttccacatgtcttgccttggaggt

SEQ ID NO: 29235 - DNA, 1024 bp, Homo sapiens
gttaagatgtttatcaatgacagtgtgtgcccagcaggacatggaccttcatcagtaattctagtttcgccctggccttgtgatctcactctgcctctctgcccttgtgatatttcattgcctttgaagcatgtgatctctgtgacccacaccctgtttgtacacccctccccttttgaaacccctaataaaaagttactgcttttgtggctcaaggggcatcacggaacctgccaacatgtgatatcgctcccagagacccagctgtaaaatttctctcctttgtactctttctctttatttctcagaccggccgacacttaaggaaaatagaaaagaacctacgttgaaatattgggggctggttcccccgatagatggggtttcaccgtgttggtcagactggtctcgaactcctgacctcaaattatcctcccaccttccgcctcccaaagcattgagattacaggcgtgagccactgtgcctggcctatactggattttgaaaggcaagactcaattatatgctatgataagaaatatactttgaatataaaggtgaagataccttaagagtgaaagaatgatataccatgtaaacacttataagaaagctggagtggctatattaatattagacaaaatagacctaaggacaaagaatttccctagatgtaaaagagtgatatttcataatgattaaagggtcagttcatcaagaagacataatagcctaaacatacattgctaatagcagaatttcaaataactgaaaccaaaactgacacctgaaagaaaaaatcgatctgcagtcataatcggagatatcagcgttcttatctttataaattacagaacaagctgaaagaaaagcaggaggaatatggaaaactggaataccatcagccaccttgatcaggtgaaatttagtgaacactgcaccaataacagcatgtatgttctttccagtacacatagaacattcaccaagacagaccatatgctggggccataacagtgctca

SEQ ID NO: 29236 - DNA, 1059 bp, Homo sapiens
acctcccccaagtgattctaagttgtagcctaggctgaggagcactggccagactttggctctgagttttctctctagagagtgtctgcaatgcccaagccacttcttttttacttctgcttgagtcacaccatatgttgctgcccaggcattgtggacaaaagcagcagctcaggcctgaaatgcccactgctaagtggcacaaaacaccatggaaacaaatgcaacacaaagatcaatggtactatatttttgtgagacttagaattgctgtgtaaggctaaagccagcaaaagagtatggatggaaattacaaatccagacatacacccagttaatgagacagtcaagaacaacattacactaacttagaataaccccatatctaccaaatttcttatgattgtagaagtagatctttccatattcaaactttgctgaaggacagctagtggttggtgaaggattaccatatccagctcttttcaaatgtggatggtaaaggaaacctttagaatctcagagccaaatgaaaataatattacaaatcattgccatttcctgtggtctcatgatgtgctgggcaccatgctggatgctttcccatacagtcctcactgtacacctgggaggtgggtatggccctcttgtttcatgtaagaaaatttagacttaatgaagttcagaaacctccccaaggtcacacagctaacaggctctgttttctgtcaacctagtaggttttcccaaaggagcttggttattaaagttgggcctgtacccttagcggagtgcctactctggcattattggctaatgtgggaaagaacagttcccaaatctatttgttgtcctctgtttacacttcatttccagaggctaaatgttaatttgtttaagccaggcttattgtctcctggagatgcactaccacgggaaagtgttgactgagcttggctcctcagtgtgaactgtaacttgtgactcattaattacgggcctacaatcaactcccaacatgttagtaaagaaacaaacaactttcttgtttaatgaagt

SEQ ID NO: 29237 - DNA, 1062 bp, Homo sapiens
ggagcactctggctccctagcaagaggaaggagcatctcagtggtgctgaattctcatcttcggagggtttgtcctgcagccctctgcggcagaagctgagagcactggctcttgccctggcttgggttggccacccttgctggagggtgttctgcagggaccctgcttttttcctaccagttcaactagttgtactatacaaaactgtacagtggtgactaaccagggaccggatacagcttgtttagatttgagataaaacctactgtttaatttcacgaacttccctggtgaaagccaaacttagctgtgtcccttgtcctggtcactgcttggctggtggtggggcaggggtgaataaggctactgcaaggactgggagcgtagcctgcgggaggcagtgaggagcctagcctagcattgaggagactgaggaggggggcattttaaaaataaaactatggcttctgccaagaagagaaaagcagctgatgaaaatcatgtgtttcaaagtaagtagactgagcgatgcttattatttgtgctgaagatactgtcatttgtctgattagcaatagaaaacaatcttattttaaagagcacagtagcttgtaagttcagtcaggaaaagacaaatacacagcctcagaagactcctctgcagggtaaagcaaatttggtttagtgcgtggcattatcatgagtccctgaaggctgtgctcattaaagagtgttgacatttttttagccccccaaaaaggaaagaaaaaagaagaaagcttctagtcatgggaaagcagtacgagaatgttcaggtacaattgcagatgttgcatttcccaatgaaaacgatgatttattatgaaaaaagaaattcactcacagtttacttttacattccctgaattgaccttccagtgaagcagggtgttcattgcgtctttggcttttagcaaagaccagaaaataaaaagactgttgtacacgagcacattgtaggcctacagatgctcgcagcaccttccaccttggtgtcctccttgccagatggccatccgttc

SEQ ID NO: 29238 - DNA, 1027 bp, Homo sapiens
agtccttttattctcaacctttctgtctgagatgtgtttcttgtataaagtatatacagtcatgtgctacatagtaatgttttggtcaacacagacccatattcaaccttggtcccataaggctgtaatactgtatttttactgtacctcttctatgtttagatacacagatacttatcattgtattataggcacctacagtattaagtacagttacatgctatacagttctatagtctagaagcagtagggtataccataccgcctgggtgtgtagtaggttactaggtaatatagcctagaatgtgagtacattctgtgatgttcacacaatgatgatattgtctctatccccagtgccaccatccagtccacacttgcatcattgctggccctgaacttcggcagtgacttcctaactcatctttcagtttctgctcctgctgggtccaggtgatttttgattccccattcattcagtgtcatgatctttgaaaaccaaaactggatcattcctctctgattctcccactccccacaccaccttgcataagcatgcccctgttcacagagcctcctagacggcccatcatcctcagaataagcctagtctatcacattctaaaaggtcctcttcatttgtatccagtgctgttctccccttcttcagcattccccaggcacacctacgtttttgtttccgagaaggatctcagttcctgcgtgaaggcagttgtccaagcacatctctgcttgtgctcctcctgggcttggtcatcctcatgcttcacacccagcgttctgtgtcttttctctcaagtcccagctgagataggccacccgctccgatccctgccaaaacttgttctgttccttcagctcatcacaggttattgttaaatatgtgtgcatttatgtctggattacccgctggattgcttcctaagggcagggatcaagttttctgtgtttcacctcaatataaatataccattgtcttgcatgtagtagataaccaaaaaatatt

SEQ ID NO: 29239 - DNA, 1028 bp, Homo sapiens
taagaaaggtaaattttcgtctgtgattgcactgtgggtcagtggtgaaactcaaataatatcaccgaacagaatagaatccagaaacagattcacccacagtcaacaaaggcctcactgaagttcactgagaaaaggatggtttttctcataaatggtgctggaccaatttaatgtccatagtggggaaaacatgacctgggaatcctaactcacaccattcagaaatgtcaattctagttgaatttatagacctcagtgtgaatggtaaaacaaaagagcttctagaagaatcacagatgactttggttattatcttggattgggcaagcgtttcttaaggcacacaaaggctaacttaaaaacactaactgtaagagaaagactttgaaacgatgtttgcgttacatatatctgacagaggataaggacttctacaaaacaacaaggaaaagaaacaattcagtttttaaaaatgactcaagacttgcatgccacttcacaagagaagaaatccaaatggttagtaagcatatggaatgaattcagcatcagtagtcatcagggaaatgcaaatttaatccacaacaagtaaccactagaccccaccagaatggctaatttaaaagccccaacaatactcagtgatggcaaggatatgaagcagcctgaactaatacatgatggtgggatgtaaataggaagaattgctttggaaagctttttggttgggaatgtctgctaacattaaacatacagctatcctgtgaatcagcagttccactctagtatatccccaaagagaaatgcagatacatgtttattagaagaggagtcctcatcccctcagccgcagacctggtactgggcagcacagctggaggtgagcaagcatcaatcaccacctgagctccgtctccggtgagatcagcaggaggtgagtgagcatcagtcaccacctgagctccgtctcccgtcagatcagtggcggcattagattctcataggagcgtgaaccctattgtgag

SEQ ID NO: 29240 - DNA, 1033 bp, Homo sapiens
aaaaccccatctctacaaaaattagccccaggcgtggtggtgtgcacctgtagtcccagctacttgggaggctgaggtgggaggatgtcttgagcccaggaggtggaggttgcaatgagctgagattgtgccactgtgctgtagcctggggaacagagccaggccctgtctctaaatcaaaacaaaacaaaaagcccaatatggacaaaatgaaatgtcagcaaagagatagaagacctgaagataaatcaaagagaaattctggagctgaaagtacaatacctgaaataaatttactagaaggattcgaagacagatttgagcagggagaaggaagctaggacaatggaaaatattaagtccaacaagcagaaagaaaaaaggttgtagaaaagtgaacagagcctaagggatatgtggaacaccatcaagccaaccaacatacgcattgtgggaaacaaggaaaaagagaaaagggcagagagaatatctgaagaaataaggactgaaaattttccacatttgatggaagtcacgaatatatacaaccaggaaactcggtgagctccaagttaagatgaactcaaggagacatattatagtcagagttttgaaagacagagataaagagaatcttaaaagcagcaaggaagaagcagcccatcacatgcaagagataatccataggattaccagcagttttcttattagaaactttggaggccagaaggcagtgggccaaaatgttcaaagtgcaaaaagaaaaaactgtcaactaagaatcgtttgtctgtccaaactgtccttcaaacatgagggataaattaaggcattcacagacgaacaaaagctgatggagtttgttaccactagacctgccttgtaagaaatgctcaaggtaatcctgcaggatgaaatgagaagacaacagacagtaacttgatgctatatgaagaaataaagatctcaatagagataaattcatgagcaatatacaagctagtttataacttcacattttgttttctacata

SEQ ID NO: 29241 - DNA, 1034 bp, Homo sapiens
tcgctcgggcccacggggtgcagtggaggaagtgtgagccttgtacagagagaggtttcaggcttcagagaggaggcctgtgaagtcaggaacatctcccctctccctttgcaatttatggaaagtacattgtgccaagcaaggacagtgaatgggccttcgtttcagcatctttaataaagtactgatttgggttatgcacagatataaaatctctagtggacagaggtgtgaaatgtagttctgtcaaactcagcagtgttttatggggcctatgtaccacttcccttacggcctagaagccgattagcagcctcagctttcagtgcaggggtgttgctgagatggctttttccctccggaaagactgaaactgctctttcttatagtgtgtattaaatgcaaatcttactctatattcttcagattgtaacctataatttccaaatctgacaattatttctctgccttcttttagtattttttttaacactttcagtattagcaattagccattaattggtaaattggagggtatacatactcatgattttagcttttatttttaaatgctattaaggcataacaggctacgaaacatagaacagtacatacagcattgcatggaaacctttgaagcacagatgttctgtcgtattaaaatataaaaactcagagggaaattagataccagatagaccaacaatttagggaaggaagagggagccaaaatgggtggtttgtggtgggtattgaacacatagtttccagcgtcatgcagggagaccctgtgtagaatctgcaccataaattagacttgtactttaattttctgaatgagaagagtatgcagtgggaccactgacataaatgagagttgagaacaaaagatcatcatagcagatgaaggtggaagtaaagtgaactttagaaagcaatgaaaatatctcttgacattcgagtttattctgaaaaacttgtgaccccttgcaaaagtaaggggatcttcagatgtcctgtcccaggacctccat

SEQ ID NO: 29242 - DNA, 1065 bp, Homo sapiens
caatagccttaagaagggtggaaaaaggcccgtcttcttcttggatccttggttgggtgacaaccctccggtggtgagacatggtgcctgattttcagttggggctttctgcttcccctgtttggttttctagggacaatttaaaagattctgcaagttaattactggagaagtccgtagatcctggattcatagtatcagattaattgtggtctttgagtgggaatcctagtggtttatttagactcatcagttgtcttattcttttttttaaaaagaaagaaaacatttattttcgtaagcttgtattgcccttaaaatatttctctgcactcttaggtcacctgcctattcacgccaggagcgcatcgcttgcgttaagagactagaagtttctttcttaaccataatgtgccaggattttgttatacggaaaaatctgtccgtgtttccaactaatatttcctagccttcaggcaagtgcgacttgcttcactgtaaaatggattcccaggacctgccgtatcgggacgggcagaattctttaaaatgcagtgccccgggcaaccccatcacttcccggctggctccgggcggtcccgggctgcccgccggccgcagagccccctctcccgggcccgcccggccggagcctcagtttccccggcagagcggggcggaggcgaggctggggacgctcgggcggcggggaaggggccgactcggccaggcgcgcccggctgggaggtcccgcgggccctggagcctcccgcagcccgcctgggcctccggggcgcgaccccctaatccgctttagtcaatatcttatgagctccgcttgggcaaagtaaacaggcgccgaacaaagcggcggccgcagcccgcgactcctgaccccggggtcgcgccctttgttcgccctcaatggggcagccccgccgcccggcctgcggctaattggggcgcgtgccgccgcctctgcccggaccgcaccctggactctgcctgggacgcgccctcggacgcaggccccggacccgcccgccaactccgacccgaccccgg

SEQ ID NO: 29243 - DNA, 1031 bp, Homo sapiens
tccggattccaatgaaaagattaattggaaaacatttctactccattttctaaaactgagttttcccatagaaaaaaaaataataaagctatccctaaagttctttcagcttctaaaaagaagatgctgtagtaagattccagtccccaccgccccaactcccaggaaagcaattgggaaggtttcttaacataccctgagttcttccttccctccccccaaattccgtgtgtcatggggtggaggcagtggtgtgtttatcagggtggctggcacaattcacagccacaatcatgggggtctagcgagctgtggaaggcagctcagtgggcagcgaggccctggcagagttgcccggctgccccagcccagcgttgccctcctgggcagtctaatccaatgtgaaatgaagtttcctgggaagcagggcacacgaggaacttttgaatttaccaatggcataaaaagtatatatatttttatgacaacgggcaagtttcaattggttggcagaaatggcgagatgtgacgtcaagggacactggttagaatgccaaggccggcggcggggggttggggggagacaggcacagacagacattgggttgggacccgggaggccttgtttctctcgggccctggccgccaaagggccgtcgcaggcgtctggggacatcagctccatgcggctctgggccagggcatgctcgggcagggggacggggtctgcgaatagtgactctgtgtccgcgtgcgtccccgagagccggaggcccaggccggcccctctgcggtttgggaaccactcaggcgcctctgtggagcgggcgggaaaagacgccgcggcctccttggcattctaacccgtgtccggaccctagaggccggccggtctcaaccaccgggagggcctgggagggaaccgtgtggcccggggccagcagtgtcgccatcgggctccgagagagcaaagctgtggccttgaacttctccccgaagctcctgtgccctgagtcggggaagcaggaagt

SEQ ID NO: 29244 - DNA, 1064 bp, Homo sapiens
cggcgcggggccggggaagtggggcctgggccgtgcgcttcgcccgcggcagtccagagccgtcccaccctgcgaagagttgcgggaactggcaccgctctgccgtccgccgcttcgacgcgggaagagggtgagcgtttggaacccaggactcagaccgctagctgagggcctgtgcagctctgggcacgcgagcgcggcgccggcggcggccaggcacggtcctcccgcaagggcagggctgtcgacctgtgcgccccaggtcacgatcgggttcacggcgactcctgaggacggtaagtgcatttctcactttcgctgcttagtgagtatttaaatattaatgaagggatctctaagagggacccttccgtagggcaggccttccacagaccagggaacgcaccgaggaggttgctcttgaacctgaagccgcaccagcttgcaagaactccactcggcattaatctggatcttggaatttgtgaagcacagcttctaatctcaggtgtgcaggctatttgccagagagaatcttgttgaacacataaaataagcgttagcagacatcttaaacacaatgggaagaaaagaaaaaacatctgtttttagatttttttttttttttttttttttggtgagatgtgtttggaaaggttattgggaagctacaactctttcttggaagattgaaatatttcatttacttcctaaacccacgctgctgattttttccccctggtcggacacttggggacagctgatttgaggggggatcctcggttcggcgttggcggcatttgggccggttcagtgaaaggcccttgtgtgaaagctgctgtttacggtggtgtaaaacgaaaaacaattcgtaactttttgtggtaaaatgcccctttataggtgcctcacacaggcccagccagtggtcctggggagtttgtgaggagcaagaaaggggtgaaggaatgcttgcgtgcaatgattatagggtttcaaggtaacgtggagattaatttttttcaaaggtgggtttcaaaagccgaggcagcctgcaggccagc

SEQ ID NO: 29245 - DNA, 1048 bp, Homo sapiens
gagagtctggcctgacttggtgaagccacacacaagcaaacacccttccaggctggagagggtgtttttgtaactctgacaaatgtggcccagagttatggctccgtgaatattttctgaatcgacagaatgaagaggcctacacatgagccatcccctggtcccttctctgaggtgctggaggagctgccccggagaagccaggccagagtccaggctcccgttagcagatgtgggaggagcgggccgtgctggggccgtagtgaagcgatctgtggtgctcggggagcgttgggaaggctgaggtggcccatcagctggggacacccggcacattacggggacctgtctggacaccccagcgatgccttgaaggaggacagatgagggagtggccctgatcaggtgggggaccagggtcacccaagcagctttcttggccagttatatctggcttcagaaatgaggttttattttttcgtcaatcggctgtcacgttttatttttctttcaatgccagagcttctcagcttggcccctgtagccctgtacgttagcccactcagaagagagctctctttcagggtgtccaggagcctctgacactataggtagaattggtataatggaaatcatgaaaaagaatgaaattttgtgacaatgggcagaaaaaccccaaaaccaggtttctagtcacttttttgtgcgtggtgggaggcagtttgaaagtaaaacggaaatcagggatgggaagcttcttggtggggtctggactggggagtctcatctttctgaccacccaggaacctgtgtggagagagtggctgggccactgtccagccagcgccgagagggtttccgagtagagatgttaccgcagggtcaccggttagtgttgtaaaataagactggtggttgtggatactaaacgtgtgcatgagatctacacggtaaaaaggccaaacaattttttaagcagtgatagaattttccctccagatttagaaggaatcgtccctgatgcttctggctttctaaaaccagggcg

SEQ ID NO: 29246 - DNA, 1062 bp, Homo sapiens
gttgcctgctggcagggcaggccccgtgccatggagcatgagggacccttcccctcccagggccaggcttttggcagccaggccaagccgctgctggaatggaattcccggcgttcctggtggggcgcatggcatcggaatcctacctgctttgtctctggcatcagctggtgagccagtcacgtggccgtgtgcgtgagaccagagcccaggactgagggctcctcccgggcgcttcctcctcgctcactcacccccaccccctttttttggctttcagcaggactggctctgagcaggcgtaaaacagtgttaaaactgaatccgggcagcagggagctcctgtccacggcggcaggctctcacagtccaccgggctctcgcggtccacccagaccaccctttacctcgagtccttatgcacagaaaggccctgatatgtcccatacactcaggagttaggcccagagctgggcagtggtcactccacgccattccctctggtgtagagctggccctgcctgcccccagacggccgtggggtgggtggcaccgcttcctggggaaccccttcccacacttctggccttgtttctcacccacacaaggacaccccagtggtcactgctgcagctcgcggtcacatagagggtgagaggggagagctggacaaacaggtgacccagcagacccagcctgatgcccgcaggagagagcaacggggtctgatattttgtctccaaatgaaagagccacagtgaaaccccaggcctgccaaccccagttgtagggccagagaacagggatgtttccctgaggcggtggcaaggtttggtttggtgaaaacgaaggatatgtgagggtctgagaggggagggtgactggcctagactccacccctggcgccctgtccaccgtggctggctggccactctcggacccctcggcgtcaagcgctgactgggtgcctgcctggggcttggggctctgtacgtgttaattctgccactccagcagccctgagtgggaggagccattatcccccttctttctgtagatggg

SEQ ID NO: 29247 - DNA, 1086 bp, Homo sapiens
aagttagccggagcatcctaggatgccaggaagccttccagaggtggcagccccgcagcccccgctccttcccacagctgacctccagggctgcagctgcagggcccctgcgtccagccctcggacctgccacgtcccagggccccactgccaggcaccgccccgtgccggccctgtacaggccacatctgctgcagcagccatgccagagctccgcctcccgggctccgtccccatggaaaccacggtggggggggctcctcctgcatttggcccgctgactggtttccattagagccggcctgctttccctgagctctgcccctgcagttcaaggcttcccctgggggtttcttcccacatttaccgagcaccagccgttccgtgccagggaacccagcggtctgggccccgcccgccctggccagcacccaccggtggtgcctgatgcccggcaccgtggctgctcccctgtcctttcttatcgaaggccagctgctgctgggtcctggtgtcgtggactcagccctggatctgagtcagggcactgggctcccatcctggctgggccgtagaatcactggtgggcacttgaataagccccttcctctctccgggtctcagtttacccatctgtaaaatgaaaagctccatctatttcttgagttccttgcaatgccgagaaagaaagacaaagagaaaatgaagccacagtacactgttgctgccgggttctcagaactgggatttttgtttgctttcaaagagggttttttttttctagggaaagagtcatggaatttgaccagagatgattgtttgaggggccaagagccagccagagcccacggacatgcagcatggaaggtgtagccagaagcctgggcagcgatacccgccggtccgccttggcatctgcttggcacccagtgacctggctgtgaacacagtgagcggaggcaggaagtgtgcctgcgccggaatccgaagggctctggaaaactccccaagaggtttccggaggtcagaaatgtgggcagaaaatgagatccagcttttaaaaacctggccgactcatcccccggg

SEQ ID NO: 29248 - DNA, 1063 bp, Homo sapiens
gaagccctcacgctgctgggccttctctccggccacctcatggcagctgggtccttggcccatctggtccctccggaaggaaccgtcgaagctaccatggcctcgtctttccacgttccaccttctcgggtgcaatgaacaagtgtgtagatgccacacatcctcctggggcctggcatctttgtccagagggcccgaggcagctcggggaaggcctttcaagtgcgtcttgggaagctcacggctgaccagtgagcagggcctgggtcccactcggccgtgtgatcttgggccagcccctccccggctctgagcctcagcttcccacagtctctctgacccccacttctgacatgtagtggatctctagagggttctgagggttcaggtgtggaattggctgcctcaggcataaaaacattcctgggcttcaacctgggatcccacctggaggacagaggagagatttattgcagagatgttcatgcagtgcctctttaaatgtggaaagctcgacgcaccagccgtgctcctggggttgggcgtttgaattgaggagttgtgataacatgacctgccggactctcgtgtggccgttcacaatgggagaagcctctgtgggcaggtggaggcggcccacgtccacacgcacacgggagcccctgcgagccaggcctggcacagggttgtcagtatttgctgccacgttctctctctctcaattttccagaactttgttgaatgagcacccattccttgtgcaatgggcagaaaatgtttaagttacaaaacttatcatctggccagagtgaccctagcctggctaaattatcgcaacatgttctcccccaaaagagagacatttgcaaaatgctcaggaggtcatggggcggccatctgccaggcacattttatttcctccatttaaaaggagcagagccgattgaaggggaaggaaggggtgttctggagattggggtgcacaggggtgctacaaggccagcttcccccacatctggcgtggctgatgagagcaactttgctgctgcttttggggcagaat

SEQ ID NO: 29249 - DNA, 1101 bp, Homo sapiens
gcctcacaccaggctaatttttgtatttctagtagagacggagtttcaccatgttggccaggctggtcttgagctcctgacctcagctggtctgcccgccttggcctaaagtgctgggattacaggtgtgagccactgcgcccagcctgatgcctttttatacccagacagaagcaagcaagcccttacaatggccctgcatttgatctttcagtcctgctgaaaatgcagatgcttcctgacttgcagtggggtttgtcctgagaaacccactgtaaattgaaaatattgtaagtcaaaaaagcatttaatacacctaactaccaaacatcatatctcagctcagcctccctgaaacgtgctcagaacacttatgttagcctctagttgggcaaaatcatctaacacaaagcctattcatgataaagtgttgaagatctcctgttatttattcaacactgtactgaagtgtggttggtttctactgaattcatatccctttgggttgagaaatcttaagttggatcctggtaagtcggggctgtctttatggacaaaatgcagagtgatggccctcacgcggcacctccctgttggctttgagcagcactctctgtctgggagaaactttagtgagcatgaagttgagccctcaccgtgatgagggatgggacagggtgcaaggacagccacctgctgttgcaggtttcacctgggtgaaacaccttcttgattcggttcagatttgttaggagttcctgtgggccaagccctgagccagtcacatggagtcatccctcttcctgatggccctgctgagtgcccctcccctgaggctcccagagcccacggggcttgccctggccaccaggctggcatacagcagagcagggccctggccccaagctgccccgcagtagaaacacctctgggttccatgaacgttgtctcgccaaggtgtggggccaccagatccctcaggggcggggaaggtctggggtctgggccgagccttccgaagtctggctgtgcagtgggttcaggccctgccactcagacccttgccgggatggtgccggggtgggccaggcccccagcccc

SEQ ID NO: 29250 - DNA, 1040 bp, Homo sapiens
ccctgcccgtggctctggatcggcggtccccatcagaggcctgggctgagtcctcaggtgtgtgagtaccatcttcccctgacccggcggccccacaaacacccctctgccagccacagctcggccgccctgggccttggcctcccagtctgtgcagtggggttggtgacgatcacaggcttctgctctgtgcaggtcgggagggagtgccatgtggctgcacccccagcccaagagcagcctcgctgctggacctttgggttcccaataagatctggtgaagacacatggagaccactgctgggcgggggcaggaaggcgtccctgtggcaccctggggccgcccatctgttggatctggaggtgctgcctgccaggctctactctgcatccagcgagtgtttgttgggggcaatggggcccgtgccttttgtccagaggaggccggagaaggggacacaagaggggagtggacagacggtcaccaggcagataagcaggacggggctcggggcttgtttgggaagtggctggtgctgagcttggctggggcagggctccaggaggggccgagtgggccccacccccgacccttgtcggcagggccccgaaagttccacgctgttgggggggtgccgtggaaggtggagcggggagcagcctccgatccctggagcaggttccccagcgttcccgtggcagccacttcatggcacagtggtccccggagttcaggccaggccctcgagccgcctgtctggggaccactccaacctcaggcaaatgaggggcggccctccccgggtctgggggcaaaagaaggttttgaatccggaagcccaggctcagtaggcccttgccacctcccccagaggtcatgcctcaggctaggccacctgggctgcaacatgggagggcatcagtgccccaggcagcccccagtcccccggggccactgcaagacccttagacgggacgacaaggcctctagaagccccggctgctgggagcctaggcagaagaagggcccacctgcctgt

SEQ ID NO: 29251 - DNA, 1023 bp, Homo sapiens
cactctggccaggatttccctgtgttggggccagccaaagtctctgacacacaggagtggaggacctgttccctcctgggcccctccacagcccccactctcctgcaggccccatccccgcaacctcagccattccagacagcatctccctccccaccagagcccctcggcctctcctgagcctctgagcttgcttcctgccccgtcacaggcccatgcacctgcccttccagtagccagaggatcccaagtggcacatttccgaagggacggtctccaggaacccccaggggccagggtggctgcagagcagcatcagggagatgctgggtgttggccgtggaggacaattgtgcccctggccaggcggggagggggcaggtggaccctgtgggagccctgtgggagccctgtggggttggccacacatcggttcctgctatccttgcaacaagatcccctggagggcagtgtgcctcctagaagaaggcaggagaaatcaccacgtgaagcagagaatggcgtttgatgagtgtgtgctttttctaggggtcgacgcaggtcctctgggcagcatggggtggtgccgggtggaccccacggtggcctgtgttcgccacgtggccgtgggtcagttcctcgctggaggagacccttccccagacacctgccgggcacccagccaaacccttgaggcctgggaaggtctctggatgccaccctacaccccgcccagactcctctccctgtggttcctggacagaacattccgtcaccacgaaacgaagtttgcccaggccctgccttcaccctgggaaaacccagccgggcatgggaaggaggaatgctgcccgcctgcccgcccagaccagagtcgccccacatgccaggccaggcccgcatcctcctggggcacacgggagccccaggcttcccggcaggaaaagccccccaccgcagaagggctggtctctggtggggagttgctgctgggtggggtgaccacagggcggggttcaggct

SEQ ID NO: 29252 - DNA, 1044 bp, Homo sapiens
acagtggctcctctgtacctggggaaactgaggcccagagagccagggacttcccaagaccagccagcagcagctgccccttcctggggtgccatctcccctgtccctcctgccctgcgcctgcccagccctcctgctctggtgactgaggaccgccaggcaggggctggtgctgggcggggggcggcgggccctcccgcagtgcaaggccgggcctggcggggtgaggtagtaggttgtgtggtttcagggcagtgatgttgcccctcggaagataactatacaacctactgccttccctgaggagcccagtgacacgaccccatgggagggccgccccctacctcagtgacacgaccccacgggagggctgccccccacctcagtgacctgcagggggcctgagccgaagctgggtgggcatctgggagctagattcaataaagctgttctgaccatgaacttggaactggcccctttcattctggaagcccagggactgggctctggggcgcgtctgctgcgggacagtgtggaggcccctggccacgagctgttccaggtcatgagacttgtctgctcacgcctcccggtgcctccagagtcctcagttggctccgtgctgtaccctgggctcaggatcccaggcccagcccgttctctgccctctcgtgctgcctttgagccaggcgggctgaacaccgggacccaggcccggtggagaggtccccacggggcagccaccaaggccccaggtcagcagctcagagcactgccaagtcctggctcctgaggccacctccgtgccttaagtgccttgaccaaagtctggacgtgcctgtccttccgtcctccctcaggacagtttccagggcacccgtaattcctctgacagactgccatcccaaaagtgcacccattctcctgggaggcctcaggccctcgtctagcagctgccgtaggctgggcccagtgatcccgccctgggcatgtggggtgggcttgttcatgcctggcccagcaccgagagcccctggtggggag

SEQ ID NO: 29253 - DNA, 1045 bp, Homo sapiens
ggtgacagtagatgctctctggagcgcagacgaggcacatgtgtcttcatagcctgggctgggtgggagccagtcaccctgcggatcgagagagggggtagagtcttcttcaaatggcagttttacttcaaatggcagatttcacaagagttggttattttttacaatggtttaggttgttaagtctcctttgtatgtaaggtagttttttcaacatctaaaatttttgttttagccttcaaaaccaacttaccaacctcagtccagctgggaaggcagcgttgattatggtagtttgtcaagaatatatggacctggaaacactttctctctctgtccacctggtagataaattgtcctgttgagaatttttagatctggactggaactgccaggaccaccgcctccagggagtcgctgggcacctggaggtatcgtcgatgcctctcccccatctttagaaaatttggctcttctgaggtcattattattttaagaatgattaggattgataagggtcccatgaccagcattatgaaaatgcgagagtgggaaggacacagtgtgagacttccactagaaaaaagtgaaagttagggttaggacatccttttttaaaaattacaaatttagtccgttttggtttttgtaatcaggctaggcacagtggctcacacatggaatcccagcactttgggaggccgaggtgggaggatcacttgagcccaggagttcgagaccagcctaggcaacatagcaagaccctgtctgtacacaaaatttaaaaattagttcatcggggtggcacacatcagtagtcccagctactctgcaggctgaggtgggaggattgcttgaacccaggaggtcgaggctgcagtgagctgtgatctcaccactgcattccagcctgggtgacagagttagattccaccctctcccaccccggcaaaaaaaaaaaaaaaagatgcaatcaaaggggctgttggccagcaatggcagcagcagcggcgggcagtctgcccaagtgtcttaggaaccaaaa

SEQ ID NO: 29254 - DNA, 1048 bp, Homo sapiens
ctgccaaaccttcggggcactggtagcacctggccacctgtctcgatgccacctcctttcctaaaacatgagagagtttctcaactccctgggattgtagacaggtttctcaaccttgtcatgctctgcaggtagcctggagggaccaaccacagctctgggggctcttgagggctctagccaaccactggggtgccagatggttctccccttgtctcaggctcagcagagtcaccctggaaccacagaggcctgggctaggccctgggtcagcagtacgatgagggctgagcaattcagggacctgagggagggcatggcaggctgtttctagagattcagaaggcttcctagtggaggtgaaatgtgagctactgaagcatatgtggggcttgctgggcagagacaagggaaagagttactctcagagaaagcagaccatccaaagctaccgggacatagaagccagcagcctgctgcgggacaaggggctggagggcaggcttgatgtggtcagatgggccaacagcaggctgaggggcacaggagccagggagcccacctgtgggaagggcaggctgaggctggagacccagagaaaagtggggagcctgggggatccttggggaggtcgggggatccattgggaagccaagggttgtgtgggaaggccgggggatccaagaggcctagggtttgtcaaagcggccagaggctttgtttaataacctttgacactttttaaaatgtgcttcctacttacgcgtctatggcctctataattagacagtcctgatagaggcctaagcacaaggccagacgctgcccgtggccctgcccacctccccggcctctcacctgggacagggtcatcaaggcctccaagggaagcgccgtgagggaggcccttgcacgggacatgccccagagcctcactccaggccctgggtctcctccccatgtcctcaggagtgtctgtgggccagcggtggcaggatgtcctgcctgtggcccggaagcacagccgagaccacatcctgctgttcaa

SEQ ID NO: 29255 - DNA, 1075 bp, Homo sapiens
aaaaaaaaaactggccaggcatggtggctcacgcctgtaaccccaacactttgggaggccacgccaggaggatcacttgaggccaggagttcgagaccagcctggtcaacatagcgagacttcgtcactagaaaaaatttaaaaaattttttaaaaaggaaaaaatataacttagagccccctatgaaaaactaaattagcatcatgacaggatacactttggggagtgaaatttcacagtacctttatttaattccaagccatagagcctggtaatatttttctctttatcagctgtggcactaaaataacagtggattttttccctctagacattcttcttttggccgatgaaaaatttgacttcgatctttcattgtcttcttcgaggtaaacaaatgagttttcttcccttgccttgggcataaccacattcagtaaagtctttcctttaaatgccagtgttatgagttattaatcattctttttttaaacaaatagtgcaaatgaagatgatgaagtcttcttcggaccctttggacataaagaaagatgtattgctgccagcttggaattaaataatccggttcccgaacagcctccgttgcccacatctgagagtccctttgcctggagccctctggccggggagaagttcgtggaggtgtacaaagaagctcacttactggctttacacattgagagcagcagccggaaccaggcagcccaagctgccaagcctgaagaccctcggagccagggcgtggaaagattcatacaggagtcaaaattaaaaataaacctctttgagaaagaaaaggaaatgaagaaaagccccacgtctcttaaaagggagacatactacctgtcagacagccccttgctggggccccctgtgggtgagcctcggctcttggcctcctccccggccctgcccagctctggtgcccaggcccgcctcacccgggcgccggggcctccgcactctgctcatgctttgcccagggaatcatgcactgctcatgctgcaagtcaggcagcgactcagaggaagcccgggaccaaattgctgctg

SEQ ID NO: 29256 - DNA, 1026 bp, Homo sapiens
ttgtgatcctccggcctcagcctcccaaagtgctgggattacaggcgtgagccaccgtgcccagccaaaaaccccttacttttgcagacacaagtaataggtaaataacgagatctttgctgattctgttttttcacattttgccccagttggggctgaagaagaccctgttaaaagcacccggctctaccagcaatctcgcaaggaagtcctcctcggggcctgtttggagcggggcatccagtgcgtgcacatccccagcagtgggcaaaggtgaggcagccggcatcatgcttggacccacatctggccaggtgaggcctggagtgctgctcaggccttggagactgtttctgcagaaccacttaggcttggcaggacgtcccggagggcgtgctgtgtgcggtggaccaggctgtggactgagttgctgtacctgccctcagtgcctctgtcccatgaggagggcacactcagatgggtggcttcagtctacggggtacacatggccagaaagcatgtatgataccccgtgcctgagaacatggacactggaatcaccctcatgtccatgtcatgagacaccagttttaaaataggactattccagataatgtagggcatatggccccataactcctgggtgcctgtttaaatccatgctcccacacctgtttgaggtcaagccacatttcaaccttgccaagccacagctgccatctagtggtaagggaaagccttcgcctttctgctcttcagagcgaaatcctcttcgaggtgcattggccatgtggcgtctcggggtcgttcagggcagcatggtgtggattgtgttcacaaaatgtaaaaagtgggccgggcgcaggggctcacgcctgtgatcccagcactttggcaggccaagatgggtggatcgcttgacccctggagtttgagaccagcctggccaacatggtgaaaccctgtctctactaaaaacacaaaaactagccgggcatggtggcgggtgcctgtagtcccagctac

SEQ ID NO: 29257 - DNA, 1080 bp, Homo sapiens
gcagccagtcctctgtgcagggaggggaagggaggccctagccggatccacgctcacctcctccactctgctctcttccagctcatagacctgagctcccctctgatccagctgagccctgaggctgacaaggagaacgtggattccccactcctcaagttctaagccgaaccaaatcctttgccttgaaagaacagccctaaagtggttttcaaccctcagaaacaagctttaggctggtcgcagtggcttacacttgtaaccctagaacttgggaggctgaggtgggcggattacttgagcccaggagttcgggaccagcctgggaaatatagtgaaactcctgtccctacaaaaaatacaaaaattagccgggtgtggtagtgcatgcctgtagtcccagctacttgggaggctgaagtgggaggatggcctgagctcaaggagatgcaggctgcagtgggctgtgattgtgccactgcactccagcctgggcaccaatgtgagaacctgtcttggaaaaaaaaaaaaagaaacatgttttagtagaagttttatttgaaaaagaaaaataagcataaatatattcccagtgctggagagggtgggctgagggactggggccagcacggaccacccaaggcctctgcttcccgccgccaccctcctcgctgccattctctgggctggaatgtgaagcctcagtcactctaaatgaagaattttcttttgaatgttttgtatgtaaaatagcaagtggctatttttaaagttaagtttgtataaatagttagatattctagatttacattaaattgtaaaataaatggacttattgaagcatatcttgatttttaagcttatcttgattttcaaacatgcatagctatttttatcactctaatcagtaaggctactatctagactcgaatgctttcatacaagtgattttcaaaaattagtcaataaaaattgatgtcagtgcaggcccaggcccgcccccagatacactagtttctaggtctggggccagcctagtaattgttactaggcacacaggtgatgctgactcgatggcct

SEQ ID NO: 29258 - DNA, 1020 bp, Homo sapiens
tatctggaaatatgtcctccctgaactgttgaaattactttgggtcgtagtggcagtggtcaagcgtgtgagttaggatgacattctttgtgtgacaccagcagacagttaggactggcaggagaaagagttccctgaggtggaggcgcaggcagctgttcaggaagggaaggcttgcctttggagagcattaagctgtcacgaaagctttttagggagcccctaggtggctggctgtcaggcacgctgtggaaggaacttctgcagtgaatgtttccacacctggaagaaaggcatgaaccgtgcagcacaggatgagaggacatgacgcccagacttctgaactcaccgcgcttctcagaggcatcctgcgctttttctagtataagtgctgttctttgaggacacagatgtaaagtggattgttttctctaggagaacctcagtcaagatgagattatgtgtctctaaagtgcctttttcaggtcgttaatatgcagcagctaattcttgctgtgtcttctgtttacatggagctagtgtggctggtccaggatggctgtgtcttctgtttacactgagctagtgtggttggtccaggatggaatccattttgctgcacctttcataaaagtctcttgcaatactaaatatctgtaattttttctttttttgagatggagtctcactctgtctcccaggctggagtgcagtggtgtgatctcggctcactgcaacctccacctcctgagttcaagcaattctcctgcctcagcctcccaagtagctgggattacaggtgcccaccaacatgtctagctaatttttgtactttttttgtagagacggggtttcatcatgttggccaggctggtctcaaactcctgacctcaagtgatccacccacatcggcctcctaaaagtgctgggatgacaggcgtgagccgctgcgcctggcccaaatatctggaatttttacacaatgaaaaggttctggattcatatgcaccttgttaggct

SEQ ID NO: 29259 - DNA, 1269 bp, Homo sapiens
gctagggcagatgtgcttgaggaaggcgcctctctcctctgactcccctggagccctcccctaaggccttagcttcaggcctggctttcctgctacctgccccttctctggtccctgtctctcccccactcctcgcaggacagtggcctgaaggacctgaccgggttctgctttcttccccggggcagctggtgtgagggtctcccgcgcagggtcagaccccgcgggccgagacaatgaggcgttctctaaggctctggcatcgtgtgcgccggctgtgactggcggccgagggtgccggtgggcagccgggcccctaccctggaagcaaagtgtggggtgaggccgggaggccccagggcccgctcaggacgtctgggtacagcttgggccaccgccacttctgctcctctcacggctgccgtcttctcatttcagagcatgggcatgtgtttcatcgggaagaggaattttgaacatttccttcttcaggtgcgtgctgctctttgacacaaagagatggggctgcgtgtctgccctgggcctagatctccgtcggtaatgacatgtttgttttccagtatctgcagcctcgacctggtcactttatttccatagaagacaataaggttctgggaacacataaaggtgaggtgcagactctgccacttgtcatctgaaatgcctagagctgtggcgtttcagctctgggagactagaccagagttcctgtcgtcccttccacttggctggagaattgtagaaggctctgtggggcggccgggggcgggcacggcctagggtggaacagttgccttgatggtggctgggtgcacttccagatgtggcctcagctgagatgctggagttcatgaaaagcgcgcctctgacttggaaggactatactctgtgagttacgtatcaagtccctgtaaaaagaatgatttccttcctgtgtaaggaaaatgttaaactacacaaaactccactctgattcagggagtaaggtggacgtcccggcatggtgtgaatgattaaggaccacatgcagcgatgggatcaggcgtccgcgctggccagagtgctgctcgctcatgtgcagacccttactgcggtgaggcctgcgtgagcctgtgctgtgcctggtgtcaggggacaggctccgagtcagtcacagtgtgcagtcctgctgtggggacagagtgcagccattgttgggttagtacagtggcggggatgtgcctgccggcgtgatgatcaggcaggtct

SEQ ID NO: 29260 - DNA, 1046 bp, Homo sapiens
gagggacaagagactctgcttgggactctgtgccaccaaactcccgagaagctgcagtgggagaagctgaatgctgggcagcgggcggttaggaggctccaggaaacggctcagcctctcttggtgggttcccctgccggccgttcctgggacctctctgctccacgtcccccctccagggaggcctcccatgagtgccccagctgtgcctctgctgtcactgctctcctcttcctgaggttcttgtttgtctactgtttaccacgcttcccttctagaaggtgggctcctgaagttaggggtctctgctcatgtccagcgacctggagcggcacctcattatgcctggtatcctgggaccctggctcgggtctgagctgggctgtggagttgggtagggccaggagccaggctgggagtgaatttgtttgttcctcactcttggtgttgaccttggccacctggctgaggtgtgtttgtcagcgtctttattgaggtgtaattcacacatcatacaacacactcattgaaagtgcacagttcacggacttctagtacattcaccaagttgtgcagccatcaccacaatcgaaacccaaacaggaacctgggccttctagacactttaggcactccctggacccttcctccctgcctgtggtgaccacctttctctctcttttgtcttttgagatggagtttcgctcttgttgcccaggctggagtgcaatggtgcgatctcagctcaccacaacctccgcctcccgggttcaagcgattctcctacctcagcctcccaagtagctggggtgacagacatgcaccaccatgcctggctaattttgtatttttagtagagatggagtttcaccatgttggtcaggctggtctcgaattcctgaccttaggtgatccattcgcttcggtctctcaaagtgctgggattacaggtgtgagccaccacacccagccaactctatttttaaaaaactgttttagatttatagagaaattgcagagataatacagagtttcccaattatccc

SEQ ID NO: 29261 - DNA, 1034 bp, Homo sapiens
attgtggatgtttggccctgggatacttcattgcccaggacagatctttgagtacaggggtgagctgaccctaccacaccgagttcctggcctgtcctgtccctggagctcacacctcaaaggagaaacccctgatcctgccagtggggggcctcctccctgctgcccccaggggctgggatgaagtcagagagggagcctgaacacacctgcctgtgtgttttgcaacggctgcaggtcctgggtccagcattgtcgtctgacaggtgttttggatgatgcctgtgttgaattccatgggaagtgttaagtcgggaaccactgcccacctctgtgacctctctagtcactgcgtcccgccctgctgaacacatcccagctccctggcctcacagccaaggtcctgcatgcagtgggtgagacattccccaggccagcaagccttcccgtcctctgcacctcatctgtagatgaggctacatggcagagatgggctctctcgtggcacatggagagtactgatgcagcagttggcatgtcctgatgtcccagctctgtaaggagacccttatttgtcatattcatctaccaactggagtcatatgggagggagtaaaggtagctgctgccttatctgtgatttccaagggcctgggcccagagcctggcagctactggatgctcagcgcacaactttatgtgtgtctatatggatggatggatggctgtgggtaagtggataggtagatgggtggacgggtgggtggatgggtagatggatgcattgctggaaagatggatgggtggatggataaatggatggatgagtggacatgtagatggatggatgggtgggtggatggatggatggatcagtgagtaggcaaacgaataggtagattaggtaaatggatgggtaaatgttgggtggatggatgggttgatgaacagacaagtgagtggatggatggatggatggatggatggatggatggatggatgaatgggtgagtggatggatagatgggtgggtg

SEQ ID NO: 29262 - DNA, 1050 bp, Homo sapiens
gctctgcagtgtaacttgcagcctggtgattcgatggagggagtgcctgtcttctagaaagttcctgtggtgatggcaggagggctgaattgggctgggagagttcaggtgagagtccgggggaggtggccaggtggggcctctgggtgtgcgggcctccggggatgcgggactccgccaggccaggagcagctttttgggtggattctgagttcgcgcccctggcctggtgggaaggagttttatttaaagattatcacttgatttttatttttgggtgaggctgggcctgttgaatcagtcgtgtgccaagaggactcctgcctgagagatctacttttacaggtttaaaaatagccgcagaactgctttccttcctcccagtaacttccctgtgcgctgagtgtcgaggctgggtggagggctgcgtgtcgaggctgggtggagggctgcgtgtcgaggctgggtggagggctgggcgtcgaggctgggaggagggctgagcattgaggctgggtggagggctgagcattgaggctgggtggacggctgggcctcagccccacagtctgggcctgtgtaggcctgagccgatgcatctcctttgcctcccctcaaatcagcgtggccgttcactcatcagagaacgttctgggggttgccccggagtgaccagtgaggtggttgtccctgcccttctcctcgcagatgctggggaggcgtgaaggctggagcaggtgggtgcacaaccagcctggctgtcccagggcttcctttagcctctgtgggggcgatttctatgtgccatgtgtcgccacgccaggctcttgtcctgtcccgggggctcctagtctgtggctgattctgcttcattccttggagagtggtggctggtgctgactggaagtgggtggggctgcctgcaggaccagagtcactcttccttgtgagcgtccctaaaccttgcgctagagcttgacccctgactgcaagacgcctgtgggtctgagggtccctctgggcacgcagagtgtcccctgggcttccttc

SEQ ID NO: 29263 - DNA, 1100 bp, Homo sapiens
gtgcccgcagacaatggccacacctctctccccagggcccggcagtgcccaaggatgggtccggggcctcggggccaatgagcgcctcttcctaggtgctgggattcagtccccaaacacagcgggaggggtccctggggcagatggggctttaccagcgtcgggtggtttagttcgagtcccttttgtggagaaagggagatgaaaactgaccacgtgccaggtgtggccgaagcccccagggagggccacattcggggagcggggggtcgggggagggccaccgactggctctgctgccagcacaggcccctccctggaagtcctcgggagcggagcgcggatcggcacgggctctgggctccccgtggagagaagctgtagtttttaccaaattgtgtacatctgggcagatgtttaatttctgtgactaatcactgaactagacgaatgttaaattttttatgtctgaagcctgagtctattttggatctgtaaataatcattgccagtgtgacttttgttcaacaaaaggattgtactgtattaagaaccgatgaaaaaaattctcctgtaacatttttttaagaaaactttgtttgtttaaagaaaaagtattgtataaattataatttttatttaaataaacctaaaatgctttgtgctaaggctcagggctgtctgcctccttggcagggccacacgcattgtaggcggcctgagccagctgggccaccaaccccaggccctcagtgccgctgccagcccgccactccctggggccccacggctgccggcggcggggcgtttgggtactgatgcggcctgagtgacggctgtggggtgaggtggggctgagaagcagagtcctgttggacgtgggcattggaggctgggagcagggggcagggcctgagttccagaagacaggaggccaggtggcgagggacgcggcctgcagggagggtacccagggctggcacagggcgaagtgggggaggttgaggcagaggcagtgccttggggtcagggggcatgcaggctttggcccctctccactttggtgtcctggctgcctgggggttctggacacaggggtt

SEQ ID NO: 29264 - DNA, 1020 bp, Homo sapiens
aaatctaaaaatttaaagactttcatggaaaaaattataaaataattaaaagacatgaatgaggatctttcatggaccagaaaagtcagtttcacaatgcaaatgtcctttcgaagttcctcaaatacaaatgcaaatgccctctcaaacatgtggagtgggccgggcgcagtggctcacgcctgtaatcccagcactttgggaggtcgaggctggtggatcacgaggccaggagctcgagaccatcctggctaacacagtgaaaccccgtctctactaaatatacaaaaaattagctgggcgtggtggcgggcacctgtagtaccagctactccggaggctgaggcaggagaatggcgtgaacccaggaggcgagcttgcagtgagccaagattgtagtgagccgagattgcgccactgcactccagcctgggtgacagagcgaaactccgtctcaaaataaataaataaataaaaatagacatgtggagtgaaagaagcaagttacagaaaacaacacgtttcctttggataaggagcaaaacctgcaaaactaaactcgctgttgcagatacagccatggacagaggcaggaagggatgcgcttggcgtgacctcgtagcgccctcccagggggagcggggggactccagagcagggcacagaaggcttcggggcggcgttcagttgcctggcataggtggtggtgacaccttgcttcattttattcttgttctttaaattgtgtgtgttttcatgaaaaatattctgctttgaaaataacaggtatgtgtaaaggaaagaaagcaagccaagtctgcccaagtaactttattcgtgtcttctcaaacatttcagatcaaataatgccattttctaatcttgaaaccagcaagattagaaagagaatgaggccatcctttcactcagactttcccagttactcaagattgtattcaggaacgaagtcaaactcggcctcacttcttaattagaataaactagaatcaggtccattgc

SEQ ID NO: 29265 - DNA, 1049 bp, Homo sapiens
cactttaaaaatgccaagacaaaatcacagcacactgggcttgagaacacaggcagtctttcagtgtgggtctgatgtttgctattttagctcagctccgcctggcagggtgtggtctgctgacagagggtatgcaggcagctggggtatgtggagtatgacgtttgaaagtggcatggtggtggctgggcgctctggctcatgcctgtcatctcagcactttggggggcccaggcgggtggatcacctgaggtcagcagttcgagaccagcctgaccaacatggtgaaaccccgtctctactaaaaatacaaaaaatagctggacattgtggcaggcatctataatcccagctactcaggaggctgaagcaggagaatcatttgaatctgggaggtggaggttgcagtgagctgagatcgcgtcactgcactctagcctgggcgacagggcaagactctgtctcaaaaaaaaaaaaaaaaaaaaaaagaaagtgttatggtagcaagaaaggcccaaattgagcatggcaaggatgtgagtgctgggataaagctggagcacaagagggttcttagtgatgtggctctgacagccttcagcttacattgccagagccacgagatgtctgtgagcaaatcagacggtcggctgaataggccacagtccgtcctcagccgaaggagaggcactgttggggataatgaattcatttggaaaacgtttacgagctcctctcctgtgccaggtgctgtggtgcgtgctgagcaagccatgtggctcttcacggctggacgcctgccctgtgaacacatgcgcacagactgcagtgctgggcaggtggcagtcccgggaccctggcagagtagcaaggccctcactgggtggaatgctcatgtcctccttacacaggtcccgcttccgccgagacctggctgtacagcaggaaccgatctggctgctgaggtcaggggagggtgtataggagtggggagcgcttgactggggaggaggggcatggagggtggtgagcaggcactggagctgctt

SEQ ID NO: 29266 - DNA, 1041 bp, Homo sapiens
tctttttaaaattttttattttttactttttcagctttttgttaaaaactaagacacagacacacacattagcctaggccgacacagggtcgggaccgtcagtgccactggcttccacctccacatcttgccccagtggaaggtcttcgggggcaataacatgcatggaatcatcatcttccatgataacattgccttcttctggaatgcctcctgaaggactagggacttgcctgaggctgttttacagcttttattgtattttgttttttaaacaagcagaaggaacataactctaaaataatgataaaaagtatagtacaataggccaggcacagtgtaatcctgtaatcccagcactctgggaggccaaggcaggtagatcacctgaggtcaggagttcgaaagcagcctggccaacatggtgaaaccccgtctctactaaaagtacaaaaattagccgggcgtggtggtgggcacctgtaatcccagatacccaggagtctgaggcaggagaatcgcttgtaccctggaggcagaggctgcagtgagtcgagatcacaccattgcactccagcctgaatgacaagagcaaaactctgtctcaaataaaaaaacaagtataatacaattagtacaatgaatacatccataaagcagtagcatagttgttcattatgatcaagtattacgtacagtacataatgtatgtgctatactgttataggactggcagtgcagtagatttgcttacatcagcatcaccgcaaacacaggagtatgctttgtgatgtgatgtaactttggctgtgacatcactaggtgacaggaatttttcaactgcattatagtcttacaggaccatggtcctatatgtggtctgttgttgactaaaatgtcgttatgtggtgcgtggcttgacttctctgtgttggacaatttctttctttcttttttttaaaggtgcccaccaccacacctggctaatgtttgtatttttagtagagacggggtttcaccatgttggccaggctggtctcg

SEQ ID NO: 29267 - DNA, 1028 bp, Homo sapiens
tgtaagacttttatagtaaaactgttaagtctttttctttttgagatggagtcttgctctgtcacccaggctgcagtgcagtggcacgatctcggctgactgcaacctccgcctccagggttcaagccattcttctgcctcagccttcccggtagctaggattacaggcatgtaccaccatgcccagctaatttttgtatttttagtagagacagggtttcaccatgtttgccaggctggtctccaactcctgacttcaggtgatccgcccgccttggcctcccaaagtgctgggattacaggcgtgagctaccgtgccaagcctgttcaatcttttaaaaaattatatttatcttttgcaattctgcattcaatttcagacaaaatgatggcaggtgagaattcccaggtgggcgtttcttcgagtttttagtctgtgggcagaggcctcagttccttcattgcactcccagacaccctcatcaccgtgtagatgcccgagggtctgtggtggtgcttgtcgggctgaggtccattctcagggatgggctgaatgccctgcttgtgtggggtgtggggtgtgggcttgtatggtgccactcatcccttctgaactgggccctcaggaccccgggtggctgcaggggggcctgcgacagcccatgaggagctgcttccttcagtcctgtgggttcctgggagcccacctttcggctgagctggtggagggctcttgggaaggcaggagagaggctcactggttttccttttcttttccatcagcatccagcacgtgtatggtgcccagcaccccccctttgatccactgttacatggcacgtaagtgacgttccaacctcacttggcgtctcggctctgatatgggagggctgtggcaaccccggtcttcctgcttccttcctgctcccaggcattcctcagggaggagactggtttctcattcagccacactgatcaagcagtcgctttgtgtgagatactgtgcaccccgtgctgcgcatcccggt

SEQ ID NO: 29268 - DNA, 1047 bp, Homo sapiens
actttagcagagcacgggccagtgattttgtgggatgtcccttggtttgtgcttgtctgatgtttgcccacaatgagattctgattgataatttttggcaggaacatcactgaagggattcgtgttctccttggtcatcacagcgggggcacgtggtgctggtgggtcctcacgttgaagatgtggactccgatcacttggttgaggtggcgtctgccagctctttccactgaagagctcccctttttcctttggtgatgaagtgctctgtagagagatgctctggggtctgtgcatttctacagtgtatttctttgtccccttgcacggcaaggcagttgtgcacctcactttttaagggaatgatacattttcccatggcgtacgtggagaaccgccttagtctttagagtgccctgtaacatgccatcctatggatttcccccgacttgactgcaccagcccctgcggttgggcagcgggttattcctaacttgctattattacaaacaacttgagaacgtttcttcaggcgcctgaacctccttctgtgatggtgacacagagcatccctagccatgggtgaggcgagaaggcagtgtgggggatgggtctgtgagttcgcctagagcaccaggtgtggaggtgtcacccaccaagacaggagataaaggtagatcgtgcttacgggagtctagtcttgtagttgacgtacccatcttggccacttcctcttctagcatgccagtgccccttctctgctggctctcctgcctccagggtggtgtggagattcagaaccacgttgcacctgggagagtgggtcctggagccgggctgcctgtgtggagagctggctccactggttactcgccacgtgaccttgagccagcttggtgatgatcctgctctcagagttcttgtttgcgtgatagacatgatgaaagcggtgctcattttgcagtttaaatgagatagtacatatgacatgcttaacagagtgcctagcacatactaaacactcaaaaatgttagttatttttatgg

SEQ ID NO: 29269 - DNA, 1056 bp, Homo sapiens
ttcacccacaggctggcgtggcaggagcaccagccttaccttcttagagaatatttacttacattcatctttgctattcttaaatattatttaaaattacagatggtcagtgtttgaaatttagaaactactgagagtaataataagaaaaataatagaatctaatgctatgtgccaggtgtggggtgtggagtccttgatgtatattttcttgatcatttctcacagtagtcctgtgaagtggatgctatttttattcctgtttgacagatgaggaaactgaggcttgaaggggttaagaaacatgcctgacattccaagattttgacgtcacagagccagggctcaaacttaggaatgtctgagtccactgggcacaggctctcctgcctgctgtgcaacctgccaagaccagtctcaggaagaaagataaaaacccatgtaaactaccaccctggattccccaggacgttaaaaaagctgatcttctttgtctttttgtgagggctgtgtgtgtgtgttttccttttcacgtagacttgagattaagcagtgtatctaattatatatcttcttatatttattttatttttaattttttttttgagatggagtctcactctgttgcccaggctggagtgcaatgacaaggtcccggctcactgcaacctccgcctcacaggttcaagcaattctcctgcatcagctcccgagtagctggggttacaggccgctgccaccacactggctatttttttttttttttgtatttttagtagagacagggtttcaccatgttggtcatgctggtctcgaacccctgacctcaggtgatccacccacctcaccctcccaagtggtgggattacaggtgtgagccaccatgcccggcctatttttacttattttaaataatgtcttttcccatgacactaactttctttgaaaacatgattgttcatggctttataatagttatcaaaatacattcatttcttccatttgcttgtaggtgaaacatttctgaagacattctattatttgggtgtttaagtt

SEQ ID NO: 29270 - DNA, 1023 bp, Homo sapiens
gttctactcaaccgtaccgtggaaggatgggcgcaggaaatcttgaacatttgaaaaaaatgtcctttacgtgagggtaggccccacgcctggctctgtgcccacgtggctggccttgactctttcgggggcttcctccagcctccaatagaggatcagcgtgagggagtgagggcttcacgtcagctgctgtgagggatgacgtgagatacgggtgttcttaaagtgctgtttcccttaaaatctggtttttacttacttcgctgaaactggtcaccaaagacaccacatttgcctcattgtacttgagagcggaacaggaacggagaaattaattaattcagttttatagatgaagaaggggagcctgaagaggttcattgttcaacagatacttactgagcactcactcgaggcagggcctcgtcctctgggccctggagactcagcagtgagcacgtggctggtcggagtgatgggcacagagctgggcgcaggcagttttggaaagcacatgagactcttttctgcctcagggatcactttctcagccatgccgcatgacctcagaggcattttgcaccaatggacacttcgtgaaaaattttttcccagggttctgtgacattttgccccgatttcccccgctgtctccgagtgtcccctgtgagtggactctttctccttcacacccatgtgcgtttctggacttcttgttttaaacacgctcttccttggttgggactctgcctgtctttccgcacctctgagcctcattgcccagtgtccgtgtcttccggaggtgcctactgcactgtcttgggattttgccctgtcagaaatgtgtcacgtgtgataggaaaatcatggacgtggttgagagtcaggcccctgagtttcctttcctcatttgtaaaatggggatgggaactgctctccaggatgacaaattgtcacgtggaaaccagtgcacggcgcagacactgctccacagtgtcgacatcccttctctccctccccttc

SEQ ID NO: 29271 - DNA, 1083 bp, Homo sapiens
ctctggggcaccagatccaggctcccgcaagataaagcaggcctgaccgtgccgtgtgggttgtgagccagccgggggggttgatggtcagttcttgactgtcacagggtctttcgttgccatccgagcctttcttctatgcttctgtgcgttttatttgaaattatatgtaggggactgtgggattatgttgctttgccttcgtaattacattgcatacttatctaaaattaattgagcttatcatggacaagactctctctagcctttctgtgtatccagcttcctgtctggtggatttctcagtcatgtgtgacatctaggcgtgtgctcgctggcctccggagccacagaaggaaagtggacagagggagtccctcggcagtgctgagaggctgcccctttcctctgcatgtcccctgaggtttgttccgggggcttctaaagggtgacaggtgtgggaatgatgagcctggggtacagcacgtgccagagaggtcttgtgatgccagggccctacccgaagtgtggatgtggtgaaaagctgtcttaggagcctctgcgtggctgccccattaatatttacgtagcgtagcatcagaacgattatgcttgctgaagccaatcttgttattgactctacctgttaagaaatggagtaacctgctgccaggtactgttaccagcaaaggctgctaacctcagaaggggtttgagctgagtcctgctgtatatgttttaatgctgaaagtataagaggctgactgagtccaactggaaagtaaaaatgtgaacttcaagcttctaatttgttgaaaggatttagatttttaacatgaaatagcagtagcctttcctttaattaaatgccatgcaacattggctgcgggatcaatgatattgaaggaaaaaaacagtgtaattagaccttgtgaagtgactaacaaatgattagggctctctttcaagagtgggggtgggggctggtaccagacgtgcagattagttgcagtttgcctttccttgctatagactttgaaaggccaaagttttcccttaaacattttgggtctgtttcttgat

SEQ ID NO: 29272 - DNA, 1125 bp, Homo sapiens
ttataaacttaatttttagaattgtgttttatctcacgtaaaatgacttaacagttaattgtaggacagtttctagaataaaatgtgtctctattttaatttttcattccttttaaaacattcatcttttcaggttttcaaaatctaacaatgtggccagcgtctagcccaggtggcctctctgtgtgttttaccagtggcttgcaggtttctgtcctctgtgagcagctcaggtggccggagaccccagggggccctcccctttattcagaacttgcaggattgtgggagtagatggcctggcttctcttgtggttcttgaatttgtctctgaggacattgcatcctcagattctgtctctcactggggtggccacctgggccagcggtgcccatgttctactggccagaattgcgcacctcccaggagggggaggagggcggctgttgccctcactcatgtccccccgctcagaacccatgggcaaactcagaattgtgtatcccggccgcactggggctctgagcagtcgtcttggccatggctgacagtggggcaggaggtgggcttcctcagcccactctgcttctctctggctatgatcggtgttgacccagtttgactctgacttttcaccttgtcctaaggatcccatgagaacatgtctgtagaaggcacagagcacagtccctggccctgtttctcccttcctgtgcttccaggagggactgggcatgtggtgtcaggacagtgtactggggcctctgtatggcctccctggccttgtggcttcaggagggactggacatgtggtgtcaggacagcgtagtggggcctctgtatggcctccctggccttgtggcttcagacaagtgactgagctctcctgggcctcagtgatgacattcaggtgttaatgagtgagtgtgaagattgggtggaacgcggtatggaacctggcgcacagtaggtgctcagtgaatgtcagcttttgttccccagctccatgaggtcttctcgctcttagcaccccccaggtgactggccctcacgaagtgggtcctctgtagatctcgggtatgtgaagtcaacagtggcccaaggaggctgtgggcaggagaggc

SEQ ID NO: 29273 - DNA, 1133 bp, Homo sapiens
gacaaaattgtaagccatcaaaattatcaaagagactatgttttgacaatgaaaatatgggagaaatgactagaagtaacgaggagctaaaaccgattagagatgcatttgacatttagaatcaccgttgcgtttcaacaacatcagtgcaagaagaacccaaagcagtgacaagaggggacctatgagagaggaattggaaagctggcatcactgcttacagatgtgacccaggctcagtcatgacagttgatgagcagtcgtttgcattcaagggatattgcccattttagatccactatacaggcatactttggaaatattccagatttggttccagacaactgcaagaaagggagtactgcgagaaagtcacacaaattttttggtttcccagtccatataaaagttatgttttgtactatactgtcatctattaagtgtgcaatatatgtttcaaacagcagcatacataccataatttaaaatgcttccttgctaaaaaatgctgacacaaagacacaaagcatgtacatgctgttgggaaaatggcactgatggacttgctcgacggagggtcactacagaccttcagtttgtaaaaaatgcaggatctgtgaagcacaatagagcaaagcacaatacaacaacgtgcatgagtatatatatatacacacagtccacccttgaacagcatggaggttggggcaccagcacacatatatatgtatatacacagtccacccttgaacagcatggggactggggcactagaatatatatatatatatgtatgtatgtatatatatacacacacacagtctacccttgaacagcatggggactggggcactagaatatatatatatgtatgtgtatgtatacacacacacacacatgcacacacacagtccacccttgaacagcatggaggctagggcactagcacacatatatatgtatatacacagtccacccttgaacagcatggggaccggggcactagaatatatatatatatgtgtgtatgtatatacacacacacacagtccacccttgaacagcatggaggctggggcactagcacacatatatatgtacatatacagtccacccttgaacagcatggggac

SEQ ID NO: 29274 - DNA, 1049 bp, Homo sapiens
tgcattcctcttttttttgagacggagtcttgctccgtctcccaggctggagtgcagtggcgcaatcttggctcactgcaatctccgcctcccaggttcacgccattctcctgcctcagcctcccaagtagctgggactacaggcgcccgccaccatgcccggctaatttcttgtatttttagtagagatggggtttcaccgtgttagccaggatggtcttgatctcatgaccttgtaatctgcccaccttggcctcccaaagtgctgggattataggcgtgagccaccgtgcccagcctgtactccattttttaaaaaataaaacttttcattccatgctctttgatctattataacttgagtggaattggtctcacattttatacaatgaagatacttttattttatcgtgattactcttttgccttttttgttggttagaggaaaaaagaatccttaaagatgagtgtgaaaatttgatttattttttaattcacaaaagctgaaagttgaacatgtagatgatttttcttttaagatagataattaaatatgtatagattatctcaatttctgtcatcttgtgcctgagagattgaaggaaaatctggaaataagaggcaaccacttcaaactttgcaacttcatgcatttagcaactgagccacttccaaatctgtagtttggtcatgaccttagttcttaaaagtcagagtggaatcctcatcttctggtctccttggattttcagttcagtaccacaaacttttgaaaaactactggtgggtttttgaaatgccagattgtgtgccatgatctttgctcttaggcagtttaaatttcgggagggatacatggcaatttattgtattcattcactcattcattcagcgcttattgctgggggctgtagaaacagaggtgatgaaaattagaaggcctgtttgaccgttgtggtggaggcggcagctgacgtttatttagcacgttgtttctgaagcttttaaagaactttccttgttattatgtcttactaattcatgaagat

SEQ ID NO: 29275 - DNA, 1047 bp, Homo sapiens
gctctaatggtatttatatttaaatcattattattacaataataatacactggtttgccaataaaacacaaaccacttcagaagaacgttctaaaatggtagcattttctgaggccgggcagcagtgtctaattttgggccttcacagtcagtttcgcgattcatgtgttatgcattttcaaagaataatcaagagcatgcaggattgcccggggcagtgagtactgaaaatgtacagttgggccagttgtgctaagagagtgatgggacatctgcacggacatggctgtatttcacgccagttaggggctgtcactgcagccggcgccatcttggagccctcggagcttgacttggtgataatgcgtcatcagagctgagcaccttgtgtcagctgtccagttacagcgaggtgtaaagtggacgagtgtctcagtgatgactgatgggttttttctttcagatccatgcaaaattcataaacctgatttataaccagtggaatttgtgctgccggaagcagaaggctcaaatgcggagctttgttttgtaggaaatgtctttctttaaggtgtcctgatgctttcatccctgagcacatccaggtgatgacaccagaggctctgcatgaggggagacgaggaagcaggtgtacctggtctcctttcatcttgcaggaaatcccatttagcttattggagttggaccaatgatcacattaagagcagaagtcacagagcaggctgtttgttacgagttttgtaaataagatgtatcctgctgagccccacagcacagggcacgtggatgtccacagggggacagattgtggccaggcacccttggcaagcaagttcttactgaggtcagaagtgactggcctgccctgtgggtggttgacactttgcagccatcatatccctcacagcatgtccacatctttgaaagcattttcctcccaggctccgggacagcaagccttcctggccttggcattcctgtggaccctgtccctcctcaccatcattttcggcttctgtgtgtgcc

SEQ ID NO: 29276 - DNA, 1029 bp, Homo sapiens
atctgcattgcctagcagggcttggcttttcctgagccattgcggtaaaggttgttcctgataccactaagtgaagaggtctcagctcatctacttgattcagaatcatcagaatatggcttttatagcctgtggtctaaggtttagactccaagtttaatttgaatatattagctaaaaggttccgttgaggaaagacgtgtggtttttgctgttacttttcatgatgtaggaatgaaaaaggagaaagtagaagcctgttgtgcggttggagaatggaaacctcgtatctattggctggtccagactcctcgtgacttactttgttccttgcaaagaaaaatgtgcccactagagatatattttggcccaagcaccaatttgtcatttcccctcctttactaatattttcatacattttattctttctgctagatctttcggctttttgcccccttagaaaaaggattgaatcataatgtaaaactttataaatttcaaatgtcgcttctctgatggtgagtgatgggacttgtgccatttaaatacaagattatctgccctctatttgtaaataaaatctgctgtacaatgaaatcgatgctggctttttcatttttcacctgagatttgtggtctgatgcaatggtttattggcagggccgatgagtgtgagggatcatgctttcctggcgcgtgtgtttatagcacatcaccgtcccgtggcagccgttgatcttctctcacgtgccacgatggattccacatgatcctcccaggagcaagagttgagggatgtcagttcccaccatccaggggacttggcagctcagctgtgattcctgtagataaggccgtccgagcagagctcctctagcgactagtgtttacaagcactgccgctgttttaagttcagagaagtatgaggctatgtactcacttaaaaccacggcaacacgcagaccggcgtgtcagctcccggacgacctggccgcttctgcctcttagctccttttcctactcttggt

SEQ ID NO: 29277 - DNA, 1039 bp, Homo sapiens
atggatgtgtccttttaatgctatttggtattagtagctatgtttcggggatgatttttagtgtagatcacagaaacacacctgggccgattccagctgagggaacacttctttaagaaggattgctttaacacagcatgttggcttcggggcctgaagataactggctttgagtgtgtgctttctgggcagtggaagctgctgacctagtgctatttcagcccctccctctctctgggggtttaaacttggtatccagtgagaagttccaggctgggctgggcacggtggctcatgcctgtaatcccagcactttgggaggccgaagtgggtggatcacctgaggtcaggagttcaagaccagcctggccaacatggtaaaaccctgtctctattaaaaatacaaaaattagccgggcatggtggcgcgcgcctgtaatcccatctacttgggaggctgaggcaggagaattgcttgaacctgggagacagaggttgcagtgagccgagatcgagccactgccctccagccggggcgacagaaccagactccatctcaaaaaaaaaaaaaaaaaaaaaaaaaaaaaaaaaaaaaaaagagaagttccaggctggatgaggccctctcaggcttttaggggattattcttgcacttttgccagtcttttcatttcactaacagcactcatgccaaggttgtcggttcgctattacttcttgaattacagcttccatatttgcctaccctgaagtcatactgctactcttaggttcactactgaacaggacaatttctttgagtagaaaagaaccattgccttttataattagtcatttacatttcctttccttggggaagaattattgaattccaagaactgtttggtggcatggaggtaataggaatattggggaaagtgactaaattatctcagaacttgtcagagaaaaggccagaaacgcagtggcgtcatgactcctttagagaaaggtcaggaaacggccaggcccatgactcggggtggagtggactctgcc

SEQ ID NO: 29278 - DNA, 1047 bp, Homo sapiens
tgcgcgcttggcaaattatttcacagaatgtggagacaaattgcactttgttggaaacttagccctggccacgtgccttgcagggccctgcccgctgagcgttgccggtcactgtgccttttcccctccctgcgcctttagcacagaaggccgtaacagcagtcttcacgggaagggcgctcggtttgggaaactgctgagtgatattctaaaatggactcctacaaattacaaactccattttgttccttgattgaatctgatttttaactctgtgtctcatggtgattacctaatttccatattatgaagttgtctgcagttcttctgataatactttcagtgttacgtttagctgcttttcaacccatcatctgttaaaaataccgtttttgcctccgtcagtgcgttcatgtgcgctcaccgcacgctccaccgcgcggtcttgtttgggtgcggctgggttcttttccctgccagcactttcacaagcattccccagcctcactgagttctctgaagtatgatttgcagtagatgtgaattacacgttcctctgaagtatgatttgcagtagatgtgaattacacgttctgagcaggttcctccttttccgcttgtgtcccttggaaggcgtatttcgtgttttcgtggaggttagaaagttgtggttagtgctcgtttgttccggtgctgcagtttgggaaatacttgaattgattttctctggtgctgtggttcagaaagaagcacattgcggattcgctggatgattgtttaagagagcagcagcgataaccaaaggaaccccaacgaaatctgtactttttagtaaatcatatttttattttcagcgcagtctctgagtaggccattttcatatggcaattttttgtttaaaggatcagtgcttcacaacagagaaagatgtgtgttgccgttgagaggttaaactgtctaacttgttcctgttcttctaatgaaaccttaaggaatttctatcatggcctcataataagaatacccaggctgctaaagcagtaaata

SEQ ID NO: 29279 - DNA, 1048 bp, Homo sapiens
gaagccgcgtggaaaggaggatgggcggcagccttcgagggtgtgtgctgggcagggagtaaagcgacaggcaagcccgcagatggggaactccctgggaagccccctgtatccttcgggacagacattgtatgagttcccacagaatcagagagggtgactggagccactgaatttggagtgaaagaaaaaggtgagagtaggaggaacgtgcgttttcagtcgtggcaggctagataatttcaaccacatttcccactggataagacctttttgtttttttaaattaagccaacaaagcaaaaagaaaaaaaaaaaaggaaagaaaaataaatgtcttaaaagcattgaattgctatctacaaaataaggacttcctgggccagagtgaagctaggacctggctaggtatgcccagctctaaagccaccagtgttctgggtgtgtgtttcctgatgcagaagaaaaatcatcccaaagctggttgtggtttgggcgcctcatgtagtgcctgcatccaacccgattagtcaggatagggatctgagaaatgcccatacagtttgtgagacccagaatagtgacacgtgagggcaaagtggacgtgatactccctcataaaatctaggttccaacctgagaggatcagggttgtttgaacctcagttatgatgattctatactggagttccccagaatgctagtgagaagcaaaacaaaatcttgtctggaggaagttacaactgaaattgtatttttttctttctttctttttttttttttttttttaataactccaaacacctttttcaaataaagtgacccacacacatgaacccgggaggcggaggttgcagtgagccgagatcgcgccattgtactcccgcccgggcaacaagagtgaaactctatctcaaaaaagaaaaaaaaaaaaaaaaaaagttgggtgatgtttttgtgaccagaaatatgccattgaaacttacctcttgtttctgtcaatcaccctgtggtaaaattggtttcattatatgtcgttttgcttcag
